United States Patent Application Publication US 2019/0348154 A1 - sequence listing, part 22

SEQ ID NO: 82944 - DNA, 579 bp, Citrobacter koseri
atgaatagctttatccgcttttacgaatttgcttcgcaaattgtcgatctggcagatgaagaactggaacgcttaaatgtcttttctcgccacttgttgccgctgctaagagaggaacggcttgatgacgatcttgatatcagtcaggtacagctaacacactataagttgtgggagaagcgtactcaggatctcaaattacaagaagggggagaaggacttaaagggatcaccagcgtcggtggctcaattgctgaaagaccgaaagatctattatcgcacattctggaacagctaaatgagttgtttggcgaagaaacgaccgatgcagacaagctggtatggcttgatggcgtagcggctaaagtttccgaaaatgattcagtgatggatcaacttcgccataacgatatcgagcaaatcatgcttggggattatcctcaggccgtacagaatgctgtcattgaaagcatgggggcgtttgagaaacattcagttgcttacctgtctgataaggatgttgcccgtttagctaaccgtttcatacttgatgtactacttaaagggctgggccgatga

SEQ ID NO: 82945 - DNA, 465 bp, Citrobacter koseri
atgcacattttttgccaatggcgaaatcgccgtaggccggataaggcgcctgcgccgccatccggcattgccgaaaatgagcgaccgatcctgcctgatggcgctgcgcttatcaggcctacaatgctgagccgtaggtcagataaggcgcttgcgccgccatccggcattgccgaaaatgagcgaccgatcctgcctgatggcgctgcgcttatcaggcctacaatgctgagccgtaggtcagataaggcgcttgcgccgccatccggcgttaccgaaagtgggcgaccgatcctgcctgatggcgctgcgcttatcaggcctacaatgctgagccgtaggccggataaggcgcctgcgccgccatccggcgttaccgaaaatgagcgaccgatcccgcctgatggcgcttcgcttatcaggcctacaatgctgaattccagacagcaaaaagccagcccgtag

SEQ ID NO: 82946 - DNA, 144 bp, Citrobacter koseri
atgaatacccattatgagttactcgccaaagcgactctgaggtctaactgtcatcagattattactaagaaaaataaacaaaataacaaacgggaacgtaacataaatttcgttttgacactggaattgactcatgaaaaatga

SEQ ID NO: 82947 - DNA, 129 bp, Citrobacter koseri
atgcgtctggtgaagcctgagagtgagtacaaaaaagcccgcgatatgcgcgggctgatggggatggtcaggctattatgccctggtatttgctgcgggtctgtccggctttcgctgccgtctgggtaa

SEQ ID NO: 82948 - DNA, 2016 bp, Citrobacter koseri
atgctggagcctggccaacaccacgccgtcaatgcctggcggcgtgaaacctttgcgcctggtaccccgtcagatgcgacgatcacagaacgtcgcctgtgggctgtgaacccacaggattatgaatggcgttcccagtacctgcatgagatacccgactggttagccgggtattttggcaaccgttacgaaaagctgctggctggccgtgacgggcgtcgtcgtgccaatacattcctgcgcaaaactatcggcgggaatgtattgccacgtctgcgcaaagtggctgcacgttacaaactggccgctgatgcacttgatcttcctttcggtaagtcgctggagcgactgccgtcacttgaccgcccagaactcaaaaaactggctggccagatatctggctggatctcccagtcactgtatgactttaccgatcagtttgtgggcagcactgacgatgccgcagaactgcgccgccgtacgctggagtcttaccgccatttatgcacgtgttccctgatgctgaacaatcagcctccgtactgggcagaacatgaagccaatggcgggcaactggaaacacgtaaggcagaatccgggatcctccgcatgatggcgcctgaatggtggtatttgcgtcttaagcgggcgcgggatatgcagcgtgagcatatggccattgcagtggggcaagtacagaaagcagccagcgcttatgtgtcccgtaaaaccctgggcgaatggatagaccagaaaaagcggaaccttgagttcttcaaaaagtttgacctgctgaatgatgaagggctgcgtattgcactggacagcatggtgcaccgcagcgttgctaatccggcgatccgtcgctgtgagctaatggtaagaatgagagggtttgaagatatggccaatgaagaagggctggccggtgagttttacaccatcaccgcgccatcgcgattccatgcggtacacagcaaagggggctttgttacacagtgggatggctgcaccccgcaggacactcagcgctacttatgtggtgtatgggcgaaagcccgcgcagccatttcccgggcaggtatccatgtctttggttttcgtgtggtagagcctcaccacgatgggacaccgcactggcatatgctgctttttatgcgtcctggtgacgtggataccgtgcgcgatattctttgctatcacgccagaattaccgactccgaagaactgcaaacgccaaacgcgctaaaggcacgtttccatgttgaagccatcgatcccgctaaaggttcggctacaggttatatcgccaaatacatatccaaaaacattgatggatttgcgctggatggtgagcaggatgatgaaacaggggaaagtctacgggatatggccaaatccgtttctgcatgggcttcacgctggcgtattcgccagtttcagcagattggtggtgcgccggtgacagtctggcgtgagctgcgtcggttgcgtgatcaggtactgactgaccgcagaatggatgcggttctggctgctgctgatgttggggactgggcggcatacacccaggcgcagggtggcgcactggttgcccgccgtgatctggttgttcgtctggcctatgaaatcacagagcagggaaatgaatatgcagaggacgtgcagcgcgttcagggtgtctattctccattggttccagattcggcggtatgtacgcgcctggtgaagtggcagaaggttgcgaagttggccgaagcgccagcggaggcgggtttttctggcggcaacgccgccccttggagttctgtcaataactgtactgaggggggaacccgcagacggttaaaactggagttacgcagtcgtggttttgatggttctgatgaggaaatcaccatactgacgcgggggagtggtttaaggtttggccatacagccctgatttatcgtaatggcaggttgcaggaagcgcgaaaagagccagtccaggagttatggccgggatgggtatag

SEQ ID NO: 82949 - DNA, 213 bp, Citrobacter koseri
atgatggcggaaataatcaccggcatttatgccttgtttgcctgtatcactttcgtttttctcttatgggacgaatgccaggatgaatttgatcacgatgctgaggacttagggttaatcactctgagtgcggttttctggctaccgctggtagcggccgtacttgtggccttcctgatagatttctggcgcaagtgggttaaccgtggttga

SEQ ID NO: 82950 - DNA, 870 bp, Citrobacter koseri
atggccgttaaaactccgcttaagtgggtgggcagcaaagcccgccttatgccgcagttgcttccccatctgccggagggtaagcgcctgatagaaccttttgccggttcctgtgctgtcatgatgaatacggattatgacgagtacctgatcgctgatgtgaatcctgatctggtaaacctgtataagacgatggcttatcacaccgacgcgttgcttattgagctggaggctttattttctgccggttcagtaggtgatgaagaaaaccgggcaattttctattacgcggtacgtgatgctttcaaccagtccggcaaatcctttggttctgaatctgtggaagctgcggcgcgttttctttatctgaaccgtcactgcttcaatggcctgtgccgatacaatcgccgtggccagttcaatgttccgtttggcaagtacaaaaaaacctactttcctgctgatgaaatccgcgcttttgctgaaaaagcgaaacgtgcaacgttcattactgcccactattcagaaacgcttgatttggtaagggacgggcatgacgttgtttattgtgatccgccttacctgactgataccgacaacttcaccgcttaccatgagcgcggtttttcgcacatggatcagggtcggctggcgcgtaagctgcgtcgcctggctgagcgtgggattagggttgtcgcgtcaaacagcgatctggaaatggtgcattatctgtatgcaggatttgacgctgtgcgggtaaatgcgccacgcagtgtgggtgcagcagctgcaagccagaaagttgccgcagagctgattcttaagtcacctgcaaacccggcgatcgacgttagggcggtggtggcatga

SEQ ID NO: 82951 - DNA, 330 bp, Citrobacter koseri
atggcagtaaaaattcatacggtaaaaatcgcgcccaagtaccttaacgcagtagttgctggccagaaaaaagcagaactgcgtaagaatgatcgtaactataaaactggtgatgttctttcgctgtgtgagtggaagcacggaaaattcaccgggcgagagtgggcggcggttattacccatgttttgccggtgaatgaaatcattgccaatacggataactgggtagtgttgtctgttcggccattgtcaccccttgaagtgctggaatacatcatttctaacggcgtatcagaattgcttttaagtggggttgaatatggccgttaa

SEQ ID NO: 82952 - DNA, 402 bp, Citrobacter koseri
atgaccattatttccgttgagggtaaatcgttgggggctgagttggctgcgtggggagtcccgcacaactacgccttagcatttgcagagaaaagcaccagtaaaaatggtcgcattgcgttgcatccattcttctttaatgacactgagcacatgactaatccgcgtcactggctggcaatcaatgccgctttctggtgctgcgtgtaccgcgaggccgaaatcaaagaagcacagattgaagcgttggccggaatccgcgccattttctatacggccggtgcgctgggtgttggcgagattaaagcactgatccaggagtggtggcggacaacgtacgagctgcaccttattccagcaccgaaccattccgcagtcactgtacaaccagcttttcactaa

SEQ ID NO: 82953 - DNA, 432 bp, Citrobacter koseri
atggcgattagtcaggaacagcaacagcgcggacttgatcagcttaaaaagattcgccgcaaatacttcaataccagcagtgaggctgctgactggtgggacaaattaacaccggagtggcgcggggttgttctccatgccgccgctgttaattctggaatgagtgtatttaaagcccacttaagcaaatgctgctggcgggaactgtttgaacgtctggattaccgggcaatgattcagctgcgttgcggcatttcccgcgcgcgtctgacgatgaacggattcgggtcgttacgtgacagtgatttttctaaaagtaccgctaaccgtccgataaagcgggtttatccaatcaataacaatcaggggccgcagatgattatcgcgcctcacatcgtccataagttgcaacaacaggggaatcaccaatga

SEQ ID NO: 82954 - DNA, 174 bp, Citrobacter koseri
atgaaagcgtttgtctcttatctgaaaaatgaatcacctgccatgcaacgaccaagtggttcaacaggatggatagaactgccgagcggtcagcgctggaacccaggccacatgtacaaattcaatggtcagcaaccgcgccgtccgtggtggcgtcgcctgatggggctatag

SEQ ID NO: 82955 - DNA, 462 bp, Citrobacter koseri
atgagtgaccagccagcctctgacctgatatttcaggccacctactgctattaccttgaagtgatgaccgaaacattcaaccggcgcactgataacctcatgaattttttgcttatccttactggaggacttactagcgtcggcgttcagttcggctggctgtgcggtattctcgctgtcattttttctgcctaccgggtggcatataaacccgccgataaagcagcctgtgctgatgcccaaaaaaagcgatattcccgattgcttagtgatatccatgcggcaagtgatgctgaaatcgccagacgtctggatgaactcgaagaattcgacagtaacgctccgacctccctctacaaccccgcaagaaacagagcttctatcgagcttcgccgcaacattgaaccgctgacaaagtttgaaaaactcatggctttgctggcgggtggtattcctaagtaa

SEQ ID NO: 82956 - DNA, 582 bp, Citrobacter koseri
atgagcaaattcccttttgaactaatcggacacagcagcgaagttttagaccgagtcattgatgcatatggtttcacttcgaaattaatgctcgcagaccatttcgatatggcctccagcagtttggcgggcaggtacaaacgtggcggctttcctgccgatatggttgtgagatgtgttgctgaaacaggagctaacctcgagtggctagcaaccggccacgggcgcaagtttaacgatgaagaattagatatattaagaatccctcgccgtaaaattgtggatgggcaactatacgagtcaggcttactcatgttggacaaggtaacctttttacctggaaaaccattgcctcagaatcctatctgcgtagtcgataacgcaattcaatatattgttgaacaacaattttctgaagtttatgacgatgattggttggttgacgttgaaggtaaaattagtgtcaggacacttacacgtatacctgttaaaaaagtaagagtgagtggtgtgggcatggcttttgattgcgaaatagacgatataacaatacttggcagagtggtcttaaaaataaaataa

SEQ ID NO: 82957 - DNA, 717 bp, Citrobacter koseri
gtggaaaagaaaactattctaaatagcacttttatctcagcatatctattattttcgagcgtatcttacctgtgggggttctggggacactttgaagttaatatatttaattacattggtgtctcagatattataaaatcagttatctggccaatggcaataactcttgtgatgtatctaatccaagtggcgatgaatgtttataatagccccaagccaaacagcacacttaagttatcagggctttcaggtgaacagaaggcgaaaaacatattaagccacagctatttgttaataatgttgttaattgtagttggcgcggtagtttataccttagcaacaggaaacaagatgcaaagatatgcagctgtaggctggataatagcagttatagttttctacgcaaccattaaaaatagtgagctaatggattatattccatttaaaaataaaactctcacttacagtataattattttcatgcctgtattattcctcactcgcggcgtaagtgaaggtgaaaggatactttctggtaaagatacattcataatagaatctaaatcgttatgccctggcactgagaatagcaagtatagatatatcgatgttattgctgataaagctttcgcattatcactaaaagacaactctatctgtattttcaaatatgattatctaaagttaactaaagaacgctcaccaacaaataaataa

SEQ ID NO: 82958 - DNA, 324 bp, Citrobacter koseri
atgaaaaaacctgtcgttatcgcactggctgtcgcggcgctggccgccgtgcttgccggtggtacatggtggtatcagagtcggcaggataacgggctgacgctctacggcaatgtggatattcgcaccgtcaatatgagttttcgcgtcggaggccggctggcttcgctggccgttgacgaaggcgacgccattacgtccgggcaggtattgggcgtgctggataaagccccgtacgagaacgcgttgatgcaggctaaagcaggcgtctccgtcgcccaggcgcagtatgatctgatgctcgcggggtatcggaagagatag

SEQ ID NO: 82959 - DNA, 1293 bp, Citrobacter koseri
atgaaagaagaatttagtgggttttatggattggaagaagaagaaatcgaaaatctttatcggaacaaagaaacgatttttatctttgatactaacatattactcaatctctatcgctgtgaaaaacaaacccgtgatacatttctttcaatctggaaaagcatgaaagatcaagtatggattccttatcatgtagtgcttgaatatcaaagaaatagaatccaatctatcgaagataatgttaatgatttagatagcatccctaaagaacttgagttaaatactgttgaagttttcaaaaagttaaagaattctaataattcaaccatatcacggtatagtgaacttaataaagaaattgaaaaattagaagagaagatacttacactaatcaaatcattcaaaacaaataaaattgaaaaaaggattgatttcattgatttaattacaaaaaaagacgttgttagagaagcacttgacagtcttttaagcaacagaataggaaaatcgccaagccaagatgacattaacagtatcaacatcaaaggaaaacagagatataaaattaaaactggaccaggttttgctgatgagaataaaaaatcaaagctagaaaattattcttttaatgggattgaatacactcctatgtttggtgacctatacatttggcaagagatattagatcacgttaaaaacaatcaacttaaaaatgttgtttgggtgtcgaatgatttaaaaaaagactttatctatataactgacaggaataaaaaaagaggtgcaagagaagatcttaaaactgaaatgaaaacatattcaggatgccataactttactgcgcactcgattaagtcttttttacatcatatcaataaagtttcatcgataaaaataagcgaaaaagccatttcagaattgattcaaacaggacgggtgaatatttctgactcatattttatatcattaaatgaaccttatgaaataaaagtagtccttacccggcaacacaatggattaaaaaggttagctagtaaattaaattcaatgataaatgacatcaatgacaaaattaaaagtcattataatgatggagactacctcatgcacctaagcatggaaagcgcggagatagaacaaaatattgctgacgtgaataacttattacttaaagtagtttcgcttgaaagtagatttaatgaatgttacgaaagtgattcatataagaaagagttgctggaattttttggagaatcatcttactatataaagacactgcatagcagcgactaa

SEQ ID NO: 82960 - DNA, 423 bp, Citrobacter koseri
atgagaaattttatcttaagtgcattaatttttattccgtttgcaacgatagcaaatgaaaccgaacttacaaagttgaaggaaaaagcaagtccaacagagagtgaaattggtgttaaacattgcgatctatccacctttaatattgtaggcggtaaagtagtgtatgaagatacattcgaaaaagaagctgtagttgttgatcatgggaaaagctttagtattaatgcgagtatctacaatgttgattcaccagctcttatgtataattttgataatgatgaaatgattgtcttatcagcgaattctggtgatttttcttttagccgtgttagagagttgagtgataactcattaacttatagattaacgaatgaagcgaccaagcgagtgttctttgcatctaactgtgaacaagattaa

SEQ ID NO: 82961 - DNA, 282 bp, Citrobacter koseri
atgttaaagaaaacccttatcgcagtactgttagctctcagtactggttgtacgactacacatagtttcatggacaaggcgatgattggttatgttgaaggtcaggccattgtcatgtttccagcaggtgaacgtaatggtgtgaagatgtaccgtccgcagtttcacagtgattgtgggaaggtctataacaagatttaccagatggacaatggcagtacgggatgcttgattcgggaatctcgtattgctgatctacacccttatagagcatataagtaa

SEQ ID NO: 82962 - DNA, 366 bp, Citrobacter koseri
atgaagccgatagttggattactggttttaatacctatagtaatgattgggtgcacaaaaaaagatcaacctatctcatttacatgctctactaccgattattcgaaaacacatagtttaactatagatgcaaaaggtatgcatattacttatgatggacgaaagttgtttcttagaaatgcgagaattggtgaaggtgaatggaactatgcgttttttattagttcaagtgatgagttagtagcatttagttttaatgataaaaagactttgtatcatcattattctgatgcaaaaaatgaagatccgaatagttatgatgagtatggtggttgtgagcgagcattgaattataaaaaacaataa

SEQ ID NO: 82963 - DNA, 732 bp, Citrobacter koseri
atgtcacgcacagatttcattaagtcgttaggggcaacatgtaaaaactggacatggagctggtcttttattgatgaagtaaacaagaaggtgatctttggggcatgggacgatcttagaactgaagatggtacaaaggcacttatattatctgatgattggagtgagaatgaacatggtcgagctaacttaggttacgttcaggctcgtgagcatttaaataaagttatgtttgaaggttatcaactttatacattccggcaaaaacgtaaaaagaacaatgatgagaggaaacctgctaagatcgaatcatttgtatcaagagtcgaattaaagtatctagtacgggatggtaaatgttggtatgccactgaacaagagcaatatagctatacaccagaagtagaagaagaatactttgaaggtgataaaaaggaaaagtggagtacatattacgaacgaaatccaaaagcacgtaaagagtgccttgatcatcacggttatagttgcaaagtctgcgatttcaattttgagaaagtgtatggtgatatagggaaagagtacattcatgtacatcacattaatcctattgcgacaatcaagaaaaaatacaagattgatccaaaaaacgaacttgtacctgtatgtgcgaattgtcatgcgatgcttcatattggtactgagacacgtagcatagaacaattgaaaaatataattaaaaaaatgaaatga

SEQ ID NO: 82964 - DNA, 393 bp, Citrobacter koseri
atgaactttaagaaattaaatcattctttagtaaccactgacatagtactgttgtggatagcaattttatttttagttaaagtacttttttctgattataacggatttgaatggggaagcatgtctgactggataagtacaggtgccaatatagtaatggctatagccgcttataaaggttttgtaattgccagagattattttatcgatacaattaaaaaggatggttatgatctagtgaaaaggcttcagttggatttaatccctaactttaagaaaaatttagacttaaactcaataaatttacttcaccatgacgtccagtcatatgtcaatggtggtataggtattcttcaactagaagggaaaaaaacaatctcaatatggccttaa

SEQ ID NO: 82965 - DNA, 678 bp, Citrobacter koseri
atgagaataataaactcgacgatgatgaacctcaataaagtaaactcttttctattatcaatagttgtttctttgcttatcatattagcattgatactgcttaacatcttagttttcatggaaagattttttacgatgagtgatttttccgatttgattagtgctattggaacggcggcgactgctgttgttgcttttttagcttatagatccgcacctaaatggttacacactaaactacgagaaaatggatatgagcacgtttcctcgctggttaaagaatatgatcagatcattcttaatataagaaaaaaacacccggaactaaaacgtacttactccactgatcttaactatggcccattaaaagatcatatagagttacaaaaattcaaattaatttcattagcatctaaatttgattcctgtggtcgatggggcattcagccacctaaagaatatcggaatcatttaaatcatttaaattcatatcaaataacagccaaacaggttttatatggaaataagattgatataatgagtgctgaaggtgctgaaaaagccaacaaattaagagagtcatacaaccaaaaacttgatgacttgttagtatcaatattacaggacgagatttattatcaacaagatataaatcaagtatttaagtttccaaaatga

SEQ ID NO: 82966 - DNA, 198 bp, Citrobacter koseri
atgattatacgcaaattaaaaatgaatagacttcttgaaattgtttttataaaagttggttattggaagtttccctattcccttgatgcatccttttcagatgttattatgcattcgtttgtgatgtggcggcgactcgttcacaccttcggcggttcgctgcgtggcgacgagtggactgcgtgggcgactgactga

SEQ ID NO: 82967 - DNA, 1116 bp, Citrobacter koseri
atgaatataaagtttaatgtagaaaatgtgaatgggattctgcaagccttatatactctacaggttgaaagagagtttggaattttaggttcacaaaaacttaaagttttattgaatgaaatcaatatgctttatcgtcatattccagcagagagaataaccggctcccttaccataaaaatcagagtcacaatatctgatgaagaagatatcattaatgacttcaaagaaacatctattcaaaaatcatattttgatttagctgaaaaggtaaagtgcaacacatcaaaccatattattattgatattattgacaattgtgagttcgtagtttttatttgtcaaaatgaatatgactgtgtggaacttgctaagaactctattatttataaattcataaactcaactgatcatatatacgctaaaaaatatcagtgccaaatcccaaaattatccccagttttagctagtaatttctgtattcctactcttaatggtcttgaggacgctcttgccctttataatagcagggttgctaaatactctagttgcccaactttatctggagtctgggagggtggagtcgaaggccctaggcttgtcttagtaaataagccagaatcaataatgagagattctttaactaatgcattgagattattattagcacccgatgccgaggttcgaccagaacataatactgatgaaacaaaacctgtagatattaaaatatcatggattggatctagggcttcagctctaattgaaataaaatggctaggacggtctttggctaaatccagaggtgataatattgggaagacgacttttaccaattattctcttccaagggtacaagaaggcgccttccagcttgctgattatctcgacagagaaataagaagcactagtgcaacagctcacaaaggatatttagtaattttcgacgcccgtagaaaaaacattcaaggccccgatgataagttacaatgcgacgacgcatttcattacgaaaatgatgaaataaatctggatattgattatcctaatataagggatgattactcaaagccttacaggtttttcatggcacctaaaaaatcactcacaacctaa

SEQ ID NO: 82968 - DNA, 606 bp, Citrobacter koseri
atggataatatagatataacacccgaggcatattacgatatactggtgctgatgactgatgccccgacatcagttttgccactttcttatattgaaattcaccttttttcttatttaagctgtgtcctagccctatcacaaggacaagcaatagaagaatggggatataaatactcagtaaccactggtggaatacccttttcggtagaacttgataattgcctaaaacatatagaaaacacaggttgtatttatcaagattctaatggcttgtttaatagaaatgataatatcctagaaaatgaaatatccatactctcagaaataaaatcgtggggtaatcgtagatactatttaaaagcagcggttgaatgtgccttagctctaccaattggttcaatacgtggggctattagtacatcgcctggaatggatcttagtgtccgactacaacaaagcgcagaattattagaatctgatgatatagacgagttatataatgaatatcaaatcataacatccatccttggacatgactttaaggatttactctctcctgctgtaatgtggttatctgctaggattattcagcagggggagcattga

SEQ ID NO: 82969 - DNA, 1419 bp, Citrobacter koseri
atgtgggattcaaatgtattaaccaatgcactttatctcgcttttggtacagacccctcagaagctcaagatgcagataaattgcagaaagaaatggaaagagaaagttctagaggtcgaaatgcaaaatattcagcccgacaaattacaaatagaattaataacttattaagtttagttcaagatgataatgaaagcaatagcactcttgagtcggaattaaatattaaacatgatgaacttaaagaatatcttgcattaacacaagaaagattaaaccaaaaacagaatgaattgaaagaatcgcaattaaattgggcagatcatagtgcaactctagccagtctacagatagaatataataagatattttcatctcgagttaagaaaataacttcttttcagcaccacccattaatccaggcatcattgagtgaatgtagatgtgctatgtgtggaaatgaagatagtcttattgttgagtcccttgagcataaaattaaaatgaatgaatgcccaatgtgtggacattctgccgaagattttagcgggaaccaaggagaaatggtatctcaactcaaatcaatagatcgagagatgaatatcataaaagaacaacagaaaattatattatctaaaatcaaaagataccaaaatgagttagatgcagctgaagccgaaaacttagctgccgagagggctatcagagagttcgaagacaaagagtcttataatttagatagaatcaactcgttgaaagataactccagcttaacgcttaaaattgaaaaaatgcaaagggagcgagaatcatttttagagcagggagatgaacactatagtaaaagggacgcactacgagaaaaattgagaacttatgagcgcaagcttaaaagtaggtatgaaaatagtgctgaagcttttgtattaagatttagagaattagcagaatcatttattggtttaccagtggatgtaagtttggatcacaagaaaggttcatctgtatctggatttggcttgaatttaaaaatgaatgataagctaaggtcttctccagataaattatctgaaagccagcgtttctttattgatattgcactgcgtatggctttaactgagtttatgtgtgaaggacctgcgacattatttattgatacgccagaaggctcattagatatcgcatatgaagcgagagctggttctatgttttcaaagtatgtttctgagggaaactcaatagtcatgacagcaaacttacgtagctcgcatctagttttacgcttggcaggtttagaaaagcaacaaaatatgcaacttattagaatgacagaatggaccgagctaactgaagtgcaaaaaagtgaagaatcattatttttgaatgcttataatgaaatcgagagtgtgatgaattaa

SEQ ID NO: 82970 - DNA, 2196 bp, Citrobacter koseri
atgagtaagcttaatatcagggcagtaagaagttatcgtagtgataaatcagtcatattagatctttcgaagagaataaatttagtctatggccaaaatggctctggtaaatcaacgatatctggttatttttataagtcagatgatgaagcttataaaaattgctcttttgaatgtaatgatgaatataagtttattgtctacaatagtcagtttgtggaggattcattttataataaatctgaacagccaggtatttttaccttgagtcaagaaaataaagaagtaatggaggcaatagaattaaataatggaaaaatagcaagtctgaagaaaaaatcattaagtataagttcagaacttgaaaaaaaagaaaaaatgatagataaagttaaggatagctatcaggctgatatttggaataaaactgcacatattaggaagaaagaaggcgggttaggagaactgatggttggttttttacaaaaagcaactttctttcaacaagtcagccagcaaatagatatggaggatactgacaccttaactttaacttttgagtatgggaaactgaagaataataaaaatactacatatgatcccattgttatgcctcctattccgaggctctctgatgagcagataaatatattatcatcatcgttgattgcatctggtgatagctatttatcagtacttattgataagcttggaaatgctgattggataagaactggtttagaatatattgaagatgaacattgccctttctgtcaagaaaaaacaataaatgaacgctttaaatctgaaataaagaaaatatttgatgattcgtatgatcaaactattaatgaaataactaaaatatataccacatataaagaagcaacacacaattatgtcgatgcaataaaagcatctgtttcatcaaatagttatatcaccgataaaaatgaaatttttagcattgttgatgattgtgatgtcatttttcagtctaatctaaaatctatacaagaaaagttagataagccttctcaatgtatagactttgttattgaaaatccaagtttagatattcttgttcaaaagatagaaaattataattctgaaatacatgaggtaaatgtaaaggttaataattatgatgtcagtgtcaatgaacttaaaacaaagttatggcgtgcaataagatttatttgtaatgaccttatagaaacttatagcaaacaacttttagatctaaatgctgaaagggaagacattctttcaaaaaataagagggttttagacgatatagagaaattaagttctgaggtcattagtttgagccagaaggtatcaaatatagacgagacaatacgtaaaataaatagaacacttaaatcacttggtattgttcattttaagctaaagaaaaaagagggaagtgattttttccagatttgcagagataatggtattgaaaataatatttataaaacacttagtgaaggtgaaaaaacattaattacattcctttattttcttgagttgtgtgatggtcggttgggttctgagacaaacagcgctaaagaaaagttaattgttatcgatgatcctatatcaagtctatcgcatgactatatttatgagatatcatccctgatccatcatcgactaattaaaaaaaatgagaacactaaaattgttattctcacgcacaatttgtttttcttccaagaattaataaaagttgctccgactaagaaagatgtatttgataagaaataccaactttaccgtgttattaaagatcagtatagtgatatattaactataaacagggatgaaataaagaatgagtatgaagctctatggatggttttgaaagatgttaaacaaggaaagcttaatcctatagtattgccaaatattatgaggaatatccttgaatattatttctcattctcttgtaaaatggaaaagttgagtgaggaacttgataatcttgttagctctgaaactgatatgaattataaaactttttatcgttatataaatagaggttcacattcagattcaattaatataagtaatttaggtcagatttcagctaataaatatttggaaatgttcgagggtatatttaaaaagactaatgatgaaaagcatttcaatagaatgttaggattagaaatagaggaggttgtttag

SEQ ID NO: 82971 - DNA, 255 bp, Citrobacter koseri
atgaaaggtatgcccaaatcatcccctaactattatctgctctttaaaacagccgatacaagctactgcggcgggatggtctggctggattactactctggtattgatgatgccgttcttacctataagaaaggccagaaagtcagcgtcaccggcacagtaaacaacttcgaagttcgcggatttgccacggtcaacaacgcagatatgccagttcgtcttgttgttctgagaaacggcacgatccaccattaa

SEQ ID NO: 82972 - DNA, 552 bp, Citrobacter koseri
atgcgtaaaattttactcgttgcaggtcttgctgctcttttatcgggatgcggtgaaaaaggggattttgagaaagcgatcaacgcgaaaatatcacaatcaaagctgtgctactcactgcaggacaatgacattgtgttcaataaaggtttccccatccgggttaatcacggctatcgttctgctggatacagtgccagtgatgaaatcttaaaaggtctggctaatcagggactgcttgatgtttctcaacaagctaatggtttcagtagtgtcgatgttctggaagtaacagacaaaggccaagaggttgagttttgggaccgtgagaaaggtgcctgtgtcggtcaccgtgttgttgacaagattacagaatggacggaaccgggtgaaggtagtcaaaaagtagttcgcgtgtcttatacatggaaattggcggatgttccttcatgggtggacaaaaaagcgttcaccagcgtcaaaggaatgaatgaacctgctgatggtgctatgaatcttgttaaaaccagcaacggctggaaagctaactaa

SEQ ID NO: 82973 - DNA, 573 bp, Citrobacter koseri
atgacaatggaaatacttacagcaattcttgttatcattacaggaatttatgcgtttttgacatacaagatgtcgagaataagcgaacgaacagctcagataatgaatgagcaaaccgaggcaatgtctcgtccttatataataatccagccaatggtgagacctcactcgcaattcctatacctgaaaatttataatagcggtaagacaccagccttgaatgtaagattagaattagataaggatttttatcagttcgatgagccaactaaaaacctaaaagaaacaagtgtttttacatcaactattgatagcttagcgcccaatcaagagttattcttcgcccttggtcaaggttgggttatttttggggaatcgaaaaatcctttaccacaacaatttacaataaccgcaacgtacagttatatgaataaagaagttgttgaaaaaaacaatatagacttaagccctttcatgcaaagtgaaggtgagaaaaatcctattgttgaagaacttgaaagaataagaaaaattcaagaaaaattgatgaaggcatctaacaaatcgatataa

SEQ ID NO: 82974 - DNA, 483 bp, Citrobacter koseri
gtgttacgtctgactctctggaccgggtgtcgtaccggtgaagtctgcaatatggcatggaaggatgttgatcttgaaaaaggcactattcatctgcgagaaactaaaacagggatagagcgttacgtacagttatctgatcaggctatcgactttctcaaagtactacgcctcacctccgataaatacttattcccttcacaggcgacaaagaagccaattcagcagaagtacctgactgaaaactcatggcgtttacgtgaaagcggtcaaatgcttgatatacctcactggacgccgcacgatctgcgtcgtacagtacgaacggggttatctcgtttgcagtgtccaaatgaggtagcagaggccgtattggggcatacacgtggcggtgttgaagggatctacaacttgtataagtatgatgctgagtgccggaagtggttgcaggtgtgggcggattatttggataccaaattatag

SEQ ID NO: 82975 - DNA, 726 bp, Citrobacter koseri
atgggtacaattaacatttgggtgactatcagccagaacaatgaaagacttgcttttgaaaaacaaaatgcagaaagcatattttctcttcaacaaagagacctttttgttaaagatgcggagcaaggattaactgaaaagcagtcagacgtagacttcctaaaaatgagttatgccgaatgtaataaaaatgacgaatccagcttaaacagaataagcagttatgctgatgtattgtttagctctgataaaaaacgtgatgacatgatgagtatggttcgtaaaatttgctcagagagtagaaacaccaacactgcaaaaaatgaacaagaacccatttatggagtacaattttataaaaaaattggtttcgaacatctcaataaaaaagaatacacaaaagcatcacaggcattcataaatgcaacacaattagaccctgaaaattcttctttgtggaactacagggcctatacacaattccgatcacataactacaatgcagcaaaagatagcatctccgtagcaataaaaataggcagccaagataaaaaaacgaatatactcatggcaataaatgcctcaaaaatattatgtgccttgggtaaaataagtgacggaacaaattacatacaacaagcaataaatgttataccaggtttgtaccccgaggcaaaaggcgatgatgaattaatgaaaatttgccacattaatttcacagaatag

SEQ ID NO: 82976 - DNA, 336 bp, Citrobacter koseri
atgaaaagaacaatacttctggtattaatagctactggtttgctggctggctgcggcgagaaaacgccaaaatgtagtagtgatgatgcaaaaaatctggtcgtggatattgcaagaaagacaatcgagaaaaggatgacactggataaggatgtgcagatttcagttgaaaatgtcaggacaataagccatgaatcaggccttgacgtttatcagtgcgctgctgatttaacgttcacaaaacctgatctgcaaaatgctctgccaatcacctatagtgtgcagaaaactgatgatggtaatgggcaattttacatcaatattcacggcctataa

SEQ ID NO: 82977 - DNA, 360 bp, Citrobacter koseri
atgaacagaaaactgttggccttattgatggcagccataacgctacctgtcgcagcagcgcagtacgtaaaacccggagcggttctaaccctgaatccgggaaagggcaatgctgaattcaacattaatgcctcaacgggggatggttcaggcgtatgcaatatggaggggacggcacagcaaatagctgccggagaaaaccagaagcttcgctgggtctggaatgacaattccagccagtgtgttgcagtaattagtgaactgaacaacggtaaggccagcgttatgactcgtggttgcgaaggatactgcggggcttctgcggcaggcgcaatggatggtctatttaataagaagtga

SEQ ID NO: 82978 - DNA, 528 bp, Citrobacter koseri
atggcaatcaccatcactgaaataacggaatgttttgagtattttttcagttctctttatcgcagggagttcgtcaaaaccctgcgtctgaacgaatgtagcgagcgggaattactgcctctggtacgttgctatttgctgggttggtttgcagataatgtctcaccggaagtaaaaagcaagctgccaggaactgtatccgggcacggttacattgattttgtcattgatgatgtagccgtcgagtttgccgtacgtaaaccaactgcggcacgttccaatgtctccgcgaccgtcaacagtacagaagttaagaagttgatgaagcatgacggcaaagccttgcttgtgctgtttgacttctctgacacgccctattcagaagaacagattgaatccttccgcaactggccctctctcggtcgaggaaatcaccgtaaatcagctttcaatgtggtctatttctttgtggaaaaacccagaccgctggcactggggaaaatcaccaaaaacatccgtatcacttaa

SEQ ID NO: 82979 - DNA, 153 bp, Citrobacter koseri
atgtacgaggcgcaaggccgtgactgcgtgaaagcgacgccagcgttaaccctcgcttgtgaagtgctgccacaatatcggcacgatgccagttccctgaacttcctttgctctgttttttctgcgatgctgttgagttacgcacagtattaa

SEQ ID NO: 82980 - DNA, 489 bp, Citrobacter koseri
atgagcagtaagagatcagtatcggctataccgacccatcctgaagcttctgttgaagaggctaaagactggctgacagcagaggaattcactcatattgagggaatgccgggcacgcctcgcggtgcaagaatgcgcctagaaaagttggcatccctgcacccggaaatacgtcgtaaaaggactaccgggaaaggtgtggtttaccatatcagcgcagccacaatgtctcttgacgatgagagaagcagggctaagggcgaagcgtttactctcaccgacagcgatcgccagcttagtctctggatacagttgtatcgcaatatgtcaccagcttcgcgggcgcaattgatggagcaggccctcaggctggtaaaggacgatctgatatctcaggggcctgatgtttctgaactggcggtacaaatcatgaagctgcccgaagatgagcgtaaaagcctgtttgaaaagctgaacgggaaggtgtga

SEQ ID NO: 82981 - DNA, 423 bp, Citrobacter koseri
atgaataaaatacatcaaggtggctattcccttccggttaaaaaggcactgattgatttgttattaaaagaaatgggaaatcccccatcacataaagccagaattaccgcagtcagcctgttgtttaaagatctgttttacagcgcagaaaatggcggttaccatcccgtcgaaatacggcttatttcacgcaatgatgaatggtatttcgattacatcaccgacttcagttatatgggagtggtgtaccccgaactggaaaaggaaattgattttagctggagtcagcaatatgtctttcttgctcatgttggtgatctgcctgttaacgccggaagggagctgtttgaactttggcaatccaactttattcagtatcacgccatgaacgtctacaccgttaccgtcctgtgggaaagttaa

SEQ ID NO: 82982 - DNA, 540 bp, Citrobacter koseri
gtgacaactgacagagggatacgtgcgtctcaacagggtgaactggattgtctttgcggtgcttattgcgtggttaacatgctgagctggctgtttgacggcagggtgaaacgacgcccgttaatgaaccagcttattcagacctatcagcagcgctggcctttgcatgaatggctgactgaaggaattgaagaagaccgcttagactggctgatggctcaggttttgcagaaagggcattacagccgccagttcccggttcaaatcaccagaccttttgcagggaagcgggggttatcagacgggcggcttttcagggaaatgcagcggtttctggacgtcactgactactcccgcctgattatgctcagcgaccagtttcactggtctcttctggtcaaaatggatgaggaaatgctctgtttcttcgacagcaacgggcgtaccaccatgccccgtaaagccttttccctgcgtactggcgtaacccgccgccagctgtttcccggtgccatttacttcattgaacgggagttctga

SEQ ID NO: 82983 - DNA, 453 bp, Citrobacter koseri
atgaccatgtttacccagcgtgaaacccgtatcctcgatcaggcgcgtgacatcatcagccggtactatcagcgtggtgttcagctctgctcccctgatgatgtacgacggtgcgtgatggttgagctggcaccgcttgaacatgaagagtttggcatcatcctgctcgataatcagaatcagctgctgcaccgcgaaatcctgttcaggggtacgttaaactcggtcagcgttcacccccgtgaagttatcaaacgagtgctgaaacataacgctgccgcagccatccttgtccacaaccaccccagcggcgagcctgaacccagccgttgcgatatacagttgactaaaaagcttcaggagctgctggaaatgctggatgtgcggttacttgatcactttattgtggcaggaactgaaacggtgtcgatggctgaacgggggctggtgtga

SEQ ID NO: 82984 - DNA, 930 bp, Citrobacter koseri
atgagccgggctgcgttacgtcaggtcgtttcggtggtacaaacaaccgtgtttgatgcgtatactggcggtctggcaccatcgggtcggaggggtatcaccagtctgttgaaccgcagtgcccgcatactcaaacgtggtgcggatgcagcagattatccgtgggaacaactgaactacgccgccgtcgctaaagtacgtgcggcactgctggatgacggttacgccgtgtcatcggtgaacatggcgttgtcagcactccggggcgcagcgcagacggcctttaacctcaattgcatggatgccgaaacgctggcacgtatccgatcagtgaagcgcgtgagcggtgatatccagcgcaaaggaagggcgctgggcaggcaggaaatccgggcactgattcaggctgcaaaacagcatcagcaaccggtacggcgctgtcgtgataccgccattgtgctgacgctttgtggaacggggctgcgggccggggaactggtcaaacttgaacgccgggactatgacaatggcatcctgacagtcaggcaagggaaggggcgcaaataccgcgaaattcatgtggcggatacagtagaaaaggccattcgtgcgtggctgaaagtcagcccagacaaggctgacagcgtactgttcagccgtatccagcgcaacagtaaggtcgccagccagccgctgacaacaaccgggttaacgggtatcctggagcagttacagcaaacgtcaggcatagcgcagtttaccccgcatgacatgcggcgcaccttcatcacccgtttgctggagcagggcgtggatatcaacaccgtccgccagttggcaggccacagcgacatatccaccacgacacgctatgactgtcgtggtgagactatgaaagtgaacgccagcagacggctcaaatgctggtga

SEQ ID NO: 82985 - DNA, 528 bp, Citrobacter koseri
atggttgaatacaacattgggggcttaatgaaaaatcagaaaacaagcgatgccgtgatccgggtttttgccagtagggaaaaccttgaagaggagattggaagtgctttctcgatcaatatgaataaacaggtgaaggcgaggttgcgtgagttatgtgtgttctatggtcacgaggacatgctcacaaggaaatcaggaacaggccggcgttttagcgatgtactggccagactgattgatgctcattacattgcttatgtattcaaacctcaaactgatccagccaagaagttgattaaagctttcaagcatgttcatcttttgaaaatgaggggcaaggataatgaaactatcaaggagtccatgatcgacaaaggatttgataggcctggagctattgcagatgtcctgacagacccaaaaatggcccctaaagtatggtcagagaaggacgtagaaaagatgctaaacccggagaaagtactaaagcttttgatgaaaattgaaagtaaacaaaaggggtga

SEQ ID NO: 82986 - DNA, 288 bp, Citrobacter koseri
atgcaacagttgcttttggcatttttgaccaaaataggggtggaaatgatggttgtaaaagcctgttcgcatcagccgatgcgtaacttaaacaggtgcgttatgaccacaattcgtatcatcaaagtcccggaagttcttgaacgttgtgccatgagcagggcttcactctacagaatgctccagcgtaatgaattcccccggcaggtccgcataggtatccgttcggtaggtttctacgaacatgaagttaaccagtggctggctgaccgccagcgtgttcagtaa

SEQ ID NO: 82987 - DNA, 1221 bp, Citrobacter koseri
atgaaaaagaataagttgcttaacaagaagaatgttgaatttagtccatcagataagatttgtgacagccttgaggggcatgagatgaagctgcgcatcgactggctttcaatcgtatcccgcttccacagtgaggatgagaaaactgactttgttcagaagttgcagtctttaccggaacgggagtggaaaaactatgttgtgcagaagaaatctccccggaacgcaacggggacatgtcacccttacaagtatggtttgtgcatttcacgtaatgaacctgatgcaccaatgctggcatatctcatgtgggggccaaaagcaccaggaactggcgggttcagtatccagtttcatccccaacacatgacgggtaaacggatggatctactgcttaagtggttgagtgaccgtctcggtgaaacttttgctcacctgctggcgcgggcatgggtcacccggcttgatatcgctctggatatctatgggtgcaagttgaatgactatctttggggcctaaaaaagtcatcgatttataaagactacgataatgataaagggttgccggggttatcccttggggcgtttgactcgaaactatcagtgttaatctatggcaagatcgatgccacgctatttaagaggatcacattccctgagcaagcaggatatgtgaatgaaaaagggaggcgtaaacgggagtatttccttgaaattgacaaggaagaacatccgaagtttctacgtgttgaaatgcgtatacaacctgagtctactggtcttggtaggcgaggattcaggcagaaagcgctgatgctgtcggacctctcaaagctcgaacatccctttgagcgtctgttggtgtataagcgcaagctggagggggaactaataaacgctgtctttaccaatgaccggcccaaaactaatggtatcaaagcatgggtagatgtcttgaggcgtggtgattcaggggggcgtctggcccgtaaattcgccaaactcctgagccttaatgaggtagagctgttcgacaagaatgacgtctggtctttttggcctatctgtatggctaagctggggcaggctattggtacattaaagccagagtttgcgaccggggaagagatggctgtcagccagtttgttgaggatactcgcaagcggaagcgcaaaacacggcatcaaaaacgtcaggaacaggagcattcaaaaccttag

SEQ ID NO: 82988 - DNA, 1473 bp, Citrobacter koseri
atgaaaccatatattacacataacaatattcttgtgacaggttcaacactggaggatttcaaagaagttgttttcagtattccttataatggtgtgccaagtctgcggcgtcccttttatcgtaatatagcagtattccttcagcatgttatttgtgtcgctacctgtagtcgtaagaacaaaaagaaagcaaagattaagacgaataaaaaatggtcttattctgtgccagtaccatttgagctgggtagagagaaacttcccggagtatttaagaaaagtgggccagcctatgagcgtgcaatggaggcactggcaaccgttggaattatcaagctaaccgggtattccaatgctcaaagttcttgccgggaatatgctgtttctcaacgtttcctgcgtaagttgtttggcaacgaccgcgaggcataccttagccgtaaggatcgctaccattatctgactgatattttcaccaagcgtaaaagctactcatttgatgatctgattggggttgcgatcgaccgtgggcagaatgctaaacatcagcagtctaaacgcgaaatccctaacgctgccttcagggaacgggttgtgagtgtctggaacaaccttgagccgcttgaaatcaatctggatgcattgctggattactataatgagaatcccacgaagaagaacaaaatattcattttcaacttcctgtcgcgactggctgaaacaggtgtggatttggtgaaggaatcaccgctaacggtttcttacaggcagtcgtataaaacagcgtacatcggcgggagatcctttgaggctggcacgggcttccaaactctaccgtctaaaatgaagtgggcgtgcctggcacgtggtgtgaactatgacatcaagggatgccagcttgagatactgcgacatgagctgttgagtattggtatttcggcaaagtcgctggaggtgctggaaactcaatatatctgccaggtattgcgtattgctgaagaactggtgaaacaattcaggttttccagcgtattcaacgccgggttcgttacgctatcgctaaaatccagtaccagacgcttattgaaccgtgagttaggtaaggtagaagcaaagcgagtactgaaacgctggaagcactttctgaaacccttgaggcgagatctggctttactgctggatcattatgaaggcactgctaaaaccaatcgttacggtaaatgcgttaccaacgcggtagggcaatctttcaacattacctacaaagatgtggcagcgcgtaaacgcaggaagtcagatgtgatgcgccgaaagctgttgtcgcacatattacagggtctggaaagtcaggctgtatacgattacgttgccagtcataagggcgtttgtgcgctagagcatgatgggtttgtttcttatgaaggggttactgactggtcccacccataccttttgattgagaaaaagcattag

SEQ ID NO: 82989 - DNA, 468 bp, Citrobacter koseri
atgattgctgagtacccagatgtaagtcgcaatcccggtgttgtagaacatatcggtcggcaacgcaacaatagcatccagcagatcttgttccaacacaaagcggcggatctcgctttcaccactgcccgcacctccggtaaagagtggcgaaccattaagaatgatcccgatacggctgttatcgttcatcttactaatcaggtgcagcaagaacagcaaagaaccatcggatactctcggcaaaccgggtccaaaacgcccatcgtagccctttttatgttctttgcggataacggtatcaatctttttccaatcaacgccaaacggagggttggacaggcagtaatcaaaacgctcattccagagctgatcgtcagagagggtattacccagcttgatattgctgatatcctgtcccttgatcagcatatccgctttacagatagcgtaagactctgggtttaa

SEQ ID NO: 82990 - DNA, 450 bp, Citrobacter koseri
atgacacagcacactcccatcttggctaacgagccacagttaattatcaccgccacagctgtacccgatgaacaacgcatcggcttctggccactacactttggctcgatcccacagtggataaccctagagccgcatatcttcgcctggatggagcgcttttgtgcggattactgtgggggagtttggtccttttacgcgctcagcaacggtggcgtatttatggcccctgagtctgacagtgatgagatttggcgtctgtttaactgtctgaacggcaacgatgccaaaatgagtgcagaagcggcaggcattgcagtctgcctgattgaatacagccaccatgcctgccatacagagtgtgacgcgatgaccgcgcactattaccgcttgcgagactatgccctgcagcatcctgaatccaacgtcattctgcgcatcatcgactga

SEQ ID NO: 82991 - DNA, 159 bp, Citrobacter koseri
atgtcccagccagtattacttcctccgagcactttcacccggatgcaagcgaaagccgtcacggcagcgtaccgcaatctcgccattgaagatgaccagcacagccattttcgcttggtcgttcacgaccccgaaggccggatggtctggcgggcatga

SEQ ID NO: 82992 - DNA, 468 bp, Citrobacter koseri
atgaaaatacgttcactaagccggtttatgctggcaactgcactgtttgccagctttaccgcctctgcggttccggggctctggcagcagggttacggtcagggcaatacggaatacagcgtgaccgaagccagcgggaagacatttaccatcaactgcacagggaacccggaccagaatggtttctaccagcattctgcttttcttaccctggcggataacagaatggtcagttcgcacgatgatggcaccacactcaccgtggtaatgaatcaccagcagtatgttattccgtccagactgggctggcgaaacggggataacgcctggtatgacttcatcagcgatatccgcaaggcccgacagttcgatgtctacgtcaatgaccgcaaagcaggtaccttcaatattgaccctacgaacgccgcgaagaccctacccacacccggagactgcaataacgactga

SEQ ID NO: 82993 - DNA, 762 bp, Citrobacter koseri
atgataaagagaattacatttaacaccgatgatgatttaacgattaattcaatcgacaggtatgccgaatccaatggcatgtcacgttctaaagtaatatgtgagttattacggtccactgcacctattcttgattttgtgacatatcaaaatagaattactcaggaggttgaaagcaggctttttagcatgttttatcatgaagttcgtcacttcgaaacgcaacggcataaagaagactccacgcttaagtatattcacttcttgtccagcaagcttatttttgatgttagaactccacctataacacaattttctcttccagcttatggagcatgggactctaaaaggaatgaaataaatggggtgttggaagagtgcattcaaatgcacgtgagagaagatgatgagatgaccaagtacgtttacttgtgcataaaaaaagatcctattgataggtttgattttgatttgattcaggtggctgtcccactttttattcttgataaatatttatttgatatccaatcaatctgctatgttcgcgctattgatttttgcactattggaataaatgaatacatgcagagaaataagaagtatctgcacgcagcgtatctttcatgggttcctgtttcggcctttagggatgggtttatttttgttgcagctttgcatatcgataaagctctgcctaatcaactatacccttctaaggtcaccataaactacccttacgagtactggaaatatttagggtga

SEQ ID NO: 82994 - DNA, 411 bp, Citrobacter koseri
atgaaacagaacaaaagtttttttattagcgatcatccattggtcctaattggtccaaataaaaataataaaagaacattactattaccactttctcaagagtttatacttatcttctttgaagaaggtgcgtatgataattatgtggaaaattccggtgtcatttccataactgaattggatgatgttggttcactaaacaaattgcaataccttaactccaataaaagtatatacttctctgatgaagtcagtgatgagtatattaagaaagttcatatggataacgaatgtgataaattgaaagacaaattttcttatgttgctgaggatgggaagttatttatcagaagaaataatatcgattttgaattagatttcaattgtctaaaacacatctataaattctaa

SEQ ID NO: 82995 - DNA, 1230 bp, Citrobacter koseri
atggcaaagatcgctaagaaacttactgacactgaaatcaaaaataccaagccagcagaaaaggaaatcaacctttttgacggtgatggcctgatgctacgaatcgctcccctatcaaagggcggtaagaaaaattggtatttcaggtatgcagtgccagtaagtaagaagcgaacaaagatgagcttaggaacctaccctcatctcacacttgccaaggctcgggctttacgtgatgaatacttgtcgttgcttgcaaataatatcgatccgcagattcacaacaacgataaagccaacgcccttaaggatgctactgagcacacgctgcaggcggttgctaggaaatggttagatgagaaggttaagacctctggtatctctccagaccacgcagaagacatctggcggagccttgaacgaaatgtcttccccggtttaggcaacgttcctatcaaagagatccgtcccaagctcttaaaacaacaccttgaccccatagaacaacgaggcgtattggaaaccctgcgccgcatcatttcacgtctaaatgaaattttccgttgggctgcgacagaagaacttattgagtttaatcctgctgataacctcggtcagcgtttcagtaaacccaagaagcaaaacatgccagctttaccaccgaatgaactcccccggttcatgctcgccatatctaacgcttccatacggctcgaaacacgtcttctaattgagtggcagctccttacgtgggttcgtccgggagaagcagtccgtgctcgttggagtgatatagacgaagataatcggttctggaatatccccggtgagtttatgaagatgaagcgccctcacaagattccgctaagtaaagaggcaatgcgcatccttgagttaatcagaccaatcagtggtcatagagagtggattttcccaagtatcaaagccccgcttaaccatatgcatgagcaaacagctaacgcagcgattatccgtatgggcttcggtggcgaactggtagctcatggtatgcgttctatcgcccgaacagcagcagaggaatccggtaagttcaggacagaagttcttgaggcctcccttgcccactcaaagaaagatgagatcatagccgcttataaccgtgcggaatacttagcagagagggtaacgctcatgcagtggtggagtgattacgttcaagcacaaaaatataaagcaattgcggcttga

SEQ ID NO: 82996 - DNA, 378 bp, Citrobacter koseri
atgagcatttactctatgaagagcaacagtaaacaagcagaaacggttgctcctaaattcgttttcttaggggaaacctacgagtttgttgaaactttttcaggcgaagtcatcgaatcatttaatgaacagatcttagtaaggaatgattcaggtgaggaaacaaaaatttctgactacggtattacattcaggaattcacaccgcattcataaatatgagttgcgccaatatagtggatatgaacggtgtagtgtaaattacgatgctctgatcgtaaatgagaatacaggtgagtataaagtaaatttaaacagaaaactcattgtcatacctgcattcatgacaatgtttttaaataatgtatcaatggcttaa

SEQ ID NO: 82997 - DNA, 588 bp, Citrobacter koseri
ttgaaaccttgcttgtcaataatctcatccactggtcgtatgaatggcttctcgtttaaatatggaaatatggctttcaaagcatctcaattaggaaaaatctactcatggtctgctttacagaacaggatcaattatattccagatcgcgacaacgcttttcttttcaatttaaaagcatcttgcagtgaaacacttgatatgataaccccttctgggattgcaatagaagaggttaatcccacgatagaaatgcttacactttgtaaaacttctgataacgatagatacgataccgattataccaaagaatgtatctcgacaattcaaagtaatagcaaagggatgttaactgatgctccaaaattaagctttgaaataccaaaatttagatggctagaaacaattccctatattgatgcagttattagtctactaaaaaacatcaaaatactaacactcaaacgtccaaaaaaccctagtgttatcaacaatataagatttgcaaagatagctcctttatgcctcgcaacaacagctgagcccgtctcggtgcaccgcaaacgatcaccatcattgtatgcataa

SEQ ID NO: 82998 - DNA, 231 bp, Citrobacter koseri
gtgagtctcggtagcagcattcaccagttcaaacatcaggagatcagggttaaacagcttatagcggataagattgatattgcggttaatctgcgcaacggcatgctcgtcatatttggtaaaatctgccgcaatgcaaatcacacgggcattggaccaatcgatatcgtcagcgacctgtttaccaaatttatccatcaccagccaacggaactcggcctgatgatctaa

SEQ ID NO: 82999 - DNA, 918 bp, Citrobacter koseri
gtggctgatctttggagtactaattactctgaaatgaaaaacatttatttgccaattccgccatgtaatgaacagattaaaatatataattttcttaagcaagaagttagtcttatcgacgagcttttagttaagcaagaacagcttgtaaatttattaagagagaaacaacaagcagtgatttctcatgcagtcactaaagggataaatccagatgttaaatttaaaaatgtcagtggtcaatggattgacgcagttcctaatgcttggagggtgatgccattacgatacgctatttcaaaaatagaacaaggaagtagtcctttatccgataataatattcctgaatcgaatgatataggtgttattaaaatcagcgcggttaaaaaaggtttgtttaatgaaacagaatcaaagaaactttttgctgattccgattttgatgccagatatataattaagaagggcgacctgttagttacgcgtggaaatactccagaattggttgctgacgcttgctatgtaaaggaagaacctcagagaaaaattatgttaagtgatttggtatatagattgagccctaataaaaaagttaaggcccagtttgtatgcttcgcgctattgtctgactatatgaggcatcaaataaaacttgatgctcgtggttccagtatgacaatggcaaaagtatcacaagaacatattaaatcttggattatagctattccaccaataaatgaacaggtggagataattgattttctgtctaagcaactcgctgagtttgagcggctctttgatgctgcccataaattaattcatcatctcaaagaacgccgctccgccctgatatctgctgcagtaaccggtaaaatcgacgtacgcaactggcaacccaatgctaaggatgctgcatga

SEQ ID NO: 83000 - DNA, 321 bp, Citrobacter koseri
atgagagcatttaatgagaatcaaatagatacttttctaaatgctttcggtcaaaatattataatctctaatggggcgacatttcgcgggatcgtggaatctcgccccattgtcattgaaggtactgaaggattaattgaaagtacagagctatattttgccgcaaagaagtatgaagaaatagtattaggtacacaggtttcattagttattgatgattcagaggctgaagttgtaccaagtcaactaaatacctacacaatttataatattgaaaatgatttaagcgggatgattaattattacttccgcatggagtaa

SEQ ID NO: 83001 - DNA, 255 bp, Citrobacter koseri
atgattataaacggtaaaaaaataaaagcgaaagatttagcgaaattagcagaagtatcacgttcaactgttattaaatactatggtatttctcgtgaggattacttgaaagaggcatctaaaaaaagaagtctttcatttcagttgagatcgtccggtttgaaatggaaagaggtggctcaaaagatgaatactacacagcacagtgcgattgggtattatagaagatatttagcatcacataaaaccgaataa

SEQ ID NO: 83002 - DNA, 363 bp, Citrobacter koseri
atggaaaaatatatttcagcattcaatgagattgatttgcttatggaaaaattattcgagagattaaaaatagggataggcgaaatcaatgcatatccaagtgaagatatgtttagaatcatcgtaaataagacaggagttgagagtttgaaatcaataaatgagatgtttgcaaagaatgatttttcggaagctcttaggcttatgagccagaatgtgtatatatttgcgaattggtggtgcgataatttagattttatgtcggtagatatatcctcgctaattgcttcaaaagaaaaagaagtaatcacttcaagtactgggaaattacgttttggaaattttgataaaaaaagactatga

SEQ ID NO: 83003 - DNA, 240 bp, Citrobacter koseri
atgcgtctgaatcgcttgaagagtaaagaaaaatccttatccaagagtgctgagacacgcctgaagatcatccttggtgctgaagtagctaaagctatgggctgtaaagtagacgatatcgataaggagtttgtgctgggagtgttattatcttttcaagatgttagcgctgaagataaggcaaaatttcaaatgcgcgggaaaaagtttcttgcagatattgttgggagacaaaaatga

SEQ ID NO: 83004 - DNA, 543 bp, Citrobacter koseri
atgattatctatttacacggttttgactccaacagtccgggtaaccacgagaaagtgttgcagctacagtttattgattcggatgtcagactgatcagctatagcacacggcatcccaaacatgacatgcagcatctgctgaaagaagtagacaaaatgttgcaactgaatgtggacgatcggccattaatttgtggcgtaggactgggtgggtattgggcggagcggattggcttcctgtgcgacatacgccaggtggtattcaaccctaatctgttcccctatgagaacatggaaggcaaaatcgactgcccggaagagtatgccgatatcgcaacgaaatgcgtcaccaatttccgcgaaaaaaaccgcgatcgctgcctggtgatcctgtcccggcatgatgaagcgctggacagccatcgttcggcaaaagagctgcatcatttctatgaaattgtctgggacgaagagcagacccataaatttaagaatatctctcctcatttacagcggataaaagcgtttaaaacgttaggttaa

SEQ ID NO: 83005 - DNA, 345 bp, Citrobacter koseri
atgagcaaatcattaaccgcacgctgcatccgccgctgggaagtcgagtttaaaccactctgcgattcgaaagtaaacccgtactggcgcaagcgtgatctgcgcgggtatatccgcgaagcggcgctcaacactgcttacaacatggttgagagcatggctgagaacaacgccaaatttgactatgacggcgcgccgaactgctggagctatgagttttctctctggtatcgcttgcgccggggaaaatacctcaaagaagcacgcaacttcctgaatgaagaggccaccaacgacgagatcgatgaagaaatccagaacgaactggaggcctggaatgactga

SEQ ID NO: 83006 - DNA, 204 bp, Citrobacter koseri
atgtcaaacgatgatgagtttttcgcggagatgcatccgcagatagcgcaggtgatcggtatggctgtgatgcagattctggttgaagggcgtgagatcacaaaggcagaaataatcgagacgattcaggttctgtggcaggaggagcaggttgatcttgctgttgagttagcgctggatgtactaatgctgccaaaagaatag

SEQ ID NO: 83007 - DNA, 537 bp, Citrobacter koseri
gtgcattcaatttcatttcaacaaaataccgggtttcctccggccacgatgataaatcgcaatcagcctgatccggcggataagcatgaccagattcgggctgccgttcgtgcgtggtcggcatcgctggacaaccaggacgtagtcgccgggatcatcgttgaagaatgggaacggcagggcggcgccgggctggattttcctgacgacctgagccgtaagcggcagaagcttttccgctggctggacagcgataccggatatgcgcgcgaaaacatccgccagctgactccggcaatcctggctgttttgccgctggaatttcgtgaccgactggcaccgcagaacgacaccatgtcgctacttgcttcagcaatgaaagagtgtgttgaagcaaagcaggccgtccttttggacgctccagagcatcagaaactgaaggaggtaagcgaaggaatagcgtcactgttccgtctcatgcctgagcaatacagcgtgctgatgaacctagtgacttcaatgctggggggaatatga

SEQ ID NO: 83008 - DNA, 474 bp, Citrobacter koseri
atgaaatcaacggtagaaataaaaatcattgagttagtgaagtcagggcatgatctggcgaaagaactgcattgtgctgagtctgccgcgctgattagcgatctggcatctcaactggaagtgcaactggtacgtagcaatgcgctggctgcggagaatgcggggctgattagtagttctgaatgtttacttcatgaagcgagcgaagtgtaccgggcttataacaaaacacaattgccggatggcgaccttgttgacgaacaatgcttgcaagaagtgtatgacgccatcaacgcgactccgacaaccgacgctttcctggctgaagtgcgggccagcgctgttgatgaagcttgcctgaaaattagcaacgctatcgttaattgctatcaggacgaacaagtcggtcttgatgcggcggcaactatctgcgggtacttcgccgcccaacttcgcaaaggagcagcccaatga

SEQ ID NO: 83009 - DNA, 603 bp, Citrobacter koseri
atgagcaacatcgacaaacatgcgctacgtgaagcaaaggtaatcacaaaggaatttgttgaggaacaccttcactacgatgggaaggattttttctggaagaagcgcgaaccaagttcattttctgacagccgcacatgcaaggtttggaatactcgaattgcagggaaacgtgccgggggaatcagtgctcaaggttatgtagaaattcaaatcaaagggagtcgatataaggctcacagattggcgtggtgtcttgttcaaggcgatataccgacgagcatgcaggttgatcacattaaccacgacaggactgacaaccgaatacagaatctgcgacttgttgataatcagggaaaccaaaagaactcgtcattacgcagggacaacataggtggtcgtactggcgttacatggcattcaagtaataagagatggattgcttacatacgagaaaacggcaaacacaagcaccttggtagcttcactgaattctctgatgctgtaagagcaagagaagaggcacagtcaaggcttggattccacacgaatcacggcgccgctggcatccagtctatcgaaggagagaagaagaatggctaa

SEQ ID NO: 83010 - DNA, 201 bp, Citrobacter koseri
atgaccactattaccagagagcttatcgccgcatatcttaacggtgaagttaaaacgctcactaacagcgaacagaaagagctggcgcgtatcgcgttggcagcgctaaccgcagagcctgcaaagtgcgggcatgtaaatttggattgcgacgacggcaaagccgtatgcctgtcctgtggaaaggtgtgggaggtttaa

SEQ ID NO: 83011 - DNA, 624 bp, Citrobacter koseri
atgcaattcaccaaagagcagttaatcaagcgcctggaagagcaagattcggcggcgcgttatgcgttaagttttgtgcaggacagtgaaatcctgcgagatattgaaatggatttgcgcattactgaaatcgcgctggcatcgcttgacgttggcagcaacagcaacccggcgcccggccctctctcaaattaccgcctgcgccgcatcagcgacatcctgagcaaagccgcagcacaacgcgacggcggtaacatcggttacgcaatgtctgatgctgtgaaggtgattgatgaggtgctggagtcgatagcccgcgaacaagtacgccgtgaacatgcagcatggtcacaggctactttcggcgatgtcggtccagtggggccgttaaagcacctatccaaagaagcgctcgaggcggctgctgaaccaggcgacctgagcgaatgggctgacatgcagttcctgctgtgggacgcgcagagacgtgccggcatctgtgacggtgaaattacagcagcgatggaagaaaaactgaaggtgaacatggcgcgccagtggcctgagccaaaagacggtgagccgcgttttcacatcaaaaaagcaccgcagcaggaggggtga

SEQ ID NO: 83012 - DNA, 1986 bp, Citrobacter koseri
gtgagaaatagcgaaatcattgttgataactttgctggtggcggcggtgcctccactggaattgagatggcgactggccgtagtgtggatattgccatcaatcacgatcctaacgccgtggcgatgcataccaccaaccatccggacacgttgcattattgcgaatctgtttacgatgtcaggccgaaagtagcgactgccgggcgtccggtggcgctggcgtggttctcgccggattgccgtcacttttcaaaagccaaaggtgcgaagccggtagagaaagcgatccgaggtctggcctgggtagttctgcgctgggggctggatgtaaaacccagggtgatgaaactggagaatgtcgaagaatttaaaacgtggggccctttgctcgctggtgaaatgaggccagaccctgaccgtgctggagaaacttttgaggcgttcatttgtatgctgactactggcatccgggctgaccacccggcacttgcggagtgctgcgaatttttgggtatttctcttgatagtgaagacgccgcgaggctgatcaagggtcttggctacatcgttgagtatcgcgagttgcgcgcctgcgactacggcgcgccgacgattagaaagcggttcttcatggttatgcgttgtgacgggaaaccgattgtgtggccagagccaacacatggcgatccgaaatcaccggctgtccaggctggtaagctggctccgtggcgcacagctgcggagtgtatcgactggtcaatcccggcaccttcgatcttcgaccgcaaaaagccactggcagtgaatacgctcaagcgcatagcgcgcggcattcagcgtttcgtaatcgacagcgcgtcgccgtttatcgtgaagtgcaaccataccagcaccaaaacgcattacgactgcttccggggccagtcgctggaagaaccgctgcagaccatcaccaaaacgcatggttatgcggttgccgttcctcacctgacgaagttccgaacaggcgcgacagggcaggatgtcacacaaccagtcccgacaatcaccgccggcacatcgcggcgcccgggggggaatggtcatgccctcggcattgttgaggccgcgcttacaccgttcctggctggtaacggtggcagtgagtaccaggcaaaaccgcgaccgctggataaacccgctcataccatcttaaagcaatcacgtgcctgtctggttgcgccagtcatcgctcgccagtttggggccagcatcggtcaccgggcagacgaaccgagcgcgacgattacggcgggcggcggcggtcattcacagctggtgacgccaacgttgatccagatgggttatggcgaaagaccggggcaggacccgcgcgtgttgcagcttgaaaagccgctgggtacagtaaccgctggtggtaacaagttcgccgtggccagtgcatttctggcgaagcactacggcggcaactatacggggccgggcgtcgggctggatgaaccagtccactcggtgacgacggtcgatcatcatgctgttgtagcttctcacctggtaaaactgcgcggcacctgtcgcgatggtcagcccacgagtgaaccaatgccgacagttacggccggtggtctgcatgtcggggaagtcaaaaccacactggcggtcgaagactacgacgaacagcgcgcacagcaaacgctggcgttcctgcgtgaatactgcggagaggaatgcaccgggatggtcgacatcgacgggataacgtaccgcatcgtcgatatcggtatgcgcatgcttcagccgcacgagctctatcgtgcacagggtttccctgactggtacatcattgatcaggattatcgcggcaagcgctacgccaaagataaacaagtggcccgctgcggcaacgcagtcccgccaccgttcgctgaagcgctggtgcgcgcaaatttgccggaactctgccaggcgaaagaaattgctgcctaa

SEQ ID NO: 83013 - DNA, 309 bp, Citrobacter koseri
atggcaaaaccggatatgggggtgagcgtggctatttatcgcagcaaaaaatggctcgccgccgtcgggcagatcgagcgttgtgttctttgtggagcatgggggacgcaggtggcacatcggaacgaagggaaaggcatgggattaaaaaccgatgactgtgcgacagctgcgctctgcatttgctgtcatgacagcattgataacgggaataagctgaacagggaggagcgtcggcagcttatggaccgcgcgattgttctgacagtgattgaagttgcccgccgtgggctggtggtgcccgtatga

SEQ ID NO: 83014 - DNA, 570 bp, Citrobacter koseri
atgatgaatcctgcattaagaaaatatgtgtggtccgcagtaggcggtggggcaattgcaatatcttctgcgctgattaccggcccgactggcaatgatggtcttgaaggtgtgcgatatcagccttatcgcgatgtggtcgataaatggactgtctgctacgggcacaccgggaacgacatcatgctcggcaagacctacacagaaactgagtgtaaggcgctgctcagcaaagacctgaacgctgtcgcccgtcagattaacccgtatatcaaagtaccgatccccgaaactactcgtggggcgctttactcgttcgtctacaacgtcggcgctggaaacttcaagacctcaacgctcctgtacaaaatcaaccagggcgatatcaaaggcgcatgtgagcagttaaggcgctggacttacgctggcggaaagcagtggaaagggctggtcactcgccgcgagattgagcgtgaagtgtgtctgtggggtgagaagccgcaaaaactcagcgatggatttgggtcacttaactcaggaacgcctgcaacaacgccgggagtgttctga

SEQ ID NO: 83015 - DNA, 210 bp, Citrobacter koseri
atgcttgacggttattacggagtgccagatcttggtgcaacaaaagaagaacatcagaggctgctcgcggtgaaggctgcattagaaattgccaaagcatcagcttcctcttcggctgcagatggaggctcaatgtataacgatttgtctttcgcaaaagagagcatctcaggcctcgcagatgcgattcaggccgcattaaaaggctaa

SEQ ID NO: 83016 - DNA, 1149 bp, Citrobacter koseri
atgaagcaaattttggaatctaattatactatcccattgggatctgaacttcgtgtactactcaacagcgaacatatttcatacggtgaaatccatttagcattaaaggcaaaagggattttttctgggagtaatgataaatcgataacagttccacttttgtcagctacattactaactccctcaggttattcagctttaattgaagcgtctgttgatagagattcaaaacctaaagttaaagtttcctcactcgatttggttgattcagcttcagattgggtaactccgctaaagcaattatttgaaagtgaattcaatccatttgctaacatcgaaaacgttgaggttttagatagtccaggcgtcattgttgatgggaaaaataaagtacgaattccattctcaatagttcgtaaggattttagtaaagactggactcagagggaactaagatttgatggcgaggttgctattgaacgtctaggaggcaatcttaagctcgatttttcgtcaacacattcatcgaaagagacagagattgttaatagaagaatgaccgctcaaataaccaaaactcttaaagaatcaggagtgactcaaaatgaaaaagagcggagaattacatttgacagttttacaaatattgaacgtgttcgtttcttcaaaaggttaacaggcggtcacgggagatttattaaaaaaggtagcgtgagtgatatggaaataaatcgggatacctcaggcccttcacttccagacgatccacaaatttcatggatgaagcatacagtaaaacgactgaagatagatggcgaaaaacttaatgatatattcctaatatctgatgaaaaatattatgattattatcatgtacagagaatggacgttacgttcggctttgcttccgcagcaaatactggtgaatttaaagccagtttattttttagcactccttcaagaggtgacttagcaaaaaatgatgctgaacttactttcgaaattctaaagatcactcatgatcacaaagtaaactcagatgcaaaaagagaactaagtacagaaattggtaagcaagtacgacttcttatagaaactgaatttgagaaaattgtagcagagcggattactgataaaactgccgcttaa

SEQ ID NO: 83017 - DNA, 306 bp, Citrobacter koseri
atggggggaataaacggtgggattgagatcccgaaagacataaacggccagcctctaatctggattgactataaggtgctggaggatggcgatatggttatcaaaacgtatcaccgggaacaccagaacgccccggagtttgcaaggaatacgattaaaggtattgccgatggtgagccggttgatatcccttcaaatacgtttgtttcagtgcgtgtagaaatgccggaaagcagtgtatggaatcagcgagtggccgaagccgaaaaagctatgactgaaactcctggagcatccgccgattga

SEQ ID NO: 83018 - DNA, 279 bp, Citrobacter koseri
atgggacttgaaatgattatcggcctggccgcagcggtgattgccgctatcgctggtgcttttggtttcggccagttgcgcggcaccagtaaagcggaagccaaagcagacaagcagcgcaccgaagagaatgccgcagcggttgtggcagcggcagaacgccgcattgaaacgacaaaagaggccagcgatgtgcaagaggctgttaagcgtatgggtgatgacgatgttgatcgcgagctgcgcgacaactggacccgccccggtggtggtcgttga

SEQ ID NO: 83019 - DNA, 690 bp, Citrobacter koseri
atgaatcctcaggaacttaattacatcagaaatgaacttcgccgggcgctgctggacctttccgggggaacgaaaggacagcttgaggcttttagcgaacaccctccagcggataaaaaggccacaccgcgccgttgcgtgaatccagtcgaactggatgatgaaaaggggagccgctttgttaattcactgtctgccccactgtgtgtgatggagacacgcagccgccgcaggccaatgccgccaataaaggacatggagtttgcatacgcaccgtggcgccgcgctgttaatgctctcgacgattaccagcaggcctggctgcgttactgttatggctttgatttgagctataaacaccaggtgataatgtgcgagcacgtctggaaaaactatcaggattgcctggttaaaaacccgatgcagtcccgcgtggtaaaaaagcttgttggactggtatggctggcaggtcaggaggttgccgccgaaaggagcaatgaaacctgtaaggattatgctggcgcggcgctggcccgtatggttagcgttgaccgttcgacgtggttgcgtgtctattcaggacactgggctgggttaaaggccgcttttacccagcttgatgagtctgcgctggccatggctcttgaatactatgaggatgaagaagccctcaaagtggcagaaatgtga

SEQ ID NO: 83020 - DNA, 1935 bp, Citrobacter koseri
atgcgtgaaattatcgttgataactttgctggtggcggcggcgcgagtaccgggatcgaactggcgatcgggcgcagcgtggatattgcgatcaaccacgacgaaaacgccattgcgatgcataagacgaaccacccggacacactgcattactgtgaatccgtatttgacgttgatccgttagccgcaaccggcggtaatcctgtcggcctggcatggtttagcccggactgccgacacttctcgaaggccaaaggcgcaaagccagtgaaaaaagagatacgcggtctggcgtgggtagtggtgcgttgggcgctggcgaaacgcccgcgcgtcatgatgctggagaacgtggaggagttcaaaacgtgggggccgttgctggcagacgaaatgcgcccggatccatcccgcgctggtgaaacattcaatgcgtttgtcggcatgctgtctactggcattcctgctgatcacccggcactggctgaagtttgtgagtttctgtctattgaaaaaggtagcgaacaggcgcaaaagctggtggatgggctcggatatgatgttgattatcgcgaattgcgtgcatgcgactatggcgcgccgacgatccgcaaacgcttcttcatggttatgcgctgtgatggttgtccaatccagtggcctgctgttactcatggggatcctaagtctctggaggtgcagagcggcaggctgatgccatggcgtaccgctgctgaatgtatcgactggaatgttccggccctgtccatcttcgaccgcaaaaaaccgctggcggaaaacactctgaagcggatcgcgcgcggcatacagcgctttgttatcgaaagtgcgtcgccgttcatcgtgaagtgcaaccacacgagctctaaaaatgcgtatgacgcttttcgcgggcagtcgttgaatgagccattacagaccattactaaaaaacttggctacgcgttagctgttccacaccttacaaaattccgcactggcgcaactgggcagcccgttaccgaacctgtcccgacggtaaccgctggcacatcaaaacgtccaggtgggaatgggcatgcactcgggattgttgaggcagcactgacaccattcttggcgggtaatggtggtagtgaataccaggctaaaccgcgcccgctggataaacctgctcacaccattctgaagcaatcccgcgcctgtcttgttgcgccagtgatagcccgccagtttggggccagcgtcggccaccgggcagacgaaccgagcgcaactatcaccgctggcggtggcggcaaatctcaactggtaacacctacgttgatccagatgggttatggcgaacgtccaggacaagagccgcgtgtgctgcgactggataacccgctggggaccgttacagctggtgggaataaattcgcgacggtgagcgcgttcctggcgaaacactacggcggtaactatacggggccgggtgtcagtatggatgaacccgcgcactcagtgaccactgtcgaccatcatgcagtagttgcctcccatctggtgaaattgcgtgggacgtgccgcgacgggcaacgccttgatgtacctatgccgacaatcaccgctggtggccagcacgttggtgaggtacgcacatttctcgagacttattgcggggaaagtgacgatgaatggttggtaatgatcgacggggttaaataccagatcgttgatatcggaatgcgtatgttgcagccgcatgaactctacaaagcgcagggcttcccggatggctacgttattgatcaggactaccgtggaaatcgctatgcaaaagataagcaggtagcgcgctgcggtaatgcagtaccaccaccattcgcccgggcgctggtggaggcaaaccttccagaactgtgtgcagtgcaacagcaggaggtggcatga

SEQ ID NO: 83021 - DNA, 867 bp, Citrobacter koseri
atgagcactaaattaaccggctacgtatgggatggttgcgcggcgtcgggcatgaagttgtctagtgtcgcgatcatggctcgtcttgctgatttcagcagcgatgagggcgtgtgctggccgtccattgaaactattgctcgccagcttggcgcagggccgagcactatcagaacggcaatcgctaagcttgaaaaagatggctggctcacgcgtacacagcgccgaaatggtaaccgtaatgcttctaacgtgtaccgtctgaatgtggcgaaacttcaggcggccgcattttctcaactgtcagattctgacacgtcaaaatctgacgcatcaaaatttgacgcctcaaaaactgacccgtcggaatctgtcaaaaacggcggttttgacccgtcagaatctggcggggatccgtcagtaaaatcaaaacaagatccacaagtaacttcaaaaccctcttgtccggttgcggcgcaaccagaccctgaagttgtgattactgaccaggccaaagcggttttgtcatacctgaaccaagtcacaggctcacgttaccaggtatgcagcacatcgctggagaacattcgcgcccgtctgcgggaacggttcactgttgacgacctgtgtctggtggtggattacaaaaccgccgattggcgtgatagcgagcaggcgcaatacctccgcccggcaaccctgtttattccaaaaaatttccccggttacctgcaaagcgcgaccaaatggtctgctgctgggcgacctgaacgcgttaacggtaaatgggcggctaactcagccagccgcgcaaacttccagaatgttgactactcactgccagaaaattcggggtttcgccaatga

SEQ ID NO: 83022 - DNA, 135 bp, Citrobacter koseri
atgcttggtacgacgaagtcgtgcgagctgagtggaaaacgccgcaagacattcggaacaggtatgccagtgccgattttattgctggtaatcgggttatttttaacattaaaggtaatcattttcgtctcgtag

SEQ ID NO: 83023 - DNA, 633 bp, Citrobacter koseri
atgggtaaacaagcttggcgaatttttaaggctcatgaagagtacgaacaaggcatggctcgtttattacaattagctgagagtgagctggttgaaggaagccctgaccttgaagagtttgagcttttaagtttgttgatagggcattatgaagataaaaaattccctatggataagccagatccaatcgaggcaatcaagttcaggatggatcagcagggtctaacccaagcagatatgaagcaatacatcggttctgcatctaaagtgtctgaagtcttaaactacaaaagaccgctaagtttgtccatgattaagagattacatgcaggattaggtatacctgctgacatacttatccaagacaccaaaaacgtcgaatggtcaccactagcatacagcgctgaaaactttgcggttgcttttggtgatgcgtgtaaaaaattaataccgcaaccacaattcaccgataaaacaaacaattatgaagaggttgcaacaatttttactcgtttccaatttaaaactgatatatatcagatgggtgataatctatcaaaatcagttaagattggggaaagttttgtttccaatgacgatattttatctcttaacgaattccagcgtgcgtaa

SEQ ID NO: 83024 - DNA, 861 bp, Citrobacter koseri
atggatgagcaactatttcgatttatcagatccaataaatttattgagtatcttgaacatattggcgttgaaactgatcttattatcaatgcttttaattctgaatttgataatgagacattttccttgtttgtaaacaactatcgaggactactttctcctaatatatgtatagaagaaattctgtttagagtgctgtgtagatatttaaatgatcatgctcctgaggattttagctttagggatgatgggcggttggatgtaagaacaataatctctcattccaaatcattaattcaacgcccgaatattcctgcgccagttgagactattaaggggtttaaagaaccacataatgagagtggttttgttaggattgcaagatttgaaaaacaattaagcctaagagaatatgggaagcaaccacaaataacagtactattcgaagggatattacctaatgccattgatataaatcctctcccttctaaattatcatcatatcatatctggaacggaagcttttacaatggtatgccttttgtacagggaatatgcggtaggataaattcattagaaccatcacatgtattatggttgaatagtaaattgttagaacttcttaggttaaggcttgatagctataaaaatggactaagagctattaatgagcatgatgaggttgttttagaatttagacagtggaaagataaactgatcggaaacggttcatactttgttggcacgtgttgtaatatcgcaaagctagaaggtagtgatttacttatgagggccgattattatagaaagttagagcttttactgcctaatttaacatttaattcttatattctcaattaa

SEQ ID NO: 83025 - DNA, 4743 bp, Citrobacter koseri
ttgagtctgaataatgcccatgaaggatacgactatcaagatttactaaccagttactttattttaaaggaggttttagatggaaactgggatagcattttttccatcgacaagaaaaatacatctgataatgtgccagacagatttgatgatttggttatcgttaatggctcaagaatacagcgaaagcaaataaaatatagtaatgattccatctctaaggtcttagaaaaagctgacttggcgaatgataatggctatgggttggctatttataaattatttgaaacatggattgatctcagaactgcggaaacagaatttcggttatgtttagcgtgggatgaaccggtgtcagatgatattacacgggtgttaacccagcaaaaagataattcatcgtttgagtactatccaacaaaggtgtacaaaattaatcttgataaactatgggaggaaagctcggaaaactttaatagatgggatagctttaaaagatatacaaaagaaaataatatcaaaagaaatgttttcaatcaattctgtagcgaactgttaatagaagtaagtctacctaaggcaagtttgaaatttgataagcctggtgggttagagcgaatattaatcgagcaagcagaaaaaattggaatcggccagtacccaaatgatgatatctacatcaatgattttttagttagacttgcaaagttagcaggttcttacagaagtggaactcgtgaagtttcggctaaatatatttttaacgatctaagggtaagaactaatttcggtaaaatagatcaaaggtttgatataaatccaaataaaaatattgtttttaagcagactaatgatgagcttcttattaaaacaattgaaaataaaagaagtatattactcggggagcccggttctgggaaatcatggttgttgacaaatttcattgattatctagatgaaaaaaatattaaatcaatcaggcattattgctttactagtacaaatgatgattttagtgaaaagagagtattgtcggatgttttcttcgggaatttgatagctaatatcatcgagctgttccccaaattacagtctaaaaaatctcaattacttgcatctaatcttgatgagttaaatttgttactctcaaatatcgatgaagctttggtgatcattatagatggcttagatcacatagaaagaattatcaatacatcatcttcgttatcggtagatagaactagaataatagactttatctcaaaaattgatgagcatccaaatgtttcaattttaattggatctcaaccggtcaatgaagtttgtgtattgatagacaatcaagattataaatccatagagttaccaaaatggaacatagcagcaattaagtttttaatgggcaagtataatgttgatgatatcaagctaaataatgtgtatttgtctgggttaataaaccaaaaaagtcaaggtaatccgctgtatgcgacttatatactcaaagtaattaatggtcagcagggtgtttcggaagaaattataaatacattgcctgcatacgatcataatctaaaaagttactatgaatatctttcaagtcagttagagagtaatttaacggctgatatattggggtgtttggagttttctattactaagacagaattggaaaacattctcatttttagtcattatctagaaaaagatattgagatattgtcccctgttatttctacaaatagttctagaggaggtattaagttatatcatgacagttttaggcggtatataatagagcgtctatcctcttcaggtcagaaaaaaattaactaccagataggaacttggcttaaaaatcaggggttctatcaaaatgctaaatcttataggtatctacttagttatctaataaaatctgaagattataatgaagcattaaacatcgctgataacaattttctaattaacagtctttaccaaggtcactcggaagcggcgataaaaaataattataaggggcttcttcacatcgctaatattttgcagaaatgggatttatttatttatctaagtgagttaaatcgtactatattagctacaaactcagaggattcgcatagtcagttccttcagaatttcgaaatttattttgagactatttgtctaatatatggtacggagaaagcgaattctctattgttttttgatgatgataaaaattttagtgatgaaattactgctaaagcttttgttattttacagaggaacggatattcaccaagatgggatgaggttaataatttattccaagggggtattagacaggaatacatgaaatattatatttatagccgaattcacattcctacagaccttgaaagattgttcgtatcaatagcggaacataaaaataaaagtttatttgatgaggttgtttttgcattaattgaaaatgataagatagatgtcattttaacgatgtatagttcaattaaaaaaaacaaccaagaaatagctgaaagaatcaatggcatatttgaacgttataatgtagtacagcgagtaggttttactaaaaaatcagcaattaaaaataaagagttaccgcctttatcgattgattttgtagatggctatattaatagtgataaattaagtattttttacgatacagtttctcagtacgctgaaaaagatataaacgttttagtggattttgagaaatcaataccgcaaattaattttttctataattggattaagttttttattagaaattttatcatagagcatactgttcttgatgaagagaaagaaaatatacttgttgaaaatatgctttttttatcaagtgatgtggaaaaatataaaggcacgcctagagttgtagattttgtaattgataattcggctttaattaatcacactttgaagactgcacttaagcatatcaaatctagaagttcttgggagttagttataaaaagcttaattgcaatcccatgttcttctttatcggttgttgagaacaatttccttaatgagaaaaacattgactacattattagtgcgtatgctgaatttgaaaaatctgataatttagattatagtgaatatgcagattattgttttaagaaagctttattactggctaagtctaacaaactgcacttagcccaagaagaattaaaaaaagccatagaatttattactacttatacttttcgtaaagatacaacactttccgaactaatattgcccttaagttcaataaataaaatagatatattagttgctaaaaaatatgctaagagattgaaatatcttaatgatgctgttatgaagcatactgaagatggtaaaggcataaggtggttagctatagaatggtttaatgagcttttgcatatagatagccttttggcaaaaaaatatcttgcatctgagttaattaatgatccttacttttggaagttggattatatgttaattaatttattgaaggacagtaatgatatcaatccgatcttggttgcctttttgtatcgattgtctccaaccaataatagatctgaatatataaatgggtttatcgaagtaattttatcgttgaaaaacattgatagggacttggctaagtcatttgttatcaatatattaagtagagatctgaatgatagttataatcaaattgaacctaacactctgagtaaacttgaaaatataagtaaagagtttggtttggtttttaccaatattaaaataaaaaatcatgacaatgttaattataaaatagataagattgatcctctctcaataattttgtctgagaaattctgcgttaaagaatctgttgtagggttatctttggctgaattatgccatttttattttgaaaaaaaatgtttaacagttgccgattttaatactatttacttttacttttgtgaatttaaaagtgttcaatgtattgatgagttactggtcccaatgataagaaaacaatttcctgatgatatcagtactcgttatgagtatttttacagtttgatcatgaatttagtactggatacagatactaaaatcaatcttcttgtcaataattttctttactccaaggatggatggtttgctatgtttactcataaagaatcactaaaaaaagcagtggagattgataatgaaaaaacactgggggttttagctaaagagttggccaatgttttctccaaaatgggctatatgtccaattcaactgctaatctcattattgctttcgagcattcaggtatagacaaaaatattgtcctggatatgtacagtcgtgcgtttgaatttatcgagaataggttgccagataataatgattttcgatgggatgatattgaaaatttctgtatatctgagatgaataataatgagttagctgtcgtactaatgttggcaaaaagtaaacacaacgattcagaaattcagagggaaactctttatgctataagttatctattaaaatactgtgaggaattattagtaaaacctttaaaatggtttttgataaatgcgcatagattcaatgaattaactgttagtggtttacttgaaattcttgcgattgaaataaatgaatgcaacacacttcttttagatattcagaatgaactaagagaagccttaaaaatagataacttgtatattaataaattactcagtgagcttgtcaaggaggcgtctaatggatga

SEQ ID NO: 83026 - DNA, 1311 bp, Citrobacter koseri
atgaaacccgatagttctttaaacctaataacgctgacaatgaaacagaatgatgttgattctgtggatggtcgcttttgtaagtcagcgcaaaacatcaaaaccagcgttgacgttgatgattgctgtgttgaaccgatggcccgacatcgcagcccaaagaatcaaagagaggcattcactaaagctttttttgatgagtgtaaaacccgtgcaatacaaactggccggactatcgaagccagcgatacaaaatgtaccgggcttaaggctatattctactcatccggacgcattaagtttattgtccgcaaaagtattcgtggaaagaatgtttacgttgccgtaggaagttaccctgaattttccattaataacgcaagggagcatgcctttaaaataattcaggagcttaaggcttccgttgagacttatggtgagcgttttcttacgcacagcaaaataacgtttaatgaacttgtggaacagtatgtgaaatgcgtacttagcacgggcgttaagcgttcagctaacaccgacctttctaagatccgtaaatacctgcgccctcttctcggtgacaaaaagctggcaggtatgacggaggcagatattctgagctatctgcacgatctcgatcttaagcctgccacacgcaaccgccacctggcgctcattaaagcggtctttacctgggctatacgcatgggatacaccagccgctctccggtgctttatatcaaagcgctgcctgaagtgacgtcagatcgccgcgccatggatgactcccagcttcagcgctggatggaagtctgtgagtgctggcgtaatggtaaacccgatcatgaagcccttgctctgctcatgttccttgccctgacggggctgcgtctgggggaaacccgtcaccttcgtcttgaagatgtggactggagccgcaaggttatcacccttcgccataccaaaaacggcaaactccgccgtgtaccggtatgtgataaggctttcgttcttctgacagaacagcgtcagcatctgggtgatgaaggctgggtatttccgggcaagggaaccgaaaatccggtttctgagccacgtcgcctgcaaaaacgactttgtgaggctgcgggtattccaccgttcaccatccatgagatgcgtcatacctttgcgacaaagctcattgagagcggggccgacattcacaccatcaaagatttattgggccacagcactatcaaagtaaccgaaatatatgtgcacagttcgcccgcgcgttaccacgaagtcgttaaccgggcgatggggtaa

SEQ ID NO: 83027 - DNA, 720 bp, Citrobacter koseri
atgacgctgataacacaagaaaatgaacatgacagactggcaacccgcctctccatcatcctgagccgtttgtttcagggggaaaagctgcatatcgggacgctggcagaagaattcggggtgacaacgcgaacgctgcgaagggattttaacgtccgcctcacctatctcgatattgaacagagcaacggcgtatatcagcttgcctctcattactttcgtcgccgcacggaacgggatatgaagatactggcgagactgctgcatctcgaccgtctattacccgcgatggatgctaaactgctgagccttctgcttgacggggagcacccttcaccctacaggattatgctaccggagccgcgccagaaacccacgctatttggtgatttcagcagactaacgctcgccatacttcaccagacccaagtgcgtatcagaaccgatgaaaacgtcagccataccgttcatccctatcgcctgctttgcagccatgcggaatggtatcttgcaggaagtacttcatcaactgtgttcgttatttccctttcccgaatcaggctggttgaggtcttatctgatatggtctttgaaatagatagggatctaactttattaattgaaaggcaagactttcttgaagcattaccacacataaatgttatccatgagataatgcgttacgataccacaacactcaataccgcaataagaacataa

SEQ ID NO: 83028 - DNA, 909 bp, Citrobacter koseri
atgattgaagcactagaaaattttaacattaacgaagcatccttaacattgtgggtctttaggaagaagatagagcagaccctgcctgtatattctgctcgttgggtgagtatttctgaaaacttagaaaacgaaataaaggtttttataaataatgaaaaattgcgatatacagaagttattgattatggtttgttagctcaaaataatgaggctagcttactaaaaataggaagcgatgaaactgaggtggataaggtaatattatgttcagctaatcagactcctgagcgaaaagttcaagatgttaaacatctaaacaattgcgatttttatgcagtaaaattagtacatggtaatgacacgttatactgtataaaaaaaaccgatgcttcatggaaaactaaaaaaaagaaaggactgaagtcgttggtatttgaagagcatactcttgcgattgatgacacacccagattcgatatagcaaagtgttttgatttttttgttttaggaaatgatatccttattaaggaaaaaggtgtttttgagtctcttttaagctataaacaagcacatataactaattttaatacgcttaccgttgagcctgaattttcaggattgtttacagatttgggacctcttaatgaatatgtaggtaataatgcaatgcagttacgtagagcatcagctattcaacaaaaagggtattataaaaacggcgcttttatggccagtttagttgcaaacgctcagcgttttagattaaatcttcagtttgatccaaatggtaaaataatagttactaaagcatgttgtcctgatattttccaggcgttgctagatcacaggttacagtctcattaccaagctcatttatatgatgtgcccaatgctcagcctgtatga

SEQ ID NO: 83029 - DNA, 597 bp, Citrobacter koseri
atgaggccaagattacttatagcgtttgcgatatttcttggttcttatctaccgcttagtacgattttgcttgttcaggattttgataagaaaaaagcaatgggtgaggtgtgtctaaatgtctttttaaatgaaaattgtcatttccctctgcaaaaaccatggctttcaatcggttttctcgttctttgtttgatatgttttttattctcgtggattgcattgaagttaacaaaagaaggagggacatatatacatataaaaacagtaaaacacacgccctcggatctgatgaattatgttttaccttatatagtatctttcatgagtatagattatatgcaggatgctaaatttataggatttctgatatttttactatggttattttggttatcatataagtctggtcagattattcttaatccaatgcttgtggttcttaattggcgaatgtatgaaattacttattattaccctgggaatgaaggtgatgaattcacaggtgtcgttttatctaataaaactcttgagcctaatagtacgtcaaagactcaaaatattcagtctgtgattgtaataaataaagagggataa

SEQ ID NO: 83030 - DNA, 1533 bp, Citrobacter koseri
atggtcacgccatatatctcgatggcggggatcggcaaatcctttggtccggttcacgcattaaaatcggttgatttaacggtttatccttatgaaatacacgcattattaggagaaaatggcgccggtaaatcaacgttgatgaaggttctgtcgggaatacatgaaccgaccaaaggcaccattacgattaataacgttaattacgacaagctggatcataaattagcggcacaactcggcatcggcattatttatcaggaactcagcgtgattgatgaattaaccgtgctggagaatttatatattggtcgtcatctgacgaaaaaagtctgtggcgtcaatatgattgactggaaagagatgcgcgtacgggccgccatgatgttgctgcgcgtcggtttaaaagtcgatttagacgaaaaggtggcgaacttatccatcagccataagcaaatgctggaaatcgccaaaacgctgatgctcaacgccaaagtgatcatcatggacgaacccacctcctcgctcaccaataaagaggtggactacctgtttctgatcatgaaccagctacgcaaagagggcaccgccatcgtctacatctcgcataagctggcggaaattcgccgcatctgcgaccgctatacggtgatgaaagacggcagcagcgtttgcagcgggatggtgagcgacgtcagcaacgacgatatcgtccgcctgatggttggccgcgaactgcaaaaccgctttaacgccatgaaagagagcaccggcaacatcgagcgcgatacggtattcgaggtgaaaaacgtcaccagccgcgacaagaaaaaggttcgcgatatctcctttagcgtcagccggggcgaaattttaggcttcgccggactggtcggctccgggcgcaccgagctgatggattgcctgttcggcgtcgataaacgcgcaagcggcgagatccgtctgaacgggaaaaccatctccccgcgctcacccctggatgcggtgaaaaaagggatggcttacatcaccgaaagccgccgggataacggcttcttccccaatttctctatcgcccagaacatggcgatcggccgcagcctgaaaagcggcggctttaagggggcgatgggcctgttccacgaaggcgacgagcagcgtaccgccgaagcgcagcgcgaactgctggcgctgaagtgtcattccgttaaccagaacatcaccgaactctccggcggaaaccagcagaaagtgctgatttccaaatggttgtgctgtaacccggaggtgatcattttcgacgagccgacccgtggtatcgacgtcggtgcgaaagccgaaatttataaagtgatgcgccagttggcggacgacggaaaagtcatcctgatggtgtcatcggaacttcctgaaattatcgccgtctgcgaccgcatcgccgtgttctgcgaaggacgactgacgcaaatcctgaccaatcgcgatgacatgagcgaagaggagattatggcatgggcattaccacaagagtaa

SEQ ID NO: 83031 - DNA, 672 bp, Citrobacter koseri
atgccgcagcacagacgtcactttttcgccagtgcgcgcgggcgactgctgttttttaatctgctggtagtggcggtgacgctgatggtgagcggcgtggcggtgctgggttttcagcatgcgagtcaaatacaggagcaggtgcagcagcaaaccgtcgatgacatgaccggcagtatgaacctggcgcgcgatacggcgaacgtggcgacggcggcggtgcggctgtcgcaggtggtcggcgcgctggagtacaagggcgaagcggagcggttgcaggagactcagcgggcgctcaggcattcactcgaacagctggcgaccgccccgctggcacagcaggaaccggggctggtggcccgcattattcaacgcagcaacgagttgcagaccagcgtggcgggcatgttgcagcgcgggcagcggcggcatctggaacgtaatacgctgctgagttcgctgtatcagaatcagagttacctgcggcatctgcaacagcttgatgcggcgcaggatgcggcgttgttcagtcaaatggatcgcctgattcgcgccgccatcgaaacgccgacgccgcgcgccgtcattaaacagctggatggcgtgatgcgcgccctgcctgagcaacatgccgatccgctggtgaacgtgattctgtctgactttaactag

SEQ ID NO: 83032 - DNA, 897 bp, Citrobacter koseri
atgcaattgttcgccttacgtgtgttaatgagaccacgcgaccctgatcttttttcaaagggatctgttcaaaaagacattgtgcattttgaaaatgccatagtattcagcgcgcaaaagttacatctgacatcatcaacaccatccgttcataagaaaaccagctacaccctgaagctgagtataaaacccactgaaggtgtcatggctggggtcatatcaaaacagcaaaaaattaaaggacatgataaggattttcgcgaattcgatgtagacaattatccacctatcgtatggatctgggatagagaagagcaagtgttattggtcgagaagaaaacagcggtattcaaggatgcgcatcaagttgctaaggcatttgaagatcttgccaacaacgactatttggcccaattggggctaagagtatttatcgaagcttgccttgaaatggaagatttttggtctgaatatcatagacttcagtttattgataaagttagttttacgttgattactccgaatattttcggaagtagcaagcaggccttaactgacgatttgcgaaagcttgaggcagatactaatgcaaacgctgtaaccacaacatttgaaaacacagatggtaatttaaagcttaaaggttctcattgggcatctgtttttgttgattgggtaaaagatggtggtggttcttggttaattaaaggtcgaaaaacactcaaatcaaaacctacaactgtatccagtaatcaaacggccaagatagtccttatcgaaggtgagatttcagaaattcagttagatggctactcaccgagtgatatcaaagaaatcatagcattacatcaaaaaaggtacacatacaaaaatgaagaatctaggcgtctggattaa

SEQ ID NO: 83033 - DNA, 462 bp, Citrobacter koseri
atgaagaatctaggcgtctggattaaagctatagcgctattcatattatgcttagcgttatcgtcaaccgataaacaggtttataccctgcttgagcaggcatcggcaggggtgatcggctcaattcttggagggattactgcagggatctctgtaatttttggcattctggcggtcatcaataaggggcaaaaacgctcaagttttacaagttacttgggaagtttagaagctgatctgaaattacttgtgatctgtttaggcgcaacaatttttttgccgtaccttcgaaattatgacttacctctaataaattatcccaagcatgagttgattccttctaaggataagttatttactgcggcagagctgtttgccgtagtgctgtctctcaatctcattgttgaggtgataagttgcatgattttagtagttaaacaaagtctgaaaacggaagattga

SEQ ID NO: 83034 - DNA, 264 bp, Citrobacter koseri
atgggggataaaatgaacgttacttcacccaaaatgctggctcaggcagtgaggaatgctcgcaagcaatgtaagctgactcaacgcgaaactgcagaaagtataggcatgaaacaatcaacggtttcagagtttgtgaatcatcctgaggggatccgcataggtacgctctttatgctgcttgccgctctggaccttaagcttcaggtcgtaagccgtaggggcgaacataaatcgtctgatagctgggaccagcagtggtga

SEQ ID NO: 83035 - DNA, 279 bp, Citrobacter koseri
atggttccgaaacgtctgaggattgcgagagagttagccgatatgtcgcaagaagaattggctattgcagcagggctttctgaagaaacgggctattcgagaatgtcccattacgaaaatggcaggcataaacctaaattcgagctggtttgtcgatttgctgaagttctcaatgtgcctgaaggctacttctatacacaggatgacagctttgctgatgtaatgctgaagctttacgacgggaaacgggtccagtggaaaaggaggcgcttaagttaa

SEQ ID NO: 83036 - DNA, 261 bp, Citrobacter koseri
atgatccctaaaagactaaaagaagctcgtttgcgagcaaagctgacccaggaaaagcttggtgtacttgctggtatagaagaggctactgcttactcacgcttgtcacactatgagaatggtacgcataagccgacatttgagctggtgtgtgagtttgctcgagtgctggatgtccctgagtgttatttctacactgtagatgatgagtttgccgaagaagtgcttgctctcttcaaaaagataaaaaaaattagatga

SEQ ID NO: 83037 - DNA, 861 bp, Citrobacter koseri
atgactaagcataaacaatttgaagagtatctttttcatgatacttattatttttgccattgtgtgaaaaatatactttgtgatcaaacttcatatatcggaggtttgaatgattttcatggcgatggaagggtaacatccttttcaatagcatttccaaaatattcacatttccatgcgtttatagaatttatagtatctaatatatattatgaagaattggaatggagcaatatccaaaagctacataaaagattcaaagagcttacccagtttgaactcgcaatgttatctaacagtgaaaatggtggtgtgttttctttctttaataagtatcaggaatatatggcttttttgtctggtgaaggtgttgctttaagccaaagcgatgagtattcattgcaagcattcttagagcatttcatgtcaaatgaggtttttgttaatcatttagaaaagactgtagatgaagtgttttatgtcttattcgctaatagattagtcgtccagctgttcaatgaaatgattgccagcgttagggaatatgataaagatgtatttgaagatgatagttgctgtaagcctaatggggtattgaaaaggaaaaatataccatcatgggtgaagaatgctgtttttcatagggataaaggagtttgtgttatatgtaaaaaagatttaacccatctaataaataattttaatgaagctaattatgatcatatcgttcctttatcaaaatatggaataaatgatatatccaatattcaactgttatgtaaggagtgcaatcagattgataaaaattcaaaaggaaatgatagctcgtatgattatttcccttggtatcccatgaattga

SEQ ID NO: 83038 - DNA, 309 bp, Citrobacter koseri
atgcgcaaccgttcattatatgcgttactgataatgctcatagaatctcaggcctacgcctccccggaatccacccagctcgccctcgcgctgaagcaacttgacggcgtaaaaacctcgctggagcgcgcccaaacccgcgccagcaccgatccacagtcgcgctacatcttcgactacttacaggcgcagcaggacatctccaccgttgaacagggcattcgccgctaccttaccccggcaagagcgcagccacgcaccgtccagcccctgagcaccagctaccagcgggagaaccctgatgactga

SEQ ID NO: 83039 - DNA, 2529 bp, Citrobacter koseri
atgactattcgaacattatcaacctcggcaaagttagggtgtgatttgctctcaagccatcgaatgcttactcttattgaggataattcatttcacattccattaagtgaaaacaaaattagggaagagttatatcttacccatcaaccttgggcagcaagagaacccgatcatgtttttagtcgagccctggatgcactaaaaatacactataaacctacggattgttcgctactacaatcagccatgcgttgtattttaaaggaatttataacttctcgccatggtattttgcgagtaaaactccaaatgttcggcgtatggcaacaaagtgttttaagtcgagtaagtggcatatccctacaagctgcagcatatgtttggcctcaaaataattattatctagaagagttgacacatcccatcaaattagctgaaacttccccaaacagcagattaaactcgttactaatgccatatgatcccttagttgaggagtattttaatagggagggattacatgaaacccatttacatttaaatggaagtacgcatgccgaattatgttggttacgtgctattacagaacctgaaaaagaaacaactgatttctgtcaaaaaattaacagcactcagagtaactcctcacgtttaatggaattagctagatctgtacatcctaatttttctatttctttatttcggaaacaattatatatagccaaacaacttagaaaatatttaatagcagcttcttttggatgcctatcttcaagtgaagagctccctaaagactgcaaggaagtactgtcattagcattatcaaatattgaacctgacacgtcacataatgagattgagtatcgtaattttattcattgtgataatgataatattaatgcagaaagatactggattttcttacttttaaaaaggcttgaatccaccccctcagtttctttgataaatatgcttcactgctatttaatattacaaaatctttactataaattgcttgtacaaaatgaagagcaatatggttttgatcaatttcagaaattaacttggactgacttacgagagcctattgaaaaagattattttgaccgtttccaaaatatgcatggtcctttacctacccacagtagagtcgtttatttggaaggtcggtttgcccctaaagaccttgaggaaaaaaatatatcgatactatacaatattttaagtggatattggagatatttatataaaaccaatccagaaagtgatcttacacggttacttggtgagtttgaaaagaatattatcaatacaacactcataaatggtcgttttttgaagctagcacttgttgctcattttgttaaactccccgaaaataaccttgatacaccctacagacactatactttgcggactaaacttagtaaacaagcccatgtccttaaaaacacactttatcattatccaaccttaaagcgatggtttagggggattgatgctgctgcaaatgaacttgacgctccacctgaggtttttgcaagcgtttaccgcatgtgccgttactctgggattacacatcgtagttatcatgctggagaggattttcatcatatattatcaggcatccgggctatgtttgatgctatagaattacttgatttgtgtgaaggcgaccgtattggccatggtactgcaatgggtatatccccagaactatggttaaaaagaatgcctggaggcgtttatattcataaagatgactggttacttgatttactttctacctggcgccttttaaaaatgataggagagaccgagttagcgtataaactggagagtaaattgactgaactaggctcttatttatttgattttcaagtaaatagtataacgttagaacgagtaatgaaactcaggggactcaatattgagttccttgccaagatttttactggtattaatgagaatactaaaaagtctgaaataataaaatgtgtagatgttgtcacaccacttagtgatatagaaagggcagaagcgataaaggtagacgaagctatcagctccaatttcaatgattgtaaacttttatggaaatggcttagtgatcaagatattcgctcgaggggaagtgagctagtatttgttgactctgaatatttgtctgcagaggaatatataaaaatacaacaagcactcatgcacgtagttaaagataaaagaattcttatagaaacattaccttctagcaatgttcgtattagccaatatgaaagtttcgatgagcatcatgtgtttagatggatgggcttaccaagttatgcaaaacctggagatccagaaataatggttacactaggctcagatgatccaggaattttcgctggtgacctagcctgtgagttttatcaattatacgctgttttgcaaggtttagggttaagcgataagaaagcattacattacatttcagagcttaatgaacgaggtagagaatatcgctttcatgactttggaataggctaa

SEQ ID NO: 83040 - DNA, 2634 bp, Citrobacter koseri
atgagtactcaagacaacgagatagtaattaacattgatgaatgtaatagctatatgaaaatggggccaaacgaattaattcatcaaaatgtttataaaaatcttatcctagatattaaaaattccatattacaaaccaaaaataaagtcccactcagtgattttcaactaacctcaaccgataatattgattatgctcctggtagcggattggtttatttcattgatggatcacgaggtgcaggtaaaacaacatttttacgtagtgtttatgaacatatatcaaatgatctcattaaaccagataaaaacaataacatcgtaaatatatccaagcttgattatattgatccaacccgtttggaagtttgcgaaaatatattattaaacgtgttgagagcccttaagggtatcgtcgaaaatcgtcatatttcattaaataatgaatcactaaaaactagtttccgtcaagcctttaaaaaactttccggtggccttagcttattccgtaatgggcatgatcagttagcacatattgatccagagctattttttgatagaggtctaactcgagcagaggatagtcgttctttaagaaagaatttacaccaggccatcgacattgcctgccatttattgaatacagatacattgatgcttgcatttgatgatgcagatactaacgcacaacacgctttcccattattagaatgtataagaaactatttagatagtcctcgcctcctcatactggttaccggagacatggagttatattctctattgattagggataatttttctcgacgactgccttcaactgaaaagaaaaacaatgatttcagaatagagcaatgcttaagaatgcttgatcatttagaagatcagtatgttttaaagttatttccattatcacgacgccaacatttaaaaacacttaatcgactctttgacaaagagtctaccgcacatacatcatcaaattataaaatcatttcatccaaatggaataataaaaaacgagaccctatcaacgtcatagatgaaattataagccgtggattacgtatatcctctcaatctgatattgaattattcagaacacatttattaaaacaaccacttcgttcagtattacaagtattacaggggtgcgcaccttatctatcacaatctgatgataatataagtatggaatggaatagtgagctctctgatgccttaagagaatctttaagagcgatggctcaaggtagtttatacaaacacggggtggtcgttgatgaactaacagctaattatcttcccacactatcaaaggcggttttcgacttgtgttaccaagacggagatgttgatactgcagcctatttaagaccacaagctagtaacgatgacctcaacaattgttatttggctttggctgcggaagttgcagggcaatgtgcagggtctgcatctgcgtcattaaagtatatgttatcaggaccaggcaatgttacgttatggggtaaagaaaaacgtcgtatggcaaataatattaaccccgacttgctttatagacagtttagtcagtatatggctataggtagaaacgaagatgcactgaactgggccagacgtgcgaccgcagtactagcagcaaggcatccgtcccaagtaaaagcccctgtaatagattttggtatcattggactgaataagagagcgcctgatgaggcaagagggaaaagtgaaggcttcaagacgatagatagtatattgaattccatttacggtactgatagcaaaggttacccgactcttgcatatagtcttttagacgtatctagtcagagtagtcgttgctattcttctatatacaatgtgctaggattggttgaacgtctttttgagtctcgttccaaagaagaaatattacgccgtctaaaaagcacctatccacaacttagtatcagcagtccagattggggggggagcattgacacaatgccttcagaagaaagcctacaaagcgatagtgacgatacggaaagacatataataacttcagatgcagagagcttgttaattaatgccgtatacgcatggcaggagttaaacagaaattcatttaaatcattttcaccctcctctgttttgctcggtaaaatctggataaggatttattttagccttgaaaaatcctcggatcaaattcgcccaggttcattgggaaagggaaaaaacattgatgacattatggaaattaatgctgcttgtttaatcaatgcctttcttgttgaagaagctgatcacaacttacaaaattacgatgtatcaccggatcgtacaaacccactaacttctgcccttgatatcttaaaaaagaaaaaagaattcctaaaaagcaataaagatagccttcctctcacgactctaatagcaagctgccctattgtgctcggtcttttaaaagaggaatcaagaacaataattaaagaggctttatccctagatgagacaatagtcaatattcaaaatgctgaactacctgttaaagcatttattgctggtcgctggcgtaaaacagaaacagaaactaaatctagaaaaggagcgaaatccactaccaataccgaggaagataaatga

SEQ ID NO: 83041 - DNA, 633 bp, Citrobacter koseri
atgagtgaacagcaaccgcctccatcacttccgccacaaggaccgattggctggcttctgtcgctggccggacggcttattgggctggttattggcgcgctggttctaaggatcgtactagagctggcggggctgtatttctggtggccgcaggaggggtgcaggcatatttttcaagtgatgaggcaagagcaaactgagctggttattgcgttgcagccacatccgctgaagaatgaaatggtgatgttgctggagaacgggacaactcacgggcttttggctaacaggttcctgcagaaaccgttcaccgtcctggcttatacgctggtgagttttatgctgcgtctgacatggctcgtcgccatgcttcccctgctttgcctgtgtgttgtaatcgggctggccgaaggtctggtacagcgggatttgaggcggtttggttccgggctggaatcggtttttctccaccgctacgtcatcaggtccggcagttcagtcgccaccacgctgtgggtgttttatctggcacagccgctgtttgtacccgcgatgctggttttactgcccgccaccttatggcttgggataacggtatggatggctgcaggaagttttaagcgttggttatga

SEQ ID NO: 83042 - DNA, 468 bp, Citrobacter koseri
atgactctcagaacttttcccatgttgcacgatctctccgactctctgtttgcggaccgttttaaccgcatcgatcgcctttttagccagctaaccggcagtacgccgttgccctccacgccttcttacaatatccggcggctgggcgataaccgctatgaactgacgctcagcgtgccgggctggaaagagagcgaactggaaattgaaaccgttggcggtcagctgaacatcagcggtaaacgtgaagaggagaaaaccgaaaacagcgaagaaggctggatccatcggggtatcagccgcagcgacttccgggccagctatagtctgccggagcatgtgaaagtgaccggcgcttcgctggaaaacggcttgctggcgattgaattacaccaggatatcccggaagaagagaaaccgcagcgcatcgccatcaacaacaacccggccattgaacataagccgtaa

SEQ ID NO: 83043 - DNA, 1470 bp, Citrobacter koseri
atgaagagtatatcattgccgccatacgcaccaacactgatagaatcaacacgtgctattggctatacattagaagctgcgatcgccgacattatcgacaacagtatttcagcacaagcttcgtacactgatattttcttcttccccattggaaattcatacattgcaattatggatgatggatgcggaatggctgcagatgagattgataatgcgatgcgctatggtagccaaaatccgaatgaaaaacgcactgaaaatgatttaggacgctttgggcttggtctgaagacagcctcattatctcaatgtcgaaccctaacggtagttagtaagcaacgagattgcattgaagcaagacgatgggatattgaccatgtgattaaaacacaagattggtcactattagtgctagaatcagaggaaatagatcaaatccctcatattgataatctaaaaaaaataaaatctggcactcttgttgtatggcaaaatcttgataggctcaaaactggtgagatcgatttagaacaatcaatgggtaaaaagatggatgaaatgaggaagcatctatcactagtttttcatcgttatatcaatggggaatccggaataaggcgattaaatataaggatgaataacacatctgtcgaaccggtagatccttttctttcccatcgaaacacgcaaataatgtccgatgaatcaatatatattaaaaactcaaaaatcattgttcgaccatatatattaccgcatatttcagacttgtctaaagaagagattggttctctaggaggtaaagaaggtctaaggaaaagacaaggcttttatatctatagaaataaaagattattaatatggggaacatggtttcgtatgatgcggcagggggaactttctaagctagcccgtattcagattgatatccctaacgaactagatagcctttggacgctagatatcaagaaatctactgctattccaccggaaatagtacgaaataatttaaaatcaattgtagaaagtctagcagacaaaagtaagagtacatgggtatttcgtgggaaaagagaaacccaagattcagtcatacatatttggcaacgattcaaaggaaaaaatggagggtgttactataatataaatcgtgagcaccctctggtagaagcattctcagacacgacgcaaaatataagaaatatggtcgaaagtttacttaaatcaatagagtttggaataccgctaaatcagctatatctggatttgacatctgaaaaaatgatagaaaacgacaccagtattaataaacatgaagcagaacgtatttttcatgagcttttaggagaaaactccattagtaaagataaaattgacctgcttaatactcttgaaattacagaaccatttatggactacccagacctgattgaacattacagaaggaaaattattcatgacaacaactaa

SEQ ID NO: 83044 - DNA, 138 bp, Citrobacter koseri
atgaggctttttgttatccaaaatcgctacaccaacatccatttgtataacaatttttgccttcagcctacgttttatcgcttcaaattcaagatcacttacattaaatacattctgaagagactgcctcaattctaa

SEQ ID NO: 83045 - DNA, 942 bp, Citrobacter koseri
atgaaaactacgccagaaactcttcttaatcaatgggataatattatatataaggatggtggtttcttacaaattgatacgcaacatcctctcgaatggcatattgggtatcaatcggctaatcaaagaacactattactggtttgtaacgcagaaattaatgctatcgaatcatctaaatcaatgattgtaagtcgtcgtcaaagagaaatagataatcgttggactttaacattcgaattaatgcgaaatgcagaacaagatgttttcgcgatcttttgttgtgacatcatcgaattctctcgtacagcttcagatgaaaaagaagcattgacatttgtcattaagcgttacaggcagtggagccgattgcttgaattgcaaaaaaatggattaatggatgaaaataagtgtaagggtttattaggtgaattgctttttttagaagaatacatgagttatggcggctcggtgcagaatgcagtacaaggttgggttggggcggaaggtgcagatcaggattttatgtattctgaaggatggtatgaagtaaagagtataggcatttctgcagctagtgtaactatttcttcactggagcagcttgattgtacactggcaggagagctcgtggttgtacgtattgacaaagtagcgccagaaagagaaggatcaatttcactaaacgagatggtttgtagaatatgtagtaagctctcaccatactcagactctctggaactttttcaacataaattaacgagttacggatatattgatattaaggaatactctgaacaaaagtactactatcagggaatgcaacgatatgaggtagacacattatttccacgactaacctccaattcagtgcctatagaagtactatctttaagttatgaattgagtttacctgcaatgtctaaatggttgaaaggttaa

SEQ ID NO: 83046 - DNA, 1833 bp, Citrobacter koseri
atggatgcacaggaatttagaaaagactttttggaagaagtgaaaattaacgctattgcaacaggagaaggatcctgtgcatcttttgtttctgcattttcccgccgcttacaagatattgaatttttatcggattttacgtcatcttattttgaagggactggaaaatataataaaaaaattcgagttgatggttattcatatgatgaatttgataaaactatgcatcttgttattgctgactatgatggttccacaagtgaagcatatttatcaaaaattaaagcaaaaaaaatacaaaagcgattggtaaattttacatatgaggcgcgtaataactctctacatcaacgtatcgaaatgagtagaccatgctgggatttagtggatttgatgaaggagaaggagttagaactgcgaaaatatagttttcatatatttacttcatcaattatcccttctgatgtaataaaactcgaatctgaggatattgatgaaatacctacagaatgccaaatatggagtattgaacggctgtttaatatttgtagttcggatattggacggaatgccgtagaaattgactttaaagagtacacttccaatggaatttcttgtctaaatgctagcgaaacaataacaaaagacttcagaagttttctttgtattattccagggacggtattggcagatatttatgataagtatggtagtttattgttggaaggtaatgtacgttcattcctttcaaccaaagttgcggtaaacaagaaaattcgaacaactattatcgatttccctgaaagattttttgcttataataatggcatctcagcaacagcgatgaatgtgcagattgagtcaacttctgaagggcaacgtcttatagcagcaaaagattttcaaataataaatggagggcaaacgacagcatcattatccaatgcgcggtataaagataaatgcaatctgaacgaggtgttcgtgcaaatgaaacttactgttattgaaaagattgctgatgaggaggcgataaagttaatacaagatatatcccgttcatctaatagtcaaaataaagtaagtgatgctgatttcttttcaacccatccgtttcatgtacaaatggagcatttttcccaaaaactctatgctagagccattaatggttcacaattcgacaccaaatggttctatgaacgagcgcgaggacagtatcttcaaaaacaaatgcgcttaactcgggctgagaagaaaaaattccttctgcaaaaccccaaaaatcagctaattactaaaactgatctagctaaagtaagaaatacttgggatgggtttccacatattgttagccgtggagcccaaactaactttatagactttgcagagaaaacgactaaagagtggaataaaggagaagtcgataaatttagtgataagtattttcaggaaactgtcgccttacttttaatttataagtatatggaaaaaatgatcccaaatcaaacatggtatttacagggatatcgcgcaaacattattacttataccattgcctttatgcgcatgttgataaaaaaacaattcaacaataaagatttagatttaatttcaatttggagtcgacaggcggtacctaacaccgtacagcaaacattaattgatttatcagaaaaagtctattttaaaattacagacagcacacgaagtgtggagaatgtaactcaatggtgtaaacgcgaagaatgctggaatagcgtcaaaaatatttcctatattttacctgattcgatagaaaatttcttgacagcaaatgataaagcattcatttga

SEQ ID NO: 83047 - DNA, 1644 bp, Citrobacter koseri
atggactcaaaaatgagcgaacaagttaagttaaaatcgaaatatagtatagtagatttgttcgctggtgccggtgggctcagctacggcttccttcaaacggatagattttcgatcaaagctgcttttgaattgaatcctaatgctcggcagacatatcaacgaaatcacggcgagcatgtggctatgtatagcgacgtggaaaatgcactctctgagtcaatcagagcagaacttggacagattgatgttgttattggtggaccaccttgccaaggattctcaagtgctaaccgccaaaaaaatcatgcgatcagtcaaaataactcacttgtcaaaaagtttgtccaggccgttcttaatttaactcctaaagcatttgtaatggagaatgttagtttacttcaatccaaagttcaccgtttttatgtagatgagaatgatcaacatataattaaaaagtacaatatatcaactgaagatacggaaatccaacttcttgacaagcaattcctgtttgaagactctattaatatagttaatgacccaattaaaataaaaaaatatttatgggctgagaaagactatttttctctgaatgttgtttacaaagctcgcaagaatgaacataagctaaaagccacactagagaaacataaaaaaaatttactatctcttgcggaaaaattaatcatcaaggacgatataaatgatcatatcactcattataattacctagcaggtaaagtaatcgttcaatactttaataatactcaggaagacaaaaaagctacacatttatgcattacaattgagcctgtaatcatgattcaacgaatgcttgctaagtccttggaaattcacaacaataaaataaatgttatagagtacacaacgaaacagggactagtggcaaaagttacatctatggcggtagttgattatatagagtcaatactaggttccgaagatagtggttatagtattacaaaaggtgtcttgtcagctacacatttcggtgtgccgcaaaaacgaatgcgctttgtaatgatgggtgtaaagaaagaaattgctgaaaatattacattacccgtgggggattttactgaggatagttttagaacagttgaagatgctatcaaagatatagaaaatctcaaagtcgcaactacagttagcgaaggcagtattggtattcctatttctaagcagccagattctattagcgaattaggtcaacagcttcgcaattcgaaggtgctttataaccatattgctactgatactacgtctcacgcattagaacggtttaaagtcattcagcaaggttgcaatttccatgatttaccctctgagcttaagacgacatactcagatagctctcgcacacaaaatacaatttatctaaggttgaaatataatgaaccttcaggaacagtcgtaaatgtaagaaagtctatgtggatacatccgactcttgatcgtgcattgagtatacgcgaagctgctcgattacaaacttttcctgatagttttatattttgtggtgtaaaggattctcaatatcaacaaattggtaatgccgttccacctatgttagcaaaagctcttgctagacatttatgcgactatttagataagtaa

SEQ ID NO: 83048 - DNA, 264 bp, Citrobacter koseri
atgacccaaaaaactaccgttagtgtcgctagttatgttcaacagcttgcaaatgataacaacgttacagctaaccgtgatggcatgagccgcgttgctgtggccattacagcgcttgccgatgactctgtcgagctggataacgttgagcaattattggtaaaccttaaaaagaaaggtgtactcagtaaatctgaaattttacagcttcagggacgttacttccgcgaacaaaagcactttcataaaaaagctactgcatga

SEQ ID NO: 83049 - DNA, 204 bp, Citrobacter koseri
atggcacttccagtcctctttgattgcgatccaggtcatgacgacgccatcgcaattgttctcgccctcgcatcgcctgaactggatgtgaaagcgatcacctcttccgccggtaaccagacgcctgacaaaacgctgcgtaacgtattgcgtatgctgacgctactgggcgtaccgatattcctgtcgcgggcggcgcgataa

SEQ ID NO: 83050 - DNA, 618 bp, Citrobacter koseri
atgctaacagtaccgggattatgctggctatgccgaatgccgctggcgttgagtcactgggggatttgttcgatttgcacgagagcggcgcgtcgccgcgtcagcctgtgcccgcagtgtggattacccgctgcgcacgccgccattccctgcgggcgttgtctgcaaaaacccccgccgtggcaacgtctggtgacggtcagcgactacgtaccgccgctgagtttacttatccaccagctaaaattctctcgccgcagcgacgtcgccgccgccctttcacgcctgctgttgctggaagtcttatacgcgcaccgcgcatcgacgcttccgctaccggatcgcttagtcagcgtgccgcgctggctgggctgcggctgggacagccgaagcgttacgcgccttcgcgccaccgccactcagcaccatctcagcgcccgattgcgcaaacataacctgaaaaatgcgtttcgccttgaattgccggtacagggactccatatggtcattgtggatgatgtcgtcactaccggaagtaccgtcgcggagatcgcgcagctgcttttgcgcaacggcgcggcgactgtccaggtatggtgcctgtgtcgaaccttgtag

SEQ ID NO: 83051 - DNA, 597 bp, Citrobacter koseri
ttgaaaagtaactttatagaaaaagatatttcagaaaagttattgtgggtttctccgcaggacttactgggtgctcctggtatgcctagctctgtggccggaattcactatcgagccaatatgcaaggatggataaaacggaagaaggaaggagtaaagggcgggaaagctatcgaatatgacgtaatgtcgcttcctcaaatagagcgagaaaacgtaatgaagcatctagggttaacaacatcgcacgacaagatcatagaagatgaaaccaacagtgaacttgttgataaccgcccactgaacatcaagctagcatctatcctagcaacgctcgttgccgaattagagcctgatgaagcccacaaggcgcttaaattgttgagtaagggaggactctcggcgttgatgccattaatcttcaccgagcaacatctctacagtctaatgggcgcttcacaacagagcattcaaactttgatggcacttgaatctctacccacagaaactcgtaaagagattttggctcgctatgggatcactgaacaatacagccccgtagctcctgatagggaaccacacaaaaaagcagtctaa

SEQ ID NO: 83052 - DNA, 258 bp, Citrobacter koseri
atggcaaaagtcgtctttgagttcaaaagtgatttcaccaggtctgttgagaaaggactgattgacgggatcacttcccaaatacatgtcgagtttgatggtgataaaaacagcccgacaggcgcactcgccatcgtaatggctaaccaccgtcaggagataatcagccttgccatgaataagctggttgaggcgttacgcgaaacggggcaagttgccgaattcggtatttatcaacctgagcaaatgaagcattaa

SEQ ID NO: 83053 - DNA, 459 bp, Citrobacter koseri
atgagtgaacaatccttaatcagcgaaattaaaacatacatccgggcttctggcccggttacatgcacccagattgccagcgcaattaacgctgctccacaggatgttatttctgttattcgcgaggcagttgatcgcggttctctggcggaaaaaaacggctattacgatatctgccgtcaaccttccgagtcccgccgcagcagttattcatgggttgaagggaatacgcttcctgcatgggttatgcggctggcccgtggcccaaaaacatgtgagtccgttgatgttgtggccgaggttgacagggccaaacggtcgcagggatggcctccgtttattcttgcgagtattgatgtccggttgagtcactttaagtgcgtttcaacgggtgaaattgttgaccggcacatactgcgctacctgccactggatacaacggaggttattgttttatga

SEQ ID NO: 83054 - DNA, 507 bp, Citrobacter koseri
atgcagagggctaacttaatcaaactgatccatgtcgccagaagaaagctggcgcttgatgatgaaacctaccgttctgtgctttccggggctgtccccgggaaaaaaagctgccgtgatatgaaagtcggcgagctggaagccgtgttaaaggttatggaacgtaaaggttttaaacgagagaaatcattgcgtccatcacagcccaaagcggctccaatagtgacagataaaatccgggttatctggaaaattatgcatcgtcagggctttatcactgatggttcagacaagtcactcaatgcttttgtcaggcgtattacgcgtcttaaaaacggcggcgaaggtgtcgccagcctggagtggttgcgaggtgatcaggcatcaaccgtactggaaagcctcaagcgctggcatatgcgttgtatgcgggaaaaactcccggccaaaggatatggcctgaactacgagcgaacgtgcgaactgtacggcaaatacagcctttaa

SEQ ID NO: 83055 - DNA, 453 bp, Citrobacter koseri
atgatgaagaaagcctttatggttatgggattagcagtgatgggattggtagccacctcaacagcggctgttgcaaatagcgatgatggtgttgatgcattagcggaagcctatctgaaagaacacccgtcaaaagctgaaaattatgatagcgaacctgtgaaaaaagaccccgcgtcaggcttctggacgtgcaacggtatccgtatgcacatgggcgttgacatgaagtcgtggcaggatctgaatactactgatatgtatgtcatgttcgaaaaagtccaagttgacgataaagacaaagatgagaaagtgaaaggtacggaatatctttatgaatggactaaaaacccggccgttatcaaaaacttcatcgttgataaaacgggtaaaaatctctacatccgtgatgatttgaagtttttcaagacttacaagtgcaaacgaaactga

SEQ ID NO: 83056 - DNA, 501 bp, Citrobacter koseri
atgaaaattttcaaacaattcgaactatatgaacctgataataaagacctgccgagtgctctttatctgcgggatgaaagcgggcttgactggtatgagtgccagtcagagttcgggggtgattcatacaaagtagcctatgacagcgagggattaattgttgcatgtgataaggatgcttcatcgttatttccggtcgggttaagcgttgcggaagtgacgattttgccggaggatttcagcattggtcagtgggtatttaaagacggcgtgattcagccgcgtcagtattctcaggaagaattgatagcacaagcggaagcaaagaaagctgagttgctctcggtggctacggctgcaattgccccccttcaggatgctgtagatcttggtgaagcaactgaagaagaaacagcgcttttgattgagtggaaaaagtaccgcgtacaggttaacagggttgataccagtgaaccggtatggcctgaagctcccgtataa

SEQ ID NO: 83057 - DNA, 186 bp, Citrobacter koseri
atgaaagaatatcgatgttcaaactgtcttaaattactttttaaaggtacgttcagcactattgaaattaaatgcccgaggtgcaaacgtatcatcttaatctcgaatgccacagagcatcccacggagaaacattgtgggaaaagagaaaaaatcacgcattctgacaaaaccctgcatcattga

SEQ ID NO: 83058 - DNA, 714 bp, Citrobacter koseri
gtgggaaaagagaaaaaatcacgcattctgacaaaaccctgcatcattgagtatgacggtcagatcgtgggatatggctctaaagaactgagagtagaaaccattccctgctggctggcccgaatagttatagtaagcaagcattactcacatcgctttgtgaataactcatatctgcatcttggcgtgttctgtggccgcgatctggttggcgttctacagtggggatatgcattaaaccccaattctggcaggcgtgtcgtgcttgatacagaaaatcgcgggtatatggaactgaaccggatgtggttgcatgacaacatgccccgcaactctgagtccagaacaattagctattcgttaaaaacaatcaagttactccacccatctgtggagtgggttcagtctttcgccgacgaacgttgcggaaggtctggcgttgtttaccaggcatcaaactttgactttatcggaagtcatgaaaccacattctacgaactggacggcgactggtatcatgagatagccatgaacgcgattaggcgcggtggaaagcgtggggaatatctgagggcaaataaagaacgtgctgtcgttcacaagttcaggcaatttcgttacatccgattcctgaacaagcgagcaaggaaacggcttaactcaaaacttttcagggttcagccataccctaaaccagaatattcaggccagtag

SEQ ID NO: 83059 - DNA, 369 bp, Citrobacter koseri
atgaagcgtttgagtctggcaatgttaaccctgctggcctgtgcgggtgcacaggccgccagtgaagaagtgacgatgaatctggtgacttcgcaaggcgtcgggcagtcgattggcagcgtaactattgccgaaacggataaagggctggagtttactcccgatctgaaagcgctgccgccgggtgaacatggttttcatatccatgctaacggcagttgccagcctgcgattaaagagggtaaagactcggcggcagaggcggcgggcgggcatttcgacccgcacaataccgggaagcacgagggccggaaggcgccgggcatatgggcgatcttcccgtgctggtggtcaataatgacgggatag

SEQ ID NO: 83060 - DNA, 225 bp, Citrobacter koseri
atggaatttaaaacaaatcacgataaaagcactgacaacacagagtacggctttcgcatctatgaagatcttggcgatgggaaaggagtaaattcagccgatatcggtgtatggattgaaaattacattgactccagaacagaactgaatacagaaatcaaaaagcaatctctcgcctttttaaaacgcgccgttgaacagcttgaatctgaattagaacgctaa

SEQ ID NO: 83061 - DNA, 555 bp, Citrobacter koseri
atgtttcaactgcccaataaattacctagtgaggatttatctgtcggtgtcaacgctatgatgatgatcatcgcggaagctgaaaatgtttttggtcaccgagatacttcttataaaatcaacccaacaatcatatatggagaccactcacctcgagcttcaggaatggcaataaatggggagaaaatatgtattgttcatctcagtaatggttcaaaagctggttggccttgcttcttgtttgagatggctcatgaggctgtacatatactaaaccctcgaaatgatcctgcatcttatctggaggaaggtatcgctgtttggttttcgcaaatcatgtgtaaaaaatatggatttaggcctaacgcaccaaccgggaaataccgcagagcgcttgaattgataaaatctcttcctgatgaaccaccgattgttgtttctaaaatcagagagctgtatcccaatctaactgatctaacccaagaagaattactcgcatgttactcatccatttcagcattaacagctaagcgattggttgcaaaaatggtttaa

SEQ ID NO: 83062 - DNA, 411 bp, Citrobacter koseri
atgatcacctacatcacggtcgcggacgttgatcaaatcctcggtgccgactgggctgatgccagcaaaaaatcaaaatcggtactgatggctaacacctggatgaatggtcttggcctgaaattaccatgtgacaaaaatacccacgaaatcattatccctgatgatgtgaagcaggctggggcgtatgcgtctctggccgcagcaaatggcgggctgtatcaacagaaaaccagttctggcgtgctcaccagtgaatccgttgatgccgatggcgtgagcgtgtcggaaagctacgccgaactggcaacaaacagcacatctttgctggattccgatctgcaactggcgctggcgatgctcaagccgtatggcgccaacacttctcagattcgtattgtcagggggtga

SEQ ID NO: 83063 - DNA, 303 bp, Citrobacter koseri
atggccggattgacgaaagagcagcgcgcccagcgtgcggcagaaaaacttgctgctgaactgtcggcaaaaaacaattctgagcagcaggagcagcaggagcagcaggagcagcaggagcagcaggagcagcaggagcagcaggagcagcaggagcagcaggagcagcaggagcagcagggtgctcagttggttgctatgttcactgacttcccggcatttcccggcgcgcccaccaccgcagatgtgcatcctgatgaagtggaaaactggaaggcggcaggctggcgcatagaggagtga

SEQ ID NO: 83064 - DNA, 1143 bp, Citrobacter koseri
atggcgaatacgctgaccggcctcctgcccgatatgtacgaggctctcgacgttatctctcgcgagatgactggctttatccctgcggtaagccgaaacagcaatgttgaacgcgctgctatcgggcagaacgttcttgttcctgtcacaacttctgcggcatccgcagataacacccctggcgttacggcgccgaataccggtgatgcagtggtcgataatgtccaggtggctatcaccaaatcgaaacacgtcccggtgcgctggaacggcgaagaaaccaaaggactgatgaacgccggtaccttctccaccattcaggccgaacgcttctaccaggctatgcgtacgctggtaaacgaaatcgaaaacgacctgtggctggaagcgtataaaaacgcctcccgcgcatatggtaccgctggtaccactccgttcggtaccgccgctgatatgtcagatttcgctggcgttctgcgtattctggaagaaaacggcgcaccgaaaaccgatctgcaactggttctcggtcatgcggcaatcggtaacctgcgcggtaagcagtctggcctgttcaaagtcaacgaagcgggttcctctgacatgctgcgtaacggtatgaccgaccgcatcatgggtatggcaatccgtcattccgatcctatcagcctggtagccaaaggttctggcgcaggttatctcaccaatggcgcggtgggggctggctctaccggtattgcgctggataccggcactggcacaatcctgtcaggcgatatcgttacgctgaacggtgataccaacaagtacgtggttaactctgcgcttgctggcggcgctattgctatcggtaagcctggtttactgctggacgctgctgatggcgctgcgttgaccgtcggcaacagctacacgccgaacgtggcgtttgcgcgctcagcaatcgttctggcgactcgcgccccagcgaagcctgaaggcggtgatgctgctgacgataccacgatcatcactgacccagtaaccggcctgtcgttcgaaattgcggtatatcgtcagttcttgcaggttgtctatcacgtccgtctggcgtggggctatcgtgcgattaagagtgagcatattgctctgctggctggctaa

SEQ ID NO: 83065 - DNA, 606 bp, Citrobacter koseri
atgaagcgtgctgagcttaataacgtccagattgcaactgcagacggtaatgttaccgtctataactacgatggtgagacgcgggaatacctttcctcatcggttgaatacttagccgttggcgttgggttgcctgctaactcctgcattgacgcaccaggtgtcagcaaagaaggttttgctatttgccgtactgctgattcaggctcatgggaatacgttatcgatcatcgtggtgaaatcgtctatagcattgaaacaggtgaagcggtcactatcacggtgccgggtgattacccggaatgggctactacattggctcctgcgactgcatatgatacctggaacggtagcgcgtgggtgacggatacagaagagctgcacgctgcggaaattgttgcagcagagcagcagaaagctgccttgctggtcgaggcaaaggctgcaatcagcctctggcagaccgaactacagttagacattatcagcgataaagataaagccagccttatcgagtggctggcttatatcaaacgtctacaagctgtcgacacgtctgcggcaccagatattatctggcctgatcctcctgtagtgcaggcttaa

SEQ ID NO: 83066 - DNA, 666 bp, Citrobacter koseri
atgaagaacctgatccccccgattaataccccggataacttatttcatgacgggaacccggtgactggtgagcttggcacactcgttacagcagaatggctgaataattatcagggcgcaacgcgtgacctccagtccgagctgctgagtattctggccgaggcgaacattaaccctgaatcctcggcattgcagcttttgaccgcaattcgtgctctcacattatcgcgttccaatccgttcggtgacatcaaaaatgacggtgctgcggcaatatcaaaggctctcgaaaacctcggtttgggagaactggcaaaaacgccccgtttcctcgtgagtaaggggcagaacgcaaacgggtggtatgagatttatagcgacggctttaaacgagtagggaaaatgtgggatagctcaaacccgcttttaatcagcactcctgcaacgggagcaagagttaactatccgatcagttttacgacgcaatttaacgggatctatgtcactgagaacgggaatacgaataacaattttgagtttgctaaccccgcccaaatcggcatgactggatttagcatggcaacaatggacataacgcttggctcgtccccctcaacggcttacggatcgtcatttacagggtattacactgcggaggggtattaa

SEQ ID NO: 83067 - DNA, 210 bp, Citrobacter koseri
atggctgacaaattgatccgcgttaattcccgcgtaagcgtgatggcaagtcaggtggcgtatgttgaagcacctgagtttcgcgatgaggtttacgtccatctggttgatggccgcgttgagtatcttgagttttccatgcgtaacgacagatggcgtgcaaaagacagctttgaaaaggcagttaacgatgccttaaacgggggttaa

SEQ ID NO: 83068 - DNA, 297 bp, Citrobacter koseri
atgacagaaaataaaatacctgagccgattctggagaatctccggaaatatgatacccaccataacgccacctgtcttaactgcggttatagtggcctgatgggatataccgggaattcatgtccgtggtatctctcctggatagctattctggccgttgttcttgtatttagttattttattcccctgccaatggttgcgattgttccggcagttattcttggcggtgccaaagctattatgacaaagaaaaatgtgacctgtccgtcctgtaatactgatttactgacaaagtaa

SEQ ID NO: 83069 - DNA, 246 bp, Citrobacter koseri
atgagtaagtcagctaaagaaatgtatgcggtgcctgactggatgcgtcagtacctgcctctctttcacaacactggaggcaataccgttgaggagctgttgcacgacgatgacactaatatgttcgccaacagtattcgctacatgttgatcgtttcagtacgttcacagttcagcattctcatggagctttacaacaaagggctgattgcggctgacgggatggagggatcatggaaaaactga

SEQ ID NO: 83070 - DNA, 225 bp, Citrobacter koseri
atgaaaactgagtacagcgataaaggtacaacggcgacggtaaccatcaccagtaccgtgtttgagttcagaaagcataaccgtgtggttgatacagcgcttttctcgacattcggaatagttgcaaagcgcagtggaatgttcttaatgaagacagttttatccgggagaacccgcgacgttctgcgggcataccagaccattcagcgggaggccgggagatga

SEQ ID NO: 83071 - DNA, 513 bp, Citrobacter koseri
atggcaataacacttcatgattccgtcgtggttgaaggtcgccagtggtatctgcaaaaggtggacttcagcctggatgacaaaaccttcagcacgtatttctatgcccttagccgtgagcacgcttcatacatgtttgaagccattaaatcgaacggccagctgggcgatgagattgtggcgacttacaacctgaactcagcagaagccctcccggttatgacctcggtagctttgcaggatgttattgctgaacgtcagcgtcagcaatctgtggagggattcacaccgcaacgggatgacacctacaccgcatgcgaactggcagctgctgcgatcagttacatcgaaccaatgatggcggaaagttactggcctgctgactggctcgatgacagttttaaaccatctgactaccgcagaaacctggtaaaagctgccgcattaatcctggcagaaatcgaacgccttgaccgcgcagccagtatccgcaagcacatcaacgggagctaa

SEQ ID NO: 83072 - DNA, 1029 bp, Citrobacter koseri
atggctatggaagttcacgggtttattatttcgtctccgttcgtgttcgtctgcgatggtaaggtttatcgcagccaatcggggaaaaactggacggtcatatttagccgttacggtacgcaagcctgggggaatgatacctatgcttcccagcgcgttgaccgtgcttgcccgccaaatcgtaacgaagaagttcgtttggctttccgtggcgcagttatgcgccacttcaagctgaactacacccaaattgaggcattcttccagcgtcagatcgacgaggacaagcaaatcctggtcgaaggaaattcggttaaacgccatgtgggtggccgcagcagctacagcacaggcagtagcagcacgacgttatctgctcccgcgcccgctccagtcaaaaaggaatccccccatccagcgcttaaacatggttgtccagcaagtcgtttggaagaattcctagcctgggaaaaagcgcaccttgggattttgaatcgtgtcaaaatgccccagcgcgttgccatgttcctgggaacctgggaagaaccgaatgcggtcaaacctgaacccgtggtggtcgaagaaccccaggctgaagaacctcgagccgaacggtcgctggctgaagaacgcgaacataaagaagatgtacccttctatggccgtcgccgtcgtgatcaggggaaattccgtgaagatgtgatgcttaactgcggtggccgttgcgtctacacaaatgccattgcggtacgctgcgaagccgcacaccttaaagcccacgctcgcaaaggtggcgcgagctttaaaaacggtctgctgctgcgcgctgatatccacaagctctttgacgcgggactatgtgccatcgatccgcacacgcttaaactctggttcgcgccagacctggtaaaaaaagacgcagatctcgcggccattgatgggataacgatgcgcaaaacgctgctccctatcaacaaagacaacatcgaagaccgctgggatgccttcgttaagatcttgctggcatga

SEQ ID NO: 83073 - DNA, 1074 bp, Citrobacter koseri
ttgataagctattttctgcgctcactaattgactgggtcttcaggaaacggtctgtaggcctagctctagtgagaattggagtaccgctctttgcagtggttcttacaggattgactcttggtgtgacaataccttcatcccaaggcaactatattttcagctgggactcttccggtagtgctggcgcgctaagttggggcgtgtttatcattgctatcataatcgtcttcttaggaatttcactgattgtccgagatatccgtagtgaaagcagaaagaaagtgatcgttattgaagcaagagggctgagagattaccagggacaacctttagcttccgcagttcctttatcaatacagggacgccgtgaacaggtgacaattgaccttagaaaggggggaatggccgatggtgcgatcctcagtcccgatgcagcaatacgtcggctgacgaacctcccagacgacttagctcgaaggtgtgatgggctcgacaggtcagatatatcattcgtactcggtggacttgcaccagttccatttctctttttgctcggtgtcattgtcgatgatgagtctcgaacattaatcatggactgggatcggagacagcatacctggcgagcgcttactgatgaagatgatggtaaccgtttcgttgtaacagggcttgatgccataaacactactgtaaaacgggtagctctctgcgtgtctgcatcttacgatgttcttgaagctgatgtgcaaatggttgaaagtgatgttccaatcatcaaagcagatttagtaggacgtaatactcattctcactggtcggaatctaagcagcagcatctcgcgcagcagtttctggatattgtcatgactttagcacagcaaggtattgttgaaatatcgctatttctggcggcccccgcgagtctcacgctgcgattgggtactatctacgacaaacgtaatctccctcgtatcgaagttaaccaatatgaagcaagtgaccctaagcgatttccctgggcggttcgaatgcccgtagccggtttgccccatgcagagttgatgcaacgataa

SEQ ID NO: 83074 - DNA, 465 bp, Citrobacter koseri
atgcaggttgagatcgctgaaaatgtcaaaggcaagctgcgtaaagccctcaaagccgctggcagcagagaaattggtggtgtgatgatgggagaacaaattgctccgggccattttcgagttgttgacctgtcgattgatagtcagactggcgggaaagctcattttgttcgcgattcagagacacataacgaagccctaaatgctttttttcacagtacagggcatcaatatgatcgattcaactaccttggagaatggcactctcatccccgtttctcagtcacaccgagctctcaggacgtttactcaatgaccgatttggttgaaggggaaagaggaatcgagtttgctgtattgctaatcgtccggttgcgatggtggcgaaggcttactctatcttgtactttattctgtcgaaacactaacccttcagttgttgaagttttggagtcatcatcttga

SEQ ID NO: 83075 - DNA, 1719 bp, Citrobacter koseri
atgatttggtgggttgatcagtctatccgtgtgcagtccgaacgtaccgccatttcggatctagaagagcggaatacatggctcactaatataaagtggcatgtagtcagtaacttgcgacttgctgctgactttgatttgcaagttgcagaacgtctaattccgttaacaattacataccccgaatatttccctgatgttcctccttcagtcgttccacgggatgggaaacgtttgtctgatcatcaatatggagaggctggagaactttgtttacagtttcgctcagataattggactcccgaaatcaccggcgcaatgatgattgaaagtgcctatcgtttacttttatccgaacaggagactggggaacccgctccatcagaacatcgagtccttccctctcagcgggcaagaaatgccgtatttcgtttcctttactctccaagagtctttgaaggtttgttgatggtagaagagggtcaggtggtcgatgcggaaattcaagagcacctttatgctggtgcttttgcagctcagcttacacgaattggacctgtagatgattctatgtggatcgcaccgaacaggcgtggttacggggcgagtactgtagcgactaagattatccgtgtgcccgaaggcgcatcagtcgcgtacgacaatcttgatgaactggttacattgcttgaaagccacaacttcgaatctgtgctccccgaattattacaggtatcaggtcctttagggcttattcttttcaatggcactaatcatcaggtctcaatggcttacggtgcttcagacaatcgcaagctggtcaactacgacaaaattattgttgatattgaccgtgtgcgtcttgctcccgagtttgctcgtcttaaaactgcgaaagttgcaatagtcggttgcggatccgttgggtcaaaagtagccgtacatctcgctcgatctggtgttgggcaatttgtactcgttgatggagatttacttgcttcagggaatctggttcgcaacgagttagattggcgggccgttggtatgcataaatcacaagcactggcagccaggcttaaggaagtcaatgccgaatgcgaagttattagccgcactacagttttaggtgggcaagagagtggaggagcaacttctgcaacgatgagatatatcgcagagagcgatttaatcatagacgcaaccgctgacccagtggttttcaatctttgcgcatcaatttcacgaagggcaaagaaaccgatttgctgggcacaagtgttcggcggtggggcggggggtatagtcgttcggctacgcccgggtatagaccccacgccacttaccgccagacagcggatagaaaactggtattccgagcagggcatagcctggcctgaaagcgagatttcgcagccatactcacaacttgatgcctctggggaaccgctaattgcagatgacgccgatgtttccgttattgcagcgcacttatctcgttatgcaactgatcttctcgtccgccccaattcgacaattttcccttattccgtctaccttatcggaatgactgacagctggatattcaccgccccatttgacgttagaccaattgatcttggagaaagtgatggatgggatatagaaatacaaccagtagatcccgaggcttaccagcaattgctagccgacttgttccccggagaaaatgatgcaggttga

SEQ ID NO: 83076 - DNA, 1206 bp, Citrobacter koseri
atgccaacaaaaaacgccgaagattttctcaccgcactagccgaggaacttgcaatcagtgactcacgatacgagcaggcatgtcggagctatacatcacttggagaatggcttcaccgtccggagtccgccgttgccaaatacgatccacaagtttacgtacagggttcattccgactgggtacagcgattcgtcctttgaatgatgcagaggagtacgatgtagattctgtttgcttactccaaagcctcggtaccaaggatcttactcagtgtaatttaaagactctggtcggcgatgagatcaaagcttatcgtaaagctcaaaatatggttaagcccgttcgtgaaggccggcgctgctgggttctggactatgcagacggcgcccaatttcacatggatgtcgtcccctctctccctaacgctacccagcaacgtatattacttgagacttatggctacgatctcaaatggtccgagacagcaatggtcattactgatatcgaatctcctgattaccaggtgctttctgataattggcagcgatcaaatcccaagggatatgctgagtggttcaaaatgcggatgagagatgtttttgaacagcggagaaaaatgcttgcggaatcaatcaaagctagtgtcgaggagatccctgactacaaagttcggaccccgctccagtcagcgataatgatcttgaaacgccaccgtgacggtatgtttgaaaagcgttacgacgagcgccctatatcgatcattattactacccttgccgcgcatgcttataatggtgaagtaaagatagccgatgctctctattcaatcctttctcgaatggactcgtttatcgaacgtgatggggatcgttatatcattcgtaacccttccgaccccctcgaaaatttcgcggataaatggccgaatcatcctgagagaaaagatgcgttctacgagtggctcgaccaggctcggcaagattttggaaatttagcacatcagattgaaaaacgccgcttagttgaaagcgtccgacctcatatgggagcggtagcagacagagctgcaacacgccttagccctacgccaggatcaatgttgcaaccagcaacaggagttgcagctctgggggttgctgcagcgagcacaccggcatttccaaatactcgtcgggagccaacttcaccaaaggggtttgcatga

SEQ ID NO: 83077 - DNA, 603 bp, Citrobacter koseri
atgataaacttaattccaatagggaaagttatatccttgattgctgtggtctatgcagttatatgctgtctgattatatggattttatgggttgtattcgataaaaatataagtttttcctctgctatatcaattgcaacagggggctcactacttctcaatgcccttttattatcacttttttactttggttggcgccggctatggaaagctttgcctatattaaacgatctgctcttccctgatttaaatggaacctgggatatggttatccattgggaatggggagataaaaaaggtacatcacgagctaatgcaacgattaagcaatcctttcttaaaattggaatggatgttgaagctgaaggctcagactcacagacgttagtggctaaacctaagaaggatgaagaaactgggcgagcagtactctattatgtctttttaacaactcctaaacataaagcaaattttgacgaggaagctccgtatagaggaacggcaattcttaaactaagcctaaaaggtaaacgcatacttaatgggaactacttcacaagccgtaaaactgttggtcattacgagttgacacgtattgagtaa

SEQ ID NO: 83078 - DNA, 327 bp, Citrobacter koseri
atgaacaagatttttactgcactgtttatttcgctcatcccgcttgtcagcgctcatgccggactggttcaggttgaaaaccgggtgagctgttatctggcactggacggcaatgaagggcttatgaagtccagtggaagtgacatcgcctttaccaaaagctggctgcacaacgagctggcccgccacggcgttgaccaggaatccattaatgaaaactctgacgctctggaaaataagcttccccgggcttaccagaaggcagctttcgccgataaatgcgtcagctattacagctcctccgccaaccgcaaaggcgatgaatag

SEQ ID NO: 83079 - DNA, 435 bp, Citrobacter koseri
gtgaccccttgttcacccacactgcatcagcccacgcttgaccttcccctgagtggcgagtttatcgcactgataaccactcacctcgcggcactgcctgacacatgtcagggcgtcgtgctgaactttcgtgacccggagtacagcgccgaaaacggtggctggcacccggtagaaattcgccttatccgcaacgagcagcctgaaatatggcaactggattacctcaccgacttcagctggcagggccttgtctggcccgaactggcaaaggaatttgatatctgctggtcgcagcgctatgcctggcactaccttatcggagagctgccgcttaaccatgagctgagcaagttctggacgctctggcagggaaattttgtggcgtactgcgcgatggatgccttcaccatcactgtttccccggactgctga

SEQ ID NO: 83080 - DNA, 1230 bp, Citrobacter koseri
atgtttaaaacaatcacggcaaatgacctgattaataaaatggagcaggaccctgatatcgccagtctaaaaaaaattaaactgcagtattttttgagggtgatgtatgcatgtaaaatggcgggcggttttactactgctgataagggacattcagtgcttgatattttaacaagggatgacgctttgaataccgtggcatttatgttgaattctctcagcaaccggaaggaaggaaagaaagggtatttttatcgtaacttcccctgtaattatataagcatttatagttccagtatcgaacccatagttgcttcacatgggaagtatattttcgatcttgaagttatagttaagacactcatttcagaacttaatggagaagaatttctgattcagctgcatgaaaaagtgttagctcaaggtaacgtattttccttttttccggaaaaggtgaatgatgcatctgaacatgtgcttaatttaaattacatcaaaatggtcagtgagcggtttttggaaggggtgggtatttttgatgaaaagctgaatacagtaaacaggattcacattaccgatgtactttcacgccttttggggcttacgactgaatgccagcagaacagaggggatacagagatgtgtaagtccctaaagcaaaagaataaggtgcatttttttgagcgaaaagtcgctttcgacacaatgttcacatttgttctactgagcaaagtactggaggcgataaagcgtgcaaacgtacttcagcctgtggacgctaaggtagcgatgcctggtagtccacttcaggtactcattgatgagaattttacaaaagattcgttctttatcattaaagagcagcgcaaattattaatgaaggtggtgtggtactgttcattgttgcgcctacaggataagcagaaaagcattctggatgagaataatcgctatttgtcacccgatgttattaatcatatttatcgcaatgtatcctggctggactcgaactcaacccggaccgcgcagtatttctggacattaacaaaggatgcgatggacggaaaatcacgcagccatcttcacagaatttcggctgaacggtattaccagccgcctgtttcactgattgagctcagcacaagagcggggatcaaaaaattcatgggcgaacactttgaccccgataacatcctctggagaacatctaaacctaaaaaggccgaatag

SEQ ID NO: 83081 - DNA, 855 bp, Citrobacter koseri
atgaccctggctgaactctgccatatataccttcagcataccagagggtataagaaatccagccataccgataagtctaagatctcgaattatattgtaccacaattaggtgacatagagattttaaatattacgcggctaaagattcaaagctatattaacggactgacacatcttaagtgttcaacccgtaacagacatcttaatttaatcaaggcgatatattcatttgctgtggagtttggctatatggatatatctcctgtggccggaatgcggacttttaaagaacctgcatccttacgcaaaacacttgaaccagaggagttctcctcattaattcgggtgcttaaagaggaagtggttgcagaaccacgcgatacgctgagtcttattatgctgctggctttcaccggaatgcgtctgggggaagcacgtgctgctctgattgaagatataaactttaaacagagtacgctctttttaagagacagtaaatccggtgattccagactggtgccactttgttgtgacgcaaaggaaattttacgtatgcagcagagtaaatatggagcgacaggtttaatttttcgctcgatgaaggggggaatggtcagtgagcctcgcagattaatggcaaagctctgtgagaaggctgggattcgcaaatgcctcttgcatgaattgcgctacaccgcaggcagtgcaatgttagcggcaactaataacatttatgccgtaaaggtattcctcggtcatcggaatataaagacgacggagagatatatatcattctttcgcggccagcaacatgaagatgttgaaaaggcgatgaccctgatgctgaaagactga

SEQ ID NO: 83082 - DNA, 1773 bp, Citrobacter koseri
atgtcaaacgtgaacagcaaagcagcagaatacatgttaccggaaggttttatcgaagagaatggtaccgtttatttttgtcatgaagatgacgataagaaaaaaattgtgtccagccaatcgctcaaacctgtggcgaaagcctgtaaccgcacccgcaacggtaactggcaaattattctgaaatgcacgaatcatagcggtgctgaagctgacataactatcagcctgaaaaaggctaaaaaaaatgctgattctgtcatcagtcagcttgccgggaagggcgtctttgtccaggacagcaaactatttctgatgttcctggaaaagtcctgtgagctgaatttgccactcttccgcgtggctataagaccgggttttcagcctgaggagctggtgttccagtttggtccatatcccatttttgttgctgaacgagaggggatacaggatgtgatcccgaatgaggatatggcgattaatgatgccattgctgtctcgggttcgcttaagcaatggcaggaacagattgctcagaaggtatgcggtatggcacccaaattgtcgattctggtggggctgagttcatcacttctccctctattgggcgaaagtggcgcaattttccatctgtgtggtgacagttcgacgggcaaaactgctgcgatccaggctggagccagtgtgaatggccttgcagctgaacccggaagcggtagtccgacccaaattcagcgctggaacagcacgtcaaacggactggaattactgatggtgatgaataacggaaccacgttgtgcctggatgagctgggttccttcactggcaagttttttgccgagacgctgtatgacgttgtttctggagtaacgaagtcgagaatggacggcgagactctggggatggcccgacaatcaacgtgggtgcagaatgtgctttcgaccggcgagttaaccattgtagacagaattcggcaggagaagtctcctgtgatggacggcatgttgcatcgcgccttgtctattcctgtcacggcagaggattcccgtggcgtgaatgaagacattgatgctgcccgacagcgcattggtgacataaaaaccagtctactgaccttccatggtagtgctggttatgaattcattcgttgcctgacgggctttgccgatgaagagggtaagtattttgactggaaagcgacctctgattttctgaaagcagacctggatgtcatgcttgatgagatgaaacgacgtttacatgcaggcctgatcacccttaattctgttgagtgcagggctctccagcgttttgcaatcctctatcttgcgggtgctctggcatcagagtggcaaatcctgccatgggaaaaagaagagatcgccgatgtggtttacgtagcttttaaccgttggttgcagaactatcgttctgatgcgggccgtaagcagaacgtcctgattaccgttcagaacttcattgcagtgagccggtcaaaatttattgatgcgaaaatgccctgttttgcgtcccgtaaaaccgatactactgggtatattctaaatgacgggagctatttgatactgccggacacccttgagaaacttggcatgaactggggcttgtctgcgaaaaaactggcccgcttaattgacgaagaaggttatctgacccgcccggaaggcgatcgtctgacgacacgccggaccatacaaaaagtgaacgtgacggggtattgcttatccgccgaatttgccacagccaatttctga

SEQ ID NO: 83083 - DNA, 5094 bp, Citrobacter koseri
atgagtgaaaacctgaaagatcaaagcaatcctttttcgactggaggtggaggggttaactttgaaactcgcatacaggcatcatttgcgttggcgctgctggctggcatttccgttccaggtctacctcttacggctaaagcgcgtgaactgaagtttcaagcaaaatatgatgatgtacatactgatgatttcgttttggtcgcgaatgataaagacggaaacgactataagctttgtgctcaaattaaacatacgatcacgataagtgcgcaggattcgatgttttcggaagttatcaaaagtgcgtgggaagattttatagcaccagacatagatagaagaatagacgcgcttgctttgatcacaggtccgctgtcgagaaaggatattaatagtactttacccatccttgagtgggctcgctattcttcttcggcggaagagtttattaagaaatccacgacaaaaggtttcaccagtaaagataagcttgagaaactcgatgcatttaaaattcagctaaaagtagccaataataatcaagatctaacagaagaagaactttggcaatttctgaaaattttctacttactgtcatttgatcttgattcaaaaaattctgttgtgggcaatatgatggggggacttatccgttctcactccgatgaagctccatacttggtagtggcgaggctcattacgtgcgtccaggagtttaatcagaatgcaggaacaatgactttatctaatattcctcctgatctgagcatgctctttcagccggttgtatcatctgctctcaatgaagacattagaaagctacgtgagcgtggtgattatatttttgagggcatttcaacctcaataggtggaattcatataccacgagacgaggatgtttcaagaatagaggatgctttcagcgcaaaccaatttatttttgtcactggagagagaggcgctggaaaatcaggtgtcgtgaaagactttatctcaaccagacagaataatatggcgattttctatttgcgagctgaagacttagataaaagtcacttaaatgacgtattttcagctattggaatgaactctacattagaacggattgcagagcatctatctttgattgagaataaggtgttggtgattgaatcagcggagaaaatactggaattaaataatcaggctgcctttacagatttactgaaatttatcaaatcacaaggggactggatagttattgcaacagggcgagactacgcttaccagaaactgtcattcggttatttacaattgtgccaaatatcctttgccaccgtaaacattgaaggtttctccgacatacagctaaatagactttgctctgaagctacggtactcagatcgttggttgaaaatgattcgttggcatcaattatcaaaataccctttttcctagaactagctatgcgtgcattaagcaatggcgcaacatttgacaaaagtgatacggaatcggaatttcgcaacacagtatggagttcggtaattgctaatgattcttaccgaaaggggggcttacctgccaagcggagggcaacgttcattgagattgcgaagaagcgggcaaaattaatgctttttggagttcatgaaaaggattttgacgccgaagcagtctttgcactggaagccgatcatttaatttccaaagataagggagcgtacattagccctagtcatgatgtgcttgaagactgggcgttggaggaatttgtcaacgaagaatattgtgcatgttctggtgaacctaaagcatttctagctgctattggaagtgagcctgcaattaatcgaggtttccgattatggttacaaaggaagctaaatactgatgttgaactgagagattttatagacttaatacttgctgacgcatcagtcgaaagctattggaaagatgaaactatcactgccatccttcagagtgacagtgctgatgatttcttcctagcactcaagcctctattgcttaagaataataatgaattactgctcaggtttatgttcatccttcgtattacttgccaacgcccctgggatctgggactgaaaatcgcaaataatgtcgatgtgtcatttcagacgcaaattttacaaccatacggacatggatgggcggcattgattaaatttatatatgaaacccgggaaaaattggtggagatatctttaccaagtgtcgttgagacactcagtatctggagcgatgggcaaaacaggcaaaaggatctttcagaggaggccagaactgttggattgttaagcctctatctccttgagccgataaaagatgcctatagaaaggaaaagattaggatcaaaattctgggtgtcatattaaaaacattccctgcgatacaggatgaattcaagaatcagattgagcaggatgtttttttgccaaagcgtgactcagataggctggcttatattgatgaactatgtcagttaatactacaaggcgatagtgccattgaattatgtaaagagtctcctgattttgttatccgattggcttatcaggaatgggtaaaagaacatgaagttgatttgtttggtcaacgttactcgatggatatcgaagcatcgtatgggttggattctgaacatgattactcttctgcaagtggaataaaagggccgttcaaatatttatttatatttcacccaagaaaaaccctcgattttatgattagttttttcaatcgagcagtcactgtctttgccgagtccagacatgctatagcagtggataatatatctcctcataaatggctaaatcaaactgcgttgaacaaggttgaaattaaactcaacaatggatcatcgatttatcaattcgcctccccacagctatggaatggctatcgaggtttctcaacacttcctggagtcctgcaatgtgccttgatggcttttgaaaattggctcatgacctatgtggaaaaaaatcgggccagtagcgaaattgattggatatttaatcatgtcctcactacgagtaattcggtaatgcctactgccgttctggcttcagtagcaactgcttttccaaataaaatcggtgaggccgcgcttcctttgctcaaatgcagtgaactctacatattagatatttgtcggcaaagcaaagagaaatttgaaggtagattttttagtggtgggtttaattcagacccattatcaaatctttatatgaaggaacgaaaaatagcatccgatcgcccttgtcgaaaacaaagcttagaacatttgcttttggcctttcagctcaacccggaattaagcgatagggcgctgatgatcgtcgatgaattacaagcacaggcggcggcaactcaggatgaaaatctgcgattcatgcttcatcgtgcagattctcgtggtttgagcattgtaaaggatcagggaactaacagcatttaccttcagacgaaggcggagttgcctcaagatttaataaaagtgaaggctgacttcgatcagcagcgaaaacttgatttgaggatacaaaaattgtctgtgtgggccaggaaagcttgggacgaacgtgtgtttgatacttcctggtatgctacccatcttgatgcgctcgatgaagcgagaaatttattgttaatgctacaagatgatgctgctgttactgagtttggtcagatggcagtcggtgccatcaggacagcttcagcgctgtgcttgcgagatgaacttgaaaagcttagtgaagataattttgaatgggttgttcacattgttttggacgcagtaatacaacatgctgacgctattgatagctctgctgctagtgatgcgactgatagttttggatcggttgcatgcgcatacgttctccttaggctttttgaatttgactggggcgaggaagatttcactactttaaaatatcatgtagcttgcgctctaacacatgctaaccatcatgtacgtatagcagtatccaggggtatagcagcgtatttgtggcaggaaaatcctgattttgctgccttttgcatgcggtcagttattgactatagccgattcgaagaggaagtacttcagccaaaacgctatcgacaatatcaggatcaatttaagtctcgtactgaagagctaagcaaagatatctgttgttttcgaacggaattttcggaaggaaagagctacggtgaaagtgaattagaatctgtgaatgagcgagaacttgagaaggtctatttgtctgtgttgatgattccagtaggtagtaaatattcagaacattctgagttactcagaaaagtggtcgaatatgtatatgatcatcagtataggaataacaatgatcggaatgcagtccatctaagtgacattgtggagagtactatccgtaaatgcttggtggagcatgtggtaggtgcgcgatattcaaattttgaaaatatgcgcgatctcttgctcctagggtgctctaaagccccatcatttacacatcttgttaagctttcgtgcgatatagccatggagaaattgcaggattttgactctatttgggctctttggcaggtacttgagcccggattgatagccattgctcagaatgatgtaacgacgcgattttctggaagagaacatgatctcaatcagttcttacgtggaatgctatatatgggttttcgtgacaacggccatccaagcaatatgatttgtctggaaaaaggggcagaacacttactcaattttatgtctaagaacggtgaaaatagtcatgtttatgaagcattatgttcattgatttaccattttcctcagatgttttttgccgatggtatcggtattgcgatggaaaaatatgaagggaattctgatataatccacatgcaggtaaactcagcttattatttggagatgtcgcttgctcgatatttgcaagttgaaaaccgtggatcattaactcgcaaaatgcacaaagtatgtctgactttgttgacaggtattgttgaattagggtctgcacgagcctattatttgcgggataacctcgtcagcgctcgacgaatttccaattga

SEQ ID NO: 83084 - DNA, 4098 bp, Citrobacter koseri
atgactgatgattccctcccccttcatcccggttcctatgttcggaaaaacgtccttgatcctcgtgggctcacggttactgaggtggcgaagttgatcggcgttagccgcccgggcctatcgaattttctcaatgggaaggtatctgcaacgcccgatatggcagcacgtcttgaacgtgctttcgggatttccgccaaggccattctcgatttgcagacagaatatgacgcgcagggtgataaaacggcaggcgcagctcaaaaggcgcgtacttacgtgcccccttttttaaatgtccaagccaacgatctcgtaaattggttcacaacgacaattcttgcgcgcactaagctgtcggtgctgctgcgaacgctcattcactccacgggacgtgatcttcagaaagtagatttccccggtaacgacgatgccgagcgtgccggctgggatggcttcattgaggccagttccggcacaccttggataccttctggtgcctctgggtgggagttcggtgtcaccgcggacataaaagccaaggcagacggggattttgcaaaaagcgtccgggctatcaagagcgctgaaagggcaaatattacgtttgtctttgtcactccaaggcggtggccgggtaagacggcttgggtcgcggatatgaagagcaaaaagctttggaaagacattcgtgcatacgacgccagtgatcttgagcagtggatggagcaatcactcgcggcccagacctggtttgcgaaccagacggatcgtccttctaatggtgtcagaaccttagagcgttgctggagcgattgggcaaacgtagcggcccccgcgcttcatccttctctttttactacggcgaatgaggcgtggaacggcaagatcaaatccttcctggcgaaagacgatgcgaatcccttagtaatagcggctgattccgttgaagaggcgctggcgtttttaaatcaagtcttggccccccccgagtttgaacagtatagggatcgggtgttggtattcgacaaggcaggagtactcccgaaactcgcccaaggcactaccgatttcattgcagtagcccatacgcgggaagtggagcgtgagcttgggccctacagcacatcgctgcgaaccattgttgtttatccccgcaatgctactagcgtggagcctcatgtcgtgttggagccgctcgggttcgagccgttcactaaagctctggaagcgatgggaaaatcgcgcgatgacatagcgaaactaactaacgcctcggggcgttcgttgacggttcttcgacgtcaactctcgaatattccggcaatccacactcctgcttgggctgaagatccaagaatcgcatcggggattgttccgcttgttcttgtcggcgcatgggacgctcagaacaaggcggatcaaactatcctgtcccatctggctgaggcaccttttgaggtgttggaaaagcgcattcttgatttgttgcggctcaacgattctccagtctggtcaattggtgggtatcggggggtgatttcgaaaatcgactccctcttcgcaattgcgggcacggtctccaaggctgatcttgaccgctttcttgacgttgcgcggactgtactgggtgaagatgatcctgccctcgacttgcccgagaaagatcgttgggcggcggccattcatggcaaaagacgagagttctcgggggctgtgcgagaaggcgtttccgagactttggttttgctggctgtgtacggcaagaatctcttcgggaagcaccttggctttgatggggaatttgaagccgcgaaaatcgtgcgtgatcttcttgtgcctgtaacgactagaaagctagaggctaatgggcgcgaccttccactttatgcagaagctgctcccgccgagtttcttgatatcatcgagcgtgatctgcgagcagaaaagtccgaagtcatgggcttgctgaggcctaccgataccgggatttttggctcatgtccgcgcactggactgctttgggctctcgaaggacttgcttggaatccgaccacctttccgcgggtagtgaagattttgggccagctttctgaggtagagattaacgataactgggcaaataagcctatcgaatcgcttggctccattcttcgtgcatggatgccgcagacggcggcaaaccacgagatgcgcctgaaggcggtcagcatgcttttggataagcacccggcggtcgggtggagggtttgcctccagcagttcggtgattacggcagtggcgtcggcggctatagccataagccgaagtggcgtcctgacggctacgggtttggggagcctttcaaaacatggggaccaatccatgcattcgtcagagagatggtaaaagtcgcgctaagcaggccgtcctacactgtcgagatgttatgcgaccttgtgtcaaggctgcatgcactcgcggcggaggatcaggcgcgcgtatgggagattatcgacgagtggcgcaactcgggcgcgcttgacgaggaagttgcgaagatccgcgagaaaattcgtgtgactgttctctctcgccgggggcgtaaaaaggtcaatgaggaaggccaagcgagcctgacggagaaagccaaggcagtctatgcggagttgcagcccaaggacattgtgaataagtatgaatggctgtttcggcagggatgggttgaggagtcggcagacgaactcgcaggagacgagatggacttccgagcacgtgagcaacgcatagaaaagctccgcgttgaagccctgacagacattgtgcaagaacgaggtattccgggcattctcgcactctctgaaaaaggaaattcccaacgccaaatcggtgctcacctggtgtccggcatacttaccgacgagcagattgaagatttgatcttgcaatgcctgcgtccggcagaaaattattcgggtcgtgatggcattgtcgccggcgcgctctggtcgttggacgaggataggagaaaggccatatatgcgggcctgcgggataaagtggtcgaagaggaaacgctccgtctcttgttgctttcaccttaccgggcttctacgtgggtgcttgtagatcaactttcggctgaagctcggagtcgttactgggttgaagtagttccacaatatgtttttgactcgcctgaggaaaacaatgagagcgttcgccgcctgcttgaagtcgaacgtccgagggcagccttcgcatcaatacatttcaagcttgaagaaatacacccacctctccttgtgcagactctatctgccatggcgaaaaatagtcaggataaagctggggagtaccagctgcacgactacgatgtacggcgcgccttccagcttctcaatcgcaactcagacctcactctagaggaaaaagctggtctggaattcgcatatttagaggttctggctcgctctttccgagggggagaccagcagcagattccaaaccttgagcgctacattgaggaacatcctgaactattcgtgcaggctgtagtgtgggcctataagcgcaaggatcgtggcgaagatcccgccgagtttcgcattacagaaggtcgcgagcatatggcacagcgcgggtaccgcctccttgaagccattgaacgtatccctggtcaagataaagcaactaaagaggaacagcaggaaaagctcgcagaatgggttgcaacggtaaggcggtcttgtgctgaacttgaccgcgcggagatcgcggacgtgtgccttggaaagctattctctaacgcaccggctggcgaggatggcgcgtggccgaacgaagctgttcgcgatgtgatggaggatctacggtctgaggacatcagcagcggcgcacatacgggtttatacaacgcgcgcggcgtccattggcgcggggaaggcggtggtcaggagcgggagcttgcagacaagtatcgcgcctgggccgacaccttgcaatttacgcatcccttcgtggcgtcatcgttgctgatgtcgatggtcaatacgtatgagcgtgaagctgagcaacacgatactgaagccggtatccgtcgtcggttaaggcattaa

SEQ ID NO: 83085 - DNA, 429 bp, Citrobacter koseri
atgtctaggactccctatacacggttacgcattgagggcttccgcaaagcagaggcttccctgagacttgaaggaatggaccccagtggtacgccactgtacgagtccgttaaggcacgtattatttcaggcgagctgacgtatgagcaggggcggtctgagatttttgcatactacataaaatcagatacctccgggtctgtgaccgtgggagaaatgctggcagaagaattcttaaaaccgctgaacatgtctaatgatgaactagcggaagctatgggtatttgccgacaggatattgaagatatcatctacggtcggcgtcgtcttagggatgatgaggctcgcgttcttgctgctatatttggtactgatgaagacttctggagtaatctgcagacgttgcaagatcggaagaaacgacggtag

SEQ ID NO: 83086 - DNA, 762 bp, Citrobacter koseri
atgacaactggtaataaagtggcacccacaagtacagcttggcaagcccgagtaattctgtaccagccaagccagcgtcctaaggaggtgaagggacaatggatggagacaagtttcggacgttgtcgtgttaccggacggctcggacagcgtcatgccgatatcgtagagacaatattatatgttgccgagcaacgtcgtgaaatttctgatggtggaatcgaattattagtagatccagcgaaagtacgccgaacgctatccgatgcacaatacagttatggtcgtatacagaaattgcttgtagatctgcgcgtcgcaacagttgaaattataacgccagagctggagaaaagcggcgactgtataatagggggactgatcgatcatgtagtgccatcacctatgacgcgtccagatcctttgactgggggagaacgtcgtttatggcgtgtccgtctgggtgttgcattagcgatgttactcaaaaaagatttgccattttattatcatcctggccccatagctcggctacaacatggtattagccaggcagtcgctcgtcatgtcttaacccataggaataatcctttaggagggtggtatatggatacgttgatattagcagtgtgcggtgaaggaacgagtaatatgactttacgtaactatcgtcggagattgaaagaagattccgtgcaattgctggaaattggaattgatttgaacggttctaggataaaacgtgtcacaacggcccgatag

SEQ ID NO: 83087 - DNA, 300 bp, Citrobacter koseri
gtgcatgatattttattgaattctggaactttttttgtttctttgtttgtactatttactacttctttcactgtgaaatttcaattgaattttctgaaaataactaaagatgaattcttagggctttttagtagatttgagtcggaattggattctgttaatttgtccgaagcaagagataagtttgatattttctcatctcaggttggattgataaagaaattattgttatttatactctcaatgagtataactaatttccttataaatattgtttcctttgttatagtactcatatag

SEQ ID NO: 83088 - DNA, 339 bp, Citrobacter koseri
atgttcagaacagaagacatcatcgatgaggtaacgcaatggattgattcaaacttacataagccgctgaagatagaggatgttgctgcgcgggcaggatactccagatggcatcttcaacggatttttgtgcaggtgaaagaagttagccttgggaagtacataagagatacgaaacttagacttgcagcaaaagatcttattgatactaatgaatcaattatggagatcgcttataagtatggattcgattcccaacagacatttacgagggtcttttccaaaatttatgaatgtccacctttgaaatatcgcaacaaaaataaattaatcagatag

SEQ ID NO: 83089 - DNA, 651 bp, Citrobacter koseri
atgatgttacttctgctggtgctgatgggatttcaccttcacggcgaaatcgtgcatgaatgggtaggaattatttttacgctgctcatcatgttgcatttataccttaaccgacatcgactatggtcactgtcgccgaatattccgttaacgatgcaggtcgttaacaggatcattaatgcagtgactttcgttgtcatcctgaccgctattgtctctggcatgatgctgtcccgacatattcttctggcgctgccgtttcacaacccggcgaactgggtcagaaaagtacacatgacgtcggtccattggggaatgctcgttctggcgctgcatattgggttgcactggaaaatgctggccacttttttctgccagatcctgaacatctccggcagctcacacgttgtaaatatcattatgccaggtgttttttcgctcatcgcactactgggattgtacgggttgctgaacacggactatctcgattatttgctgatgaaagtcgatttctcctttttcgattacgatgaatctgcccttcttttttatttccgctacctggccattattgttttatttgcattaatgacgcgatttttgctttggtcgtttatttttagaaaatgcaaagcgatgtccccccaatag

SEQ ID NO: 83090 - DNA, 657 bp, Citrobacter koseri
gtgagaataaaaaaagtatttagcgtgtttctggtgatgattattattgggcttatgggacagcctgcgttcgccgcagagagttcatccacatcgtcccgcacgctgattatctatttttcccaacccgaggaaatgaagcccgaagccgttgatggtttttccggggccagcgtattacaaaaaaacacgccggagaccggcagcacgcagtttgttgcgctgttgattcagaaacagactcacggtgacctgtttcgcattgaaaccgctacctcctatcctcgccagcatgatgctctgttacgcgttgccgaaaaggaacagcaaactaacgccaggccctcactcaaaacgccgctccccgatctcagcgattacgacaccatttacgttggctatcccatctggtggtataccatgccaatggtgatatatagcctctttgagcaaaatgactttgccggtaaaacggtcatcccctttaccacccatggcggcagccggttagccgactccctgcgacaaatagcccgcatgcagccgcaggccagattagtcactcgtgcgctatcaatctctcgcaatgatgtttcaggccctgacgtacccgcgcaggttgagcaatgggtaaaacaagttcagccacagcgttaa

SEQ ID NO: 83091 - DNA, 579 bp, Citrobacter koseri
atgacaaccacctacaatgcaaaccctaactacgaaatgcacccgttaattatcagtgatattaatgagcatcttgatgcgatgtttaatcgttactcacgtcttttggctgtaagaattgatttcggctggagaaagaacagtgttcgatatcaaaaacagagtatcgatgcaatggcaaaagacatgcataatctgattaatgggattaaagccaacaaatcaataacaggctattactgggtcatcgaatgttcatctgataaagggttacatgtccatactgtattttatctgaacggacaaaaacacaataatccttacatgttggttcggatgattggagatgagtgggcagtatgtaccgataatgagggatacttccatcattgcagaaataaaaaagagtttgttgccagcgttgagcgtgttgtcgatcatcgcaacccggaagatataaataacctgagatatattattagttatctggcaaaaaacagtcaaaaaggtatgggtgtgtatgtggacaagaacaacatacctttaagaagtaatcgtggaagaccacgtcagttctga

SEQ ID NO: 83092 - DNA, 225 bp, Citrobacter koseri
atgctacaaaatcgaactttccgcattgctaatagtgaatattaccacctaaagaattttttatacaagacagagccttcatctgagatcactgatgatattgtcattaagcaggatggttttagcgtagaagcacgtgtgattaagcaggcggtgcaagagttgttgatgccttacttaacggtcagaagactggtagggaggacaacttgtggagataattga

SEQ ID NO: 83093 - DNA, 1143 bp, Citrobacter koseri
atgacgttgatggagtatgagcgttgcagaaagtactatcagtatgtgaggtatctgactgagcatatcggtgtggctgttgatatgaaaatcgtcagttctttctgttcaccggcgcagtacgcgcaattaattcattcgaaattagatcagtgttttgataattcatctcagaaaagaaaagctctaagtgaaatgaagtcgtatgccacattgcatattgtgtctgaaaaaaaattcgactggatgaaatcaaacagacgcgttgcttgttttgcgtggttttggatttttagtaaacttggtttagaactgaaaaaacttaacttaacaaataataacactgcagcatctaatgcaataccctcattcttcactgaggagatgttggggcagtattcaagcgatatagactttgaggcattaaagaaacatcagagcaaaaaattagatgaaaataacgttaaaccgaatgacaggacatacataaatgatgcgagagtgccgggtgctcatgaggcgaacattgtatcccgcagcgcaaacggtatagatttcgaaagacttatccctgtacatgactcaaaagaaaattatgtgctatccctgatgaaggaaattgatagctttaactgcgatgtaaatgaaaaaattaaaatcattaacgaactctatcattcttgggtaaatacctttaatgaattccctttgccattttcttggattgatctggatgaagatgaaaatgtctactggttatggaattatatgtataagagctatgtcggttgtgatgtacagccagccaccagcaggcaaatgaaggattttgctattgcgacctttgactgctggactggctggaatgtagaacaggctgatattatgaatgtccaggagggtatgtttacgccaggcaggaaaaaaagtaagcaggaattcctcgcgcgaggccgcaattcctggatacaaaaacgccatcgggataaaaaatcaaaagatagttcaggtattaaactgacagcgcaatctaaaaagaaattaatgtctttgcataaagccactggcattgaaccaaatatattactaaaatcgtttattgatgaagcatggaaaaaaatgatatccgatgtaaaggaataa

SEQ ID NO: 83094 - DNA, 864 bp, Citrobacter koseri
atgcataactcagataatgttcaaacaattcaacaaactctgtcggctctaccagagtgggtatcggaacgtattctgcaacacataaataacctgacaaattacgaaccggttatagggattatgggtaaaactggagccggtaaatccagtctgtgcaatgcactcttttctggggatgtatcgccggtcagtgatgtggccgcctgtacgcgtgaggtactgcactttcgtctgcaagtcggtgagcgtctgatgacgatcgttgaccttcccggtgtgggggaaagcagctcccgcgatgctgaatatgctgcgctttaccagcaacagcttccccggctggatctggtgctgtggctgattaaggctgatgatcgggctctggcggtggatgaacatttttaccggcaggtgattggtgaagcataccggcataaggtgttgtttgttatcagccagtcagataaagctgaacccatcagcggtagtggtcaattgtccacggagcagaagcagaacatcagccgaaaaatctgcctgctgcatgatttgtttcagcccgtacatcccgtgtgtgcggtgtcggtgcggctgcagtgggggctgcgggtgatggccgggcggatgataaagtgcctaccgcgtgaggccagcagtcccgtggtggcgcaactgcagcctccctttcgcacaaaagcagtccaggaaaaagcgcgtgacgattttggtgaaaccgtcggggcggcactggatgcggtgagtgccctgccgctgataccagctccggtgcgagcagtcatacgcgcggtgcgcgatacagtggtgtcggttgcccgtaccgtctggaacttcttcttctga

SEQ ID NO: 83095 - DNA, 459 bp, Citrobacter koseri
atgacaacagcgacacagtgcgacctcatacccgctaacgaatccgaatttgaactaactgtaatgcaggtacccgacgaacagcgtattcgcttctggccgcagcactttggcgctatcccgcagtggataacgctggaaccccgcattttcgcctggatggaccgcttttgtgatgagtacagcggtggtatctggtccttttacacgctcagcaatggcggcgcgtttatggcccctgatgctgacagtgacgataaatggcgtctgttcaacagcatgaacggcaatggtgcggatatgagtacagaagccgcaggtatcgcggtctgcctgattgaatacagccatcacgcctgccgtacagagtgtgacgcaatgaccgcgcactattaccgcctgcgggactatgtcctgcagcatcctgaagcccacgccattttgcgtatcattgactga

SEQ ID NO: 83096 - DNA, 153 bp, Citrobacter koseri
gtgatcgaacgtctggcggcgcagggcgctcagggcgtgattttcggctgtaccgagattgggttgctggtgccggaagcgcagagcgcgctgccggtgtttgatactgcggcgatccatgcggctgacgccgtggagtttatgctttcgtaa

SEQ ID NO: 83097 - DNA, 423 bp, Citrobacter koseri
atgaaaaagaaactaatgattgttgctctggctctgttaccttttacggtcagcgcggaaggcaatccttacctttttgattttgtacaaggcaaagaaacaggaggggcttataagacccttattgccagacacaatctgccatcgtgggtaaaagatggaggtacgagcacgcctgcaaatgaaataaccattgatgggcgtaagtatctcgccttatctggctgcaagcctcataactgccctgcgcaatcaatagctatcctttattctgtagataaaggagatatccacggtgtcttctctgaatatgatattacatctgagcaacaaaaactgacatggctgaaccttgagccgacaggttcagatgtgatgagaaatattttattcgcccggctgaatggcgatgtatcaaactga

SEQ ID NO: 83098 - DNA, 537 bp, Citrobacter koseri
atgcaacaccttaaaaatctgacgaaatacactcctgatgacgcatataatctgtttttgatggacgagcataatgcggaatttttcatctctgatgatggacgtgactggtatgagtcccaggctgattttctaccggatacactgaaagttgcttacgataaatcaggagttatttgctgtatcagcaaagatgtttcgagcatttacccgcgtgatttcagcgtcgtagaagtcgaaattaccccggaaaatcaggatgtggacattatgggaggatgggtgttcaaagacggtaaaattcagccgcgccagtattctcaggaagaattgatagcacaagcggaagcaaagaaagctgagttgctctcggtggctacgactgcaatttccccccttcaggatgcttttgatcttggtatggcaaccgatgaagaaactgcgctgttgcttgaatggaaaaagtatcgcgtgttaattagtcgcatcaggccagatgacgctccggatattaagtgggctgaacgacctacttaa

SEQ ID NO: 83099 - DNA, 975 bp, Citrobacter koseri
atggcaaacctacctgaaaccccgcagtgggaagacggcatctaccagattgaggtctccgaccccgtactgggcggacctgacggaatctctaaccgtcaggctaaacagctggccagccgtacttcataccttaaacagaaagttgaaaaaggcggacaggatcttgccgatcacattgcggcagctgacccgcatagccagtatgcaccgaagtccagcccaacctttaccggaaatccggcagcgccgaccgtagtcaaaacggacaacagcaccaaactggccactacggcacatgtcaaaatggttgttgccgactatgctccgctttccagtccggggctaacaggtaagccaacagctccgaccgcagcacaagcatctaatgatacgcaactggccactactgcttttgttaaagctgcgatagcagcactggtcgcatcatccccggcagcacttgacacacttaatgaactggcagcagcactgggcaatgatcctaactttgctaccaccatgacaaacgcgctggcaggtaagcaaccgctggataatacgcttactgcattatcaggaaaatctgtcgcggctcttctcgaataccttggtttgggagatttagccaaagcaggtgttggcaatgggctgatcgccacaaatggatacgccacacttcccgtgattattggcggagaaaaaaaggttcttatcattcaatggggaactacgagcacaacaggtagtgacggaaaggctactgctacgtttcctgtttcatttacgcgaccccctttttatttaggcctgacagaaacaaccggggaagcatccggcattggttctgtatgcgtgtggtcaaaagagatcacatccaccaccacaaccggttttgcggcgctggcgtcaaaaccctgggcatcggcgtttacagccggtgaagccgcaaattatctcgcggtaggattctaa

SEQ ID NO: 83100 - DNA, 1605 bp, Citrobacter koseri
atggcagaacaacattcatcagcatggtcacctttacgtaaccgtgtttttttcatgttatggatagccacactcttttccaatatcgggacctggatgaatgatgttggcgccggttggttgatgaccaatttaagcccggaccctgtcatgattgccgctattcaggcaatgaccacgctgcccgtattcttgctggcgttaccggcgggggccattgcggatattttcgacaagagaaagttacttattcttgttaatattatgatgctgtgtgccgcatctctgctcgcaattatcgtctattttaatgttgtcagtatcggatggttattattcatcacgtttattctcggatccggcgccgcgtttttaggcccggcatggcaggccattgtacctgctattgttgaacctcatgaattaaaatccgggattgcgttaaatagtatgggtattaacatcagccgggcgatcgggcccgcgctggccggtattttgatttcacaggtcggtctttatcttccttttcttctgaatgcgttgagttttattgcgattattgctgcggtatggtggtggaaaggagaagaaaaaacgaacgggagtcttccggctgaatctgttgttgccgcaatggtttcaggtttgcgttatgcccgttacagccctgaattaatgagaacaataataaaggctgccagcttctttgtttttgccagcgcgtattgggcaatgctcccgttggtggtgagactctcacttcagggagatgcaacattatatggcgtgttaacaaccagtatcgggatcggcgctgtctgtggcgcattcagtttgcccgcgctgcgtaagcgactcagtgccggcgctcttattacctcaggaacattcggtactgctgccgtattactgatattcgccggagcagcatctcaatatgccgccattttcgccagtattgtggctggtttcagctggattattaccttgtcaacgctcatgatatcagcccagacagcgctcccggactgggttcgcgcaagagggctggccttatacctgaccgtgttttccgggtcaatggcattcggttctctggtctggggacaaattgcctcgcatacgtcagtaaccacagcattactttctgccgcaatcggtattgtcgttgtctggttatgcgtattaaaggtaaaaattgaccatgacaatattaacttgcagcattcagatcactttagccttgctgaggacggtcttaatgatattaccggccataccggtccgatgctggtgtctgtttattatcatgtcgatgctgaaaagaatggccaatttatcagtttgatgaaaaagttaaaaaatatccggttaagggatggcggttacgcctggggactgtttgtggttcctgagaaatccaatgaatttattgaaacattcatggtgtcgtcattggctgaacatctgcgtcagcacgacagagcgactgtcgatgacagacaaatacagcaacagctggatgacatcattctggataaaaaagcaacacactatttttctgcgagtgtagcggaatcctttgtcatacaagaggaataa

SEQ ID NO: 83101 - DNA, 1014 bp, Citrobacter koseri
atggcgaaattaaatagatttatcgtccatcaatttactcgagacgcagggaagcatgcgtctctaatacctcgttcggaagaaaacaacctcgatgaaataacagatgaagtaggtattacattattaaacttatttaataaaacggggctaaaatctggtttttttgatcaagaaggtgggattacaaagtttgaacagactctagaaaaaaattatgatgggcttaaagatttttctgactttcggacgatgacaatagaaatgtcttatctgcttttggatgaattaaatcaaggttcaggtaaggcagccaaacctgggtatattgtttttttcaattatgaaagtaattcaaatcaattcttgtcgatagtaactttacaagaaacacaaggaatgattttagaaaatctctcattcaaacatattgaacgactagatcttgatcgtttgcaccttggcgcgaggatcaatcttacctcatggtccgaaggcttagctcaacggtttatatcttttaggatcgggcgaaattccgaaatgcgagattatttttctcgttttataggttgtaaggaatttactgcttctaaaattgaaacagctacgcttgttagtgccattaaaaaatgctgtgatgagctttatattgataatatagatgctataaacgaaaaattgtctttggcaaattcttattgtaaagaaaatattaatgaagaaggtaaagttaacatagaatacttaggccgttttcttttccctgaaaatgaaggttatcttcttgagatagttcaaaatgaaccgtttaatcttagttgtgaagttagtatcgataaacgggaactaagagggctcgtccgctataaaggtaaatcaaaaaagatgagtattagttttgatgcagacctccttgattctaaagtgttttatagtgaaaagggtttgttgtttgcagaaattcctgcggaactgaaattggaattagacaaacgagaatcagcaaaataa

SEQ ID NO: 83102 - DNA, 1215 bp, Citrobacter koseri
atgaagctcaatgccagacaggtagagactgccaagccaaaagataaaccccacaagttagcggatggtgggggcatgtatctggaggtgttcccgaacggcaccaaaagctggcgcatgaaataccgcatcgcaggtaaagaaaaacgtgtggtgtttggcgtctacccgaccataaccttagccgatgccagaagcaaaagagatgatgctaaaaagctgctggttaatggcgttgatccgagtacgtttaagcaagaaagcaaacaagcccacatcgaagaagtcaaaaacacctttcagcaaattgcactcgaatggcacagcatgaaagtgaagaaatggtctgcggggtatgcctctgacattcttgaagccttcaacaaagatgtcttcccgttcattggtcaacgtcctgttgcagacatcaagccgttggaactgctgaacgtgcttaaaaagatggaagaccgaggtgcgactgagaaagccaagaaagtgcgtcaacgctgcggcgaagtgtttcgctatgccattgtgacaggcagagccgagtataatcccgcgcctgatctcaccagtgccatgcaggggcatgaatctacacattacccgtttctgactactgaagagcttcctgctttctttaaagcccttgctggctactctggtagtgaactgatggtgctggcagcgagattgcttatcattactggcctgagaacaggtgaattgcgtggtgcgttatggtcagaaatcgataccaagaaagcgctatgggaaatttccgctgaacgcatgaaaatgcgtcgtccccatatcatcccgctctctacccaagcgttagccattatcgaacagatcagaacaatgacggggcaatttcctttactgtttccgggacgcaatgatccaagtaagaccatgagtgaagccagtatcaatcaggtatttaagcgaattggctatacaggccgggttacgggtcacggcttccgtcataccatgagcaccgttcttcatgaacagggctacaacacagcgtggattgaaacccaactggcacatgttgataagaatgctatccgtggcacctacaatcatgcgcaataccttgatggtagacgtgagatgctgcaatggtattcagactatatggaaagtcttgagaacaacggcaatgtggtgcagggagcgtttaatcggcgtggataa

SEQ ID NO: 83103 - DNA, 291 bp, Citrobacter koseri
atgtctaaaaaaaatggtgttgaaaataaatctacagagttgttccttgatcttgctattagatcgtttgaagcaagttgggagttttttcagaaagtgaatggagagagcatcgagttgcttgatgagcccgattttatgagtctattcattatgtatattattgaccatatccagaataactttgagagattcacaacccaagaagggaatagtggttatattggtgaggttaacgttgagcaagttgcggaaatgttggtatggtattcggatagctttagaaaataa

SEQ ID NO: 83104 - DNA, 366 bp, Citrobacter koseri
gtgaaagagattgtattaaatgaaaagaatgaaacggtaatatatcttatcgaaaatgtattacagggatattgtgaaacgatttataacatatttgaaaaagaacctgaaacagcaatcaatattttattagggcagatgcattcagagatactttatgacgttctgattgcgcacgaagttgataagtgtggagaggatggggaatgtaaagacgtatctgacattaacgttgatgatttaaaagaagagattttgtattggcaccaagagcatattattgcgcttgtattaaaaaacataaagcaggataaaaatgaagatcctatttattggaaacttaaaatgacagtgaaccgacgctaa

SEQ ID NO: 83105 - DNA, 378 bp, Citrobacter koseri
atgagaaaactgtttatcgctgcgttggtgatcctgcctcttaccgcttgcactacctatggcaacaaatcccttaaagatgaatcccaacaaaccgtaaaaaacaaaatcgttaaagggaaaacaacccagcaagatgttattaatgcattcggggaaccacaaacacgggcaaccaatgatggtcaggaaatgtggtcctactctagcatgtcaggcgaaagccagatctcgaactacatccccggtctggccctgctgaagaacagcaacacggctcacatgaactcccttgagatctggttcaaagggaatgttgttgaccgatataatttcagccagacggcgagtaaggtttcgaaaggattgttggattaa

SEQ ID NO: 83106 - DNA, 1428 bp, Citrobacter koseri
atggcgatttttcatctggagtttaaaattgtgaaacgttctgagggtatgtcttcctgtaggaaggctgcctaccatgtgcgttgcagaataacagatgatcgcacaggtaatacttatgacttcagccacagaacagatttatttcatcatcagatattagcacctgtttccgcccctgctcatattattgatagttccactgccttatggaatgaggtagaaaaggttgagcgtcagaaagacggtcaaacagcccgttattttgatgtcgctattccatgtgagctgaacaatgaagataaaataaaactggtcgttgaatactgccagaaaaatttcgttgataagggcatgattgctgatatcgcttttcatgatcttgacggtaaaaacccccatgctcatgtgatgttgacattaaaaccgatcactcctgatggcttcggtaaaaaagaaagaagctggaatgacaagaaaaacgtgatcctatggcgtcaagcgtggtccaccctcaccaatcgttatcttgaagccgcaggcgctgaagaacgtatcgaccaccgctctattgatactcaatacaatgaagcactcgaaaatgccactatcaccttagacatggaagaaaaagcgctatggcttgccaaggctacgttaaccagccgcccagctatgcaacgtgttcatcgtgccaagtggaacagtaagagcgctcagaaaaaacgtgctgctgaacaggctgttcgtaatgagatcaaacaggaagctcaggctacctaccacacctttaaagatctggaccagcagatcgttgttgaccttagaagcttcaccgtatcagaaatgcctgagcctgttgaaatcgtattgcctgaaatacaacctcgaacagagttctctgaaacaggttcgcagtcagcatcatcagaaagccaaaaacccgttctggttgcccctgcgccacatacacgcactaaattgaaaaccccatcctcttcaactgccagagcaattaaacgtactcctgttaaaagtaagaggaaacaggttaaacctcgtcaggatggtatatttaaacgtttcgcgctgttggtaataggatatataaaagagaaattcgtctgggccaagaagaagcccgtcgctcctgatgttgagcacgataagcgtgttgctgaaaattacgtgtttgatgaggtgctggggatctatgttccacgcgctgaacatgaaagacgcataaggttcaacagtgattattacaagcctaccaaggatgagattagacgtttcccaagtcgtcctaaagaggaacaacacgaagcagacagcaatcttgactatccctctgctccaccgtcagtatcaggaagaagcaggaatcatccatcgctcagaccattgccatatgataaaaatagataa

SEQ ID NO: 83107 - DNA, 555 bp, Citrobacter koseri
atgaagaagattttgctcgttgctggtgccgctcttgttctggcgggatgtgatgagaaaggcgactttgaaaaggctatcaacgcgaacatttcaaaatcaaaggtgtgctactcactgcagaacaatgactttgcgttcaacaaaggttttccagtaagggttaatcatggctaccgttctgctggatacaatgtcagcgatgaaatcctaagagggcttgttgagcagggtctgcttaatgtttctcaacagcctaacggttttagtagtgttgatgttctggaagtaacagacaagggacaagaggttgatttttggaaccgtgaggaaggtgcctgcgtgggccatcgtgctgttgttgagatcaccagttggactgaaccgagtgatggcgctggcgctaaaatcacacaagtgacctatacgtggaaactggatggcgttccgggctgggttgataaaaatgcgttctctgacgtgaaggggatggctgaaccagaagaagccaaaattgttctggtcaagaccaataacggctggaaagctaactaa

SEQ ID NO: 83108 - DNA, 249 bp, Citrobacter koseri
atgctggataaacttaccggaatgcgggccttcgtggttgtggttcagacaggctcttttgtcgcggcctcagacagactcggtatgtcgcctcagatggtggcccgccatatcggcacacttgagaagcagcttgaaacacgcctgcttaaccgaacaacgcgcaggcaaagcctgacgccggcaggctcgctgtactacaggcgttgtgaaacaattttacaggccatcgacagtgctgaccggtaa

SEQ ID NO: 83109 - DNA, 489 bp, Citrobacter koseri
atgaataatgggcaagatgacattaagcgtgaagcgaacgttcattcatggttatatggagtagggataacgggagttatttcagggattggttatatattcacgccaggggaaatgccgattcgtttaattgtcagtgcgttactttttttactgcttttgtttcctaatgtaaaagtggttttttactttatttcaagcggcctcagatgtaaggcttgtaatgcttcatatagtattaaactaatagatactaaaagagagtttttatcagccatacccagaagtaaaactcaaaaccaaggcgtggttggtggagatacaagaggccctcattgtggaaagcaggcaattataaaatcaacctggacagaagagcgatataacattactaatatttattcgtgtattaaatgtggcaatacctatgatactcagcgtatggaaacacgaaaacaaggatattctagtacaaaattttatcgctaa

SEQ ID NO: 83110 - DNA, 183 bp, Citrobacter koseri
atggaaaaagtaaccctgagaagtaaagaccaactggcggtgatcgcgttccttgaaacaaacaatctcgccgctgtcgcccgtcgctatctgccagattatgacgagcatcctgatattcaggccgcagacgacttgttagaaagcgccgctggcatccagtctatcgaaggagaaggataa

SEQ ID NO: 83111 - DNA, 456 bp, Citrobacter koseri
atgactaataaccagttaacaggcctcggcgcaggtcatccggcaaacagcccgcttaccattgatcggttaaccaacgttcgcgacgtgttacatcgcaatctcaaatactcaaatggcggaagtatggattacatcatcgctgacgctgtgaaagcgattgatgaactgctggtgtcgcggggcactgagccggtatttttcattgaagttgaaggagatgactgggttcaggcaggcaggattccaggctcaacgtttgatttcaatgacctgcctgatggcatcgttaatctctacaccgccgcgccagcgccggtagagccattgaccgatgaacagatcgacgatgtgctcgattctcgcggcaatattttatacgtcattgccgacaaaagggagcgcctgcgtatgtttgcgcgtgaaatcctccgcgctgcaatgggggtgaaatag

SEQ ID NO: 83112 - DNA, 1233 bp, Citrobacter koseri
atgccgaaaaaagccaaagagctcaccggactcgcagttgctaagttaaaaaaagaaggctcttttgccgtcggtggcgttgacggcctgtatcttcgaaacagaggccagtcgcgttcatgggtgctttgcgttgctatgggggtaagagttaacacgctaggaagaaccgttccaagacgtttaaacatgggtcttggcccctaccctgaagtttcattagcagaggcgcgtgacaaagctcgtgagctgcgtaaacaaatccgtaatggcattgacccccttgcagaaaaacacgctcataaagcgcatcaggaacgtctggcgcataagaacaaatcctttgccagttgcgccgaagacgtcatcgcaattaagagtaaagagctaaagaaccagaaacacattgctcaatggcgatccactctggaaacctatgcttatcctgtcattggtcaaaagccgattactgagattactaaggttgacctgctagcgatacttgaaccaatctggttaacaaaaaacgaaactgccagccgtcttcgcggtcgcattgaagcgatcatcgattacgcaaaagcgaaagaatactttgaaggtgataaccctgccgcgtggaaaggtatgctcaaacctctcctgccaatgccaagtaaggttcagcaacaaaagcatcatgcagccctgccttacattgagatcaaatccttcatctctgaactgcagaaacgagcaggcatttcagcacgagcacttgagttttcaatactgacagtttcacgttctggtgaagtccgtggtgctgaatggtcagaaatagatctgaaaagtaaaacatggactattcccggcagtagaatgaaggccgggaaagaacaccgtgttccactgtctgatgctgccattaccctgctaaaggatttaccgcgctttaaagacaataattatgtattccctgccccgcgtggaggaatgctttctgatatgtcattactggctgtattgaaacggatggggcacagtggtttaacgcagcatggattccgttccacgtttcgtgattgggctggtgaaaccacagaccatcaacgcgaagtaattgaacatgcgttagcacaccagttggcagataaggctgaagcagcataccaacgagggacgttatggcctaaacgggttgcattgatggatgaatggacatcctactgtaatagccataccattaactaa

SEQ ID NO: 83113 - DNA, 579 bp, Citrobacter koseri
atgttatcattcgccaagcttcaagagaatcatgataaaagattggagcatgaacaaatcgacagtatactttctattgttaagcatgaaacaatatctcggatcgaaaaattacaacaaactcatgatgaattaaccgaagaatcatttgcccatccctcagatgtagatagctatagagatatgcttattgaagacatgattgagacagataatcttcaaaagatcgcagaagagctagcaataatgtctttgttcaaaaatatagagattaaaatatcaaatgttgtaaagcgattgaaaccaaataagtttaaaagaaatttagggaagactattagctgcataatacctaacattaaagatatgatgggtttcgattcttataatgaattgagacttataaataacgctataaagcatgatgggaaagtaacccaagaattatctctcaactatcctcaatggatagaaggtgacacattaaaagaattggattgcgcctataatcgcctattacccggaagtaaagcgttcgttagaaacgttgtcaccgaaatatataacagtgatgaataa

SEQ ID NO: 83114 - DNA, 1557 bp, Citrobacter koseri
atgaaaaaacaaaataagaaagggttctcattactggaactcattttggtgctgggtgtcggtagtatgatggcttttatgcgttttcaggatatgaaaaatgaacaggaaatggtgattgctaaggctgttggtcaacaaatgaagcagataggggaggcggtcaatggttatatcaatatccgctatgataaactttctacgctgacatcgagcagcagccagtcaagtgatccgggtccaagaacgtgtgatagttctggttgtgaaatcacttatcagacgcttattaatgaaggattattgccagcatcatataccggggtcaatgcccagaaatcctcttacaagatactgttaaaacgttcaggaatcactcctaactatgtggttaatggtctaatcacaacaactttgccttggagtgagggtggaaaatttcgctatgacttattaggtaaagctatgcaagaagctggtattgatagcggaatgacgcaatcagcaactgtggtattagggctgcagggggcgtggaaagaaacatcaacggattacagtaatatcaccagtgcaggtcttatggcctatcgtgttggatatgattctgcgatgtattctgtttatctgcgtcgtgacggaacattgccgatgaccggcgatttgaatatggggggcaatgatattagtaatgccgcagatattacagcgtcaggaacagcgacagcagcaacgttaaaatcaacgggagcgaccagcgtcggttcaacgcttacagtgggaggtgcttccacgtttgccggagcgatgcaggtgaataatacagtcacctcaacaggtaatataactgcaggcggtcaactcatcggccataacggtggtggtgatgcttatgttattggtggtggcgatggtaacgattatgaattcagattaggttcaaataagcctctgacattatggcgttccggtggttccagttctgaaactcgctttcagatctggggaaatcaaaataatgctggtgattttgtcattgttgcgggaagtgatggtaatactaccggaagtattaccgcttccggcaatatcagagggaaaacacttgaatccacaggcagggcgacagttggtgagtttttacaggttaatggatgggctgctataggtgatacgtgctctcccaacggactacagggacatgcttcatcaggaatgccaatatattgtgttgatggtaaatggcagtcgatcgggtcaatggtaaggattgtcacggtttctcaaaatgctgcggatgccgtaacgatgacttgtaatagcaatgaagttgctgttggcggtggaggaaagtctaacaatggtgttggttttaccgatgttcaggggaagtatgctgcgccggggatagacatatcaatgccagcaggtgctggaacaacgggagtagcccctacgggcacggtgcccgacagatgggtgctgagtggtgtgcacaatgctaccaataatcccgaaaacttagttgggtttgttgtatgtatgagaaagtggtga

SEQ ID NO: 83115 - DNA, 735 bp, Citrobacter koseri
atgaggtttgatgtgtttcccataaaaatagacgttgaaaaattcaactcaatgattgacaaaattcttgagagatttgagaaagacgattatcactcatgggattttatcaatcggttatctgaaaatggttgggttcctccgatatcttttgattgttatgaatattttcaatgttcatctaacgagttatcagatgaagaatttgaacaaggattaatggatttctttgaagaaaaccttgagaatgtatttttaaaaatcataaatcttgaagagtatcataacccattcatacataaaatgttgcaagaagtggttcaggcttacaagcaagagctttatcaaatatgtataccttctttatttgcaatcctggagaggtatttggctgacctctcaaatgatggtgatttgaataaggttaggtatggtgcggggttaggcaaaaaaatatggatagaaactgatcacagtgataagtatattgaatcctgtcaagaaataccgggtagatttatccatagctgttatttaatcaagagctttatagataaatatttcactagtattaattttgaagattttgactcactgaacagacatgcttttgcacatgggcgacagcgatatttcggaactcgcttggatactattaaattgatatttattattacaaatatcattaatatgtatcatgaaattgaattcattactgtcgaggtaaaagattaa

SEQ ID NO: 83116 - DNA, 279 bp, Citrobacter koseri
atggttgtaaaactggataatgatgtggagaactgcgctcattttaattcactagcattcaaagatttgcgttttttcatgaggggtggtggtgggcttaatgcacgttgcatagtcatttattctccgggttacccggaagataaaaaatccaaatcgtatttaaaaagtgtacttgatagaaaccctacaggaataatacgttggtataccgcattttgggatgaatataccttttatgaggatacgggaaaaaaactgattccgttgaaagattga

SEQ ID NO: 83117 - DNA, 1029 bp, Citrobacter koseri
atgagcgttaaagatattaaaaatacctatgaggggctcgaccttgtagcaactatcaaggattctaaacaaggctgttacctgcttcaggatttgaacctgttcgctaaaggctcctctagcgtccctaatgcccgtgtgagtgatattactgatgcggaagattccaaactggaaaccgtgtcgcgctacggcaccgacaccaaccaccagaaagcggcgaccgctgttttccgtgatgccgagatcccagtcgtacatgagactgcctttgtgcgcccgcatgattggcaggggctgatcagtccaacaactaatcaggatatggcaatcactgaagttatcagcaagcgtgctgtacagttcgaaaaggattatcgccgaactgtggaaacttctctggcggaggccctctttgagcgtaaggtgagcgcaccccataccgatgacggcgacatctccttcgatcaggtgttcgggacctccccggcttccttcaccctggatgcttccgtggatgcctctatttaccaacaactttctaaactgcgtcgccaggtttcccaggcgctaggcgcggcccgcaactatagcgaccgtctgtatgtcctgtgtgattctagtctctatgatgtcattgccaccaacaaagagatccaagcatttattctgcacagcgtccagcaggcgcagatctccggcgtggttatccctaacgcgcttagtggttttaataccatgtcgctgggtcctgtaacctttgtcgatctggctggtgaccctacttacaaggtgagtgagaactccggtctggttgtcccacgtatgaccgactccgattactcatttttgcgcaaaatttcagggccatgcagcagaaatcaaagcctggccgtcaaggggggcgttaaggatcgctacgcctggaccagcgtagacgatgacgggatgattaaaatgcagtcagagttttctctgttgcctcttctgcttcgtcctcagtggcttacaactatcacgctgaagtaa

SEQ ID NO: 83118 - DNA, 360 bp, Citrobacter koseri
atgcgtacttctgagtcgttccccaaacgaatgtcagatgtgctggttaacagcgcctccgacctcttctcccgcaccgagatcaaaggggccactgtcccagcggatctattctgtggcgatgtattcaatgctgaaacctacgaattgttcgatcaggctgtcgagggctcccctctgatctgtctggtagatgtctccgcaggcgacaataagacaatcgttgtggttgacagattggcatgtgtgaacacgttcaacctccgcgccaaagatgccgcctccctgaaagaagcaatcaagcgactaacggcagatggttctattcgtattggcaataacaacagcatggaggcttaa

SEQ ID NO: 83119 - DNA, 171 bp, Citrobacter koseri
atgccgcccttgctaatctggctctctctcaccctcgcagggtgggggggaggtgtaaacctcttttttgtggtcactcacccgccagcgtcacgggagcaaccgccagccgatgggcaaataaccacaaaaaagaacccggaaggagacaccgggatgaaggcaatgtaa

SEQ ID NO: 83120 - DNA, 426 bp, Citrobacter koseri
atgagtatttaccttgatgttggaaaaatggttgaacgtatcgatcagcgcgatctgagccgctccaccctttacgctcaacgtagccgcttcaggtctgccgggcgtaccgctgaagcagaagcaatcggcaaggcactggagatgaccagtaaccgcgcctctgccgtattacgacagtctcagcgcctcgcagggaaaattacagagatggacgcagaaaaggcattagagcttaaagcagccgttgctctattcgcttcccagtctacagatctgcaagcctccattgtgttggcgttccaatccctatttgaggctaaaggcgtcccgatggaatacaacgaggtgatggccttcattctgttgaatgcggcggatcagtttgagcgtatgactggagagcttcctgtaattgtacattaa

SEQ ID NO: 83121 - DNA, 246 bp, Citrobacter koseri
atgagcaaatatcagccttacgcagatttgagtgattcccctgtgttgtctgcgtatgcacagcagactatcaaccagttggactcaaccctgttcgaagacatttacgaaatgttgacgcaggttagcctctcccaaatggtgacgattggcaacccagcgatcaccgccccggcgtcatggtggggtgattggttcggcctcaacctcaccgctgtagaaatcgcagaattacaggagttttaa

SEQ ID NO: 83122 - DNA, 306 bp, Citrobacter koseri
atgaacggtctaactatcccgtttgaacatttccagaccaacaagatcgccggggcaaatttcactcctgtgatgaaacttgtttatttctttcttgatgccaataagaaccaggacggagttattcatatttcccaaacagatctcgcgaatatggttggcgtcactcgcccaacaatagggaaggtgattaatagtctaaaagaaatgggcttgttggcgaaatctgaacaggtggcgggcaatgacatcctgaattataagacattacctattcggcaatatgggcatggttatagcaaataa

SEQ ID NO: 83123 - DNA, 171 bp, Citrobacter koseri
atgaaaatcgatttcccgaaagagcaagccgatcagttatatgcactggtaagggcgggcggtggcgctccccattccatcgttaaacaggcgttaaccgcctaccttaaaaaccaccctcttttagtcgcttccgcagaaggaaaacagaatgacagcaacagcaagtaa

SEQ ID NO: 83124 - DNA, 606 bp, Citrobacter koseri
atgacagcaacagcaagtaaaccgtttaccgccattcgccacgaactggcagatattgaaaagatcaacggtaaagtgtttaccatgaacatggtttacacctatgcactgatcgagggctaccagagcaatgggcagaccgcctatttctctcaggagcttttatcccgccgtttgggcctgactgaccgatcaattaggaatttgcttcgggacatggtggcgatgggcctgatcaacaagactgggcagatcagcggcaagacttgccgttacactgtaaacccaatcacccccgagatgttgggcacagtagaagcggaacagccaacagaagccgcacagcgagccgtagtgcccccggaagaagtgcggaaacccaactacacggcggaagccgaagaggtgcccacagcggcggagattgagcctgtagcgccagcatctacagcgccgatcacattggtggaggtttacagtgagaaggtggaaacggtggaccaaacagatccccaaaccggggaggtggttttagtggtgacgccatacccaagaggcgaagtcaaggagccgtcgagagagtgggatttagacccagctttttga

SEQ ID NO: 83125 - DNA, 522 bp, Citrobacter koseri
atgattgtcgctctctctgacaagctggctaccagcaagccacgccccccgatggatgaaaagaagctaacaacggatcagattgtccaaatcaggcgggcctgtgtgatggggcatagtgctaaggcgatctgtgcagctttcaaggtgtcccttgcgtatgccctgaagatgaaacgggaatacaaccctctgaaatatcaaaaggttgcgttaactctgcccgagaaagccgtgatgattcagcagatgaaacaagacaatctcccgggtcagatgattggtgagatgttggggatcaatatcaagactgtggagactctctcccaagtggccccagctaaatatctggcagaccagatgttaccttacgatcaggtgctggctaacttacgcgcccctcgatatgtggctaacccgatttacaagttggggaccagcatgaccagagtccgcaagattatcagcgcaggacggaaggaactccgcaccttaatcatctcctccaaacgagccgcataa

SEQ ID NO: 83126 - DNA, 375 bp, Citrobacter koseri
atggaagcatttaagaacctcctcaatcagttggaaattaagaaggcagaacaacgccagcgggaagcccaagaggcaaccaaacagaacgaactccgcaaggcacaggccgatctgtcactggatgaggctatcgctctgtactccacccagttggaagcctccaccggggccgcagacagcgcccagaagggccgcgccattaagagccggggaattgctctgtgtcacaaggatcagggattcagcgccaacggtcgccctgtgtctctcctgaccaaatccgcagacctgccagcaggtcaccgccgggtaatcatcaacaaggcagcagggcgcaccctgaaggctatcaatctggaaggggctgaataa

SEQ ID NO: 83127 - DNA, 2124 bp, Citrobacter koseri
atggcaagtggaaacgtggtgatcacgaaaacaacgaaccgcaccacctttgaggttgatcgtggaagctatcaacgcaccgttgaccgtatcaaacaggtggggaaagagtgggacaaagtagcgtccaagatgaaaccgctacgcctcaaatttgaggaaaacgcctacaccaagatccgccggaaacagcaggatgacgccgcaaaagcggcaatggcagaagccaaagccaaagcggcagcagaggccaaagcggcaaaagcccaactggcagcggagcgcaagatccagacaatccgcgctaaagctatccgcttcagcacttcagccgctaacgccaacgttaccccggcccaacgtgctggacacctccaggagtttggacagcttacccgccagtatcacgccgggtctatggcattgcaggaatataacgcccgtgtgtcacgccttcagcaaaccatgcgccaacaaggccgggtaggcatgaagggaggcacaattccagtaaccgcgaaagtaaacaaacttgatacctccatgatcgagggtgcaggcggggcgatcaccattgccgcaactgtggctttgagtggcaagatcatgaccaccggacaggattttgaatcctctatgtctggtcttacagcgatcaccggttccacagagaaagccgctaaagagtttgagtatctcaaagaacagtccaaccgtttgggcctcgacctccttaagaccagcaaggattacacacaatttgcagcctctgttggggataaactccctaaagaccagatgcgatccatctttgagggtgccagtgaatggggccttgtaactggtgcatccgcagatgagcaatcacgtgctttgaaatcgctcaatcaaatgatgtctaagggaacggtaatgagtgaagaactcaaaggccagttgtccgaagctctccccggttctgtgggtctgttcgttaaggctcttaacgacatgaaaggcgttaccaacctgacagagaaagatctgtttaagttgatggaagacgggaagctgttctctaaggacatcctcccacacgtggctaaacagatgaaggaagcggcccggaacggcggagcacttgacaaggctatgaagtccaaccgggcatcatggcagcgcctcaataccagtatgcagaacgctatgaatgttttctttacttctggcttcggcaacgaattaaccaacgctttcgactcaatcagcgccgctattgacgggtctggtggagcctttgagatgttcgggcatatcgccgggaagattgttgaaggtgccacagatgcgtttacagagttgcatgacactgtgatctttaccttccgtgtgattgagtattacgccgccaaaatggggatcagtggggagcagctcaaagcctggggagaaatggcagcatacgccgccggggtggctttgttcgctggctctgtttacaagttgggcggggctttcaagtgggttctcaccatgctgaaccctcttaccaaactgttgggagtcatgaaggggatagccgctattggtggcattgaagccgcttctgaagctctgggtgacggtaagcctggtaaagacggccagccgggcaaaccgggaacccaatcaaagaacaccaagccgatcggcgcgggccgtggcgttaactttggcctcccggctattatcgccgctgtatcactgaatgaccgccttgatcagattcaggcagacccggaagcgtttaagcgcaaggtacaggagaacaatgatcggcctacgctgtggactgacatcatggaaacattctccggcagttggtacgaaaagcagcagaacgcaaaccagcaggcagcacagaccgcagcactcgatcagattgttcgtgttgctgtcccaacattcacccctccaaccacagcgacggttacagatggctacgttaacgcactgatggccccgccagcgtggctaaaccagccgcttaacgttaacatcaatgtgaaagtgcaggatgggcaagttaaagacctggtacgctcagaagtggaagcgaacgacaaccggaactttaacatgttgatgcaaggcgggccgaactaa

SEQ ID NO: 83128 - DNA, 567 bp, Citrobacter koseri
atgaatttcgtagagggctgtaaatcagttcaggaagtgaaagcggtagcggttgagcttctcaaacagggcaagggactgacgctgtaccgtgacgcctggttattaggttatgagttaatgctgagggtgtcggatctgcgctctatccgttatgacgacatcaaaggcgatcaccttgtcctgtcccaacagaaaacgggtgaatctgtccgggtgaggctcaccgataccgctaaacgcatcatagcggcccggagagaggcgaaccctgatcatgtgtacctcttacagttgaatagccacaggagcaagggaaagcctgtgagccgctccaaattgcatgaggaaattagctacgccggggaaaaactggggctgaatctttcgacccacagcatgaggaagagtaaaccaacgattggttatgacaatggggaggatatagccgtaattagtaaagcattagggcacaaatcgttatccagtacgctccattacattggggccacacaacgcaaagtagatgattttagtgataaatattcaatagaggatctgttatga

SEQ ID NO: 83129 - DNA, 171 bp, Citrobacter koseri
atgaataacgataagtcaaaccaccctaaacacttccaatacttggggcgcatggtcactgtttaccctacatacatcattattgacggcatcaagatcagccgttcccgtctgtcctttgcattccaattggaattggcaaaagcaatccgactgcatgaagaaaactaa

SEQ ID NO: 83130 - DNA, 336 bp, Citrobacter koseri
ttgatcacgcgcagacgctggctatcgtcctgcctgcgctgtgggctgtggaatgaaaaacgcgataccaaacgcgccaaactgttgcagtacgcagagcgagtctggaatatcaccgacggttccgacgatgcgcgtattgatgccgccatcgccgccacccgccgcttctttgagcaaatgggcgtaccgactcgcctgtctgattacggtctggacggcagttccattccggcattgctggcaaaactggaagcgcacggcggtacaaatctgggtgaacatcaggacattacgctggatgtcagccgtcggatttacgaagcggctcgctaa

SEQ ID NO: 83131 - DNA, 1725 bp, Citrobacter koseri
atgactacccgcctagataaattaaaatcatgtaattccaaacccgatttagcacggctcttaggaattgatcccgtatttatgacgcgcgtcatatacataagaaatacagataatctttattcacaattcactattaaaaaaaagaatggtagtgatagacacatatcagccccagaccctgaactcaaagaaattcaaagtagactttccgacttacttcaagattgcttaaataacattcgagaaaactcaaaagaagataataatttctcccatggatttgaacgcaatcgtagtattattacaaatgcagaaaaacataagtcaaagaaatgggttttaaatattgacttgagcaatttctttgatgaatttaattttggaagagttagaggttactttctaaaaaataaaaacttttctcttaacacagagctttctactttaatagctaaaatcgcctgtcatcaagataagttaccacagggaagtccctgctctcccgtcataaccaatttaattctagtttctttagataggcggctaagtaacttgtgcaatcgtgcaggttgtacatatacacgatatgccgacgatataacaatatctaccaataaaaaagagtttcctcggaatattattaaatcccacaacgagaacgccatagatttaaataaaaaatttctaaaggaaataatttcttcaggttttcaaataaaccttaataaattaagactttttgacagaaaatgccgtcaagaggttacggggttgacagttaataggtttgtaaatgtcgataataaatatgccaaaaaaattcgcgcaatggcacacagtctgtttactaaaggggaatacacattaacagacaaaaaaacacgcgaacaaagagcaggtaatataaatgagttaggtgggaggcttagctttattgattatgtcgacaaacacaataatagacttcctcataccattaaaacctcgcttaacaaacgagaaaatgtatattctgatttcctttactattctgctttttgggcaaacccaaagccaactatcttgactgagggaaagacggacattacgtacttgcgagtagctctggattctttatcagcaaattaccctaacctgattggcaataaaaaaattggtaataaaaccgtacgagactatggagttaaattcttcaaaaacaccactaaaagtaagtattttttaaacttagatggtggagcatcacaccttaaagacttcattgttggctatgaaaaaaagacaaatgcgtttaaagcaatcgctgatcaaaaacctgtcattattgttttagataatgactcaggtagtggtggatctaatgggatcttccaaactttaatagggaaagcattccctaacattactttatcgaaagatgagttaagaaatcaaaaatggacttgggttacaaagaatttatatttaatctttacccctctcaatggattaaatgatagttcgatggaggatcttttccacagttcggtcttacaaaccaaactggggggaaaagtatttaatcgaacgaatgcaaaatgcaaagataatgaatatggcaaagagttttttgctactggcgtggtgttaaagcaacgtaaaacaattaatttttcgaactttaactacatttttgaatcaatcaacgaaataattgatcacaatgcttcaaggaagccttaa

SEQ ID NO: 83132 - DNA, 429 bp, Citrobacter koseri
atgtctgaaaatacccaaggaaaactcaagggactgaaaaagaaattaaatctgcggcgaaatgtctcccccactgataacaaggatgagcaggtagaagaaaatgtcagtgagcaaactacagaagggccagaatcccgtactacccgatataagcgattgctcgacagtatcgttatcagcggtttgctgaacattgccgaggataaactcagtgacgatgtgtttatcgagtcgatgttcagtaaggcttatgagcttctgccagtgccggtcagactggttgtccgaagggaatggtgcctggattatctccagtcacggaaagccccgatactggcgcaactccagctctaccgggccgaaaggcacggctcagcagaaccggtgccgcctgcccaggaacccacattaccaccagcgacctaa

SEQ ID NO: 83133 - DNA, 180 bp, Citrobacter koseri
gtgggaaaaacattacagcaggaaacgctaccaaccgtggactgtacctggcaacttgttttgagtgttgccggtgtggcattgatgcgcagcaattctgttgcggttaaagcactaggatccagcctcaccacactaagtctgatacgcatcatcaaaaaactcgccacacttgcctga

SEQ ID NO: 83134 - DNA, 804 bp, Citrobacter koseri
atgcataaactcgttgttttatctctcagctccgcagcactgtttattcctttggtctcgtctgcaatgacaattcacggcgacatacatcccgtacgctataccttctttctgactcaggaaggcagcaatcaactgaaacaggcaaatgaccggatagcgaagaacccgcaggcttatacacttgatgtgaatcataccggcattcaaccttttgacgctgttcgctgggacggcaagcctgtaaaagctgtcacctgcgtccttgtagacggcgtgatgatgggacaaaaagccacgtggtcacaatgtaaagacgagagcggtgctgaatatttcggcaataaaggctggctggtacgtgattatgtggcaaaagcctgtgaagtcggaaaatcagattgtcctgtttatcttgtgcttcagacagatccgccaacaatgcgcagcgatatggcgaatttcgtacctgctcctaaaaactttaatgcttcaacaagcctgacggatgaaattaaatctgaaggttgccagatggcggataactcatttgaacatgccaaaagtagtctgcgttgtcgtgccattaataccgtgcgtttcatccgcaaacaaaataccgaagcggcatatgaagctgacttaaccaccacgacgggtgaagcactcactatgacagtagggtacacctacggtaatgcctccagtaaagagccgggctggcgcacaatttcagtcaaccagggagacatcattactgatatccgtaagcagggccagtgggttcccaatggttataaataa

SEQ ID NO: 83135 - DNA, 435 bp, Citrobacter koseri
atgctcagagaccatcatgcaacactagcaggattactgctgcttagtcacagtgccagcgccgtacaggctgaccagcaatggagtgactggtacgggaacatcagtgccatggagtttgaactcaatactcaaaataccgcaggtgaagtgctcacactgacctgtacaagcggaaagctgtctgctgcttacagcgtgcctgcggaggattaccgcgtctcgtcacaaacagggctttctgaacctggcgtcagtatcaatggtaagaaccatcctctggatgaaacagcctttactgcgctaaaagcgacgagtgaaaaagacgtaataaaaatgacctctatgaatgctgccatatctaaaaaattcagcgccaaagggctgaatgaggcgctggctgataccacatggcaggactgcattaatcattaa

SEQ ID NO: 83136 - DNA, 636 bp, Citrobacter koseri
atgaaaccatacatcagcagattacatgggccatgtaaccaacatcatatcaaccgtattcatgacacgttgaataaatcacttaatgaatacccaaggacatatattcgcagaatagatttaagaatacccgatgaggtctatgaacaataccgtgaagattctacactgataactagatttatggagtcactaaagtctcagattaaacaaacacagaagcgtaagagaagggaaggtaaacgaatacatccctgcaatgtgcgttatgtctggtcaagagagtttggtgaggtaaagggtaagaagcattatcatattgcattgatgcttaataatgatgcgtactttcgcactggcacatattgtcctgttggggatgtatatatacataatctggcattgatgattatggaagcatgggtaagggcgttaaaccttcatacacaacctgattatcaacggcattaccggtcggtgcattttgtgctggagggaagtatcatgttagatactaacagcaagacctttgagcttaattatgctcagatattccagcatctcgaatatatggctaaactctactcgaaaagtaatgctgatggtcagcgtaattttggttgtagtcagtgctga

SEQ ID NO: 83137 - DNA, 1566 bp, Citrobacter koseri
atgagctatttacctttggtgcctggatgccagcaccaaaccattcctatgccaaccatccctttgtgggcatttacaccaatgatgcaaaaaggcattaactatcttcaggatggcggaaaaatcccggtggaattagttgtcaatgtagttttagccgccgtatctgaggcttgccagtctcatattgaaataatcaatccctatacgaatatgccggaaccctgcgctctttatatcgtaacgctggcggattcaggtacgggtaaatcgacagttaacaagcaactcagaaagccgtttgacgaactgaaagctgagctggatgtagctttccagaataaattgttagcatacaaacgcgattatgccgtctgggagacaaaactccaggcacttaaaagtaatctgcgcatggtagtcaaaaaaggtctccctaccgacgagactgaagctacactggcggtacatacaagcatggagcccgttaagcctttagtacccacccttgtctgtaatgatccgtcggaagccgcactcattgaattattcgacaaatactcgaatattaccattaactccgacgaagcgagcagtttttttgtgtcctgtgtgaaggataattccgtgttctataataaaacttgggatggtgatctctatgagcacaaacgtggcaatcaggcttcccgtagcttcaaaccgacactgacattatcgttaatgttgcagagacctctctttctcaatttcatgaaaaagaatcaggacaagcttttaaatagtggtctgttagcccgtttcctgtttacgaatatccctactaaaaatgttacgaacatgggccatcgtcatcactcgaatacatttttccgtgatgaaactgcaatacctctttttcatgagcagattaagaagctactaaaaaagcagaagcaacaaatcatttcgggtaaaactgagaagaaagcactcaaactttcccctgaagctgcagagttctgggagaataaacgtgatatctggatttctttaccaataaattatcctcgttggcgttgtgttgattacatgctgcagaaagccaacactaatacattacgtattgcagggttgcttcactacttctctgaccaagaaacagaaattattccactcagtgttattcagagtgcatcccttatcatggattggtatctcaaccaagcagtatcttggttttatcagttcactgatgaatataagttttatcaggatgtggaagaactccgccagtggattcataataaatttactgccaatggctggctcccattcaaaaagaatgacatcatcaagtatggacccaataaattccgccgcagcgacaaacttgaacctttgatgaattacatcattggtcaaccaggaacgggtttttttaccacattccgggcaagtgctcattcagccgagtatattacctggcgcatgagcaatggcttttacgccccactcgctgcacctccggttcaatacttgccacagcaagcgcctaagctgattaattcgtctggcattgtctaa

SEQ ID NO: 83138 - DNA, 156 bp, Citrobacter koseri
atgaccatatcaacagtgaaagtactacgtttacctgatgttgtcagcaaactggggatcgccagatcgaccatctatgactggttgaatgtgaaatcctcacgccacgaccctacattgacaactaattccaccgggatttttccgccatcctga

SEQ ID NO: 83139 - DNA, 720 bp, Citrobacter koseri
ttgaaagtaaatgacgctagtgccctttttaacgagttgaaagacgcttatgaacttaaacttgatgaattaaaacaagatggggaaatatcgactaaaaaatatcaagaggatgttcgaaggttttgtgaaatgagagagcaggaatatgatgggcttgaatattttctggcggaaagtacgcagttgctgaaaagtgaggctgcatctgtctgggttgaagcagttttgcagggaagatttgataagtatctatacatatcgttatgctattaccatctggcctttctcgtgtctggcagagagcgtatatccgatgggtgtaagtatattcaagatgccatgtatttttatggtaaatggcaggggagtcgagaaaataaggagtgggctaaagataaggagggaaaagaagagggaaggcgtgaaaatataaaagaaagcatgggtgataaatacatgccgattaaaattgaaataatccgtcttttgcataagaaagcacctttgaaaaaatggacttcaataccgaaagcaattgcaggtattcagcgagaattagagttattccttgaaaatgaaccgaaagatagggggggtaatttagattccagtaatttggaaagaacaataaaaggctggctaaagacggatcgctatttagggtttgcgttttctgaagctattttgaaaaaaaataaagaggccataagtacttaa

SEQ ID NO: 83140 - DNA, 810 bp, Citrobacter koseri
gtgaacttcttccagaatataaataaaaacaaatatgaaattattgctgtactactcatgattagcatcggactgatcaatttaggatggttgagtttgaagacaattccagaaaccccaccaggatattatgaaaatatcgttattgaacatacccgattactcacaaatctgcgaaatgaatatcaaaatcagagaaatgaaatgagggatgtattgatgtccaaaaagcatactttcttagaaactgcacaaatagcactaaagttgaacatttcagaatctagatatttggatttttggttagcagaaaagccaatcatcattggtatgttaaagccatttgaggagagaaaatatcttagttggtatctaaatctccccccagaaactcaaaaattagttaagaatatagcagataatttgcactcaatttacccaaaacttgctgaatgtaatcaaaatgcagttaaggattacatggcattggtttcgggacttaccgcgccatctgaggataaattatctgatgcgctggttgcacaaacccgggtaataatgcgcaatatctctaacaataaaaattctttatcagaagaatgcgatagtgcgatggtgtcatacttctcttcggtacagttgttatccagaacatatagtacacttgcggatacttatcaagtttatttggaaagaaatgaaataattcgtaaaatacttagcacgatattttcgttttgtttgttcgtagtttgttataagtgccgggaaaatttaataaaaaaggcagcacagtcaatgggagggtga

SEQ ID NO: 83141 - DNA, 798 bp, Citrobacter koseri
atgaagcagttcgatgaaggcggcgcgggcgcattgaagatctactgggaacaagattggggatggagctcggatacgccggacggcaaaacctatgcctgccaactggtgggttatcagacgccattcagcgcgtttaaagagggggattacacgaaatgtgtacagcatttctacaatgtgaacatcattaatgatgacggttcttcgactaaaccggatgaagagcccgtaacgccaacaccggctgatgatacgcctgcacctgcgccagtgccggatgaaacgccagcagagccgaccaccgttaaccatgcgctggtagcccatatcgcagggccgattggcgcggtagatgcgggggcgcaggtctctttgagcgcggaggggtcgactgacgaagacggcaacaaactgacctacacctggcgtgctcaggatggtcagaccgtgtctggcgaagacaaagcggtcgtaaccttcgccgcgccggaagcggcgaccgctcagcagtacgaggtgagtctgaccgtcagtgatggtgagctgagcagcaccacctcttatctgctcaacgtgaaagcgaaagcggcaacgccatctcaggacgacggcgcttcgggttcgtatccggcatggagcgcgaacagcaagtacaatgcgggcgatatcgtgaataaccacggtaagctgttccagtgcaaaccattcccgtatagcggctggtgtaatacggcgccggcctattatgaacccggcgcgggtctggcatggtctgacgcgtggagcgcgctgtaa

SEQ ID NO: 83142 - DNA, 1140 bp, Citrobacter koseri
atgtccacaattaaccccgcaattttttcttttttctctggttcaggatttcttgatcttggatttgaaaaaaatggttatgaagtggttttcgtgaatgaataccatgctccgtttatggatgcatataaacattcgaggaaaaaattaaatatagcaccacctcgttttgggtatgcagagtgcagtattgaagatgtagaacatgaaaaaattaagtcttctatgcttcaacttaaaaatgaggggcgattgactggatttattggtggtccaccatgcccggatttctctgtagcgggtaaaaataaaggtcgagatggtgaaaacggtcggctttcacaaagctatattgatatcattcttgaaatgaaaccagatttctttctttttgagaatgttaaaggtctataccgtaccagtaaacatagggagttttttgaccatttaaaaactcaattagaatcggttggttattgtttgcatgaaaaactaataaattctattgagtatggtgctcctcaagataggcaacgaatcatattgattggtttccttgatgaaaaatatgcaagtcagttcaattgggggcaaagagtctaccctgaaagaactgcatttgaatataattggccgacgacaaaccaattttcagaaaacacttctgttataaaaccaaagggtatcccagaagagttaacagtagagcattggttcaagaaaaaccaggttgataatcatccaaatgcaaagcatgtattcgcggcaagagcagggcttgcgaggtttttgactgtcgaggaaggggacgatagtaaaaaatcctataaaaggttgcatagatggagattttcaccaactgctgcttatggtaataatgaggtacatttacatccttataaaccaagaagaattactgttgccgaagcattagcaattcagtctttaccaaaagaatttgaattacctgcttatatgactctgtctaatatgtttaaaacagtcggtaacggtgtaccctacttagcagcggccggtattgccaaatctattatagagcatttaggaatcgaatatgagagtaactgcggcgaacttagcacaggcgattgccaatctaccaagaaacacgcagtttaa

SEQ ID NO: 83143 - DNA, 873 bp, Citrobacter koseri
atgttgtggagattggctaatgctttacaggaagatgtccctgtcaatttggatcgtatttttggtgcaagctataatacacgtgctgttctcgaaagccttttggcccatactcctgagttttattggtgtaagcttgatcgccttgaggtaatgaacactcagaaaaacattaaaaaaggtcacaagcaccttatttatagaccaaatgacccacatgaaaatggtgtagcaatagaacatattactaatgttataatttctgagatgaatttagatgttgtccatcaatcagttgatatagagacaatcttacctactaaaggaatgacgattgaggaaaaaagacgtcatgcacaaattcaaatctcattagtaaaaataggccattacttaggttatcgaacatgggttgcagcaaatgatcgaggcctccaatataatggaaaatctatagcccaaatggatggggtcatagataatttaagaaatgaacaagtgcttcaatcatatgataaagctatcaaggaagctcggcttatagattgcatttggtttcgaaatggaaaattaatgcctgcagttatggagattgagcatagcactggtattaaaagtggtttggtaagaatgaaacaattttatgattatgcaccacagttaaaaaatatacgttggaccgttgtggcacctgacgaatatagaaataaagttatagagttttctaatatgccacagtttaaagaattagatactcgattcttcccctattctgctgtagaggaactctattcattatgtgcaagaaggaatcctcaaggaattacagacgatttcctcgatgcattcatggaaaagtgtgtgacacattag

SEQ ID NO: 83144 - DNA, 213 bp, Citrobacter koseri
atgagaaatgaaatcgcaggtaaaagattaatccgtgttccagaagttctgagaagagttggatttagtcgaaccacaatgtatgagcttatcaaagaaggacggttcccggataaggtaatcataggggcaagatgtgtagcttttgttgagagtgagattgacgcatggattgataatgccatttcaagctcgcgcattaaacataaataa

SEQ ID NO: 83145 - DNA, 315 bp, Citrobacter koseri
atgaagaatcaaaaatcaaaagacatcaaagaattatcgacaaaaacttttactgctatggcgaagaatctttatatcacaggaatacgcatatataaagaacaagaagagcatgagttattaacatccattatgttggatagcaacagaacggaatcatatatttcgcatgttaaagaatatctggcaaaacgcttcgatgaacatatggatgaagctggtaaaagagaaagacttatctatgttgatatggataaagttatgtttgaaatgagatatgtgcatactaaagcattactttttagtatgagttaa

SEQ ID NO: 83146 - DNA, 297 bp, Citrobacter koseri
atgtctaaagaaagtattgctagtaataaatcaactgaactgttctatgatcttgcctgcaggtcatttaccgcaggctggaatatgttcatggaagtcaatggtgatggggatgccaatgattatctggatgatccagagtttatgagtccatttattatttatgttattgaccatattcagaacaattttgaaagattcactgtccaagaaggaaacagtggtgatattaatcaagttgactttgaactagtcgctgccatgttagttgagtattcagaaggttttagaaaataa

SEQ ID NO: 83147 - DNA, 237 bp, Citrobacter koseri
atggcaaatacaatatctgtcgcagtaagtatattgtgcgaagaaaccccaaaagtaattaatgctattcaagagcgttttgaaatatttgttgccattacgggatattcagtagaagaaatcatggatgatagcaacttgcttgacgagttaaatcgatttattaataacgaactagttaatgatttagggttggaatatggttccgttatcataaatatcggttataacaactga

SEQ ID NO: 83148 - DNA, 1260 bp, Citrobacter koseri
atgttaactgacagcaaaatccgcgcagctaaaacactcacaaaatcatacaaacttactgactcgcaaggcctgtacctcacggtatctgccagcggcgctaagttatggtattttcgctatcgcttcggcggtaaggaaaaccgtctggcctttggcccctaccctcaaaccacgctggcggaagcccgcgaaaagcgcgatgcggcgcgtaagttactagcatccggcattagcccttctcagcttcgcaaaacgaacaatcccgccgttgaggaatcccgcacctttcaatatatcgccactacatggcaccgcagttgccttaagctctggtcggacgcgcacgccgataaaattatcacctgcttgaatcgctacgttttccccgcgataggagcaatggatatcgctcaggttgaaaccagccatctggcgcagttggttaaggacattgatgagaaaggcgtgcatgacgtcgccggacgagtgcgccagcatctgaccaaaatcatgcgccacgccgtacagcagggcgtaatcaaatacaatccggcttacgatttggaggatgtcgttacccccgtggtgacacaacatcaccccgccctgccgctgaaacgcctgccagaactgctggagaagattagtaattacaaagggagggaactgactcgtctggtgctggagctgaatatgcatgtctttctgcgctccagcgagctacgcctcgcccgctgggatgaatttaacctgaaagcccatatctggacggtgcctgcaaagcgtgaggcagtaaaaggcgtgaggttttcagagcgtggtgcaaaaatgaaggatgaacatctggtgccgctgtcgcagcaggcggttgccctgctgaaaaagattcagacgatttccggcaagtcagtctttgtttttccgggcgcacatacactgaacaagccgatgagtgaaaacaccatcaacaaggcgctgcgcgtgattggctacgataccaaagcagaggtgtgcggccacggtttcaggaccatggcatgtagcgccctgaacgagtcaggacgctggtcgaaggatgccattgagcggcagatgagccacaaagagcacaatggcgtgcgtgcggcctatgtgcataaagcggagcatctggaagccagaatcgaaatgatgcagtggtggtcggattatctggatgtctgtcgggaaggatatgtcgccccatatatttatgcacggcaacaccaattaacataa

SEQ ID NO: 83149 - DNA, 1395 bp, Citrobacter koseri
gtgattgaactgcaactcagccgcagtgcaactgcgctgccgctgtttaatcagatagagcagcaaatcagctggcaaattgttcagggtcaattgaactacggggatgacctgccaccgtccagggatcttgcgcggcagcttggggtatcaaggggatgcgtggtccgcgcctatgaaatgctctgtctcaagctgtactgtcaaagccaaaccggccggggaacctgggttatctaccgttcggcaaccgaactgccatcgcagagatctgctgcgattgatagcccaacaattgacaaatttcttcccggaagtttatctttactccccagtcacgccagcacagcgcacctcccggtgagtgagtttcgacaggcttttaatcgcgtattacgctacccggacaggcttaaccagttcggtgagagtgctggtcatctggaactccgccagctcatctgtgaaaagatacttccggggcgaggcatttccgccaccccctcggaggttttgatcattccgggttcacagtacggcagtttgcttctcgccatgaccatccggcatgaacggtcctgctttcatttcggcgatccagggtacctggagtttgcacgtaacttttcaagatttggctatcagctgcagccgcatggcatggacgcagagggaattgacatcaccgattttgaaccgtcatcccgtgatattctttaccttatgcccgagcaccattttccgcagtgcatcaccctttctgatgcaagaagaagcgatattatccagctgtctatccgaaatcaggttttgttgctggaagatgattacgatagcgagttttacttcgatcacgctccgcgaccggcgctcagagcgtctgccgccagcgagcacatcgtctatatgagtactttttccaaagtgctgtttaacaccgtcaggctgggatatctggtggctgatacaccgctggtacagcagatggcctcactacactggggtctgtcccgtggtacaagcggtttgttgcagcaatgggtcactgaattaattaaatgcgggtcttacgagcgacatacccggcgtatgcgtacggtatatcgccataagagggatggcatcgtctccctgattaggcaatacctcccggatgcactgttttccgttccatctggcgggctgcagctttatcttacattttctgatcctacgaaaacccaatacatccacaactggttttctgccaataacattcaggtcgcagccacacaaaattatgttttcgatataaattctcctcccctatttatcatcattggttttgccaatatagacataaatgaatttagagaggttttaaaaaggcttcatcatttcatatcttcaccgtag

SEQ ID NO: 83150 - DNA, 831 bp, Citrobacter koseri
gtgtttcttgtactgaccgttgcacagttactacgtctgattttttgctatcatcatatcctcgcggagtggcagtctcgtgccagtaagaactttttttgtgccgccactatttcgggatttttactgtctctgggactactgccctacagcattgcgctggcaaaggcgctctggataatcggcgtcactgcgcaaattttcttcctgacctgcacgtttcgccgctgggttattgaccaacttgagacgcatgaaatcagtccagtatggcttattccgatggtaggtaatgcttcgcctgcttttgctggtgtcgatctgggctttccgggattaagcaaaatgctcctgttctccgcgatcctgtgctgggcattgtttatgccgctgatactctggcgcattgtttttgtgcgtcccgttaccccattaaaggcaatgccgggcctcgcgataatggtgtctgcaccagccgttatctctgtcgcactctactgcgtctataatggggtgaatgatgccgtggaatttatggcatggacggctttattttttgccatcgtgcttattagcctgtggcgaagaatggttccggatatgtttagcaagtcctggtggggtttcaccttcccttccacagcactggcgtcatcacttatcagggtcgacaaagccacaatgacgccgctaaaccatatgcttgcacttaccgcgttaatattcgcgacgtgcgttgtctgttcgattatctttcttacactcaggcaattattattcatcctcagagggcgcaggaatgaaaagcacgttagacagcgtcttctatag

SEQ ID NO: 83151 - DNA, 747 bp, Citrobacter koseri
atgaaaagcacgttagacagcgtcttctatagtcctttatatgtcagggtgtctgaatatctcttttatgcgggtaaacgcaatgtcttcacttccattgcaaaagcggtcattgataagattgaagagtttccggatgtcaatatcgaagagctggctacgtattgtaatacgacgccttcgagtattaccaaattcgtccgggagattggatatggctcttttcaggaactgaaaaatgacatcgtcccctaccgtttaacacatcagggaataaaagggctgactgaacaaaaaatcattgaagaaatatataactacattccttatgataaatgcaaggagatggccgatgtcatcaacaacagccgctctgtcattatcctgtcaaattcatttctttttaacattgccaatgttatgcgtgagagcatcagtagccgcaaccgaaaaatttatcttgtcgaacgctctaatgatgaactgatccagagtttattaaagcatgttgattgtgtatttatccttacccttacaggtcaatggattaattcctgccagtacattaaccatatctcaccgaaaacccacacctgccttatctccgggagcgtgccagccatactaaatagcagggatatttattcgattgaactaaataattacccacaaatgctttatgctaattatttctcacacaaatatcttgaaagtattgttttcaacatggtccaacatgtgatttag

SEQ ID NO: 83152 - DNA, 1341 bp, Citrobacter koseri
atgtctgaggaaaaacagatagcatcaattattgatgatttaggcggtcgtgagaatattaaagactattttcactgtgctacacgattacgctttaatctctatgactatgaaaaaataaataaagaatcactcaatgccaactctctgatcctctctgttgttcttgcaagcggacaatgccagctgattattggtaataaagttgctgcagtatacagtgctctgcataaactacttgaatctggcggtatgagtagtaatgcaaaacctactgctgattcggtttctaaaaaagaatcagtaacaaaccaaatcttcgcatttatttcgggtagcttcctgccattgattggtatccttgcggctgcagggttactgcgggcgttcaccacgctgtcattgagccttccctctcttgcagggaacagtacgttgaccattctttcattcatcgccaacgtaccgttttatttcatgccagttttacttggttttaccattgcacgcaaactcaaatcaaatgagttgatcggctctatcataggtgcctctctcctttatccggaatttgcccatctggcgggtcagacattaaatgtggttggattgcctctgattgtcatggattatgggtacagtatattcccggtcttttttgctgtccctgtcgctgcatacctggaaaaactctttaaggccaaactgtacgattcaattcagttatttatggtgccattattgtgcgtggtgattgttgttccaattacaatgtttttgcttgggccattcgggaaatacctgggcgactacctggcctccggcattgtctacatcatcggtgtaaatagccttgtggcaggcatgatcatcggcgctgcttattcatttatcgttcttttcggtctccattgggcaattattccggttgtcttttcgaatattgctcatggcggcgaccccatctatgccattggtgggatgtcggccatttcccagatgggcgtcgcgctgggcattcttatccgtacccgtgatgcgaggacgcgtcagattgcaagcagtgcatttttcccatcattaatcagtggcgtaaccgaacctattttatatggtttgatcatcccgaaccgccggacgatttactacatcattatcgccggtgcagtaggtggcggcattgttggtggctataacatcaccataaataaccttgtttttgcgagtctgctttccattccaacagcaagcaacatgctggtttacagcactgcattatttgccacgttgattactggcgcattgttacccgttatttttggttataaaaaccggtcttaa

SEQ ID NO: 83153 - DNA, 1443 bp, Citrobacter koseri
atgaacagagagtcactgcaatttccggaaaactttttatggggtggtgctatcgcagccaatcaggctgagggagcatggaacgtagatggtaaaggcatcagcgttgctgacatcaatgaatatgttttcaatgaagacatgcggaaaatgtacaacatcgagctgacccgtgattatgcggttcgggcgcaggacgatgcagaaggcattttccctaaaaggagcggtattgatttctaccataccttccgcgaagatctggcattgctaaaggctgcgggtttaaagacatttcgcacctcaatcagttgggctcgtattttccccaatggtgacgacgcgcttcctaatgaggcgggccttagattttatgatgaactcatcgatgaaatcataaagaacggcatggtgccgatgattacgcttgcgcattatgagatgccgctgaatctcacgattaactacaatggctggaagaatcggcagcttattgatttgtacttcaattttgcccgcgtatgtctcgatcgctatcatgaccgggtgaaatactggatcccgtttaaccagatcaatctgattcgttatgagtccttcaaccatctgggtatttttgaggatgaaggcacctaccttgaacaggataagtaccagggcgtgcaccatgaactggtggcatcagcaatggtcaaaaaatacgcttcgttgttgggcgaagatattaaaattgggatgatgctctataccgatttcgcctatcctgaaacgacaagcccggaggataatttcgcgacctggcagaaaaatcagtacgaaatttactttgcggatgtgcttttgcgcggagagtatccggggtatatcaaacgattttttaaggaaaaaaatatcgttcttgatattacagaggaagacaacgccgtcctgaaaaatacggcagattttatgacattctcttactacacgacctatgtcagcaatgccgaaattgcccataatttcagaggcaataacaagcgtaacccgcttttatcccagaccccatggggttgggccattgatgcgacagggcttcgttatgtgctgaacttcttctgggatcgctggcaaaagcccattatgatcactgagaatgggattggctgttttgacgaactggtcaatgataccgttgaagatgattaccgtattgccttcttccgggatcatatccgctcagtcggtgaagctattgcggatggggttgaggtcctgggatattatatgtggtccccgattgatattatcagttgctcctccaatcagatgtcgaagcgctatggattaatttatgtcaatctcgatgattcaggccggggtgatggcagacgtctgcgtaagaaaagttactactggtatcaaaagcttattgcaacaaatggcttgtcactagaggaataa

SEQ ID NO: 83154 - DNA, 1422 bp, Citrobacter koseri
atgaatagccgtcctgagactctgccggatataggattagggaagtattcatggccgcaggtcattaaatggcttttaatcttgctggtcctgtatgctgtaggtagcgtatttatatccaaccctttttcaatctttgtggatagaacgacacctgttgattattcaagagtaatgtattttcacggtatgacggtggggcttgccggaatcaccgccctgattatcagccaggttttttctcttgataaaaagtttaaaaaaattatttttctctgcactgtcgccacaataattattggggtcacggggggcgcagttaaccgatcaatggaatataccaaactatttctctggtatcagatccttgcttttattgcacttgatataattttaatcaccatgtcagtaggtcttattctgaccagggacatggagctcagacaatcacggacctggtatttggttctgtctgcatcagcaactgctgttattgctgccctgattggcgacctggctggttttattcttgattttggtgactggcctggtgttctgggatggtatgccggaaaaattggctatacgttagaagaatggcaggacaacctgttgcgttcgcattcagatatgatggttgttgccgtaattggtcttattttgtcggttatcagttggaagtacggccgccatatgacaggtgtatcatcatcagcaaaagccacgggtgaatggatggctatcctgggactggttttactgatcatcataatggtcgtctccgggtttggtggctccggtatgcaaattccgcacatttttacagagaaaggtttttatgccccgcgaggccaaagtgttgccggaattgatctcggcgacttcaccattggcacattctttttgatgggaggaatgctgatgatgggcgcaattcttttcggaaaaaaatccccaggacacacgttgagcaaaacggctaaatacactctcagcggaatatttcttacctggagtagtatcgtcgtgaccgtagcaggtatgggatttctggaggagtacagagccgatttatacaactctgcaaaagatgttccactcggggactatggttttgcattcagaatgttacatctcgatgttagcctgatacttttcccggcaatcatggttgtcatgctgcttgcacatcattttctaaaggatgatgacaataaatacattcaatggattttacgcactggcgtagttatttgctcaataggctcattagtatatatggttcttaaccctggcccatttggacctggctactggattgtcgctgcaggatttataattattatgttcgcaatggtttattttttcatgcgcagcgataataaaattaaagaggattttagaagtcaatctgcagaataa

SEQ ID NO: 83155 - DNA, 459 bp, Citrobacter koseri
gtgaacaatcagtatcttacctttagaaaagacagctacacggtgacgacagatcctgcgtctttccagactgatgccatacgtaattatctttcacagtcatcctgggcacctggaatcgatgaagaaacagtttgcctgtcaatagaaaacagtctgtgttttggcttgcttgatggttcagagcaaataggatttgcccggctggtgactgactatgccacttttggctatctttgtgatgtgtatatccttgaagagtatcaaaagacgggacttggccgatggttgatcgagtgctgccacgcacatcccgtaatgtcacgtcttcgacgcataatgctggtgactgacagcgcgccgtggttatacgaaaaactcgggtacaccccactgaatcgaccagattttgtctggcaaatcaatcgccctgatatctaccagcaaccgaaatcgtga

SEQ ID NO: 83156 - DNA, 504 bp, Citrobacter koseri
atgcgtaagccatctggtcttttagtcactcttatggaacttaagaaattccaggaaatagccttttatgacctgttactttctgcagaatgcaatgcagtaccagagattattcgtaccgggtcatactggctaaatcatattcatatcgtggataaaattttccgcgctcatctgagcggagaagttcatggttttacgtctacggtgagtgatgacattcctgaactccagcttttaagacatgaagcggcgaacagcaatgactggctgattgcctatgcagggtcactgaatgcagaaacggccagtgagcgcattcaatttgcatttaccgatggggcgcctggtgatatgacgcgtgaagagatcctcctgcatttgctcacacatgccagttaccacctgagtacctgcagtccgtcactggaaaaaaatggacttacgatccctccaatgttgctgaccaccatgctgaactcatcccgtgcggattctctataa

SEQ ID NO: 83157 - DNA, 603 bp, Citrobacter koseri
atgaccaaaaaagtcaatttagtgaccgatgccggtgctgatgttagtacagtgaacgaagctgtatcacatcgaataaagcagtaccggaagcaaaaaaaattatcgctcgacgagctatccagacgagcgagtgtcagtaaaggcatgctggtcgagattgagggatgtaaggccaaccctagtattgcgctgttatgccgccttgctgccgcaatgggggtctctgttgctgattttgtcgatgtcagcatcaagcctgatgttcacattattgcggatgctgagatccctgaactctggaacggagaaaaaggggggcgtgccaggcttcttgccgggtcagggggacctgacatgacggaactctggatgtgggaaatgcagcctggggaaaaattttcttcgccaggacatccttcgggaacacttgagttgctttatgttcagtcaggaacgctgacattgggtgtgaaggagagctattaccaggtgatgaccggttactctgcgacggccagaacggatgccccccacttctatgaaaaccagggcgaaagtattctgaaattcatcatgacagttaacgaaaaagcaccctga

SEQ ID NO: 83158 - DNA, 696 bp, Citrobacter koseri
gtgtacattgtctctccgtcaatcacccctgaggtatatgcagtcgcacctggttttcgggcgctcagtatctctgtgcaggccgcccccgtactgaaccctcaggttggtgaattggcattgaaagaagcttgtaaagctgttctggcgggcgatccagaatggacagaatctcatcttgccgcatgggctgaggctttcaaggcatttggtgccaaacccaaacgcacaccgtgttccgctgacgctctgcgtaaacgcgttcttcgcgacggcgatatgccggctctcgatcctgtcgtagatctctataatgccgttagtctgcagtatgccgttcctgttggcggcgaaaatatcgctacctatcagggttcaccgcgtctgatgatggcaaaaggtacagaaccttttgatactttaaaagacggtgaacccgcagttgaatatccgccaccgggcgaagttatctggtgtgatgatgcgggaataacctgtcgccgctggaactggcggcagggtataagaacccgcttgggcgttgaagcccagcagatgtggttcattctggaaagcctgccgcaaatgccactggagaagcttcatgaagccgggaagatgttgaccgacggccttgaaaaaatgatgccgggtctgcagtttgacgttgtactcatcgaagagcaacgcacgtaa

SEQ ID NO: 83159 - DNA, 894 bp, Citrobacter koseri
atgttcaccggcttgtctgctttcccgttaacccccgtcaccaccagcggtgtggatgaacagggattcagtaagattctggctcgccttacggcggctcgcgttgattccatgggtattctgggctctaccgggagctatgcgtatctgacccgggagcagcgcaagcgcatcgcaactctggcaaaacagcttgccggggagatcccggtgatggtgtgcgttggtgcggtcagtacggatgcaattctgcatctgacagaggatgcgcagtcggcaggcgcggacgccttgctgcttccggcggtcagctaccagtcactgcgcaatgaagaggtttttgccctttttgagacggttacccggcaggtgtcggtaccggtttgtgtctatgataatcctggcaccacgcattttacctttaccgatgagctgcacggtcttctgtcatccctggaaggtgtgcgttcgataaaaattccgggcgtccctgataacccggcggctgcctgcgaacgggtgggtgcgttacgtaagcatcttcgcccgggcgtaacgatcggggtcagcggcgatgcctttgccggactgggattaaatgccggttgcgaagtctggtactccgtgtgcggtggtttgttcccgcaaacagccaaacagataactgaggcagcagcggcaaacgatcatgcccgcgttacggctctgacgactcgcctggagcctttgtgggcgcttttccgtaaacatggcggaagcattcgggttatcgccgcagccgcaggggtacttgggcttaccgatacggattgtttgcctcgcccccttcttccgttatcagcaggcgatatcgcggatattgcccaggtgataacaatgctggatctgaaataa

SEQ ID NO: 83160 - DNA, 1215 bp, Citrobacter koseri
atggcgacccttcgatatccaaatactgataaacacaccgggcttgtcggttatgcctttgccgcaatgctggcgcgaattgcagatggtggcggtgtgctggcggtgattttactgtgtcagtcatctgaacagtattctgcagtaacaggatggatggcagcctgtattaccctgccacatatgcttggcccatttattgcccgcagtattgacacggccatagatgggcgtagggtaatcgttgctgcctgtctaacttatgcaggactcaccggattgctgacagcaaccttcggtcatgtacccatattcctgacggcattacttctgatagctgcgggtctctgcggtccacttctgacaggggggatcagcacttttctgccagccattgcagggccagatcagagaagtcagcgcagggcccagggtcttgacgttgcgacttatggattcggtggcacactgggcccatctacagttgctgctgtctccgccttatattcaccttcggcggccttttacctgctagctgctggaacagtactggcggccttctttgttatgagactgccggtacctcctaaagcatataatagcgacccagcaatagtttcaggtgcactagcaacaatcggtctgatgatccaggatactcgtctgtatcgtacgctctacctaacaatggcagtagcctttgcagtcgcggctctgccgattgtagcagtaaacatggctgatgttattaatgtgtcggcagccactgctgcctttctgaccgttgcttatggagccggaaatctggcaggttcattgtgcctaatgcttattccactaaaaggcgagccgggcaggctgatgatgattacaggatggttgattgttaccagcctgttttctatgcttatggtagacagctttttacccgtattcttatgcttctttattactggaatactcaactcagccttttttgccgcaacactggctgcacgaagcgagtattctccaccattctgtcggggacaggtatttatttgggtgggggcaatgaaaataactgccggctcacttggtactgctattgcaggtcaggtgatgattttcaaaccttatgccccactggtgttaagtcaagttttattatcagtaatactggtaattcccatctcaaacaagatttggttatcatttaaatcacgcatctcataa

SEQ ID NO: 83161 - DNA, 207 bp, Citrobacter koseri
atgggaactccggtattggaatgctatgagttgggcatttctgatatcatattttacatgtggcacaacaaatacggcggtatttcgtcattagagctgaattacatgcgtcagttcgaagagaaaaaccagtggctgaacaaactgatggctgaactgagtctcaacaaggctatattgcacgataagttggacaaagagaactga

SEQ ID NO: 83162 - DNA, 1932 bp, Citrobacter koseri
atgcataataagcacataaatttattgaagtttttgctggatagtgcccatgagataactgcacatactttggcaattaacctttccgttagtgatcgtagtatcaaaaactatatctctgaaataaatgtcagtgaaccaggactaatcctttcttcccaccgtggttatactgtggacaaaaatcggactatccagattctttccagctacgtacatagaattccccatacgcaagaagagcgggtaaactatcttttgactcagttactatatagccgcaagtcagacgttcagataccagatctgaatgaactgagtgacactctttgtgtaagctatgaaacagtcaaaaaggatattttgttagttagaaaaaaattgaaagagtttagtctttatcttacagtttcaaatgatcgtctggcgatagaaggattagagcaagataaacgtcgtatgttatctagtgtcctctatgctgaatttagttctaatatcttgagcttggcacaaattggacggaaatttcagaagtatgatattaatctgttagtttctattcttattgaatcatgtaaatcctggcgctattttattaatgaatatgctctactaagtcttattcttgatgtcgtaatcagcattgatcgtatccgcaatgaccacacttttaatcactgtactaatgtacaatccagcacaataaaacggaagtttgaagagcatgaaacgaattttgctcataaagttatctctgatatagaacaccattttggcgttacctataatgaattagaagcagaagcattaacggtagtcttacttagcagcctgattagaattgatatggatgagattcatgcagataatatcgaggaacttgccggtaaagaatgcatggagcttatcaaaatacttcgtgaggaaatacaacgttataattttattgatggtgaaagtgaacagtttttagtgcgttttactattcacattaaaaaccttctggtacgacttcagcatgggtatgtcactcgtaatccactaactgaaaatatcaaaacatcatgccccttaatttttgaatgtgcattagctatttcagagaaaatccgccagtttacaggttatctagtagatgaaaatgagatagcctatattgcacttcatatcggtagtatcctcggtaaccagatagcagagcaaaacaaagttagctgtgtgttgttggttccgcaatatcataaccatacaaatcaattgatatctcagatcgacagcttatttggcgaacaactcatgatccgagcaattgtcacctcacatgagggatttgagagtctcccagacaccgattttcttatctctacaattagaattccacagaccataattgaatgggtttatatcaacccttttttgacagatcgtgatatatcagccttacaatacaagatagagagggtgcggaaaaagaaaaaacggattaaattattcgaaaacttgatgttgatttcgaatgaaaatttatttttctataatccacaattctcaaatgagaatgaggctattatttctatgtctgatgcattatatcaatatggatatgttgatgaacgtttcgttcatgacgttttcaagcgtgaacaaagctacccgactacatttggaaatattgcagtaccacactcaatgagaatgaatgcatttaaaaccggactatgtgtcacagtaagcgagaaaccctttcaatggggagataatatagtaaatgttgttttgctcttttcaattaatcgagccgaacgttctttattttacgatatttttgataacctcattgtgttgctactggaaccacgtaatctgatgaaggctagtgaatgcaaaacttggcaggaatttgtcaccactatgattgattgtttctga

SEQ ID NO: 83163 - DNA, 1914 bp, Citrobacter koseri
atgcttaactttgaacaagtgctaaacgacatcgaaaatcttctttttggcaaacagctacagccaattaatccttctacgcctccactatgtattataagcattgatcgtgaaaatggtaaatataaagtctcttctaattctgaatctaaaacacgttcattatcagagcttgaatcgatttacagcaatttaaatattagaggtttttgtaatgtagagcaggttctttacggtagttcttcgagcaggaaccaaccagaaacaatatttgctaacttaccctatattcaacatttcaagtatgaaaacaaaaaacatctgttattgcgtagtcataatgtccatgaggcagcgacattatcagaagttcaaggctttgaatttagggttttaagaaaaaaaattgataattttctcaatttgaatcttgggaaaatttatgaacagcaggttgagttagttcaaagccttgatgatgcttatcaaatagttttgaagaaattcccatctgaaattgcttcaaaaaaggttgaggttactcttaatagatttaaagagctttccgcagatatggctaactcagttgtgactcttgattataatatagaggtgccaacattaaaaattagtaatactactgtagaagaacttatagagtcacccaatacttatggagtagatgagggtgaaaatgatacaacatcatcacagttgaacttggaattaaaaactctacaagctaaacttggtgttgcaagaatcacctccaagactccggttttatctctcatttttgatcgggttcattttggtgatattgaactacaacctgacttccaaagaaaagatcgtatttggaataatgagaagaagtctaaattaatcgagtctattctcttaaaactcccacttcctgtattttattttggtaatcgaatcgcagaagataagtgggtcgttgttgatggtttacaacggatcacaacaatttatgattttatgagtggagaatttaaactttctaaacttgatatccttgaggatttaaatggtaaagagtttggtgagcttactcgcactgaacaaagagccataagagaatatgaaatcacggcttactttatagaaatgaataaagatagcactgatctcatagttgaattattccaccgtatcaatacatatggtgttaagttaagtgatcaagaaattcgttcggccctgaatcaaggttcaagtgttaagtttttacggtatctggcatccaaaaaagaattcaaacaagcaacgcatggtaaggttaagcctgatagacaaaaagatatggagctttgccttgctgctcttgcatttataaatattggctttaaaaattataattttaattcctatgataagtttttatcaaaagccatggaaaacttaaatctatataaactaaacttattaaacgaaaaagaaatagatttaggaagtgcgtacatttcgaatgaatgcaacgagtatcttcaaatagaaagaaaatatttgagggctttaaacctcgcctatgatgttttcggtgatttagctttcataaaagagattggatcaaatacatcacctataagtaagcaactttatgaagtgataatttactatttctattatgttactgaggaacaagaagaattattgctgaaaaattctgataaattggttgataccctttattctgctattgatagcaattcaaaagaatatgccacatgggattcacaaacttacattgaagcagagcgagggtttaaggactctatctctacctcaacaggaaagaaaataactatattatatagattcaattcttttgcgaaaattcttgaacaaagcacaggcattaagattgttaatgctaatgagggtaattga

SEQ ID NO: 83164 - DNA, 2340 bp, Citrobacter koseri
atgagtaagctgttgatccgtctggcggcatggcgtgctcgccgtcgcgcgaagcctaatgctgatatggtaaggaacgagcagccggacggagggattggggctgaagcgccgattcggacagcatccgaagatcgccttagaaggtccggattcgcggctcgtatagccgacgtgctttcggagcttagtttgcgcgaaggccgagtgttcgctattcgtgggggatggggcttcgggaaatcatcactgaaaaaccttatcaccgaacggctcgatgccaagagcagtggagcggactggctcgactttaacccatggcaatggggagacggcgatgcaatcgcccgcgcgctatttggccagatagcagatcgattgggaggcgagcattcgaaggctgcgctcgatcgtgccgaagcactgcgacgctacggagcgatccttaccggggtcagtaagcctcttaaagaggctgggagttcaggtcttctaatctcgacagtgctaacaaatgcttcggttatagctatcgcgtcggctattggatatgaccttccgacagttgcaaaggttgcggctgttcttgcctttctctcggtcggagtacctcttctcggacgcttactatcgtatctcgggcgtgaccatagcggcgagtctctcgacaaggtacgcagagcgcttgagactcgtcttcgcgaacttgaccggccgctggttgtcttcgtcgacgacattgaccggctcgagcctgatcagatcaggatgctgcttcggcaggtaaaggcgaatgctaatctaccgaatattgtttttgtgctcctgttccagcccagtatcgtagagcgagcgctagatccggttgcagacaacgacggtcgagcctttcttgaaaagatcgtgcaggctaactttgatttaccagccgtaccgacatctttcgtgcatcgtatgttcgaggaagaactctctgaaatagcgggtccatacgcgactgaggccaacgggttctctcagagacgctggggtaacgcttgcattggcagcattcagcccctgcttcgcaatatgcgcgatgcacgtcgtctcatctcatccattgctgtacatatgcccctgcatgtggtcggcgacgtgttcgaggtgaacattgtagactttctgcttctggaaacactccgggtcttcgaacctgacctccacgatgcactgttccgtgagagaggattggttctccaggaaggacgcttctcccgtgatggccgacggaaggtggaccaagcagcggctaaggagcttcttgagatcgtctcagaggagcgccataatatcatttgtgatgcgcttaaagacttatttcctcccctcgaatgggcgtatggggggacaaactatgcagacggcttccatcgccggtggttgacggagaaacgagtatgcacttcgcgctacttcccacgttactttgagctccagacgacggtcggagaaatatctgaacgccgtttcgttgattttctcgatgcaacagcgacagaggacgagctctttgctgaaatcgcagccgtcgaagctgatgggctgctgaattcactcgttgcgaggctcgacgaatccgtcgaccgattaccaaccgagaacgctgctgttctgctcccagggatgttcggacttgctgaaaaactcgcaggcacgagcagtggctctttcgactcgtcatatgtagcagcatggcgagcgacaagttggtatctgaagcggattcctgaggacgttcgaggcggtttggctcttgaagctctccgtaaaactgaagcgctatccgttgcctcaatcctgatccatctcagcgatcccaccgatcggaatgatggcgagagtagagcgttcgagccagcgttagatctcaataccgttgtggcaatgaagactgaatggctacggttgataaggatccgcgcagcagacgacgacgcgctaattgctgaaccggatctaatatcacagctctatcgctggaaaaactatacagattcaatggatgaaccccgagaatgggtgaggaaagcaattcaatcagacttgggtttcgcaaccatggtcacacgccttatgagcataggcacgagccatgcgtataatgatcgagtctccacgcagtacaacagtttcaacaaagagacaattgacgattttattggcattgatgtggcgaaggccaggtgtgatgcgattaatcccgcccagttccccgagcacgaagaggccctgcgaacgctgcttaggtatctagaaaaatggcttggattgagaacacacgacattttcgattcctag

SEQ ID NO: 83165 - DNA, 240 bp, Citrobacter koseri
atgaatcacgatactttaaagaacaccatcgcaacgcttgaaaagctgcgcgatgctcactgcagccaactcgatgctggcgctctggcagagctggaagatgtattgcgtcagttacgcagacatcgtgacagcccggtaagaagcgggttccggtttgacgatatcgtcttccgggcactgcgtattattgacgttgtggttcgtctgatcacaaacattgatgattggatgaaataa

SEQ ID NO: 83166 - DNA, 291 bp, Citrobacter koseri
atgaatatcggacaggctatcaagttatgccgaaccagaaggggaatatcacagacggatttagctcggaaggcagaatgttctgtttcttatctttccatgctcgaaaacaataagcgagatccgacgctttcaacccttaacagaattgcttctgctctcaacattcctgtcagcattattttctttattgcagcagaggccggtgatcttaacggtattgataaaggactccagggagaacttgcgcgtactgcgttggagctgcttaatgattcacactccctctga

SEQ ID NO: 83167 - DNA, 972 bp, Citrobacter koseri
atgattcacactccctctgactcacccttctatagcaaacgacgcatcagcagtatgacagcgctatcaaaagcgctgaacatctctcctatcgaactacttaatttagccaatcgtgcggaccatatgtaccgactcgccagcacgatcactaagcctgacggaagtacgcgccagacttgggatgcatatgcacctctaaaaaaagtacaacgcaatatcaggcgcaatattcttgattacgttgtttatccagcatatttgacaggtagtctgaaaggctgtgattataaagttaacgcatcattgcaccttggcgcaacgattgtcattaacgaagatatcacgcgtttttttccgtcaacttcaaccgcaatagtgcaaagcatatggcggtatttctttggcttcagtcatgaagtagctgaatgtttgaccaagctgacgacccgacaaggggagctacctcagggtgccatcactagttcatttctggctaacctggcgttttggaaagatgaaccggcactgcaagccagttttcgggcaagaggaataatttattcccgctacgttgatgatatcgccgtctcgtcagtaaactttcttgataaaccggctaaaacgaatgtgatagcctcgatttatggcatgctttccaggcacggttaccagcctaaacgagctaaacacgaaatcagaacatctgggcaacggatggaagttaccaagctttcggtgaattcaaaacctggtatctcttccgctaagcaaagtcagatacggtcggcagtccatcatttggagcaagccattcttaggggcgaaattatcgagttcgataagggcacttatacacaaacattgggactagttcatttattggccagattccaccctggcaaagcaaaaaaacttaaacagcgcttgcttgcacttaagagtgcgaggcgcacgaatgtgtattcatag

SEQ ID NO: 83168 - DNA, 912 bp, Citrobacter koseri
atgcaaaacaaaaaacataaattaagtaaccctttaccaaaaccagcctgggttacaattaaagaagcagtcaagataacaaatgaattaaccggtgttaaaatgatggaaagtgatatttacaggtatgctttacatggggaaatttgtctttctgtatatttccagtcaccaccagtattaagaaagataaaaaacactgttaaaaaatttaaaatgcgacaagttgaaaactcacttcaatacagactttgcatgcttgatacaaatggtttcttgaatggacatgatttaatattgagcacagagggtaaatatatttcacctaatcagttagttataaacactgagttgcatggatacgagtttgttctcattcaaaagttacttgcacattcccttaaattacataaacctgttaccggagcaaatcaaatgaattatggaattaccgtcaacctgtcaggtcagacatatcaagtttttgaaaaaaccacctggcaaagaagaataaacaaacaaataataagattacctaaacatataatctccgagatttattcacatgattcaatttatgatttaacagactattcaagaaaaggttactttcctatttatgaccttcccaaagatgcttgttttgttattcaacaggaagagcttgataaattcctcagtatccctaaagaaaaatataatccttctacaccaaatcgaatatcaactccgctgtcacgacttttctggttagcatgtaaaaataatgatttaatcagtcctctcctcacccatccttataaacttctgcctatttttgagcactgggcttctgttaacggtatcaccgacaatctaagtggtgatactctgaaaagagcacttgaacgcggttccccatctcagggataa

SEQ ID NO: 83169 - DNA, 186 bp, Citrobacter koseri
atgacatctgttcagttattacgtcttaaacaggttgaagagaaaaccggtttgaaacgctcgcaagtctacctctatatgaaaaatggcactttccctcgctcaataaagatcggcccagccagtgtggcctggctcgaatctgaaatcgacgcgtggataaaccataaattagaaagccgctga

SEQ ID NO: 83170 - DNA, 585 bp, Citrobacter koseri
atgttcttgtcactgaattacgccgtattaaccgatgcactgcacgcgctgaaagaaggtaattttcatcactgcgaatcattgggattcactttcgaggaaataactgacctcaatcagctatcgctagatgagctgtttattgtcagccggtcgtcagcgccgtttgtcacaatcagcgtccgccatgacgttttgcaccatctgatagtactggcgcgacaggaagtcctgcaccagcagcagattcaccgggcaattcgcttaggtggttcgatcgcgttactcaaccagtattttggcctcacctccaacgaagtctgtcttcgtcgccggatgctgggcgtcagtgtgccttatggccggacacctgaaccagatgaagagaccgatgcagctatctggctgcaatggcaaaaatgccgggtggaaaatctggcttccccggaagcgctgttagccatgatgcaagtcactgaaacgctattatcgcagacggaagggctaccactcactactgtctggaagcggatcacgctttgtgagcaggaagccgccagcaggagggcattgcatgccggatga

SEQ ID NO: 83171 - DNA, 237 bp, Citrobacter koseri
atgaaagatattatcggggtggaattaagaatgcggaaggaagtggaggggtgcatcatatataatgaggcgtcatttttatttaaaaataaatataaagacgtggagagaaatctcccccacgtcttaccggtaaaattaacgtcggcggcgttcaagcttttcctgacattcggtacaggttgttatacccggcagcatctgacgtcttttttcaggaatagatttaccgcataa

SEQ ID NO: 83172 - DNA, 231 bp, Citrobacter koseri
atgagaaaacccgtttattacgcctatgttgccctggaaagtcagccggactcgcagggtgagaaaaatacgtactggacaaaagtcggtgtcgcctttgctcaccacggtaaagccggtctgaatattgtcctgacgcccggtattgccgtctccggcaaactagtcctgctggagccccgcgaggaaaacagtccgccgcagagtacggatcctgtcgaaaccgcatag

SEQ ID NO: 83173 - DNA, 711 bp, Citrobacter koseri
atgctttccaccactgcctttctggcggcggccatgcagtgcgccgccagtattcatccgtccaccgcgctcgatgtggcacgagtggaatccggttttaacccttatgccatcgccgagattatcccgaaggccagggcagcctccagtgacacccctgttatctcccattttcccgccagccgggccgatgccgagcgtattatccgacgccttgccgtacagaaccgccgttactctgtcggactgatgcagatcaccagtaccaatttccgtcactacggcgtgacggcctctgatctgcttgatccctgcaccagtctgtctgtttttgaacgcatcctcagcgactgctaccggcgtggcggttccctgaaaagggcactgagctgctattactccggcaatttccgtaccgggcaacagccggaagcggcgttttccgggacgagctatctccagcgaatcggttatgcgccgggctcccctcactatgccgttcccggcacccgcgaggacaaatcagtggctgacgtttacccggaagcctttcctgccggtgatgcctcccgttcccgcgtgctctggccaggcgctgtcgtccgtggcgtccccgcgaacctccggcagaaaaacatcaacacagcacaactctccccgccgtcagtgcgccggagtctcccgcagccaccccgaaaggaggaagaataa

SEQ ID NO: 83174 - DNA, 906 bp, Citrobacter koseri
atgaaaagcatcatccttatcgcactggcgctgatgatgtgtggcacggcatggtgcgcggccatcccgcaggccagccgctatgatacccgcgttcagcaggttgtctataacccgctgaacgtcaccgtcgtcagcacccggcccggcttcatgaccacgctggtctttgacagcgatgaagcggtcatcagtgccagacccggttttgaggaggcgtgggaggccactcctgacgccaatcgggtcaacgtccgcccggtggcgctcgttcagggcgcgcccggtgcggacggcaatacaacccaggtggtcatcccgcccaacagccgggactggcacaccaacatgctggtcgttaccacccggcgtttatataacatcgagctgaacgtcattgatgataaatcaccgcagcagcctgctttccaggtgagctaccgctatccgggcgaagccctggagaaaacccgccaggcggaagcggtcaggaaacgcgaacagacgcaaaaacagcagcaggccgacattcagcaggccctgaacagtgcgcagacgccgcgcaactgggactacctcaaatacccgggaagtgacagcgcacgtattgtccctgatttcgcgtatgacgatggtctctttaccttcgtgggtttctcccccgcaaaatccattccctccgtgacaaaagcgctgaacggccaggagcaggttgttaacagcaatatccgcaggaaaggcagctttaccgtactggttattcaggaagtcacgccccgtctggttctgcgttccggtcatgccgtagtcggactggaaaatcgtggtttcggcagggtccaggccgctgatggtgccacggtttccccgcaggttgagcgggtagaaaaacccgcgacccattga

SEQ ID NO: 83175 - DNA, 1254 bp, Citrobacter koseri
atgaacgacgaacacccgcatcctgtgccggatgaatcccggaccaccccggcacaaacggatgaggacattgccgcgctggagcgcgaggcccgtgcaaagcgggaagcggagcttttcaccgcgcaggaggatgaagagagcgatccggtacaacccgcgatcaacaaactgaaaaagcgcaggcgcgggaaagccaccgcgtttctggcgctcgccgccgtcgcgctgatagcgctggcatgggcgggtaactggatataccgcaatttcctctggcagcaaggtgaggaaaagcggcagggtgccgcgccacagccgaaccggagcgattaccggcagcgtaccgatctggggacgcacgataccgaagcgggcacaccggaaccggcggacaacagcccgcgcagtgcgacggtcaccgggccggagacaccgccggaactggataaagcccgttttctgattcgccgggataactctgccgctgcggcccaaaacccggtccggacccggcagcaggagatgacacatgcagcttctgacggtcagcagtcagggacgccatccactggctccggtcagcagccagacacaacgccgccacagtcggaacaatccccgtcatcagtaaggcgtattccttacaacccggatctgtacgtgccggaaaataccgccattccctgttcgctggattaccgctttgtttcggaccgggcggggaaaatccgttgcacgattgccgaagatatctggagcgccagcggtaatacgaagctgattgaaaaagggaccaccgccacgggtatttaccagactggcgcagacacagggatgacgcacggacagggccgcgccttcctcatcatcacgaaactgcgtacccgccaccccccttatcttgatattccgttggtcgatacccacgctgccggggaactgggcgaggccggtgttgacggatggatcgactcgcatttcagcgaacgattcgggggcgcgttactggtcggcatgatccccgatattggcgcatgggcctccaacagtgccggtcagaaagatcgtaacacggactataccgaaaacagccgtcaggcgatggcggatatggcgcggaccacactggaaaacagcatcaatatcccgccgaccgtgcacaaaaatcagggtgagatcatcaacctggtcaccggacaggatattaatttttccggtatctatacgctgaggatgaaaaatgaccgctaa

SEQ ID NO: 83176 - DNA, 399 bp, Citrobacter koseri
atgatgaaggttatcaatatgctgctattttcgctggtactttccggttgttcttcacccccgccaccggtgcctgttgaatgggataagccgggccagtcagtcaatactggtttaccgcaatggcgagacaacccggttattattccttctccggtggttaacgataaatggttatactccattaatgcacggaattataacgaaacacgctggacgcccgccgtattttacgcggtcgcccattcaacgcgtattgttgttgctgctccatcaggtacggaatttttcattgcaaaaagctggcttcaccagcatggcgcaaaaagcgttattgaatatcaccctatctctgactgcctgacatgcagcgatacccacatttatttttcgcattaa

SEQ ID NO: 83177 - DNA, 306 bp, Citrobacter koseri
gtggaaaaagaaaacctgtttatttccaatgtctattcaatgcatcaggacagaataacagtcaaagccgtgtacagaaagctctctgaggaagcgaatcacggttgcgggctttattatgagatatatggaagccggtttatcagtttattgcgacatcatctttcacagcttaatgaacaggacgcagagaagctcaggcgatatgccgaaagtcaggacacgaaagtcgatgataaaacgtaccgtgcggcattaaatgctgaacaggaatgctggactgaaatagcccgcgagcagatgtga

SEQ ID NO: 83178 - DNA, 795 bp, Citrobacter koseri
atgagcttacgtcaggcatgcaggacattgtcgctgagcaggacggtgtatttttatcagccagacacacagcgtgatgaaccggtgatccggatgttgactgaagcggctgaacgttatccacgctacgggtttaagaagctgtttcaggtcctgcgccgacagggacatggctggaatcataaaagggttcaccggatttactgcctgctgaaactgaattttcgccgtaagggaaaacaacgcctgccgctgcgtaatccggctccgctggcgacgccagaggcgatgaaccagagctggtctatcgattttatgcacgatgcactggtgtgcggcaggcgcttccggaccttcaacgtggtggatgattttaaccgcgaagcactggcgatcgaaattgacctgaatatcccggcgcagcgtgtcgtgagagtgctggacaggatcgtggcaaaccgcggatatccgctgaaaatgcggatggataacggaccagagctgatctcgctgacactggcacaatgggcagaagagcatggtgtgatgctggaatttatcaggcccggcaagcccacgcagaatgcctttatcgagcgctttaaccggacgtaccggacagaaatactggatttttatctgttcagaacactgaatgaagtacgggaaataacagagcgctggctggctgaatataacagcgaacgccctcatgaatccctgaataacctgacgccggaagaataccggctgatggctgaaaccccggaaatctcaaaaagtgtgtggaactaa

SEQ ID NO: 83179 - DNA, 444 bp, Citrobacter koseri
atgagtaacctgaaacagactttagtagaaaatgaatgtattcagatagttgaatccatttcggactggaagtccgcggtagaactggttgcacagccacttctggaaaaaaattttattaatcagtcctatctgcaaagcatcattgatgagacaaattcgatcggcccttactacgtttatgacgaagagcgtattgctttaccacatgcccggcctgaatgtggtgcgcttaaaaatggagtgagtcttttgctcataaaagaaggaatctccatagcaagtagtacacctgtatcgattattctcatgttttgtgcaactgatgcaaaacagcatattgaatcgggtattaccagcataatggaactgctggaagatgaaataaaaatggagcgtattagaaaagcaaattctgtttccgaaataatctatgttctctga

SEQ ID NO: 83180 - DNA, 306 bp, Citrobacter koseri
atgaaaattgtgcttgcctgtgcttatggtatgtctacaagtattgtagcaaaaaaaatttccgccgctttaaccccggaagagaaaggctggaaaattgacgcaaggaatattgacagccttgcggagtacgcagcagattatgatgttgttttgcttggcccacaggtacgaatgcgccttgatgatgccaagtctatatgtggtccacttaatattccggttgatcttatcaatgctgtcgattacggcacaggtaatggtccaaatatcatcaaagctatccgtaaaatgaagggtatctga

SEQ ID NO: 83181 - DNA, 1311 bp, Citrobacter koseri
atggcatttacacatattagttcattcctcgagcggtttttaatgccggtcgcgaatgttttagggaagcaaccacatctgatttcggtcagaaacgggatggtgttcacgctgccttttaccgtagtcggcagtttttttcttgtcctagcatcaccaccagttgatccggctcaactggatatgaatagcttctatgctcctttgttgatgggatggtataaatttgcccagacaaacaatgattatctgatgatgccctataacgtgacgatgaatatactgtctgtgtttgttgtgctgggtattgcttatagtcttgctgcatatagaaaaatccattcattcacatcagccattaatgcactggcaagcttcctgatagttgcctccggttttcatgaagggaaactggatgctgaattctttggaggaccagggattgtaacagccattcttgtagggttggtcagcgtagaaattgcgagtttttttattaatcgtaatatcacactcaaactcccaaaaggtgtacctgatgctattgctgaggcctttaactccttaattccattagcagcaaacgtgatggtttggtggacgttaagcataatcgctctggtcacgctcgataaaagtattccagtattactcttttctgtcatttcacccgcaatggccggcctagataacggtatatttatgactgtcgcttatggctttgcacagttattctggttcctgggcattcacgatacagcaacggtatatcccttgctcaaccccatgggtcaggcaaatctattaatgaatgcacacagctacgctattggcacgaaaatgacagctgtttatactgagccattctggtccacttttatcgcaattggtggttcaggttcaacatttgcatttgtttgcttgttgctgaaaagcaaagcaaaacacatgaaacaagtgggtcgtattggcttgattccaacgtttttcaatattaacgaaccgattatatttggattacctatattccttaaccctatcctattcattccttttgttattgcaccaatgatcaacacggcactcgcctatactgcaataaaccttaacttaatcggccatagttttatcagcattccttggtctacaccgtcgatactgtctggaccactatcgtcgctggattatcgcaacgctattatgacagtggcattaattatacttgacggatttatttattatcctttcttcaaaataatggagaaacaacagcttattgatgagcgaaaagcagaagaggctgaggaataa

SEQ ID NO: 83182 - DNA, 1338 bp, Citrobacter koseri
atgactatctgggatgattttacacacattccggggaacagctttaacaatactaacggagatattgcttcagatcattataatcgggtagatgaagatattgctctaatgaaatcaatgggacatacatcttatcgtttttctatagcatggtcacgaattttgccaacagggagaactgataatattaaccaagcaggtattgatttctacagtaatcttattgataagctactgagtaatggtattgaacctatggtaacgctatatcactgggatcttccgttgacattggggcgggaaggttcatgggaaagtcgttcagttgttgatgcttttgtggattatgctcatctgtgtttcaaacagttcggtggtcgagtgaagttgtggacgacttttaatgaacccactttcttcatcaaatcaggatatatcattggcaactatcctcctcaggttaccgatttccgccgggctgcgatggtgtttcataacgtgatggttgcaagtgcccgaacaataaaattgttccgcgaaatgaagatagacggtattattggagttgtgcatgcgtatgaaactatttatccgaaaacaaactctccggaagatctgaaggcagccagcattgcagatgatatttacaataatattgtttatgatgtagcggttaaaggtatatacccagagcaactctttaacatgcttaaagaaaaaatggatgtcagttttattgatgtggatgcaaaccttttacaaagtcagactgtcgactatatcggagtaaattactactctcgatatattattgaacattacaatggaaatgaaacagttcttaaacaaaataataccggctcaaataataataaaacacaaatatctgttgccgggcttttccgcgttgtcgagatcgaaggggggttcattagcgaatgggatgcagatgtctatccggaagggctaactgatgctcttctccgcctgaaagaaagatataataatatcattatgtatgtgacggaaaatggcatcggtttgcgtgaaaaagctgataaaaatgacatgataattgacgatgttcgagttgatttcttgcggaatcacataaaagccatacattccgctattgaaaaaggagctgatgtcaggggctattatcattggtctactatggatttatacagttgggttaatggatatgataagcgttatggcctaattcacattgatttcgaaaataattgcaaacgaacaccaaaaaaatctttttatgaatttaaagagatttctgtatctaatggcaggtctctttttgagaattcatcctgttaa

SEQ ID NO: 83183 - DNA, 459 bp, Citrobacter koseri
atgtctgaactggatatagctaaatggtctggtcgtatcaatgcgaatcagaacagagtttataaccatgtgtcagaagaaaatatgttagataaaatcaaagctattaaattgaataggagtaattactgtcaaagggagtcaatacccacaaatgaattgacaattgattttgataaccttaatcaaggtgcaatacacttaactgaatttggttactgtgtacataactatttaatcaagccttgtgcaaaaattaatcatcttattgaatgtgataatgaaacaccggacattaactcagtagatagaattagactgcaatctgtccgagagaaagtaatgcaattaaagagaataactcagatcgcttatgaaaatggtgattatggtgcagacaaatggttgcaacaccatgaaaaaaatttggaaagaattaataagcttttgaataattaa

SEQ ID NO: 83184 - DNA, 315 bp, Citrobacter koseri
atgaaaatatactcaattatcacagttatcattaccaccttccttctaaccgcatgtaacaatgaaccatcgcaagacgatatatacaatgttttcaaaagtgttgtagatagaacaaatacaagtatgaaagctcttgattcaagagttacagaaaaagatcttttaagaatcgattacgtgaagaaagttagttgcacagaagaagcaaacaatgtttataactgcattgtcgatgcctctattaataatatgaaacaaacaaaaccagtaaaactaatcaaatctgatggtgtctggaaagaagttcagtag

SEQ ID NO: 83185 - DNA, 1194 bp, Citrobacter koseri
gtgaagggtatgcggaagatcaagaggggtaagagcttcactggtgttgttcgttatgtaatgcaatcgggagcacaccacaaaagtgatccagtcgtcattggcgggaacatgttaggtgattcagcccttgaactgatcgctgaattcgatagcaccaagcatcttcgccaggatgtcgcaaaaccagtttggcacaactcgcttcgcttacctgatggtgaatcactatcgaatgaccaatgggcaaagatagctgacgactatatgaaaaagatggggtttagtgatactcacctctgttgctatgtgcttcatgacgacgaaggccagcatatacacattatcgccagcagaatcgacattgccagtgggaagctctacttaggtaggaacgaaaatcttataagcacacggatcatcagtgaacttgaaattactcataacctgacagtgaccaaaactgcatctcccccctcgcaagcacaaccgaagcggaagagagtgtcccgtaatgagaaaatgctatcggaacgaaccggggtgctttcaccaagagaagctctgcagcagatacttgataaaagtttatctgataagccggaccttttgactttcacaaaacggctggaagaagctgaagtatcctggacggcgaatgtcgccagcacaggcaaaatgagcggcttctctttctcttaccgcgatatagccttcaaagcttcgcaattgggtaagagctactcctgggcaaatctcagtaatcggcttaactacgaccccgaccacttagaagctctgcgaagcgacatatcgataaaagaccaacctgctcttcctgctcctgctcctgctcctgctcctgctcctgctcctgctcctgctcctgctcctgctcctgcaaaagatgttgcaacaacggatattccaagggaaagcataagtgaaaaaattgctggactcgaactgcgactcagagaagacagacgaaacgagatcgttgagaagattcttcaaaagaatgcaatacaacagaaaaagcatctaaggctcagtagctggtttccctttttacaacggctcatagagcttctccgaaaatatggaaagagcatcctccacaaggttcctacaaacttctcagaagtctattcaacacatcatctgaaacctacaagaaaaattcgtttatag

SEQ ID NO: 83186 - DNA, 438 bp, Citrobacter koseri
atgcataagataaattatagcgatgatatagatctatccaaaatttcccgccgtggtggttttaataaaagtaaaataccttcagaagcagtaagaagctattgtgtcagtgtccgtttgaatgttgaagaactgcaactcctgaatattaagcgaggctcttataaaaagggagagtggcttcgtatggcttcccttcaaaagttacctcatgttatacctgcgattaatacaaaagcctggaaagctttaactgacatatcacaaaaactaaatcgtattgcgatccatatcgatggtaagagcaaagatagccagcttactcatacagagcttttcgctgtgaagcgacaacttgaagagcttcgtcacaacttgttaagaacagatttttggagtgtccctcgtgaagggtatgcggaagatcaagaggggtaa

SEQ ID NO: 83187 - DNA, 228 bp, Citrobacter koseri
atgaaatatataaataataaatatgtgcaaatcacaatattatcaacagtatttctattattgttttcttttaatgttgctggggttgtcatactcttttttaaagatatcgatgacacattaactggcgatttattggggctgaacttaacttttatgttaagtttagccccagtggtttatatatttttaatggcaagtatttgtgcgttattgaagagtgtctga

SEQ ID NO: 83188 - DNA, 243 bp, Citrobacter koseri
atgattgatgaattccatgttatgtatatgtacaaaaaaattcaagctgaagcggctactaccgacatcaaaacactggaacagtttttgaagaagttccgccaagttgttgcggagcgccgggaagaatactatcgggagattggtgagaaaaaagcacgtaagttgagaatgaaaagagcacaaagattacttgagaaaatgacatgtgatcgtgtttcaccagaggatctaaaggaatga

SEQ ID NO: 83189 - DNA, 351 bp, Citrobacter koseri
atgagctttgaagctaaaaaggaacacgccattgccattatggaaagcaagaagatgtggcgtagtaattattcccctcctttgctacgcctcgcatggaaagctggattcaagataccaccgctaccttttgcctcattctggcaaataaccttgctgatgggggtatggtttggtccggcatgggggatttgtatgtggttttcttcatggaaggacagtggtatgcaaccgggcattgcatttgtctcaagtatagtcgcaggtatttgctttggtgttcttatggctgcgtatcattggtggcgaaagatagttaacaatctgccagactgggacagtctggagtaa

SEQ ID NO: 83190 - DNA, 384 bp, Citrobacter koseri
atgtatgccaatggttatggcgtggtacaggacttacaaaaggcaaaagagttgtatgagaaagctgctgctcaagactttgctaatgcccaatttaatcttggtatgctctattacaaaggtgagggagttaatcaaaactatcagcaagccagagaatggtttgaaaaagctgcgtctcaaaatcagctgaatgctcaatataatttaggtcagatctattactacggtcagggcgtgactccgagctatcgaaaggcgaaggaatggtttgaaaaagcggcagagcaaggtcatgtcgatgctcaatataatcttggcgtaatatacgaaaatggtgaaggcgttagtcaggattttcatcaggcgagggtttggtattga

SEQ ID NO: 83191 - DNA, 1635 bp, Citrobacter koseri
atgaagattatttcaggaaaaggtgtatcttcgggaatagcaaccggacgcatctggtgctatatcccacataaaagtattatttcttccctgcctattattgacacagagtatgaaatagaaagacttaaacaggcatgcaccatagttttgttacaattgcaaggcttggaggaaaaagttcgaaatgatattggagatgaagctgcgcaacttttttccgcccaccaactgatgttgatggatgaagattttcagcaagaaatccaagaggctataaatattaaacatgctaatgctgcgtatgcagtaaagcaggccggtgagttattctctggtctattttcaaaaatggatgatccgtatttcaaggctcgtgccacggatgttcgggatattgctgaacgaattattactgctttagaaggtaatagtagacaggaatcacaacaaccagcgggtatggttattttgtatgcggatgatctaacccctagtgaaaccgtattgctagatcgggagcatattaccgctattgtcacacgcctaggttcagtcaattcacattcttctatattggctcgtgctatgggcatccctgctattgctggcttagaattaacagagttttccacaaattgggatggtttggaggccattgtcgatggggatacagggcatctttatctgagccctgatttgagcacgaatcaatcctataaacataaaatgttattacggtatcaagccaaacaggaaatgttgaaacaaagggatactcctgcgattacgatgtgcggacagcatgttgagttatatgccaatattggatcgttaacagaagttgccgcagccatagaaaatggggcagagggaataggtctttttcgcagtgaatttctttatcttgggcgttcggacctaccgcaggaagaggaacaatttagtgtatatcgttcagtagctgaaggaatgaaaggtaagcgggttatcatccgtaccctggacttgggggcagataagcaaactgatgcattatctttagataaggaagataatcctgctttaggctgtcgtgcaatccgattgtgccttgcccggcctgagcttctggttgttcagttacgtgccatattaagagcaagtatttatggtagaattgcaattatgtttccgatgattacttctgtttgggagataaatgctttaaaaataatttataaacaatgccaagaacaactggaaaaggaaggaatcgcttatcggactgatcttgaaattggtataatgattgaaacgcctgcagcagctattattagcgatctgttggcttctgaggttgactttttcagcataggaaccaatgatttaactcaatatactttggctgcagatcgacaaaatcctctaattgaaccatacagtgatccaactcacccggcattgcttagacttataaaattagtttgcaataatgctcatagacaaaagatatgggtaggaatttgtggtgaattggcagcagacttaactataactaaatatttgttacagttaggtattgatgaactatctgtctcacccccgtcattgttgccgctaaaaaaaacaattcaacacctcaacctgacttaa

SEQ ID NO: 83192 - DNA, 258 bp, Citrobacter koseri
atgaaacaatttcaatacactattaaagatgatctaggaattcatgcccgaccggctggtctcttggtacgtttagctataggtttcaattccacaataaacatatctaagcacgatcggttagtcaatctgaaaaaaatattcagtttaatgagtttgaatgtcaaatgtggtgatacggtaactataactgctgatggaaatgatgaacaatcagcgatcaatacattacagaagttttttcaacaaaacctttaa

SEQ ID NO: 83193 - DNA, 345 bp, Citrobacter koseri
atggacaaaagtgaacaaattaatagtgctgcaatggatatcattatggatgctggtgatgcacgggtattgattaccgatgcgttacatgcaattgagaaaaatcagtacacactggctgatgaaaaaatagcagatgcacagaaaaagattaaaaaagcacactgtaagcaaacagatatagtacaaagcgaagtccatggtgagttattcccatcttcattattattttcacatgctcaagatacgcttatgacaataaatagtgagctattgatgagtcgacgattacttaaaatatttcaggcacttgataacagaatttgcaagctagaaaaacggtaa

SEQ ID NO: 83194 - DNA, 897 bp, Citrobacter koseri
atgaaagctggtgtctgcttattcttggaaagtttttctctggataaagatgaatatattcttatccagcagatttcaaagttaaaaaagttaatgaaacggatgaactctgagtttacgaaattctgcaaatcaaatgagtttgactcaaaacttgcactttcactgtgttcaacctcatcagatattggcgggttaatgagccaattttatgatatgggaaaaatagaagttttatctttgagttgtgacgatttgcttaacgttataaatagtacccctccgttgtataatagtagaatgatgtatatgtacaatagtagggataacccaattttaactgcaatgcgtgattcaacaattattaatgaagaggaattagtcatgcattgtcgtaaaatacttgacgattatcccagagataatgttgaatacggaaaaaacattcaagacatatttaaaaacattatatttatgaataatgaggaccatgaagagtttaaaacattcaactccatggataaaatagatggtgggtttgaaaattttcataaaagtataactgattttcttttcttctgtaataactatgaagtgattcctggggattctgctcaaaatttaaaaaacatggattcggcattaatatatacagtatgtgaggaaggtggtggtaagtcaggacgaaaggcgggagagctaaatagagacttcatcattgacaaagtcaaatacacagacattaactgtgaattccattataaactattatatgaagatggccaaaatagaaaaggtaaaagatatagtggcaaccgcatatactttggtttctttaataaaattgacgggcagccccccaggatagcaatttcacatattggcaagcacttatag

SEQ ID NO: 83195 - DNA, 639 bp, Citrobacter koseri
atgaatagacaagatagactaatactgaaagatggtaatccaaacaaagacgacccaagaatacatcataattataataatatcagggttgcgaataatattcaggcatggatggatgaaatatccccaaattataaaatagagccaaaattggaagttagtgcaaacattgcttataacacaatacaggctgagtcaggaaaacaaactaaacccaaaaacattggttttggttatagctatgctttgagtattgtttcagcattacttttagcaaaaccgggcgaattagtagttttagaaaacccggaagcccatttgcaccctagaggacaaagctatatgggtagattaatagcttacactgctcaagcgggagtgcaggtattggtagaaactcatagcgatcaccttctaaacggaatccgtgtcgtagcaagaacatctcctgacttttcacctgagctaatttcgttattttatatttcacatgagaataatgaatctactgcagaaaagatatctattggcaaagatggaaaactttcaagttggccgaaaggattctttgaccagcaatcaattgatatgtatacaattatgacaggctcttttgatacccctgactcaatgaaataa

SEQ ID NO: 83196 - DNA, 270 bp, Citrobacter koseri
atgaaaaatattaaaatgataacactctttcatccccatgagaaaacaccatttatgatctgtattgtaaacaaagtagaagatactgaacatggaataaaactcactcttgaaaatggcaatgatatttgtgtcaataattatagccattatctgttatcggagtctgtaagtcgttgcgataaagataggttgaaaaatatttatattcgcttggtttcagaactcacacagatgagtgaagaaactataaaatcacagatgttataa

SEQ ID NO: 83197 - DNA, 963 bp, Citrobacter koseri
atggaaggtaaattaattttttgttccgatgcaatactgcggtttcagtccgattatgatgaaacctcggctgttccgttgctttccatacagaacgcgatagctgatgctgaccccttctttcttctccgtttctttcgccatacggccctgactgaagaaggaacaacactggcaagtatcttcttggctatagagccgtggaaggaattgttagcggcttatctggacagagatgttggtgcctacatagatgaggtaagaaaaccgtccgggccaatgacatgggatattgaatggattgggattgaccgtcgaagctcggtttatcgcgcttacaagcgtcaggatatggaagaaggggaagatttttcaacctattttaatcgcgagcggttctcgactgatgaatttgacatagaaagtagctgcgatgcttcaggcttcattaaaggtgataaagaacgctggagtatcagcggcgatgttcaacaaattaaaaacctgcctgtaatcctctatagcaaacagacattgatgacttcagcgaaggacggattgttgaagaagaacgtatcaggggtgaagagttccaagcatagctgctttgtttatggcgatacctcgttttctttcagcgaggtaatggaagctatcttcatcagtgggctgttcttctatgcgccaagagacgccgccagtagtcttgatgaactgaaagcgagtttggctgagttggaagaagaactggccgaagagcctgaaacagaatcggctggtaatgaaacagataaagaacctaccatagtcgtagtcgaaggtgcttttgatacggtcgctgctcatatggagtcagaagctgaggagtggcaatccattaagaagctgtgccagcgagaaggtgagctacccatacgcatcggtagtattaaagtggctgagcctccagagtttcgtttttag

SEQ ID NO: 83198 - DNA, 417 bp, Citrobacter koseri
gtgttcaataagggcttccccatccgggttaatcacggctatcgttctgctggatacagtgtcagtgatgaaatcttgaaaggtctggctaatcaggggctgcttgatgtttcgcagcaacctaacggctttagcagcgttgatgttctggaagtaacagacaaaggccaagaggttgagttttgggaccgtgagaaaggtgcctgtgttggtcatcgtgctgttgccgagataaaggaatggaccgaaccgggaaacggtaatcagaaagttgttcgcgtgtcttattcttggacgttagcggatgttccttcatgggtggacaaaaaagcgttctccagcgtcaagggtatgaatgaacctgaagaaggcatgattaatcttgttaaaaccagcaatggctggaaagcgatttaa

SEQ ID NO: 83199 - DNA, 258 bp, Citrobacter koseri
atgatgacgggaatgcccaaatcatctcctaactattaccttttatttaaaacctctgatacaagctactgcggcggaatgatttggatcaattactactccggccttgatgatgccgttctgtcttacaagaaaggccagaaagtcagtgtcactggaacagtcaacaacttcgaagttcgtagcttcgccacggtaaacaatgccgatatgccggttcgtctggttgttctgagaaacggcacgatcaaccattaa

SEQ ID NO: 83200 - DNA, 549 bp, Citrobacter koseri
atggatgattacatttacagagttgatgttgcaatcaaacttaagaatattcaggatgcttactttcgtgctaaaagatgggaaaacagaagtgggatagattatccacataagctgatgaaaaaccgttatgctggactcagtagcgcagaagggatttatctaatctgtttctataccagccaacaaagagcggaaacttctttgataaatgatttttcctattttggtgattgtaaaatttcacgttgccataaagaagtgatattaggatctggttttatagaaagctgggatgatggttttccagttggggaggcttatttattttggtgtcaggaaacgctgacctcaaaaaacactttattctcatctattggcatttctttagagcactttgaaacattgaatcagggtgaatggattccactaacagactatataaggaatgaatctccttctgttaatacctcaataaatacagaattgttgttcgaagataaatgttcaacaaataataacaaagcatggtggaagttttggttataa

SEQ ID NO: 83201 - DNA, 402 bp, Citrobacter koseri
atgactgacgatattaaagcccttaataacattcgaaccctccgctctcaagcacgagaaacagatttggctacactggaagagatgctggaaaaattaactgctattgtcgaagacagacgtcaagaagaatcgctggcacagcaacagaatgctgaacgtcaggctaaaatcgaagcgctgcgtgcacaactgcttgaagatggtattgacccgtctgagctgctgggcaatcctaaatcctcccgtccggctgctgttcgtgcacctcgtcctgctaaatacaaatacattgatgaaaatggtgatgaaaagacatggacaggtcagggtcgtacaccaaaagcgattgctgctgcactggaaggtgataaaagtctcgaagattttgaaatcaattaa

SEQ ID NO: 83202 - DNA, 348 bp, Citrobacter koseri
atgaatacaaaacttaacgtattgctggtatgtggctctggtgcaagctctggttttatggcagccaatatgcggaaagctgcacagagaatggggttagaaatagacatcaaagcacggagtgaagcagaaatcgaaaactacatagacgaaattgatgttttaatggtggggccacaccttgcatatattttaatggaaattgaagagtacactcatggtgagaatgtagctgtaattctgatgaagccagaatactattctacactaaatggtgaggctgcaatttctcatttacaacaggtcatcgcacaaaaaaacaaaaaagaggatgggcatcatgaataa

SEQ ID NO: 83203 - DNA, 162 bp, Citrobacter koseri
atgaagggtaaaatttgcattaccgaatctttcagtgtgacgatccatatattatggttaagtttattcatacgtggactgaaatcattttctagccaaattaatagattattcatgatgcccatcctcttttttgtttttttgtgcgatgacctgttgtaa

SEQ ID NO: 83204 - DNA, 468 bp, Citrobacter koseri
atgagaaaagtaaaaacagacaacagtgatttaatccagtatttagatacaatcaaagaactaaaaaatcatattccgattgaagaatacagaaatgaatatcgtaggctacgctctgataacgttcctttgattaaagcccaaaagtttaaatctgcacatactgaactgcgccgtctggacaagaagaaagagtccctgcttgataaatttatcgatgagcttaaccctgttaaccaagcttccgcttttgcttctaaaaacattgataagcttgaaacgtatagcctatatagaagaaatctccttgagaaaagcgatgaagaaattgttgccttagtcataaaacagcgtacaggagccgctctggagtttcagcgttcaattgaacaaagccttgagcaactcgctcgtatctcgtcagagttcgaaccatcaagccaaaagcgcagaaaaatgtctctttaa

SEQ ID NO: 83205 - DNA, 138 bp, Citrobacter koseri
atgcctattatccacatagggatcatcatgatgggattccaggctatacatccgaagaccagcggctcatttatattaaaaaaagaaggtgccaagcaggcccggcctagggcttttaattttcttgatttagactga

SEQ ID NO: 83206 - DNA, 414 bp, Citrobacter koseri
atgttatcagagataaggctcattgaggtcagcactagcaacatacatttcaagcatacccctttgaaaagtggtactaataggggcaattttgaagctgagatcggtgagattactgtcgaagccggtaaaaaattaaaatccgatgaagcactaagtataattgagataactgcttccccaaaggttgtaggtctcagcacgaccagtgatggggcaatccatgaaacgtttaacctgcaatttggtttacgtttagtattcacttatccagacagtatcgatttaaccccagaattacttgatgaaaaccgatggttctttgaatataacgtaaaaatattctttaaaacacaatgtgaacaaatacttaagccaacaactatcaaaaatattgagctaccatttgggtag

SEQ ID NO: 83207 - DNA, 447 bp, Citrobacter koseri
atgactgttgacaacaattctgcaggcgaagttttcgaacttccctatgtcagtgaaagggagatggcttccgaacgattggtgttcaacaccacggaggatctcctactagccatgcaagatgcaggcatcacaaaaggtgagcttgccaggaaacttggtaaatcaccttcccatgtttcgcagctgcttgatggaactagaaacatgaccctgagaacattatccgacatatcatacgcactgggtgctgaagcaagggtctctgttttcagaaatggggttgatgtttcacatcacatcattccaccattaaggcaatatgagactagtgaacccgaactgaaagatactagtgaaacaaaaattgtgcgctttgtgataggaagtaagtttggctctagcaacgacaacaatgatgtgggtattttatgttatcagagataa

SEQ ID NO: 83208 - DNA, 123 bp, Citrobacter koseri
atgtaccgcatctatgtgcttttcctgaagacctggatgattttttattctaagtacatgaatcttggaaataaaggtgagcttcgtctgtcaacaatcgcagccgctaccatagtggggtag

SEQ ID NO: 83209 - DNA, 372 bp, Citrobacter koseri
atgaaatcaactaccgttcttgagaaaaagcttgaagccgcagagaagcgcatagcagaactggaggcgcgggcattcaatcccgcaattctggatgtgatagccgaacgccagcggcaacaatcggttgaagggtggacgccagagcatgatgacgaacattctggcggggaaatggcgcttgcggccagctcctatgcgctgtatgcacaccggaaacctatagccccagcaatcccttttaactggccgtgggaaccaaagtggtttaagcaacaaggtgctcgccgagacctggtaaaagctggcgcgttaattctggcagaaattgaacgcattgatcgcgccgctggcatcggtaagggggagtga

SEQ ID NO: 83210 - DNA, 309 bp, Citrobacter koseri
atggctagcctgctcaacttcctcggcatagattcccggcgtagcagcgtgactctcgttgaatacaaatatgatccagaggcgcgagagaaggtctcaaagtatctcgtcaggcatacttccagctttcgcggaacaacgctggaacaatacgtcacagtagaacgcgaccgttatggcgcattcaaacctgtagtcgcgctggacgatttccccagcggtatgagtgacagggagtcaatgctgaaactggcagattggctgcatcgccttggcgtagcgattgaagatgaatggagtacaccatga

SEQ ID NO: 83211 - DNA, 246 bp, Citrobacter koseri
atggctgctccagaaaacaatttacattacgccggtaatgaattgattattcatgactcaggtgacggtcctgatcaattttatcgctacgttagtccgaacgacctaacaaatgctgaattattgaacgcgctgcgcgatgttgttgagcgcaatggcattggatacatagaatcatccgatacggtagtacgcgtcggtgatcatgttggtccatgcaaagagctatttaaaaaattttcctaa

SEQ ID NO: 83212 - DNA, 180 bp, Citrobacter koseri
atgaacaaagaaaaagagaaccatcaagatgttgtcctgaatgtgaaaataattaattccacgccaaccacggcagaagaccacgaaaactggaaaaacgaagattttgctcgaatcacagatggtgtggaagtgactcgcgccggggtttttgatggcgagtacactaaaggcaggtag

SEQ ID NO: 83213 - DNA, 672 bp, Citrobacter koseri
atgaagaaaatattggcagtagcattagggacagcgctgttggctggatgtatctcgccaaagtacaactatgtaccaacaacgcaaagtttaagtgagccgccggtaggttccgttaacacatcgtatgttggagatgctctgttatctcaagggattttagcaaaatacgaagggataaaagttactgcgccagcaagagtttcatgggcttatactgtaacaccagggaatctgaaaaaagtcggtcaagatggtaaatcagagttctatatgccgacaggaatggcagacacagctaacgttcagaaagcggcattagctgatatgtggcaggcattgatggttaaagaaggtactaggacgctttgtgttattaccgtcttctcagcatctacttgcgaagacaacatgcctattgaaaaaaacaacctaaatattagttcttctaataattttcagcagacattgctgtataacggccgtgtaggaaataaaatcaacattggttatcgcgaatcgtcatctgatatggcaagacccgccttcaataacgatgtcgaatatgacttatcagaatcgaaaattataggctataaaggtgccaaaattgaagtccttgaggctacaaaccagagcatccgatacaaagtgattagtaactttagatga

SEQ ID NO: 83214 - DNA, 1071 bp, Citrobacter koseri
atgaaactcacaagacgtgactttatcaagacggctggagcggcaaccgggactatggcgatttcttcggtgatcccaatgcctgcctgggccgaaaaccaaaatggcggcgccatcctgactgccgcacgttggggggccgtatatgtggaggttaaagacggcaaagttgtctcttcaaaaggcgcattacctaaaaccataccgaactcattgcagcaaaccgcgccggatcaggtacataccaacgtccgtgtaaaatacccaatggtgcgtaaaagctatctggaaaatccaggtaaagcggacggtaaacggggaagcgatccctttgtgcgggtgagctgggaacaggcgctgaaactcattcatgagcagcatagccgtattcgtagcagctatggcccgtcctccatttttgcgggttcctatggctggcgctccagcggcgtcttgcataaagcgcaaacgttgctgcaacgctatatgagtatggccgggggatatgcaggccataccggggattattccaccggggcggcgcaggttatcatgccatatgttgtgggatcggttgaggtatacgaacaacagacgacatggccgatggtgcttgagcacagccaggtggtggtgctgtgggggatgaacccgctcaacacgttaaaaattgcctggagcagtacggatgaacaagggcttgagtattttaatctgctgaagaaatcgggaaaaaccgttatcgcgatcgacccaatgcgctcagaaaccattgagttttttggcgacaatgcaacgtggatcgccccgcatatgggaactgacgtggcgatgatgctggggattgcgcatacgctggtgaaaaaagagcgtcacgataaagcgttcctggaaaaatacaccaccggttatccgcagtttgaagagtatctgctcggcaagagcgacaacgttgagaaaaccgctgaatgggcatccggcgtctgtggcgtacccgcagaacagattgagaaactggcggaaatttttgccagcaaccaaaccatgctgatggcgggctgggggatttaa

SEQ ID NO: 83215 - DNA, 342 bp, Citrobacter koseri
atgaacaagaatatagcaggaattctgagtgcagcggcggtaacgactatgctggcagggtgtacggcgtacgatcgtacaaaagaccaatttgtccagcctgtagtaaaagatgtgaaaaaagggatgagccggtcgcaggttgagcagattgccggtaagccttcatctgaagtgagcatgattcacgcgcgcggtacttgccagacctacatcctgggtcaacgtgatggtaaagctgaaacctattttgtcgcgctggatgacactggtcatgtgattaactccggctaccagagctgtgcagagtatgacaccgatccgcaggctccgaagcagtaa

SEQ ID NO: 83216 - DNA, 333 bp, Citrobacter koseri
atggacagaggggaaatctggcttgtttcactggatccgattgccggtcacgagcaaagcggaaaacgtccggtgcttatcgtatcgaaggcatcgtttaacaagctgacccggctacccgttgttgttcccgtcaccagcggcggaaacttcgcccgagcagccggttttaccgtctcactggacggtacaggaaccaaaacaacgggcgttattcgctgcgaccagcccagaaccattgatatgggagcccgaagcggtaagcgactggaacgtatacccgacgctgtcgtgaatgaagtgctggctcgactggaagccattatgagctga

SEQ ID NO: 83217 - DNA, 258 bp, Citrobacter koseri
atgtatacaactcgcctgaaaaaggtcggcggatccatcatgctggcggttcctcccgccgtgctgaaaacgctggagctgtcgacggacagcgaagtgggtatgaccattgataatggttgcctgattattgaaccccagaaacggccccgttattcgcttgaggagttgctggcgcagtgcgatccgcacgccgaaatgagcgaagaggatcggaaatggattgatgcgcctgcggtgggtaaggagctcctgtaa

SEQ ID NO: 83218 - DNA, 153 bp, Citrobacter koseri
atgatgcagtctgactggcatcctgccgacattgatgttcctccggcgcagcccggatacggaagctgtgccgcattttgtttatccgatccacaagaatcctttgaactgcaaaaacagttttctattatcggccttcttaccacgaactaa

SEQ ID NO: 83219 - DNA, 129 bp, Citrobacter koseri
atggagaagtaccttagctggctattgtacgacctgatcaactacttcgccgcggaaatgaaggctccgcgttggctgcgtacttccgacggcgtgaagtttattgacggcgtggaggtcaaagcatga

SEQ ID NO: 83220 - DNA, 309 bp, Citrobacter koseri
atggctactatcccaatccagacacactcgttacttgctgttccctttaatgctgccacggattccactgtactcgctggtcactgcgaaacttttgccgaaaccctgattgaaagtaacgatcccacgctgaaaatggcgctttgcggcagactcaacgcctgtctgacgctgcttcagcccactctgttagaacctgttccaccccaccttgttgaatgcctgaccgttgatactctccctgcgaatttcccgcagtttgggcctgaatgcacagaactttgtaactactgccttgccctgatgtag

SEQ ID NO: 83221 - DNA, 3900 bp, Citrobacter koseri
gtgagtgcccctttattacgttcctacaatgccgttattgaatacaccctttctcaggcaaaaaagtccaaaacgtcccgtcgtatcgcaggattttgccaacttcaggggccaacaggtagcgggaagacgagctcgctttatcgtcctggtcatgaagacaacgcacttccggcactggaatccattaaaaaggcaggctttcaggccattctggttacccaccgctggaacatactgcacgatatttatgaaaaaacagcagagcataaagacagtaacgaagagccattcagggtcagtgtgctttatgcacaagaggaccagattgtatctgccgttgaagcgacacctttacctcatgagacaaatatttctccagctttgttacccaacccttttacgtctatcgatgagctgcatgtcagtaatttgtttgccagtaaagatatggctgaaaaattgcgcaaaagttgcaacaatatactccgtatcaacagaacgctaaaaaattatccctcccaatttcggactgccatcgccagtgagaaagaagcgttaatcaattcgtgtacagccgtagaaataacgctgattcagaacattaagtctctggataaagagttcaaaaagcaaaaagaaaaatacggcgaaatgaatgaacttacgcaggctgcgaagcagcggctcgatgatttccgtcgtcatgcctgggttagacgaattcttccagccattgcctggcgtgacgaaaagcaacatctgctgatcatgacaacccaaaagctggtttcatcattttacgatggccggcgcaaagtacgtatgtccagtaaagagttgcgtaatcacatcatttttattgacgagtttgattatcaggctgaggtattacaggagtatctggctcaggcccagtgggttcaggagccgccagaatgcctaggccagttgctggatgggggacgcaggttactgcaacgtctgcaacatgtagtaacggagccagctccgatgattcgtgtacgcttggctgagtttcttaaaaatctggaagatacattggttgacaaaaaagtggatttaacacatgccagatcattggttatgccactacaacagtatctgacaggtaagccattcggtgagcattacttatttcgctctgatcatttagtcaccagcgaacggctcattatgcgaaaagcagatcatggatatgaaattataaagcccaacgctttacttcaggataatgagtcaataattgatatcagcgattttttgcgtctgatggaaaaatttattcggcagtttaacctgatgttaacagatctaacagccagtgaagacgaagcacatgaatatatcaaaaaattaacccggcttctgttcgatcctgtcaatgactatagaccatcatactatggctcaaccctgccaaatatgtcccggtttttgttaccacgtaccgatctgcctgaactgcgggaactaagaaaaagtaatattttgcccaatacacatgccagtatttttgggttaactaactggttgctgaaacaaaatgtcgtggataccgatatcgatccattacgaatacagataaagcgagcattcttgccaacaacagcagaaggtctactactgtcactagccagtcgtaatctcgtttttgcactgtcagccacatcatatattgaaagagcctgcaaccactttgatgtccggtggataaactcagccttacgctatattgcggaagcacgcaatcccgcagttacagaaagttttctcggaactacttttgaaaaccgacctgattcctggtttaaagaaccgataccctatgttcagaccgatgatgaccttcagttacagaataccgcgattgaagagatcaacagcagcaaggaaagtatcagaaagacacaactgaatactgagatccatgattttaataaaataaagaacagccagcattcagccgatctgctcgcttctctgccccccgattttttccagaatgatgatgaaccttcaacagatttcgaatcagaatatcgccagaatattctacttaaactgcttgatgtgctggatctggcaggaaaaaggcctcagcaccgagggcatctggcttttgttaattccatatcttatttaaaaaaatggctaaccgctgcaatagcgacacaaagcagagattgcctcacatggttaaagctgaacccgcctttatccgacaatcttctgttaaagaattttactgatgtatttatcccgttgaccatacataacgagcccgcactaatctgtctgttaaccgcagaatgtcagaaaaaaaagggcttcagtgatgcctatcatgccgcatttgcttcccgacgtattgttattgtactgacacaaactgcctctgccactaacggtataaatctggatttcagcctgcctgaatccggcaaaaatatggatttaacctgtttgtatttattggaatcacggcattattacttttccgctttccagacaagtgcagatagcaatgatgatatggcacatgcaggcttccagttacgcaatttggaaaaactactccgtgtaggagaaatttcacgtaaacagcatcagcgcttcatcctgccactgatgttgaaccggaagaacgaaatctcccggttaaacggagagtataagagaaccagcgattatataaaaaatacggcagccaatgttcaacagcaggttggtcgtattgagagagcctggtgtgaagtacccaatgctgagattcatcttgattctgaactggcaaaagatctgtcccgctttgcttcactgcctatttatacatcaaatcgtcgacagctttcggcactcaatcgtcaattactggatacacttcgggaacgtgatgaactgacacagaacaatttcttcagccagctcatgacgccgacacagcctggaaaactagcattggattatatcgatcagcggctggttccggctattcggttgttacgggaacagtcaacaccaagagatgacatctcattactctggcgacaactcggtaaagcagtacttcaacatgatttagcctgggaaccgggaaaaaacgctttcgacattgatcttgaattatataaatgggcttgctttgaaaaaccgaaattagctaatactgacggcaaaatctggtactccccacagacatggcagttttttgataaagcagcagaagggctgcgccaatacaaccctcagagactgtaccagtatatccaacgtcatcctgtcattactgactggttcaaccgtaaaggttacagaacgtctattatgcccttcgcgaacgatttggaagaacgttacgcatttcatccactagttgtacaacgcctgttgatgggacgtctgggagaagaggctatccgggcacttctttattcagagagcatcattaccaccagccaagtgagcaatcaccggctttttgagcagtatgatttcagcataaaaaattctgattatcgtgtggatgctaagttttggagacaagatactctcgataaggcagatgaagaatatcaacaatggttggcgtctggcgcaaatcaagagcatacccctctgggtctgagtaaaaaactggcacaaattcgcgctatcgagggtaataaaaccaaattggttatcgccaactttgttgctccacatgctgatagtcaattactgggtttctctcaccaattaacccctgttcaaaatccttatgatgcggacattctggttctcggcggatgtgtgaccccggacaccatttcagtggaaacacccggattcgggcaactcaaaaaaatcattaatcaaaacattatggaaagagcataa

SEQ ID NO: 83222 - DNA, 2460 bp, Citrobacter koseri
atggcgaaacgtaatgacgaaataatccgttctctccccctttcacacatgatttaccaggacaacgagatcgatcgggagaaagctgaaaaactggttgtctatcattatccgttaagtaaaaactatcgctggaaagaatggcaaaccaaaattgatgatgagttaggtaggcgttattacccttatttgatgaagtctcataaagatcaatttggactatacgttgctttggactctgagcaggataatccaccagtaataaaaaatggtgatgggattattgttgaaccaacgcgtgtccattacgaggctatgctgaatccagtatggatccggcttatcatgcgtaaagtctccgcctttggttcacattgcaaaggtagtcatactctgggatgcccattactacagactgacgtctggagaagtaagaacagcttcggtatcaatgcaattagtctggactgtcgtactcaacaaagaagcgataaaaatataactgaggttatattatttcataaaaacgttccactacgtcctgtcgatataaaaaccgaatcgtttaatattaatcaaccattatggacatatgataaaaataatattcttgtccgctggaaagcggagaaaacgacaaaacctaaatctcagatttaccgtgaagtagccaaagacaaagataaacgcaagctacgcccttttctcgacctttcgtcctcaacctcacttaaaaatagctggccttggatccttcaacccgttcaaaatgaatttattgagcaagcaagaaaatttggcttcggattatctcctgtagtacttaagttacgccctttatcgcttaaaacaaaattcaaaacaactgacaaggctaaattcccaagtgtacagcttgacaatgagataaaggttctcgatctacgtttttcgaaaaatgtatccccgcaatacattgttaataacattcagtcgctgctgaatgaaaaatatcctgatgcacgcatgtcattactacctgatatagaacaggatcagattgcgaacatagaaattgatgaatcacagtgcctacttgttctgctggatcagactccgggtatcattgacgatcgctatccattgacacaaatgttaagaactaaagttgcctgccagcatattaatgttaatccttttgatctcactggtgatccagttacggataacttactaatagaacagtctacttctgatggtgacacgaggcttattcctgccacagattctcgttactatgattatagtatcagtgattttgagaaaaaagcagttcaggaagctctggcacgtaatgttgaaattgtatataaagagttagccctgaagcatttgctgctatgtaataagaccaaaattagtgtgacgcttccgcaacagaaggatctactaactaacagtctcgctgtaatcactaatggctgtttatttactgttaaacaagaccgcccaataatattacctttccatccagctatgccagatgctgtttcagcctgtgataatatactccgtttatttgatacctctgtaacagcactactcactttgcttaacgaaaagtggccttaccattatcgcccccaggatattacacaagggatttggaatgaagcagagaagttgacccgatttattaatcggttgacggtgataattcacaaaacggaagaagtgactatcctccttcaggatccacaatatggagcacctcatatgcttccggagaaattaaacgatttaatgactattctggattctcaacggcaacaactctctcttaatcaatggttattacctgaaatggatgaactaacatttcatatagaccaacttactgaagagggtgaattatccgatacaagtagaaatacgctgcttcgtgaattagaattgttgtgtgagttatggaaatgtgcgttaaaaaaatattattccaacaatgaattcaatgtcacttatgatattttaaaaaaatatgttttttcccaatggcctgagaagaaaaatgcgcttatggtcggagttgctcaaaaatcagtaaaaagagccagtacatcattaatagcatcatggaataaattattatctcgtgtcttcgatttacctttaggcgatcctcgaaactggctcaagaacgtgccgggcattacacgactctggcatgatccagagcaaaattacgttattgttggcagtctttcctcccctcaacctattattcaacgtcagcccagtattcgccaatggcatgcattgcagggcgaacttaattctgaacttcttgccggactggttgatgttgattgggtcagaatgaatcaactagcgggtaatccctgtgtagctactcttgtgcgtcggtggaaggaatgccaggttcagccggatgatgtgcgtgatgtatcactgacagagtaa

SEQ ID NO: 83223 - DNA, 237 bp, Citrobacter koseri
atgcgcattcatcaggttcaaataaagaatttccgacttttagctgacgtggaacttgtattagagaaacagacgacagttattgttggtcgaaacaacagtggaaaaacatcgctctcagagataatacgcagatttttagcagacggtagtgcgacttttcaactcgaagacttttccagttcttgctatgaccgtttttgtgatgcactgagaacgctaaacgaaggggaatag

SEQ ID NO: 83224 - DNA, 627 bp, Citrobacter koseri
gtgattgatttggatccggcgtgtaccgaagcgctcgtggtagtcaggtatgaattgaaagatggccaactggcacgatttctagaaggacagcccacagaacaattaattccagaaactagaattgccttcttccgcacgttgcgagaacgtattcccaatgatttttgcgtgaaaatatgggctgaagatcccaatgatccggataatcaccgcgagttacaatcaggagcgctacgctgtctggtcaaatcggggtttatcaacgctcagcggggacttgatgatgtgacatccagagaatcggatgtactggctaaaacggttgaaaatctgtttgcaacagctgcttcagcctctgcgtgtacagcagataaacaaattgccgatgcattgaaaggcgcggttcaggatattcagactcagattgacacaaactttggtagccaactcaaaggcctgatcccggcgctgaaaacgtttggatatcccggactgggagggcaagaattacataccgaaacattgctcgacgtgcgcaagttactatcaaatttcactaaggttcgatactcgggttatagcggtgtcacactaccggagcaggtcaacccaaaaacgggataa

SEQ ID NO: 83225 - DNA, 177 bp, Citrobacter koseri
atggtagacaacttacgccgccgtcaaccagaagataaacgtttcattaacttgaacgaatcttgggaagtgtcctattggatgcagacgttaggagttactgaagcgaagctgagacaagccgttgccgatgttggtaatggttcggcgaaagtaagagcgcacttaggtaagtag

SEQ ID NO: 83226 - DNA, 879 bp, Citrobacter koseri
atgcttgctttgccgtcatacccctaccaaagaatcctagtgaatccagccaaaacaaagaataatcccaaaattaaatttatcatatatatcaaatacatatatttatcgtttttatcgatcattattttgttattgatcgttattattgatcgattgtttttaaaagagcattatcagtctgttatgaccacatggattgctcaaatgaacatcgaattcgtcgcagaaccaatagtcaatcttgatgaaaaaatgcttggtgtagagttactgacacgctttacagatgaaaacgcgcgcgtgatcagccctgaatacgttatcgctggttggactgctgaactaaagcgttcatttctgtatgaacagttcagccagattaatcaccatgctcaatggtttgataagcatgggctattctgttcggtcaatattgatcacacaatggctgtgctgttacttaacgatgcagttttgcaatcctctctggagtcactcccgtttgttactctggaaatcactgaacacttcccgaacttagaacaaggcatacaaaacccggtacttcgtggactgaaatctgaaggatttagcctgtggctggatgatttaggtgcgggaaatgcgaatgttgcaacccttgtgagtggctgttttgatgttgtgaaacttgatcgttgctttttcagagaacagatacaaaaaccaacatttcccttactaatcagtaacatcaagaaatattgcgacaaaatagtcattgagggtgttgaagatagacaatacataaaccttttacggggtgaagatatctgggggttgcagggatacctctttaaatccgtcccgtttcacaaggttgaaaaattgatataa

SEQ ID NO: 83227 - DNA, 2085 bp, Citrobacter koseri
atgaccattaagattatcaccaggacgacaaatatcactgattttcagacagataaggcatcatttgaccggactatcagaaagataaaaagcgtcgctgcggcatgggacaaggttaattcccgtgtaaaaggtaagggacaaaagcagcttgataacagtcgggcaattgtccaggccaacaaggcagaagccgcccgccttgcttctctgaacaagctgaacgcagccaaagaaaaagagatcgccattaccaacaaggcagcaactcagcgcaagaaagatacagcggatcagctccgagcggaggctaaacttcgacgcgctttggagtcccgattcaagccccgcaaaagcatcacgcctccacctatcccaacggcggcagagattcaacctcatgtgcagggcatcatcaatgcctcttctgtacagtcgaaagtcaatgcacagcaggcagcaaagcaggcgatgcgggagcaaatgaaactggcggcagatatggaaaaggcggagaagcgccgcattcagtacgcccgtaaacgttatctgaccatccgatcagaagcatacaaaatccagaatattgagggcctcaccaacgcagaacgcacagagggcatcctcaaaatgcgccgcattgctgatttgcaggctaaagagacattgaacgcacaggaaacacgattcgagttacgcaagattacccaggagctacaaaaacaagcccgtattcgtcgccaggtagccacccagcgcacccacggcgggaactttagcggcgctaatcgtcacgccgggcgcggttccaatggtgtgacggcgggtgtgggtgtcggcctcgcaggtgcagcaggggcagcagcggcgggcctcctggcggtagcgggtgcgtcaatggcggtagcctccacactccgggaatcatttgaacgacaaaaggaatacagcggcctccgggagcaaggagtaagcgcaacagacgcagacgcgatcctgttggcagcaaaccagaaaggggcgggaatctccctcgataagctccagcaacaatttgtagactacctcgacaaacaaggggatctgtccctgggggaatggaaggttgacaagaaaaccggggagcgtacctacgctggcggcggtgaactggcagacgtgatcaaccttgtggagaaacgccaggcgggcgcaggagatgaaatcctgaagcgtttgcagtcggtagacttccaaggctatctctcaatgttgcgtgaactggagaagcgttacaagctaacggcgggtgagatgaccctctttggtgaatttgtggatgatggttccaagaccctccgcgctttcgatgagaacgggaaggtcagcgccaaatcactggagcgtgtccagtcctccgctttgtacttatccgatgtacagcgggaacaggtggagaatctccagagtaatatgatggtgttgggccaggcgtccaacgggctggcggataacttcacgttgggatttgctgaggcgtttaactcatccgaggaaatgaccaaagcaatggagagcctcgccccagttatggagggactaggccgcgcatccgcagatgtactaaattcatttgtacgcctctttggctggctctcccatatcctcccggaggtaggcggtgacggtacggcggcaggcgtcaaggagagttacacaggctcccgcgatatggagcagaaacccgaaaaaggattctgggctaacttgtttgattttgactctaaggctttcctcccgcaggaatacggcggcaaagcccaaaatgcgccaaaacctttacagatcccggataacctccctgcgttggccccgtttaaggatctgaaagtaaccccggcccctgtgccaaccttcagcccggcaagcctgacccaatcggcagtaaacgcccagaactcacaacaaaccgttgtcattgaccaaaagccgctacaggtgacggttaatgtgaatgatgggaaggttaaggatctggttaatgcgtccattgatgaccgggagcgggaaaacctcaacatgatggtacagggtggaaacaattaa

SEQ ID NO: 83228 - DNA, 354 bp, Citrobacter koseri
atggaagcatataaaaaccttttggctcagatcgagcaagccaaagccctggagcggctagaagccgcacaggtcaacgtgaccaaatcagccgccgccctatcagaactggaagccctgatcgataagtacggcgacaccctcacagcggttacagacagcgcccagaagggccgcaccattaagagccggggcattgcattgacccacatgactggtcaaggtggggctgctaatggtcgcaacgtccctcttctgatgaagagtgcagaaggcctccgctatgtggaaatcaacaaggcaagtcgttcgcttatggcgacaaacgggaaggggctgaataatgaccattaa

SEQ ID NO: 83229 - DNA, 660 bp, Citrobacter koseri
atgacaaccgcagcaagtaacacaggctttttaatgttggctaatgaccttctgaatgtggagaaggtctccgggaaaccattcaccggaaacatgaagatcgtttatagcctcattcaaggttatgagagaaacgggcaaacggcctatttctcccaactccttgtttctaaatacctttcgatgagtctccgcaatgtctcccgccttatcaaagagatggtagaaatgggactcattaacaaaaccgagcaggtgaacggcgggacgctgaactacacagtaaacccgatcaccgctgaaatgttggggcaggttaccgccgccccggcagcacctaccaaaccagcagtaaccccaaccgtggagaccgtagcagatgcaggaattaaccagcctggaattattgagtgtggatctgaaagcgtacatgaaagcaacacggcagcgccgggagttgctcctgtggactgtggcgggcttgatgttcgtcccgctcctgtccccgtgccagtgaagcaggaggccgcaaacgatgatttacgcaatcctgttattaattttgtagctgactctaatgtgatgataatcaatggcgaacccgttacctacctggagccagaagaaagcgatattgacgatttcggcgatgctttctaa

SEQ ID NO: 83230 - DNA, 261 bp, Citrobacter koseri
atgaaacacgcttttgaagatatgcaggaatcaaacttcctgaccgggtacgcctcacaaattattgaagcaattcaagacgatgtgaaaaaccccggcctgtacgatgatatttacagctttttgcaggaagtgaagcccacagcactggttacccttgggaatccagcgatcacagccccggcggcgtggtggggcgctttcttcggtctctccattggtgaggctcaacgtttggaactggcggagattgaattatga

SEQ ID NO: 83231 - DNA, 417 bp, Citrobacter koseri
atgagtatttacctgaatgttgaaaaaatggttgaacgtgttgatcagcgtgacctgacccgaaaaacacttatcgagacccgcagccgtatgaaagccgccgggcggactgaagaagttgaagcgattacgcaagcccttgaattgaccaagacgaaagcctccggcctgttgcgtcagtctcaacggctcgcagcgaacacaaccgccattgatggagagaaggcgttagagctgaaagcggcggttaacctccacggcgggatcgatgttcaaacgtctgttgtgttggcttatcaatccctgtttgaagcaaagggcgtcccgatggaatatgacgaggtgatgagttttatcatgttgtcagcggcggatcagtttgaacgcatgaccggggaattgcccgtagtcgtttaa

SEQ ID NO: 83232 - DNA, 360 bp, Citrobacter koseri
atgcgtacttctgttgcgtttccaaaacgcatgtcggatgtgctggttaacagcgcgtctgaccttttctcccgcactgagatcaagggcgtgtccatcccggtggatctgcactgcggggatgtctttaatggctcaaccttcgaattgttcgatcaagctgtggaagggtccccgctgatctgcctggtggatgtttcagcaggtgaagacaagaccattgttgtggttgaccgcaacgcatatgtgaacacgttcaacctccgcgccaaagatgccgcctccctgaaggaagcgatcaagcgtctgaccgctggcggctctattcgtactggcaacaacaacagcatggaggcttaa

SEQ ID NO: 83233 - DNA, 201 bp, Citrobacter koseri
atgaagagaattttactcggtgcgctggcgttgctgccgttggcagcccatgcaggaaaaaacaccatgcaactgacagaacaaaccgaggctgccaacgggacgctgtatcgctattccaattcaatctacgattttgtgtacaaaacgaacagcaagcattgtccaaacgtgaaaacattctctacagagaacaagtaa

SEQ ID NO: 83234 - DNA, 429 bp, Citrobacter koseri
atgtctggagtgttagcgagcacagcagcggctgtagggattattgataaagctgttggcattgcaaagaaacttgcggatgatggcggtgaacttgataaagcgacgcttaaacttgagcttgcaaacctcatgacagagcttgccagcgttaagatggaggttatcaccacccaggcgctactttttgatgcagaacagaagaacaagcaattagaggagcagttaaaggataagcaaaccttcattttccaaaacggtgtttggtggaaagagggtgataaaatagcattttgccctaaatgctatgaaagtgagaatattaaattccacatggaagcaagagagaaggtcatcggtatgatgggatcatacgactataagcattggcattgccgtcgctgcaattctgattttgacagaatttaa

SEQ ID NO: 83235 - DNA, 534 bp, Citrobacter koseri
atggatgttgaaaaggcaaaagcgattgaaaacagtatgatgtgcttaacgatattttcacgatccatccacacctttttcgccctggctaacgttctagaacacctggatcgtgggactggtgatttattcccgttcaggggggtttgcaatgccttgattggtgatgcggcgatacattggtgcaaagtttttggatctgatgctgaggggactcactggaagtgtgtagtggatgatcacgacgagtttcgaaaggttttattcgatgcactgcgaacgacgccaaccgaatttcatgcttactggaagaaaatgactgagttcagaagcaatgtaatcgcgcatttcaacgctgaacatttttcgaacggttctacacctgagttcgataccgcgattgcagcagcggcaacggcttataaatacatgtaccgaaccttcccctcaaatgtgcatcaccttgggccgatggatttaatcagttatggtaaaatcgcttcagaagctgtaatgaatcgaattttggtttaa

SEQ ID NO: 83236 - DNA, 819 bp, Citrobacter koseri
atgaaatttgatcttaccgagatcatcttggtagcaatagctcgtcttgttggagatgctcaggcggacgctcctaggtcaccttctcattcagatttgagttattcttttgaaagacatggtttatctcatgttgatccaaaaaatcagcaagttgtaggtaagactaaacgtgttcgtgcagtcctctcttgggcattggataacgatcctgaagctggatataaactggcattgacacttttgcaggatgttaaagtggctgggggctttagaccagaatcgaccaactatgcgggacgcgatgctatccaaggagcaattgaagcctttagagagcaaggtctaattctgactgaagatggatctttagttcgtcaaagtattgacggtcttcgagggcgcgaattaactgaagcattaagaaaatacgctgatagggcgaggcgtggcgctgaagatgctgcacttctatctggaaccagtaaggatcttttggaagcaacagcagcgcatgttatcacccaaaaatttggggcgtaccctcaacaagccaattttccagctttacttgggcaggcattcattgctcttggattagccactccagaagacaagatcgaaaatcttgaagctcctcatcgcacaatggagagggggatgtttaatactgctattggaatcaataaattgagaaataagcagggaactggacatggtaggccttggctaccaacaataaaagaaagtgaggcaaaagccgccattgagatggcgggggttatatcgagctatatgattgataaacttagtaagtaa

SEQ ID NO: 83237 - DNA, 342 bp, Citrobacter koseri
atgcagatgcttcttttgtgcataacaataccgatctttaagtctgattatgatctggtggattttttggtagatatctcaatggatgccgaaaaggcggtggtgtcggggatagtgattggcatatttgctggagggcttacgctagtgagcgcgcccatcattgtgactacttttgtcatcgtagccttaggtttatttcttaataatagattgaactatattgacgatgaaaccggattatctacggagttaaaaaccagaattcgtgattatttccgcaaaatggaaagaagaggtcctgattatagattcaactctcaatacttttactcattctag

SEQ ID NO: 83238 - DNA, 591 bp, Citrobacter koseri
atgcacattttttgccaatggcgaaatcgccgtaggccggataaggcgcttgcgccgccatccggcgttaccgaaaatgagcgaccgatcctgcctgatggcgctacgcttatcaggcctacaatgctgagccgtaggccggataaggcgcttgcgccgccatccggcgttgccgaaagtgagcgaccgatcctgcctgatggcgctgcgcttatcagacctacaatgctgcgccgtaggccggataaggtgcctgcgccgccatccggcgttaccgaaagtgggcgaccgatcctgcctgatggcgctgcgcttatcaggcctacaatgctgcgccgtaggccggataaggcgcttgcgccgccatccggcgttaccgaaagtgggcgaccgatcctgcctgatggcgctgcgcttatcaggcctacaatgctgcgccgtaggccggataaggcgcttgcgccgccatccggcgttaccgaaagtgggcgaccgatcctgcctgatggcgctgcgcttatcaggcctacaatgctcatcctcgttaaattccagacagcaaaaagccagcccgtaggctggcttttctga

SEQ ID NO: 83239 - DNA, 189 bp, Citrobacter koseri
atgaacgccttgcgaaagctgagcatcaataaaacaacaaagtttttcgttgagtatctggcctggctgagattgtggcatgagtatgttgagtataaaaacaatcaaatgcgaaaaccggttaaactctctgtcatcacgcctgaaacctttacaaaaaggcggagtgaggttttaatagaggtttaa

SEQ ID NO: 83240 - DNA, 2190 bp, Citrobacter koseri
atggcgcgtcttaaaactgctcagccaaactcttcgctgcgtaaaatcgcagtcgtagtagccacagcggttagcggcatgtctgtctatgcacaggcggcggttgaaccgaaagaagaaactatcaccgtaaccgctgcacctgcccagcaggaaagtgcctggggaccatcaccaacgattgcggccaaacgatccgcaaccaccaccaagactgataccccgattgagaaaacaccacagtctgtttcggtggtgactaacgaagagatgcagatgcatcaattccagtcggtaaaagaagcattgggttatacgcctggcgtaacggtaagcagccgtggtgcgtctaatacctatgattttgtgattatccgtggtttttcatctgttggcctgaaccagaataactatctggatggcctgaagctccagggtaacttttataacgatgcggtcatcgatccttacatgcttgagcgtgttgaactgatgcgtggcccaacttcggttctctacggtaagagcaaccctggtggtattatctccatggtcagtaaacgcccgaccacggaaccgctgaaagaaattcagtttaaaatgggaacagataatctgttccagacagggtttgattttagcgattcgctggatgacaacggtgagttttcttatcgtttaacggggctggcgcgttctacgaacgaacagcagaagagttctgagtcccagcgttatactatcgcgccatctttcagctggcgcccggatgataaaaccaactttaccttcttgtcctatttccagaatgaaccagaaacaggttattacggctggctgccgaaagaagggactgttgagccattaccaaacggtaagcgtttacccactgattttaatgaaggcgcatcgaataatacgtattcccgtaaccagaaaatggtgggatacagttttgaacacggctttaatgatacctttactgtccgtcagaacctgcgttttacagaaatgaaaacttcgcagaagagcgtttatggtacagggattgctgcggatggtcataccctgaaccgtggcaccgttgttgatgatgagcgtctgcaaaacttcagcgtagatacgcaactggaaagcaaatttgctacaggcgcggttgatcacaccttgctgacaggtgtggacttcatgcgtatgcgcaacgatattaacgcggcctttggtagcgcgccgtcaattgatctgtataacaattatcacccggaatattttgcttttggtggcacagagccatatcagatgaatgaaagcaaacagaccggtatctatgttcaggatcaggctgaatgggataagtgggtatttaccctcggtggtcgttatgactggtctaaacaagcgacgacggtacgtcagaactcttatacgccaactgaagggtatattgagcgtaatgaccataaattcacctggcgcggtggtgtgaactatctgtttgataacggtattacgccatacttcagctatagtcagtcctttgagcctagctcatttgacctgtggagcaatccgcgtgtttcttacgagccgtcgaaaggcgagcagtatgaagccggtgtgaaatatgtaccgaaagatatgccgatcgtcattactggcgcggtttatcagctcactaagaccaataacctgacagctgatccaaacaacccattggcacaggtgccagcaggtgaaattcgtgctcgtggcgttgaactggaagccaaagccgcgcttaccgccaacattaacatgacggcatcgtatacctatactgatgctgaatacacgaaggacactacgcttaaaggcaatacacctgagcaggtgccagagcatatggcgtctttgtggggtgactacacctttaacgaaggcccgctgtctggtctgacattaggtactggtggtcgctttatcggctccagctacggcgatccggcgaacagcttcaaagttggtagcgcggcagtgatggatgcggtcgtaaaatacgatctggctcgctttggtatggcgggttccagcgtcgcggttaacgtcaacaacctgcttgatcgtgaatacgttgccagttgcttccagacctatggctgcttctggggcgcggagcgtcaggtcgttgcaaccgcaaccttccgtttctaa

SEQ ID NO: 83241 - DNA, 336 bp, Citrobacter koseri
atgaaaatctctcagtcgccacgcaccaacattcagtccactgttgagactcagaaagtagtttttgtcattttccgaacgggtaaaacggttgctgccgctgaaattgtagttcagcagagcagcgttaataccgtcatcccagaaaaccggatctatgtaacctctggaagtgtttcgcacatacaattgcgggatactgatatcgagtcgcatccctgcgaagttaaatttataaaatgcaccagagatctgtttagccagcaatatacaattactattttgctgtccattcatatctggaaaaagttcagttctgactccgataatgcctaa

SEQ ID NO: 83242 - DNA, 330 bp, Citrobacter koseri
atgaaaactctacctgcaacaactccgcaggcggcgaagctatgcctgtcgccagtggctgtctggcaaatgttactgacacgcctgctggagcagcattatggtctcaccctcaacgacacaccattcagtgaagaacgtgttatacaggaacatatcgatgctggtatcacgctagctgatgccgtgaattttctggtagaaaaatacaagcttatccgtatcgatcggaagggattttcgtggcaacaacagactccgtatatttccgtagtggatattctacgagcaagacgctataccggcttgctaaaaactaatgtgaaataa

SEQ ID NO: 83243 - DNA, 864 bp, Citrobacter koseri
atgaacaactctgaaggtctgcagtcgctgcaaaactctctttccagcttaccgcaatgggtgtctgaacgtattctgcaccaagtaagccagttaaccaactatgtgccaatgatcggtattatgggcaaaaccggagtaggtaaatcatccctttgcaatgctctttttgccgataaggtgtcacctgtcagcgatgttactgcctgcactcgcgaccccttatgctttcgcctgcaggtgggcgaacatgctatgactatcgtcgatttacctggtgttggtgaaagtgaaaaacgcgatgttgaatatgccgagctctacagccagcagcttccccggctcgacctggtactgtggttaatcaaagccgatgatcgggctctggcggtggatgaacatttttaccggcaggtgattggtgaagcatatcggcataaggtgttgtttgttatcagtcagtccgacaaggttgagcccacctgcgatggtgaaaagctgtctacagagcagaaacaaaatatcagccgtaaaatctgtctgctacatgagttgttccaaccagtaaatccgatctgtgcggtgtcggttcgtctgcaatggggactgagggtaatggcggagcgtatgattcgttgcctgccacgcgaggccagcagtccggtggcggtacagctttgtgctccacttcgtaccgatgccgttaataaaaaagcccgtgacgattttggtgaaacggtcggctcggtactggacaccataagttccatgcccctgataccggccccggttcagacagtcatccagtctgtacgagacatcgtggtatcagtcgctcgtgcagtctggaatttcttcttctga

SEQ ID NO: 83244 - DNA, 2529 bp, Citrobacter koseri
atgaccgttcgatcattatcaacttctgcaaagttagggtgtgacttactgtcaagtcatcgaatacttacgattattgaagagaaatcatttcatttcccattaaatgaagaagaaatcagagaagagttatatcttacccatcaaccttgggcggccagagaacccgatcacgtttttagtagggctcttgaagcctggaaattataccacaagccaacggatagctctccactacaatctgctctacgattcattgtgaaagagtttataacttctcgtcatggtattttacgagttaaactccaaatgttcggcatttggcagcaaggcatattaagccgagtaagtggcatacccattcaagcagctgcttatctttggcctcaaaatgattattatctagataaactccccgcccccaatcagttcgctgatatatcatcttacaacagattaaattctttactattgccatttgatcctttaatcgaagagtattttaacaaggaaggattacatgagactcatttgcatttgaatggaagcactcacgccgagctttgttggcttcgtgcaataacagaaccagaaagagaaattactgatttctgcaataaatataatgacactggaagcaactcatcacgtctgagagaattagccagagctgttcaccctgatttttccacatccttatttcgaaagcatatatatatagcaaaacaacttagaaaatatttaatccctgcagcctttggttgtctttcctctagtgaagagctcccaaaaaactgtgaagatgtattttcactagcattactaagccacaccccaagcatatcacataatgaaccagaatataataacttcatactttatgacaatgataatatagtttcagaaaggtattggatttttctcctattaaaaaggctagacactataccttcagtctctttgacgaacatgcttcattgttatttaatcttgcaaaacctttattacagattgcttgtccaaagtgaagagcagtacggttttgatcaatttcaaaaaatcacttggacagatttacgcgaaccaattgaaaaagattatttagaacgattccaaagtatgcatggttcattacctaatcatagccgaattgtttatttggaaggacgatttgctcctaaagatagcgaaaacaagaacatatcaatcatctataatattttaagtggatactggagatatttgtatgacactaaacctgcaagtgatcttactttattgctaagtgattttgaaaaaaaaatcaaagagccgaacgctaaaaatggacgttttttaaaattagcacttgttactcactttattaaactgcctgaatctcggtttgataccccttatagacactatactttacgaactaaactaaccaaccaagtatatacccttaaaaatacgcttgaacactacccatccttaaggctatgggttaggggtattgatgctgctgctaatgagttagatgctccaccagaagtgtttgcaagcgtgtaccgtatgtgccgacattttggtattacacatcgcagttaccatgcaggagaagatttccatcatatattatcaggtattcgggctatgtttgatgctttagaattacttggactatgtgaaggagatcgtattggccatggtacagcaatgggtatatctcctgaactatggttaaagagaatgcctagaggggtatacatacgcaaagatgactggttacttgatctactttccacttggcgtcttctaaaaatgacaggagaaaccgggttagcatataaactagaagctgaactgaccgaacttggatctgaattatttggacagcaaataaatagtataactttagagcgagtgatgaagcttagaggactcaatattggatttctagcaaaagtctttacctctactcctcgggatataaaaaactctgtacttccaaaatccgtagactcggtcacaccactgagtgatttagaaatgatggaagcattaaaggttgatgaggctgtcagttccaatgtcaaggactgcagacttttatgggaatggctcagtgactcagaaatacgttcgcgaggaagtcaactcacatttgttgatgcagaatatatgtcagcagaggaatatataaaagtacaacaggcactaatgatgattatcaaggatagaaaagtacttattgaaacattgccttcaagcaacgttcgaatcagccaatatgaaagttttgttgaacatcatgtatttagatggatgggattgccaaattataaacagccaggcgacccagaaataatggttacacttggttcagatgatcctggaatttttgctggtgatcttgctggtgagttctatcagttatatgctgttttacagagtttaggattgagtgataaaaaagcactgcattatatttcagaacttaacgaacgtggtagagaatatcgatttcatgaattcaaaataggttga

SEQ ID NO: 83245 - DNA, 1980 bp, Citrobacter koseri
atgctagcatttgatgatgcagatactaacgcccaacacgcattcccattattagaatgcatacgaaactatctggatagccctcgcctccttatattggtcactggcgatatggaactttattcactcttggtcagggatgagttttcacaacgacttccttcagttgaaaataaaaataattcctggagagaggaacagcgtttaagaatgcttgatcatttagaagatcaatacgttttgaagttattcccattatcgcgccgtcaacatttaaaaacacttaatagacttttcggtaaaatgtatgatggcacccatccatcaagctataaaatctgctcgtctcgatggaatgatgtaaaacgcgatcctataaaagtcttggatgaaattattagtcgtgggttacgtatagcctctcaatcagatatcgagttattcagaacgcatttattaaagcaaccactacgctcaatattacaagttttgcaaggttgtgccccccacctatcaaaatctgacgatgatataaataatacatggaatcgtgacctctctgatgctttaagggaatcattaagagcaatggctcagggaagtttatacaaatacggtgtagtagttgacgatctaacagctaattatcttcccacactgtccaaagcagtcttcgatttatgctgtcaggatggagatgttgataccgcagcctatttacgacctcaggcaagtaatgatgaccttaacaattgctatttagccttagctgcagaagtcgctgggcaatgcgccgagtcagcatcagcatcgataaaatacatgttgacaggtccaggcaatgttacgttatggggaaaagaaaaacgacgtatgtcggacaatatgaatcaagacttgctttataggcagtttagccagtatatggctataggtagaaacgaagatgcactgaactgggctagacgtgcaacagcagtactcgcagctagacacccttctcaagctaaagctcctgtaattgattttggtatcattggtttaaataaaagagaacctgatgaagcaagaggaaaaggcgaaggctttagtactatagatagtatattaagtatcaattacagtagagagaataaagcttatccaactctagcatatagccttttagatgtatcaagtcagagcagtcgctgttattcttctatatataatatacttggtttagttgaacgtctttttggtgctcgttctcatgaagaggtatcacgtcggctaaaaagtacttatccacaacttagtatcagcagtccagactggggtggaagcatcgatacaatgtcttctgaggataatccacacacagttagtgatgacactgtaaaagatagcgacaattcagagttggagggagatttaattaactccatactcgcatggcaagaattaaataaagaatcttttaaagagttttccccatcctctgttctacttggaaaaatttggataagaatttactttagccttgagaagtcctcagatcgaattcgccctggtttgctcagtggcggaagaaatgttgatgacataatggaaatcaatgctgcatgtttaattaatgcttttttagtggaagaagctgatcacaatttgctagattatagcatctcacctgatcgtactaatccgctaacctcggcctttgatatactcaaaaagaaaaaagattttctgaaaaaaaataaaagcagtctccctcttacaactctaatatcaagttgtccgattgttcttggtcttcttaaaaaagaatcaagaataataattaaagaggccctatccctagatgatacgataacaaatattccaagtgccgaattacctgtcaaagcatttatcgctggtcgatggcgaaaaaccgaggcagaaccaaaatcccgaggaaggactaaagccagtaccaaaattggagatggcgaatga

SEQ ID NO: 83246 - DNA, 252 bp, Citrobacter koseri
gtgactagtcccattcgtcagaatctgtttgaacgggaatgtgatatgccgctgctggaagcgcggcatctcgcccttctgcttctcggcctcgatgcttcccaaccggcaaatgccctgccggaagaacatcaggaaaattaccgtatcctgcacgacgccatcagccgcaccatcaaagctacaggcatggtcagcgccccggctaacaaacgcatgttctatgccgatgagatgttcgcgctggcctag

SEQ ID NO: 83247 - DNA, 333 bp, Citrobacter koseri
atgaaactgtcgcgtcacagtcgcggccgcaagtggctgaagacactcggcgacgacgcgctgccggatctcactgcttccacacaaccttcccagcgtgggatgcataaacgcgacaaggctcgagagaatactgccaggctctgctggttactggttcaacttctggttgaggagactgacggacggtatgggacgtctgataaaccggcatcggacctgatacttcgaaagctgaaaacgctggcgcaggaacgggaagtcccatcaaacgggcttgggagaggaacgttttacgaggtgttgaagatggggcgggagaagagaacgtag

SEQ ID NO: 83248 - DNA, 966 bp, Citrobacter koseri
atgaaaatatataatcccattgtttttgtttgtgcagtatcaatgcttattgcatgtactgaagctaaaaaagatgatactgaaccgccatataaatttaaggcaaaagttgtatatcaagatagtcccaaatgtgcttgtgctcaatccaaaatggcttacctaacaaacaccgaccctcaaaatgatatatttacaaaatatactgtaacaaccaggctcgctagtaaccccagcacaacacataaagataatgctgtgattgctgtgaatggaataaaagagcttggttgtactaaagaaacaaatgggcaaaacatttgctctcttgaaacttcatgggaagttaacgacaccgcacctctcatatatactctcaataaatccaacattaagggattatcaactccttttttcacatatgataacaaatcatgtgtattattgtgcaatagtaaaagtgattgttactccttcggaccaaaagccgctcaatacgcagcaccactagtcgcattggtagttgctgggcaatccaaaacagacaaaacagtcactgctaatgaaatactgaaagaatataataaaaaacctactgacaatgtgtgcgacagaggtgacattacaattaaagcaggagaaataaaaaacacgtcatctagtggttgtactattgaagcaaaacgtgatgacacaaatggtttgaacgtaccactttctttgacattgccaaaaataataacagctcaaaacacccctctgaactcaggtgaagtattaccgctatccaatgcacaagagatatttttttcagatggtcaactcgcgccaagttttggtttctccggtccagatgccgaggacttaaataatagttacggaggtgccattaggtcaataacaaaaatcgatgatacaatatatgtggcaaacacaaacggttgtgtaagcatgaaagtaaaataa

SEQ ID NO: 83249 - DNA, 1368 bp, Citrobacter koseri
gtgaacataatattgacagttgttcttctggctatatttcaaattttgattttatcaaaggctaatggctcatcagatgacataccccccttacgtctaaacgccccatttagtagtcaaaaatcaattgacagactttttattgaatataaagacctacctaagtcgatgcgtccttacctgagtaaaatattgtatatcaaatatacatttgaacctgtcagtagttgcacttacaaagctccatcgctatgtaatcccaaaaaaacctcacaaaaacactatattgtcaaaagaaatatagggctagatctatcgcagcttgagtcggctattaaaatggccttgaaggcaaatgaaaaagatgcttgttcagatttgaagttttcaccgctcagacggatttcttataacaacatccagatgatattcaaatttgacttaaaggcacataaaagggcctgtggaagtacgttcggtgtagattggtcatatgatctcgcaaccgcaagtggttatggtattatttatgtgaatttaaatatctccgcccctgatctgaacaatggcacatctaaaggcactattggtgtagatattccaacaatagtaccaacaatcgataatcgctcgttgttaggttttatagatgctaatagtgtggctggtcaaatatttgaatatttcgtaatccatacaggcttggctattgatgacttacatttaggtgcttttgatatcggatttagagacttatcaagtgaaattcaaaaagaaaatttatcaataggaataacgtactcaaaactttccgaaataaacaacatcgattcagttccaaaattctatgatgattttgaaaatctcggattaataaaggactatttcattgagaaaaatacatctgcttttaacgaacaaatgtctttaaacatttctagttttactatggtgcctgctactgagattagaactttttatagcattaaggattcagaattgaagtatatagaatctcttggtgcagataatatagaacataatgtcattcgtggggagtcgctatggagtttgtctaagtcatattatgggacgggagaattgatgtactcccttgcagaattaaacaatataacgaaatccaagatgattataaagccaaaccaaaaaatagtaatacctcctctttatactctgagtgaaataagaaagaaatacattctacctggggatagtctttggtctttttggaaggaaaactgtcctaaaacatcatggtcaatattcaaaaaaacaaaaatcgctggttcgagttcgaatgatagaatctatccattacaaatagtaaatggatgtaatgcaaattga

SEQ ID NO: 83250 - DNA, 771 bp, Citrobacter koseri
atgggagagcgaaagctgcgccatgctgaacaataccggtgcgccggaaggcgagagttgaggtatggtgaggtacggtactgcacgatgtgcaggccgcctgcgtcagcagggatgcccccggatcgtcgtgatccgcctccggtactgttcattcctccttgttatctttttgacgcagaaatgatggcgtcagaggcccaaacacttactgcactgcgtcccaagtacgaatttatccaatatgattgtgaagctattgaaagacaattacttgagaatccaagaggtcaaggtcttgctgcccgatatactccagtttcatttaataaatggatgattgcctctcaaatggttcatacacctgctataataaatgacccgcagcatagtattaatcacttttttctgcgccatcctcatgttaatttaacagatgctttaattgaagcatctgcccgtaatatcccattatttatagtcatatatgatcctgaacatcctagcaatagccgcattgaactttctttaggatacttcatggagtatcacactacaaaaaaactggttgatcagaactttgtcgctgtagtggtgcctaatcttactcctgaaattatagcgttgataccggcggatgacccactagaaaaatgcctttgggttgtaatgcaaccaaatggcgacataatacgacgagaaggcgtatatgccaatccagacgaaggaatgaagcgtgttcgagcagtaataacatcgcttggactctaa

SEQ ID NO: 83251 - DNA, 876 bp, Citrobacter koseri
atgtcgcgactggcacaggatatgaaaaagctggcgcaccgcacaggtggcagccacaaaacagtccacgaccgcgaacagatggcgcagcgttttgcccatcatctgctggcgcagaatattcaggtaaccagcaccagccagctcaaagccagacacatcgcgggatatatccatgaacggctggcgcagggtatttctctgcgaactctacagaatgagatggcaatggtgcgctctattctggctgaagccggacgcacacaactcagccagtccgaattaatcagcaacaaatcactcggtatcagtggtgccagccgtgacgggacgcaccgggccattccggatgcgctttaccagcaggtactggatcgggtccagcaaaccgacgctggtctcgcggccagcctgcaactggcaagggtgatgggcctgcgtggtcaggaagcggtacagtgctgccagtcgctgaaaacctgggataaacagctggaaaaaggcgctgaacgtctgtcggtgatcttcggcaccaaaggcggacgaccgcgcatgacgcaggtgatagacagggaagcggttcgtcaggcggtgaaagaggcgctgaatattgcgggggaacgtgacgggcatctgattgacaaaccggatctgaaatccgcaatggattactggcacaaccatctccgcgatgccgggctgacgggtgaatactcccctcactccctgcgctatgcttgggcgcaggacgcgatccgctattacaaggatcaggggttaagccacaaagaggcactggcggtaacctcaacagatctgggacatggggatgggcgaggacggtatatcgagcaagtttatggcaaaattaattag

SEQ ID NO: 83252 - DNA, 1659 bp, Citrobacter koseri
atgctttttaatatgcttaataataaacaaaaaaaacgtctttttattaatcaagtaaatgtgttttacaattattcgttaggttttgaagttccttcggtagatttactgaagactgctaataaacttcttaaatcaggtttttctaaatgtgtttgtttttcagattttaattttttatatcttaatgaaaataatcaaataaaatacagtaatttgcatccagaaggaagaagttgggattcttcatgggaaataaattttgatgatggcataccaaaagaaataattcctgatttaatgatttcttccgagttgtttttccatgaaaatagactcgtgaatgataatcaggcttacataagaacatcattacctccctttgttttggagacaagtaatgagcagtaccctatgtatccaggagtaaagatctaccgtgatggaatcgctatcatttattttcaatttgatggtaaatggaatggaattgatgataacagtttcttatcatcaattataaacatgagtcaaagatattttgataaaatatgggttgatgcgaaacttcaaatgctggatggtgaagtggttttagaaaatagctttgaagatgttttttcaattggtggaagtcttcttgatggaagagaaataagaaaattaaaacaaaagatgcgagataatagcatgaaagtattaactgaatcttttgagaaagaaggttgtactttttcgttcgataatcatagagaatggattttgcatcagattgcaggaacggaggggaatgaatcatgggaatctacgattgaaatgtgtcgttctatatattcaaacgttattagcagcatgttggttccacaatataagaataataaaactaagtcatatagttatctctggcacggacggccttctgtttctcttttacgttttgataagcaacctcaggataaaagtgctttgttgaaaaatttctctgagtcattggttaagtttttgaatagagctgatatcagcgaaaagaaaaactccttgccgccagatttacggaagtttaatgattattgtctacatgcaaatagatccatttacttatggacttggttaagaggagagaatgagtcagaagatatttgggatgacagaaatacctcatcaagaatacttgaaaatcaggcaagagttgagcaggttgaatatcataatatgagtatttctagagcgtgctcttgggctaataacccgccatctgaacagcatctatttatctcctatacaacattggcagaaacagaaaataacattcatcatagtagtatatctggggaaatttctgatacgctttcatatctcgttaaatcttttgggacagagagtttaattgcttctgcgaaagagatggctagatttcgcatggacgaacttaaatataggtcagattcagcaagaaactctagcaattattggttaacatttattttcggtttggttggtgttacaagttttgctgaatttgcagttaatccactaattcttaataaatggagtggaatgaataaagttatagcgccttttatttcttttgggatctctgctgttttagttttagcaatatctgcaattatctggtattacacaaagagaaaatactag

SEQ ID NO: 83253 - DNA, 1254 bp, Citrobacter koseri
atgctgactgatatcaaactgaaaaacctcaagccaaaggacaaactttataaagttactgaccgggatggtttgtatgttgcagtgctgacgtcaggcacagtctcgtttcgctacgattacagcatcaacggaagacgagaaacactgacattaggaaagtatggtattgacggtatttctctggctgaagcaagggaaaaactccataccgcgaaaaagctgctcaagtcaggcatatcacctgctgtagacaagcgttacggtaaaaataagctccgggagagtgagacgctgacggtatataccgacaattacatgaagcatgtaacactggcggacagtaccagagcgatgaaagaagcggttattgagcgagatatcctgcctgtgctgggcaacaaattaatgaccgaaattactacggcaatggtgcgcgacctttgcgatcggataatagatcgaggaggtaatgcaacagcggtacaggttcgcgagataatcagcagtgtctatcgttatgcaaatgatcgagggcacagtttttctaatccggcccaggatattaaagcgagttctatcgcaacgtttactccgaggctcagaagcctttccccgcgagaagttggcattttcttcaatacactggataccgttgcagggatgccaacgctcaaactggcattgaagattatatttctgacaatggtacgtaaaagcgagttcactttagcgacctgggatgaggttgatttcaaaaccaacgagtggaccattcctgctggccgtatgaaaggaggccggactcatgtcatctatctttcgcgccaggttaatgatttgctgacaggcctgaaaatgtgtgccggaggaagtccttacttacttgcagggcgctataacatcaacaaaccactgtctaatgcagccctgaacggcgttatcactacaaccgtaaaagtggcacagtcgcaagggaaggcactggagcactttactgtccatgacatgcggcggacggctagcacgttattgcatgaggcagggtatccatcggactggatagaaaaatgcctcgcgcatgagcaaaaaggggtgagggcaatttacaacaaggccgaatacgcgcgaccgcgaacttacatgttgcagcagtgggcgaatatggttgatggttggattgctggaacaacaatgacgctcactccgttttcgccgagaaagtatgaggagtggatgaaccttgatatgtaa

SEQ ID NO: 83254 - DNA, 1068 bp, Citrobacter koseri
gtggttatcgtcgttcgcactttcttcccggccccagaattgctgtttaccccgccagacaatcgtgccgtcttcggtcagcagctcctgaatgcggccaaccgtatctgtgatggcatagtgcagttgccctttctcataacgcgccagcggcgtaaagctccccggctcgtatatccaccgaatcgcgttttcgtcatccggtgtgccatcagcgttagcagcgcaccacagtacctgttgtatgccagtcagcagtatccggagtcctgcgatatctttcgggtaaaatcagtatccagtaagctcccgacgaccagtcaggggaaaaagttttgcctctggcccgagtttgaagggtttcagcatcagatcgagtacagccgtcagcgtgaagttgtctactggcaccaccgtaccagaacctccctgtttcatcgtggtctggagcacgccattgcctttgttcatgccgatggcaatcagcctgactcttcccggctgaacggtgaagtattcaccgcttcgctggtctgcactaaccggatgttacctgcgtcactgcataccggagatatctgtgaggctgttaacaaaaatccggcggtggcatctttcagcaacgttacgcgcccgacccgcccgctatatccggtaacggatggcgatatgcactggtcgctgatttcctgcatgaacctgaactacctttcgctgctggaccgggaagcactgatccaggtgttgcgtaccttcgatatgccgggtatccaccatccacagcaggcgcgactttcctcacagaagctcgatgccatcgaaaaaatggaatcccgcccggttgaccgtctgtttaaaggcgtcccggttcgcggtctgtccaccacgcagtggatcaatcccgccccctttgtctgtgaaggcgagatctacctgttgggtaccgtgctgtcatacttttttgcgctgtacgccagcatcaactcatttcactgcctcaaaattattaacacggaaagtcaggagtcctgggaatggcaacacacaggccagcacgccctgatgtag

SEQ ID NO: 83255 - DNA, 378 bp, Citrobacter koseri
atggcaacacacaggccagcacgccctgatgtaggggaaacgtcatcgctcccggatgtgcgcgggatgaatttttatgtgctgatggagtcactgtaccgccggtatggcggggcagatcgtgagccgtccctgcgcactgagccagagcgggaagtggcgctgttcaaatctgatgccagcattgcttttccgggcagtgatctgagtacgcttgtccgttgccctgactgtggatcgtcctggctggtttatagcgaggatgcgccttctgaaaaaccgctggtgatatgtgaagactgtggaaaacggtttcgtaggcatccggtgtcggaggaaggggggatgactgacgatgcagggatgaaaagagcgtag

SEQ ID NO: 83256 - DNA, 738 bp, Citrobacter koseri
atgtcgcaggaaattttaggtctccctgggagatgcccctctgatgtttatccaagaactaaaaagcttgtggaggaagctgacaagcacttaatttctctggttacaaaatggacatttcttaaatcagtaccccagattgagatcaagcgatttgatggggaggaaatccgcctcggcggcgttgcttttaagggaactgtggttgatgttttttggtctgggtttattgagccttatatagaacatgaaagcgtaaagatactggaagctgcgggacaacttgccaccgattgccaactctcacatgacattgttattgatgaagcacggatgctgttacatgtgatggttcgcagagtatattccaagatggccgatgttgatcagacactacgtggagacggtttcactttccctgagaaaagagacgtgacttcccgtatcgctgctatgtctgcatatgttgatgctgaatcaaaaattgtgatgcttaaagccagaaacatgcaaggtaacttgcagcctacagtgcacatttcggggcatgccaacgcacagattcagatagggcatgataacaatcaagtgatgcagataaccttgcagcaacttgtagaacaggtagcaaagagtaatgataaagatgctaaatctcttattcaaaaaattctggaaaataataccgtagcatcaattattggagctgctgcaggagcactgttaactaaactttga

SEQ ID NO: 83257 - DNA, 921 bp, Citrobacter koseri
atgaccagtcgtccccagatgataatcaacgtgttacaggctaatcctggccagcagttcactgcccgccaactggcgcagaaaattatcgatcactacagcgcagaactggctgaaaagcgcaaaaatccgcgttttgctagcgacgaagattttttaagtcagataaccgcagaggtgggcggtagccggactgttaaagcgaaggcgatgtgtccgcaggtgatgactcgtgataagccaaggccgcgcctgttttactggggggaatctgtggttgaaaagacagattccaatgtggcacccgagccaacagttgaaactgtcagccttaccgagcacttgttatatccgatcctgattgattacctttcacaggaagaagggctgttgtgccgtcgtattgatgaaaagcgctccagcaataacaaagggttgggtggcaaccattggctttatcccgatattgtcgcactggagcctctggataaagaatgggacgatgtggtgcaaaactgcgttcgtcatagtgaaggacgtttaacacgcctgtggtcttttgaggtgaaaaagcagctaaaccgtagcaacgtgcgtgaatgtttcttccaggcggtcagcaactccagttgggcacatttcggctatttggtggcgactgaaattaacgaagataagcaacgtagtgtggagcgtgagttgcagatgctctgtgcgctgcatggtattggtgtgatcctcctcgatccacatgacttcagtaacagccagacgttgatccctgcgcgggaacgtaccagtgtcgactggcagtcagtaaaccgtctggtggaagagaatcgggattttaaagattttattgagctggtgggggaataccatcagacaggaaaaattcataagacattgtggaatagataa

SEQ ID NO: 83258 - DNA, 657 bp, Citrobacter koseri
gtggcctatgactacagcgccagcctcaacccggaaaaagccctgatctggcgtattgtccatcgggacaatatcccgtggatactggataacggcctgcactgcggcaacagcccagtacaggccgctaactggatcaatatcggcaacccggagcttatcgtcaaacgcgccgggcatcaggtgcctgccgggacgggcgggacgctgcatgactatgtgccgttttactttacccccttttcgccgatgctgatgaatatccacagcgggcgcggcggcattacgcagcgccccaacgaagaaatcgtcattctggtcagcagcctgcgaagcgtggcgtcgcaaaacgtccccttcgtgtttaccgacagccacgcctactataactgggtcaactactacacctgtctggaagacctgaaccagattgactggccgatgctacaggcgcgagattttcgtcgagatccggacgatccggccaagtttgaacgctatcaggccgaggcgttgatctggcagcactgccccatcacactgctggatgggatggtttgttacaataacgacgtcaaggtacaattagaagactggctgtcgcaacgcaatctgacaatgcccgttcacgcacgggccgggtggtacttctcatga

SEQ ID NO: 83259 - DNA, 576 bp, Citrobacter koseri
atgtcagatattcgcacacagcaatttctttatcacttaacggatcttgacaatctggaagatattttctccgaagggctaaaatctcgcagcctcttgcgtggtttttcagatattgccgatcctgaaatcatagcttcgcgcagtgcgttacgtttgcaagagtacgttcctttccatttttttgcccgaaacccttttgatggcagggttcatcgtaataatccagataagacgttcgtcctcattgctgttcgtcgaagctatgcgcagacaaatagctggtcagtcattcccagacatccgttatctggttcagcgattactttgcttgattatgaaacgggtatggctaccattgactgggaaaccatgaaccgccgtgaatatggggatgacaattgcaagtgtgtttgtatggctgagtgcctgtctccagccactgtaaccgcaaacaattttcatagcatctatgttccagatgcagtaacagaaacagttgttaacgccttgaagcaaaagtatagactcgatatgtatgtcaacatcaattctcgtatgttcccgggagcctga

SEQ ID NO: 83260 - DNA, 1281 bp, Citrobacter koseri
atggtggatttaatggtgggtgagcagcagtcgggtgcagcggataaaggcgtgcctgcggggtttaagatgacggaagtgggggttattccgcaggattgggatgtaaaacctttaaaagaactatgtcagctaaaaagtggcttaggtattacatcgaaatacatagatgatttcggaaattacccatgctacggaggaaatggaatacgtggctttactaatagctttacgcatcgaggtgaatatgccttgatcggaaggcaaggcgcattgtgtggaaacattcaatatgtagaaggggatttttttgcttctgagcacgccctagtggcaactatgcaatcaggagtcaatgcaagatggttatccatctatcttgagaaaatgaatcttaaccaatattcggaatcatcagctcagccgggactttcagcggaaaaactaaatgttttaaacattattactccacccgaacaagaacaacagataatttccaataccatctcggacattagtaattttatttatgaattgaaaactttgattgtaaaaaaacaatctataaaaactgcaaccatgcagcaattactaacaggtaaaacccgtttgccacagtttgtgttacgtaaagatggatctatcaagggatataaaaaaagtgagttagggatgattcctgaggattggataatcacaaacattggacaatttactgactgctgtgctggcggaactccaagtactaaagtttcagtatattggggaggcactcacccctggatgagttcaggtgaattacacttaaaacaagtctatacagtagctgataatataacagatgaagggcttgctaactccagtacaaagtatgtgcctaaaaattcagtgttagtcggattggcaggacaaggaaagactcgtgggactgtagcaattaatcgcattgaattatgtactaatcagtctattgccgcgattttccccagcgaacatcattccacagaatttttgttctacaacctcgacaatcgttatgaggaactgagaagtttatctactggcgatggggggcgtggcgggttgaatcttactattatcaggaaattacatcttgcatttccaccaaaagaagaacaaaccgccattgccgccatcctctccgatatggataaggacattcagaccctgcaacagcgtctggacaaaacccgccagcttaaacaggggatgatgcaggaactgttaacaggaaagactcggctcatagaaaggaactag

SEQ ID NO: 83261 - DNA, 567 bp, Citrobacter koseri
  misc_feature (469)..(478): n is a, c, g, or t
atgcgagtgactcagcccgctgaagttaggtttgattcaaaatgtctcatatggagcgtggccttacagtggtcaaaactgcacattcagtgcatgaaaaagaccttgagaatacagtttggcgagcgggtaaaagaactgcgcattgccaccggaatgagccaagaagcgtttgctgatcggtgtgggtttgctcgtagttatatgagtcgtattgaacgtggtggctccaacgcgtctcttgatgcgattgaggtgctggctaacgctttgagtgttgagccgtggcagttattagtgtctgactcatctaaagatgacgaccaggaactgttggttccatacgcggccgatggctcgtgctttaatcctggactggcgagcacccgcgatggttcgtttggtgtcggtgataaaacggctcagaagcgttttggcacgttttatgaagctcttgaatatctacgtnnnnnnnnnntctacgtagcatggagacagcaaaatggcgtaggcccaatgccagcggcaattggggcattgtgtcagcggtgcgttgggacaaactga

SEQ ID NO: 83262 - DNA, 498 bp, Citrobacter koseri
atggcgggatcaggttttttattaccaatggtggcgggtgtcgcgcttagttgcgtcagctatggatttgttgctcgcattgtttcaaaacgtcagatcagcacgctacgcgcagtttcatggggaattcttggaaccctctcattggtgctaggcgtatgtgcattttccgctgtaagcgcagaacacccggcagcgaaacacaaaaccttgtgcttaggtaacgtccctgaatgctatgcaaaagcacaccataaccccgtcaaagagtgcaagcaggtagtggacaagaaagcagcgtttcgccatgtgtggcaggaaagtgaagcgcggccggttttcgatacctatctttggcacgacgagaacaaacgaactattcaaatgttcggacaacaagcgaaggcgatcaatgaccttgggatgcaaacaccactacaatacttttgtatttttaacgccaacaccggggaagtcatcgcggcttcatttgagtga

SEQ ID NO: 83263 - DNA, 276 bp, Citrobacter koseri
atgacagaacaagaaattaaggatatggtcaccaacatggtgtcattcgcacttgaccaatctaagcaacagtttgaccaacagttagctgaagccaagactgttttctacactcaaggtttcaatgatgggtcggtggccgggtatgtaactgccatgaacaacgtcaagggtgcattgtctgaagggcttaaactgggttcacccaagtgtggtagtgccatgaacagtctgcgtgggatggggctggctgatgataatgacggtgaagaataa

SEQ ID NO: 83264 - DNA, 1017 bp, Citrobacter koseri
atgaagagccgggaatgtaaatctgctgaagcagaccgcaaatccttcaaggtttcagccgggatcgactggctggacatgctgatcagcttctccagactgacccagcatcgctatattcaggaagaattacttaaaatcaccgggttaaaactctgggttgaaccctgcggcctgcgtatctcaaagttaacatcatgcgaacaccgtcctggtgacaacgtcaaaccgtgggtaaaacccatgataagcagcactaacgatgtttttcggattcgcttccgcgatctactggcaaaccatagcgggaacctggaggctgcactcgaccaattgcaaaaccgtttcccatttgcgtatgagccgcaaatagtgggagtcgaagttttctgcgatttctggcacaaagcccggtcgattaccgctacaaatgcgatgacctatcggcttcaaagctccctgttcagtccgggaaccaaagcccgacaatacaatcccgtagctgggcgaaatgttttccttgatgttcagggtgctcgtatcaatcctgaatggaacctgagaacgggtaacaagtgggacaacatctcgtggcaggtctaccacaaatgcactgacgacggtcagaaactacctgtagaaaaacaacgcgctcgtgtagaagtcacgttaaaaggtgctgcgctcactcgctactctcttcaccgccttagcgacatacaacactttcgatttgaaaccttcgctcacctgttcaggtttcgcaaaccaattgagcctgaaatgatggctaacggtgatatgttccggtttaccgctatcaacgcagttcgtaaggtgaacgatgcaacagccgagcgcggattgcattctttcaatagcatcggacgtagggataaacgtagctggatgatggtcaacggtgacaagcgcctacggaaagaaagctcgcatctggcggttgttagcgatctgcaaaacgccgtcaagggtgctttacgtcgcctccacgtttga

SEQ ID NO: 83265 - DNA, 474 bp, Citrobacter koseri
ttgtttaccattgagactgcacgtgaagaggcgaataggtttcgaaagatactcgaaacatgtgatccgtcaacaacctaccttgtacctcacggcttcccggtaatgagttgcaagctttgctcaatgttactttccttccactttctgcaattatggcccgaactggaattgaaaggggtcactggagtcaccggtaaaaatggcgcaataactcacttctggctggaagtggaagattacgttattgatatcaccggagatcaatacaacatcatcaacgccagtaaactaaacgaaaatatcgtaagaaacaggccctttatgcctgttcacgtcgctaaccaaaaggatagctatctctataatttatttgaaattaaagggaaagagcatttgagctatggctttccgacaatcggtgatgatttcatcgatgagatggaatgtgattatcgccagctcgtcaggtga

SEQ ID NO: 83266 - DNA, 474 bp, Citrobacter koseri
atgccgatatgctttcagaaagatgatgagaaagccattactcgggctatagaatccctgaaaagccagctacgggaagagcacaagcgctctggcagggctggtgagcctacaccactcggctatatctgggccagggaacgtgttaccggggaacgccctcactaccatctggttctgctattcaacaaagacgtttatggttatctgggagattatacaaagcctgacgctaataatatggggacccgtattcagaaagcttggtgcagtgcaatagggctaagttatccttactatgccagtcgggttgaattcccgaaaaatcacagcgcctggttcacccggcaggatgcgttaacgttaagtcccgattattacgacttcctgctacgtgttgcttacctggcaaaaacgtacagtaaagattcccatgacggctatcgtaactttggcactagccagttaatatga

SEQ ID NO: 83267 - DNA, 792 bp, Citrobacter koseri
ttgtgcgtaagagacgatcttgccaaggtagagcgcgcgacggactttctcgataaattccgctttgtcacccgcaagctgcgctttaggtcccgacaacactttagacgctgcgacacgctgctctttcagagaagagatataacgtgcaaaaacggattccgtgatcagcgacagcggctcgcccagatccagagaactctggctggtccatttaccggtgcctttgttcgccgcttcatccagaatcacatcaaccagatatttaccctcttcatcctttttggtgaagatgtctttggtgatgtcgatcaggtagctgttcagctcgcctttgttccactcagtgaaagtatctgccagctcttcgttagacagattcaggccacctttcagcaaagaataggcttctgcgatcagctgcatgtcgccgtattcgataccgttgtgaaccattttcacatagtgaccggcaccatcggcaccaatataggtcacgcaaggttcgccatcttctgcaactgcggcaattttagtcagaatcggcgcaaccagttcgtaggcctctttctgaccgccaggcatgatagatgggcctttcagcgccccttcttcaccaccggaaacgccggtaccaatgaagttaaagccttcagcagaaagttcgcgattacgacggatagtgtcctggaagaacgtgttaccaccatcaatgatgatgtcgcctttatccagatacggcttcagggaatcgatagcagcatcagtgcccgcccctgctttcaccattaa

SEQ ID NO: 83268 - DNA, 531 bp, Citrobacter koseri
  misc_feature (369)..(378): n is a, c, g, or t
atgcaggcctttgctctgaagatgggttacggtctggcacctgacccgtattatcaccatgtgaaggcggatgttgatgggacacttgttctattccctgccgccgaaggtggacgcttctcaccttctcctgaatttatctcagcagtaatgacgctcagattaggggcgatggtcgccttgattgacgattcccttgatcaagctgaacagaaagtgcttgagaatgccatcaacaacaatcctgtcttcaccgatgatgaaaagcgctctctacatgcgtacttaacgtggctgcttcataccccagccaatatgacgggaatgaaaagcagggttgagttgatgggggctgcggaaaaggctgcnnnnnnnnnncatctgtctcgagcaatatccatcagcattctgcaactgaacatgatctcgtctcgtctgtaccaactgatcagccaacggcagggttcacactggatgctaatgtacttgcccgacacgaatctgccacggatgatgttcgtaaattactga

SEQ ID NO: 83269 - DNA, 132 bp, Citrobacter koseri
atgattggttgtcacccgaagttcaacaccccggccgccactcaatgtaaaggttgcaaggttgtcatcttcactatcatcgtttcgcacaaccgtctcttttttcttgatgtcagcgatccattcttttga

SEQ ID NO: 83270 - DNA, 1659 bp, Citrobacter koseri
atgatcgttatcgatccacgctataccgataccgcggcaggacgtgaagacgaatggatacctattcgtcccggcaccgatgccgcgctggtcgccggactggcctgggtgctcatcaccgaagatcttgtcgaccagcctttcctcgacaactactgcgtgggttacgacgaaaaaacactaccggccgatgcgccagcgaatggtcactataaagcctatattctgggccagggcgaagacggcacggccaaaacgcctgagtgggcgtcgcgcattaccggtattccggcggatcgcatcattaagctcgccagagagattggcgcggctaaaccggcctgtatttgtcagggatggggcccgcagcgtcaggcgaacggtgaactcaccgctcgcgcgattgcgatgctgccgattctgacgggcaatgtcggtattcacggcgggaacagcggcgcgcgcgaatccacctataccatcaccattgaacgcatgccgttaccggaaaacccggtaaaaacgcagatctccgtgtttacctggacggacgccattgcccgcggcccggaaatgaccgccctgcgcgacggcgtgcgcggtaaagaaaagctggatgtgccgatcaagttcatctggaattacgcgggcaataccatcaccaaccagcattcggatatcaataaaacacacgagatcctgcaagacgaatcgaagtgcgaaatgatcgtggtcatcgacaactttatgacctcttccgcgaaatacgccgatattctgttgccggacctgatgacggtcgaacaggaagacatcattcctaacgactacgcgggcaatatgggttatttaatcttcatccagcccgcgaccgcccctaaattcgagcgtaagcccatttactggataatgagcgaagtcgcgaagcggctgggcccggacgtgcaccagaggtttaccgaggggcgaacccaggaacagtggctgcaatatctgtacgccaaaatgctggctaaagacccggagttaccgggctatgacgagctgaaaaaaatggggatctacaagcgtaaagatcccaacggccatttcgtggcctataaaaaattccgtgaagacccacaggcaaacccgctgaaaacgccgtccggcaagatagaaatttactccagccgcctggctaaaatcgcccaaacctgggagctggaaaaaggcgacgtcatcagcccgcttcccatttatgcctcaacgttcgaaggatgggacgatcctaagcgcagcgtattcccactgcaactctttggttttcattataaatcacgcacgcactcctcttacggcaacattgatgttctcaaatccgcctgccgtcaggaagtctggattaaccccgtggatgcgcaaaaacgcggtatcgccaacggggatatggtgcgggtatttaacgatcgcggcgaagtacgcattccggcgaaagtcacgccacgcattctccccggcgtgagcgcgatgggccagggcgcctggcatgatgccgatatgtcaggcgatcgcatcgatcatggcgcctgcgtgaatacgttaacgacgcagcgcccctctccgctggcgaaaggaaatccgcagcacaccaatctggtcgaaatcgagaaagtgtaa

SEQ ID NO: 83271 - DNA, 180 bp, Citrobacter koseri
atgtccgatgttgaacaacagggaggcatcagccgcaggacgttagtgaaatccaccgcgataggatcgctggcgctcgctgccggagggttctccttgcctttcgggatgcgtaccgcggcggctgccgtgcagcaggcaatccagcccgctgaagacaatgaagattgtaggggctga

SEQ ID NO: 83272 - DNA, 288 bp, Citrobacter koseri
atgctccctctggggaaaatggtttgcataaccgcacccggcgaagaaaaatacgattttgtcagccgtttcttttgcccgggagaagccgtaccggaagaccccgttacaggttcagcacatagcatgctaattccatactgggctgaaaaactgaaaaaaacgcagatgctggcgcgccagggcgccgaacgtggcggagatttacgctgccagcgagtgggggatcgagtccacatcggcggacaggcaacaacttatctgctgggtaagatactgttgcgctag

SEQ ID NO: 83273 - DNA, 168 bp, Citrobacter koseri
atgaggaaaatatatgcctcgcaaggcattgtttattttaatggcgctggtttgatttgcgatcaaaaaacaaccactgctatttttggcgcagcttatggtatactccgccgccttaacatttgccatcgcactttttcactgaaacataacgaggaaaataaatga

SEQ ID NO: 83274 - DNA, 216 bp, Citrobacter koseri
atgagaattacaatttcaggtgttgggggagtgcctttggttatctctcacgttaaaacgctggatgataacgaactgattaatgtcagtggcctatgcagggcgctaggaggtattccgcgctcttcatttctcgataaggtcgagcgactagggcttgagggggctatcaagcattacctcaacgaacagagacaacgaaaactgaaaacataa

SEQ ID NO: 83275 - DNA, 1026 bp, Citrobacter koseri
atggattttaaatataacgattttactggtgttttcaccaaacccttcggaaataatttcctgattcaggaattaggcatcttccaggaaaagcacagcgatacaccaaaaattgaaacagatgacctacgggctggcaagatctccgttgcggagtctgtgaacaggtacggcacagagctagttggcacagagcgagacctatccctgaaccgcctcctggaaattccacattgggtattatctggtgaggttgatgcgagcatgttccaggggattcgccgccccggtacgcagcgccagcagaatatggacgagctggttagcgatgaatcaatccgccagtatatgaagttccgcaccacaaaagaagatgtactcgccagggcgttgtttactggtattgttaacgcgccgtacacacagcaacaggttgtcgatttctctgaagagtttggcgaagattattccagtgctgtgatcgatgttggttcaactggtccgctggagtcgctagacaccgctgcaactgcactacgtgtcaaccttggcggctgggttaaggctctcaaaggtatcgtggttctgtgtgacccgactttctataaatcagtgaaataccacgcggaaatccgcaccctggttgctcacggtgttctgcctcagtccacgctgtttaatagtgctgtacgggcaaacctcccggcgtttagcgcgtttgaactggacggtctggtcttcgtgaacgttatcggttacgaagattatctacctgctggtagcgctgtaatggttccggtatttgctgacaacattattccgtcagaccataccccactggaagttgtctccggtcctgcctcacgtaatgcgaagattgccgcagcgggtacacgcgctgaattcttccagtacagttttgatgatcgacttggcaacaaaactgttatgtcagaatttggcgttctgccgctcatctatgatctatcgatgattaccaaactgaccacctcaacgggtgagtaa

SEQ ID NO: 83276 - DNA, 330 bp, Citrobacter koseri
atgattgtagcaacagaagatcgctcattccgtgatgttgtgatctaccgtgatgatccggtgttctcacacaagacccgcattttcactactctggcagttgatactgttcctggcactttactagccagcgatggcaccgcttatgagtcaggcagtggcctgttaatcgcactagatagccacaaggcaggatcaaatgtccctgtgattgtggttgaccgtggttgtgttctgaaccgcgccggattgattggcaccgatgcaaccgcagttgcgaatgctattacccaaattgaggccagcggcctgaatcgtatttctgaataa

SEQ ID NO: 83277 - DNA, 2148 bp, Citrobacter koseri
atgagtgggaccaataagattatttccagcaccgttaatgaaatctcgtggatcacagacgatgcctcatatcaaaaagccaaaaagaagataatttctcttaaggctgctcacgagaaacccgctaaagcgcttgagaaggcacagaagcgtaccgcccagagtgaaggcaaagcagcactagccgcagcgaaagcccagactgcaaggcttcgacaggctgaacaattatcaaaacagcaacagaaacaagctcagattcaagccaaaatggaacgggatgcagttgctcatgccaataaaatgacctcattacaggctcgccagttatcccaacaggaacaggcagcacaccggaacgcccgtttagcagcaatatctgcaaaagtgcaggccgcagccagatcacgagcgatgatctacaaccctaacatgggcggtcaacattacgatcctggtcttgtttcccgtcagactaacgcaatgaaccgtggtcacggcgctgttactgctgacatcgcagccaccaaaaaggcgatggccctggaggagaagcgccagcgtgagaaagaggcaggaattaagcgtgaggtgacttattacaacagtttgcgccgtagcgctctgactctggcaaacgtgaacggcgctgacgttgcaacccggtacaaagccatcagtgcagcaaaagaggcacttaaagcccagaaagaagggcgctatacggtcgaagagaaccgcttcgaaatggctcgtatcaccacagaattacgcaagcaggctcgtctgcaacagcgtattacccgtgagcagaaagccgcaggtgttcgtgctggtcgtgtacgcacagaaagccgtggtgggagagcaggtcttgcagccgcgggtgttattggtggtgcgtcgttagtgggtagtatgggcgtatctcgtgtcggtcagacccttcagggaagccttgagcgttcccgcgatgtaaaaaaactccagcagtacgggatcagcaaccttgagtttgctgcacttcaggatctggctatgagccgtgtcggctactcactgagtgctgataaattaagcgatctaaataaagatacactcgaaaagtctggggaattgctgaataccggttcctttaaacgcaactctaaaacaggtgctgtaacgttctctgggggcggtgagtttgcggatatagtgaaccttacgttgcaatccaccaacggcaaccagaaggtagctcagaaagtgatcggagaactgcaaaagctggattttccgactttcatcacttacctgaaacagttgcagaagactttcaaatggacagacaaccagacccggcacctggctgaggccgtaaatgacggatctgtgttccttgatgttttcaatgatgaggggcagggacttatccagcgtatgcatcaactcgcttctgaaggatggaccctatctgatgcacagcaggccaaccttgataagctggcagctttgggtgctgagtacaaccgagtgcaaaccagccttgcagatcatttctcagcctcgtttgttgaaggcctggggcagtatgctgccaatactgacactctacgtcagaatatgactggactgatcccaatttccgatgccctcggcgttgcccttggtgagctaaccaccaacattctctccttcgctggtcgagtcggtgaagaactcaagaaaggcgcgacactgccggatgcagtctacaacaccgtagtggatgactctgcaaatagcaccgccgattggattaaggaaaagaccggctttgatccacgtagcatcggtcagacgcttaagcaggtttacccgtggctggatagttcagcaccaagcaatattggctcaggcacggcgtataacgatccagcgctagcgttgaatgttcctggtctaaactatcaaacaccccagcaaccaacgtttacggttccgacaattgatagcatagttcagcgacagccgctctctgttgcggttacaggcgaagccgagatcaagcttgcgcctcttcaggtgaatgttaatgatggtgcgattaacggtctgattgatacaaagctgagggactacgaacaggcccaaaacaaccttattcttgcggttgcggagggataa

SEQ ID NO: 83278 - DNA, 375 bp, Citrobacter koseri
atgaccacaataaaagaccggattttcgccgccatgcatggcatgacaccggaggaatacgaactccaaaaagcgcgggacaatctgaagagcgtcaccgataactttctagatcaacatccggagttgctcaaatcagcctcgtctgacacccccacggataaacggggcgaagccctctcgccaatgcgagacacctttggtgctgaacaacggattaaaaaatcgttgggtgctgatagtcgttcggttgtctcacataccgctgaccatatcgatcctgaaatgctggcgaaagctaaagcagcggctgctgctctcgcaaaatccgatcctgatcgatacggtaatatcatcaagcagcagggggtgtaa

SEQ ID NO: 83279 - DNA, 918 bp, Citrobacter koseri
atgacggaattagaaaaaactgaagttcaacgtacaccagatgaggcttacggcgttgctgagatgcgcttcttgtgtgccagcaggattttgattcgcagcactggcgaggttgtgaaaataactcccgtgatgaagctcgcctatcaatacatgaggaatcagtacattggattctcaagtcgtggacagcaattttacacagaccagcgacaaatggcggcggcgctggatgtgtcaagagacactttcagcaaagtactgacggaattaaagagcttaggaatagttgagtctgccggctggaggcggaatagtgaggcttacactgtccactttttcagtgatgttgcagatgcgcttgaggtgatccacaaagagtacaaaggtgctccagcttgggaccacgagcgggcgaataaaaattttaaatccaaatccaagatgaagaaagcagcacagccaaaaatcgaggagagcgaaaatggcgtacagcaacaaaatcacgaacaaccaactactgtggcttctgagactgccacgcctgttgctggaaagccagacggcgtacctcctgtggatgctcctgtcgatgctgatgtacctgccaatgatgattcatcactgaatgatcagcctgataaaggcagcaatgataatggcaggcctgcttggttccgtgctccgtttaaaggtaatggtgacttagttcctgaggcgaaagcatgggcgcgttcacgaggtgcaacgtctgaagaagaggagaagcatgagatatggagagcgctggagattataaacccgctctttgatagtcaatccgaaccagaaccacaaccacaaccatctgccccttcaacagcctctgacgaagaagaaacagaagaagaggaagagtcagaagaatatccgttttaa

SEQ ID NO: 83280 - DNA, 201 bp, Citrobacter koseri
atgaatatcaaattccagcagcacgtttatcaggctctactggctgaggccattcgacaagataagccattggcgcggctctgtaatgagattttagagagagcggcaaacattttcgacaacgcaccagaccacacgacacctttagccagcaaggcgaaacctaatggagatattaatgacggaattagaaaaaactga

SEQ ID NO: 83281 - DNA, 444 bp, Citrobacter koseri
atgaacaaaccaaaatcacagcgtctcgacctgaccacaatgactggtgagcagatcgccgaccttattctgaacggcaaatacaccaagtcagctttgtgggccttcatcagtaggaacggtggcgcagacgctgtacacgctaaataccctcagatcgccgtttgtctgcacatcctcaaacaggagcggaagaaagcgaagcaggcgcggtcgttcaaaactatcgttcagccgctgagtgaaaaatacgccgagggttacagcctgactgaaatcctggctcctgtgctccaaggctatcgcacgttataccgtgacaaactgaatctagatttgacgccagaacaggtagttatgttgctggtcgccactgatggtgtagagcgcctggagtcctacggctacacctgtgcaggtgatttccccacagcgtccctgtaa

SEQ ID NO: 83282 - DNA, 177 bp, Citrobacter koseri
atgtcgaagatgtattccagaccattgactattgatggacgtttacggccttgcttcacaaatcgcaacgtgactattgaggagatggctatgaagaaggttttactttgtgtgctggcactgctgccgctggtgactcactcgaaaacattcaatacggacgataacgaaaagtaa

SEQ ID NO: 83283 - DNA, 684 bp, Citrobacter koseri
atgaatgctgctatccaatcaatctgctacaacatttctcaacattccgaaatccgtaatgcatccttgaaacgttctcagcttcatgaggtgattgctgctctcttaggctatgccagccatgcggcactcatccaagaaggaaaagaagcctcaaaagaatatgaattctctgatgctgaatttgtggtgctgaatttaccgatggctacagaaagagcgaggaagtttcttctcaccgatgaaattttctgcatttgtgtctcggaagtaaagtcagggatgcccgtaccagtatttgagtccgtagaggatttttatgatgattacctcagagagtttcttgagaaatttatctatgacggagcggaagagactggggaaatggctgactgtaacgccagtttctacgattatccagacttggatcagaattttaacattagcggcgatttatggaaggctgttgataaatggtcaatagaggatactggaacgctatcaggtgaatatgatccagaagggcaccggatgtacaacgggcatatattcaacgtaaagggtaagctcaagtttgcaaaagcagggcgggcaggcctgatattcttagaagatgaaagcgacttctttttgtcacctgatgaatcgtggcgtgacgaagagccattgtatatcgaggattaa

SEQ ID NO: 83284 - DNA, 279 bp, Citrobacter koseri
atggaaaagataatcaagattcgcttcaactataagggtagtgatttcgaagttaattatcatcatattgatgatggttatgatcaaataaatggagctttagagtatattgcagacacttgtgtaattcctgatttagttgttgcaggtaaacacggtagagatagaaaggtcatcggaaaattgaacttactctctcatgggatttctggtgtaagccttcagcttgacaacggcgattggattaatgttgatgacaagctactgctgagtgtgtag

SEQ ID NO: 83285 - DNA, 528 bp, Citrobacter koseri
gtgaatgcagccgtctttccgtacccggtcggtagcaccgccagcatatcgcggtcacgggcaaacacagcggcggctacgtcctgctgtccgggtcgccagtcgccaccatctggcggcggtaatggcacaaacgccgggcggtcgcattgctccagctcgcggaacctgtacggcgcagtaatcaacggcgggatggacggcggtaggtcagcgcccccaatgtcacaatgcagattcagcgtattgaaattatcatctgtgggtttcagctcaccgcaccataactggcgaaattccggggtgtctcccagtcgggcaaagtcagcatggcgcatagcttccagttggctcatgccgcgattgattcgtttcaggggggcatcgtcgcaaatcaggaactcgcgacaggctttaagaaaggcgttttgccccgtggtcgcttccgggatggcgtgctcgcgcggtttcagtgcggcatcatcgacacgcacaccggggaaatctggcggcagcgggtcagcataa

SEQ ID NO: 83286 - DNA, 297 bp, Citrobacter koseri
atgaacagcatcgccgggctggatgacttgccgcaaccccgtgtcagagcgctgtttttgcttcttcggttgaacaccgtgcagcgctcgccactcccgcagggtcatagcggagccatcagcattgtaataaaactcttcggtctttgtgttgtatgccgccttaacgggtttacgctttacggggcatatcttggaacgccgaataacaatcccgtcagcgatcatttgctgtacatctgcgtttgcggtattgagcgggtcagcgtcggcagcctgcgcaagcaggcggcatag

SEQ ID NO: 83287 - DNA, 234 bp, Citrobacter koseri
atgacctacaaccaaatgaggtgccagcactggccgttactgggctgtgggagatggatggcctacagcttttgtatttatttcagagtgttatgttatgcgaaatctcataacgatatgatttataatgtattttcgttttacttgcggctcttgatgcgaagaggtggcggggctttagccgtgccagacgatgagcatcaagatcagattgtgaatgtgattcatcactga

SEQ ID NO: 83288 - DNA, 339 bp, Citrobacter koseri
atgggcagattaattctcgctgcgttacttagtagcattactttcagcacatgtgcacttactactggcaatgacctttacgagcacgggaaagcgtacaactctatttttaagcaaaatcaagaagcaaacgcgataagtggtacagaggccgggatgtactcaggctatattatggccgtaaatgaccttgctccgttctgtttgccagagggtgtaaagatgggacaagtgtatgatgttgtattcaattacttagatgttcacccggaagcccgacagaaaccagctataactctcatagcgaaagcagtgcataaggcttggccgtgtaaatag

SEQ ID NO: 83289 - DNA, 381 bp, Citrobacter koseri
atgactaaggcctggagtcttgaccctgcattgttcgcaggaaaggtagaggaagatgccgtaaagctacagcgtgctatagctatccagatactggagcgcattgattttgcctctcctgttgatagtggtcgttttcgtaataacaacatggtgtccctggtgacgccggattactcatcaaccactgaagtagacccgtctggtgcgaaagcgctacagcgtggtattgcggtaatttcaaaagcatctaactacggcgctatctacatccagaacaaccttccgtatgcagaagagcttgagcgaggacactctaagcaggctccaactggtgtttacgccaatgctttcaatggagtggcgcaagcctataaataa

SEQ ID NO: 83290 - DNA, 267 bp, Citrobacter koseri
atggctggattgacgaaagaacagcgcgctcagcgagcagcagaaaaacttgctgctgaactggcggcaaaaaacaattctgagcagcaggagcagcaggagcagcaggagcagcaggagcagcaggagcagcaggagcaggatggtgctcagttggttgctatgttcactgacttcccggcattccccggcgcgcccaccaccgcagacgtgcatcctgacgaagtggacaactggaaggcggcaggctggcgcatagaggagtga

SEQ ID NO: 83291 - DNA, 189 bp, Citrobacter koseri
atgagcaaattaacccgtgaattagtagcaaatgccatgctcagcagcattgaagactacctgtttgagattctcgactctgttcaggctgacgtcggagtgctttcgcctgaggagtgttacagcctcaatacgtgggtaagaaatgcggttgagaaagctgctgaaacagtggaggccgcccaatga

SEQ ID NO: 83292 - DNA, 615 bp, Citrobacter koseri
atgaaatcaacggtagaaacaaaaatcattgagttagtgaagtcagggcatgagctggcgaaagaactgcattgtgctgagtctgccgcgctggtgagcgacctggcatcgcagcttgaagtgcagtttgcccgtagcaatgcgctggctgcaaaactgagcatgattaacgacctcatgggcgctgctgaacaggccaacaaacttgcgcaggaagcaacggaaaagctggtacaggagcgtgacgcgctggctgcggagaatgcggcgctgacgaatatcaatgcgtggtgtcacacagaggcattcggcaacatgtaccgcgagtttaaaaccgctgaggctcttgggtgctcaggcgtagattgcatgcatgacgcgatgctggcggcgctaatgcatgcaccagaaaccccggcgacagacgctttcctggctgaagtgcgaaacgaagctggcgcgagagcagtagagctgtttgctcaaactctcggtagtccatattccgtgcgggatgaaaaatgctacgaggatgggtttacccgtgccattgaggtcgtgagagatattcaggccccacgattcgcctacaaaattcgacaagcaggaatgtag

SEQ ID NO: 83293 - DNA, 225 bp, Citrobacter koseri
atgactggtattgaaaaagctatccaaaagttcggcacgggggcagcgcttggaagggcgcttggattctcaaaaatgacaatctccaactggaagaagtctggagttccacctgaacacattcgctcggtatttgaaatcacaggtgtaaccccgcatgagttgcgaccggatttgtatccaaatccaaccgatgcattaccggcgcaggaagcgaggacgtaa

SEQ ID NO: 83294 - DNA, 465 bp, Citrobacter koseri
atgaaagtaaagcatcattttaccaatgagtcaaacaatgaatgcctatctactggtaaagtgatcatttacactagtggaatgagcgaaaacacaatgactactgggctgatctccaggcttacagaactgaaccggaaaggtttctctaaaacagagatggccagggttgccggtgtcagcaagcaggctgtttccagctggttcaaaacaggaagaatcagcaaaagttctgcattagctgtagctgatgctgctggcgtatccgtcccttggctgctaggtgaagatgtcggagaaaagaacgggcttaagccagacgagcagcgcctgctggaactctatcgccagttaccggaagaagagcagcagaacatgttgcggatcgtatctctgcgtctgaaggaactcgacgagttgtacgccaagtacatggggcggcggattaagggtgatggagagtga

SEQ ID NO: 83295 - DNA, 411 bp, Citrobacter koseri
atgaatgttaatgatacagaggatgatttctcttttccggaggtcagtgaaagagagttggcttgtgaacgactcctgttcaacacctctgaagacatcctgcttgcaatgcaggactcgggtgtttcttgtgcggaattagcaaaacgactagggaaatcaaaggctcatgtgtcgcaactcttaaacggcacacgcaacatgacattgagaactcttgctgacatctcatatgtcattaattgtgaaataaaaatcaccatcatgaaagatggtttagacgtttcacatccagtgatgaatgagcagcaacactacttttccacgtctaatgatctcgaaattcacaccgaaatgacgtcgcattttcgcattgttctgccagatatggatgtatgttatgcaacttaa

SEQ ID NO: 83296 - DNA, 402 bp, Citrobacter koseri
atgcaacttaaggacataaagttaatagaggtctctaccaaaagcacgatatttgaacagaattcattcacttcaggtaaaggaaagataaaggtcgagtatggtgaattgaatttcgaggtcggaggggttttggttcaggatgagaaaaaatccactgtgatagttaccgccaccccacaaatattgggctccagagaaggtagtgaaaatcttgaattttctctgaaaatctccatgaggatgatttacatttattcccgtgagaatgtaatggacgaaaaattcctagccgacaacgcgtggtatttctcttcgttcttacgtacttacttcaaaatttatgcagagcaaatattcaaccaatcttcgattagcggtataaagctccccctcaactaa

SEQ ID NO: 83297 - DNA, 516 bp, Citrobacter koseri
atgttgaatctttcctctggtttgcccggagcatcttgccactcttcattttcaaatttctttatttcaatgtcattattttttgtccatataacattaaataaatcatcacgcctctttattcctacgctgacttcggtatcatctctagtaactccatcaataaaagaatctagatctctttttatagattgtaagccgactaactcttcagatctacccatcgcaattcgtagtgattcaacaaatgttgatttaccagcgccacgtccaccaattatagcattgaagagagggtgcagttttatctcaacaggttttcctgggataattccacagtgggtcatttttttaattgttaggttgttaattgacaggtttggtagagaattaggatcgtcaatttcgttacttacgcagaatttattatcgtataatgcaagccttaaaccatcaattgttggttttcccatcttgatccaagaggtattagctcctagtctagacttttcatga

SEQ ID NO: 83298 - DNA, 666 bp, Citrobacter koseri
atgaacaataagattcattccctggccttactggtcaatctgggaatttatggggtcgctctgcctgttatggcggaggagaccactgatagcgcagcgcttcatgaagacaccatcgtggtcaccgccgcccagcagaacctccaggcaccgggcgtatcgaccatcaccgccgacgaaatccgtaaaaatcctcccgctcgcgacgttgccgaaatcatccgcaccatgccgggcgtgaacctgaccggtaactcaaccagcggccagcgcggcaacaaccgccagatcgacattcgcggcatgggcccggaaaacaccctgattctgatcgacggcaaaccggtgaccagccgcaactccatccgtctgggctggcgcggcgagcgtgacacccgtggcgataccggttgggtgccgccagagatgatcgaacgcattgatgtgattcgtggccctgcggcggcacgttacggcaacggcgcagcgggcggcgtggtaaacatcatcaccaagaaattcgacgatcagtggcacggttcgtggaacacctatctgaatgcgccggaacacaaagacgaaggttccaccaagcgcaccaactttagcctgagcggcccgctgggcggcgaattcagctttccgcatgtacggcaacctggataa

SEQ ID NO: 83299 - DNA, 303 bp, Citrobacter koseri
atggaaaaattaactttaaccagaaaggaagcagccgaactactgggtatctccacggcaaccgtgacgcagtgggttctggaaggaaggctaaaagcctaccgggtaagcgacaggcctaaatcaccatatttgttcacgagagaaatgatttgcttaggtttttggaaaaaattccgcagactgtcgttcatcaagccagtgctcaatatcttcaatattccaagcgcaacgattgtcagttatgtgccaacgcttcggaaactcaccttttttctccagtctatcgatagtgctccatga

SEQ ID NO: 83300 - DNA, 2727 bp, Citrobacter koseri
atgccgcaggctatccctattgtggccgccgtcgccgcaggtgcagcggcagcaagtgaaatgtatgcccttgcgatggtgatcaccgtcgcagcgcagatcgcaacccaggcgatgacaaaaacgccctcactgaatgcgtaccgcgacacatcagagcgaaaacaggttctgcgcgcggcagtcagcgcaaaaacagttgtttatggccgcaccgtcactgccggaaccttgtttttctccgaagagcaggcgggcgaccagaccgagggtgagatgctgcatcttgccatttctcttgcaggccacccgttatccggcgttccggttatttatctcggcgatgacccgataagtgcatacggtgacaacgcctcttttgaggttcacaccaaccgacagactgccgatccttacatgcttgcgaactgcccgtcatggaaagaggacatgatcgggaaggggatcacctggctgcgcgtgtcgctgaaattcaacgcagaacagtttccttcaggcataccgaacattaaagccgagaagctggggcgggccgtttacgatccgcgtaccgggctgactgcatacagcaacaatgccgcactgtgcattctcgactactaccgcaattatctgaaagtccctgattccgacattaactgggatcagtttcaggaagccgcaaatatctgtgatgaggttgtggtaaccggcgctggcgcgacagagaagcgctacaccattaacggcgaatttgatctcagtgaaaacaaagccagcattctggaggcgatgctttcagcctgtgctggtgatgtgacgtatatcgccgggaaacacggtctgctggtcggtgcctattatggcccggcgactgaagtgatcaccgaaagccaggttgccggtgatattgaaatcatgccggaagtctcccagtcagagcgtgtgaacactatcaaagggacatttgttgatcctgagcagggctttactgaagcagactttccgtcagtttccgtcagtgagtgggtggcagaagacggtgtcgaaatttcacaggacatgaagcttcgctttgtaacgtctgagttccagtcccagcgccttgctgacgtgaaactcaagcgaacccgcatttccagaacgatgaatgttccgctgaacctgagcggataccgttatcgtcccggaatgtatgtgaaggtgaatttcccttcgctggggatcgttgacgttgaaatgcgcgttacggactggaagtttggcgtgcagaacggtgcgcaggtcacactgaagcaggaaacagcagatgtgtggggtgatgcgattggcaagcccatcgtgcgaccgccgtttactcagctccccagcggtggcgtggcgcagccgcagaacctgaaatatacggttgaagaaattggccaggtggtgcagggcattctgtcctggcagaacatcggacaggtctcctataacaaagtcatcatccgccgcaatggtcagatggtgctctctgtgcaggttccaggatcgtttacacgactgaccggactgccgaaagacacttacaccgcacacgtcatagcggtaaaccagatgggcgcggagtcgccggaagcgtaccttgagttcagcattcaggcaccgccgccgccgtctcatgttgatattgagcaagggttcttctccgtcacgcttattccccgccttgctgccatcgccaacgtttcaacgcagtttgatttctggacgtcaggagaaacagctcttcccgactcatcaacggaaaccgttgaggctaacgcgagccgggaggggatcggaaccacatggacgagcaatcagttacaggtcgggcatacctattactggtatatcaggacgatcaatgcgttcggcgcgtcggcatttgtcgaagtccctgcactgtgtgagatggatactggcagcctcatcgacattattgatgaccagatacagcagtctgatgctttccagaatattaaagagggggtggataccaacctggacggtatcatgtcgaattcgctggcgaaccacggaactgttgaacatcagttccagcagcttggcgaagttcgcgccgacattctggttgttaagaccactattgccgatgtcgatcaggggctggctgatctgtccacttacgtacaggcttccattggcgatttaaatagtgatgtcaattctctgacgtctgccgttaaccagaagatgaccgctgaggtcaacagtgatggcacagctaaagcatcttatacgctgaacatgggtatagtgcgaaacggtgtgaaatataacaccggtttcggcatgtctattgagccatctggcggcacatacaaatccacagtcgtatttgctgccgatcagtttggtatctactcgggaagcgatccagggaactacactgcggcattcttcgttttcaacgggcaggtctttattcgcgacgcgttaattcaggatgggagtattaccaacgccaaaattggcaactatatccggtccagtaattttctcgccggaacacgtggatggaatatagataagagtggtgactgtgaattccatgggaaactttatgcgaccagcgggaattttgcatttaacggagtaaataacaaagttgttctcgatgggaaaggtatcactgtcaatttatctgctggcggaaaggttgttgtcggggagtggagctaa

SEQ ID NO: 83301 - DNA, 399 bp, Citrobacter koseri
atgaagcatccggactggcataacagattaatcaccgtaataagggccgctgaaaagcggccttttttatggggtgagcacgactgctgcctgtttgccgcggactgtgcgcaggcgatgtgtggtgaagattttgcggcggactggcgcggaacctatgacagcgaaaccggcgcaaagaaagccatcctgcgcggtggcggttctcttgagaaggtccttgcgcggtatctcgacgaggtgccggtgaagctggcgcagcgtggtgatatcgcgattgttgaaaattatggcgcccggtgtgcaggcgtgatttatggcggtgctgtctgggttcctggtgaaacaggactggtctgcctgcgtgtcaaacctttgagtgtctggagggttcgttaa

SEQ ID NO: 83302 - DNA, 3333 bp, Citrobacter koseri
atggcaactctccgcgaactgattataaaaatttcagcaaactcacagtcttttcagacggagattgcgcgagcatcacgtaccgggcaggattactaccgcaccatgcagaatggtgggcgtcaggcagcggccgcatcgagagagacccagagagcgctgtctgaagtgaccagccagcttaattctgcaaaaaattctgctatagggttggctggtgcctttgctggcgcttacgctacgggccacctgatttccctggctgatgaatggagttccgttaacgccagactgaagcaggcatcgcagtctactgatgacttcaaagagtcacagcgggcattaatggggatcagccaacgcacaggaaccgccttttctgacaacgccagtctttttgctcgttcagcagcgtctatgcgtgaatatggctatagctcagaagaagttctgaaagtaactgaagccatttcaacagggcttaagctgtccggcgccagcacatcagaggccagttcggtaattactcaattcagtcaggcgttggcacagggcgttctccgtggagaagaattcaactccgtaaacgaaaatggtgaccgcgttattcgtgctcttgctgccgggatgggagtggccagaaaagacctcaaagcgatggctgatcagggggctctaacttctgacaaggttgttccagcattaatcaaccaacttggaacccttcgcgaagaatacgatgcaatgcctcagacagtatcggcggctacgacaaaaatcgaaaacgcgtttatggcatgggtaggcggtgcaaacgaggcaaccggtgctaccagtgctttgaccggggttctcaataccatttctgataacattaataccgtcgcaactgctgctggcgctttggctgctattggtggcacccgatttcttggtggtatgtttggtgatctcggtagccagacggctcagttaattgacgcgcgtaagaatgaaatagcgctggccgccgcgcgagcaagctcagcaactcagtcgcagaggaaagccgccgcagatgcaattgcggcagaaagagcatttcaactagcccaggcggaacttgagttagcccgtaatactaatgcggaggcaacggcgacgcagaacgctattgcaaggcgtagagcgatgatcacggcgaatgccgctctggttcagtctaaccgtgctgttactgcatcacagcaggctcttaacgcagcaacctctgtcatggggctcgtcagaagcggagcaacgggattgctttctctggttggaggtttacctggacttctgatgcttggagctggtgcctggtacaccatgtatcagaatcaggaacaggctcgccagtctgcccgggaatatgcgaatcagattgatgagataaaagagaagacatcgaaaatgtctctccctgaactggataacagtcgcaatcagacagtggctgcactggaggagcaaaaaagactcattaccgagcaggaaaagagcgtaatgagtcttaatcggcggctaaatgagcttaacgagacgaggagtaaccctgctttaaatcaggaaaacgaactgaatattatcagggcgattgcaattcttaccgatcagatttctgttgaagaagaaaaactcgcacagatgagggagaaatctcgctcagtatcgcaggctcttgaagaaaacgaaaggcgtcgtaatgacctcattaaagagcgggcatggagacaaaacgcagagtatcagtctcttgtaaatatgaacggccagcatacggaatttaatcgtctgctggggctgggtaatgaactcctcagggcgcgacaaagtattactaattctccgttgcgcatcccgcaggccgatctggacaataaacaaactgatgcgttggcaaaaagtcgccgtgaacttgagttgtcacggttacgtggtgaagcaaaagaactggctcgtttgagatacgccgctgatgatcttggttttgtatctaatgatccacgctaccagtcaagccgacaggaatttataaacaatggactggaggaatggcgcaacaatcaggctaataagccaaaagcgaaaggtggtaaaactgaagcggaaaaaaccgaagatgtttactcccgccttataaagcagcagaaagagcagatctcactggctggccagaataccgaactggcgaaggtaaaatatcaggtaagccagggtgagcttgctacgctgaccgaagcgcaaaagcaaactctgttgcataatgcggctttgatcgaccagcggaaaatccgcgaacaacttgctgcatacgaagcaaatcttgccgatgctaatgccagcgcacgggcatcaaatcaggctgaacttacaggctatggtcagggaagccgtatccgcgagcgtatgcaggaaatgctgcgcatacgagaggaatttcagcagaagaacgttgatctacagcgacaatatcaatctggagatatttccgaggacctctaccgtcaggaactggcgctgaataagcgctatctcgatgaacgtcttcgcgatcaggaagtttattacgctgcctctgatgcccagcgtagcaactggaccgctggcatgcgtgaaggattcgctaactgggctgatactgcttcggattacgcttcgcagtctgctgatctggttaataactccatgtccggtctcgtcggtaatatttctgatgctctggccggtaataaggttgactgggaagactgggctaattctgtgctccagtctatgcagaaaatcatactgaacgcgatgctggtggactccctgcggtcggccagtaacagcggttttttcagttccatcggtggaatgtttggtgccgcctcagctggcggaagtaccccatccggcgcatataactctgctgcatccggtatcaagttgaatgccaaaggaggtacttatgcttctgaaagtctgagcgcatacagcaacagtattgtgagaacaccaacttactttgcttttgcaaaaggcgcaggtcttatgggagaagctggaccggaagccatcatgccgctcacgcgctccgcagatggttcgcttggtgttcgggtaacgggtgctcaaacggcacccggtggcggtggtgaaatccatattacccagcacattaacgtttccggtaacggtgatgcagcccttaagcaggcaatgcagcaggcggcaaggcagggggctaacgacggtgcgaagcaggctcgtcaggatttgcttcaggattttcagacgcgtgggcaggcccgccggttgttgggcgtataa

SEQ ID NO: 83303 - DNA, 291 bp, Citrobacter koseri
atgcggtttttgatggcgctcgcgctccgtatggggcgcacgctttcagaacttcgtgaaacaatgtcggccagtgaacttcggctatgggcagagtttgataaacacagcccgataggcgacatccgcggagatatccaggctgcacaaatagcaacggcggtatttaatgcccagggagttaaagccacgatgggcgacatgttgctgaactggcagaatgatcctgaagatgaaggggccgacccgtttgccgggctggaagctgcacttactgcggcgacgcagtga

SEQ ID NO: 83304 - DNA, 369 bp, Citrobacter koseri
atgaaatcactaaaagagttggcgttgtcgcgtcagtcagcgtttcgacatacgaccgttgatgtccctgaatgggacggtgcgaaagtgatgctccgtgagccatcagcagaggcatggttgcactggcaggatgtgattaagcctgctgacactgacggtgaattgtcagtttccgaacgggcacaccgtaatctgcgcgcagatgtaacgctgtttatcgatgtgctctttgatgagcaaggggaaccagtgttcagcaaagatgattttgctgatgttgagtcggtttatgggcctgttcatgcaagattgttgcggcaggcgcttaatcttaccaccgacccgaaagaagccgagggaaagtag

SEQ ID NO: 83305 - DNA, 444 bp, Citrobacter koseri
atgtcctcactttatgaaaaatctcagggcacaaagattcagattacctctgcccctgtaacgtcagaaactgtcgacgatgcaacctttcttgacctccattgcacgatcaaagaagtgcaatttactggtgggcaaaagcaggacatcgacgttacgactctgtgctctactgagcaggagaacatcaacggacttggcgcccagtccgaaatctcattgtcgggtaacttttactccaacccggcacaagatgcgctgcgcgaagcgtatgaaaatgacaccacctacggcttcaaaattatttttccttcggggattggcttccagctcctggcagaagttcgccagcacacctggtcttccggtacaaacagtgtcgtggccgcaacgttctcgctgcgactgaaaggaaaaccaacaaaaattgaacctggctcataa

SEQ ID NO: 83306 - DNA, 348 bp, Citrobacter koseri
atgacggaagatgatatttcccctttgctggaacatctcgccggagggcaggtttatccttacgttgcgcctttaaccagcaatggggagccatcccttacgccgccgtgggtggtgttttccattatttcagacgtgtcctctgatgttttatgtgggcaggctgagtcccgtgtttctgtccagattgatgtttattctctggatattatagaggcgcgcaccattcgggatatggcattgcaggctgttctgcctcttaagccagccaatgtatccaaaatccctggctatgagccagaaaatcgttattaccgagcctcgctagaatttcaggtcgtcgcctga

SEQ ID NO: 83307 - DNA, 450 bp, Citrobacter koseri
atgattgatattaatcttgatttttctggtcttgaagacatttcccgcgatctggagttgctcagccgcgctgagaataacaaggttctgcgcgatgccactcgcgccggagccgaggtgttgaaagaggaagtcattgccagagcaccggagaaaaccggaaaactgaaaaaaaacgttgttgtgctgacacaacgttcacggagacggggagaaatctcttccggtgttcatattcgtggtcgaaatatgcgaactggaaacagcgataactcgatgaagcccagcgacagacgcaatgctttctactggcgatttgtcgagatggggacgattaacatgccgccacatccttttgttcgtcccgcttttgacaccaaagaggaactggcggcacaggttgctttgaaacgaatgaatcaggctatcgatgaggtattgagcaaatga

SEQ ID NO: 83308 - DNA, 339 bp, Citrobacter koseri
atgcaagcaggaagattgcgagatcaggttaccattcagaacgctacgaccaccagagcgccgtcaggtcagcccgtagaaacctggcatgatggcggaaccacatgggcagaagtgaaggggataagcgggcgtgaactggtagccgcaggtgccgagagcgcacaggcaacgatccgcgtatggattcgtttcaggcgcgacattaccgcagcgtcacgcctgaaggttaataccggcccatttaaaggcgcgattttgaatatcatcggccctcccattcctgatgcaaaaggggttcagatggagatactgtgcaaacagggggctgaaaaatga

SEQ ID NO: 83309 - DNA, 327 bp, Citrobacter koseri
atgcttgatcaaaatgtggtgaaacagcattgccgcattgataccgatttcacaggtgatgatgctctgctgactttatacaccggtgcggctgcgcggtacgtccagacatggacgaggcgaacgctctatgaaaatcaaagctcccctggctacgcagacgacccggaccctattctgctcaatgatgatgttaaggcggccatgctcctgcttatcggccactggtatgcaaaccgggaagcagtgaacatcggaaacattacgtcagaaattcctttcgccgtagaagcacttttgcagccctataggatttatggattgtag

SEQ ID NO: 83310 - DNA, 1209 bp, Citrobacter koseri
atgtctgaagtaaatgaaattctgaaaaaagttaccgccagcatcgaagaggcaaccagcaaatttaatgcaaaggcagaagacgcgctgaaagaggccaaaaagtcaggttcgctgtccgaggagacaaaagcggcggtagacaagatggcttctgaatttaatgcccttcgtgaagctgaaaaaacgctgaaaaccgccgtgggtgaactggaacaacacgttgcgcagatgccgctggcaaatgcaaagcaggttgttgaaacggtcggtcatcaggttatctctgctgaagcactgaaaacattcgctgccagtattgatggtggcaagcgtgtcagcattccggtcaaagccgcaaccatttctaccgacattcccgaaggtgtggttgagccgcagcgactgcccggcattgataccgcgccgaaacagcgtcttttcattcgcgatctgatcgcgccgggacgtacttcttctccggctatcttctgggtgcaacagaccggatttaccaacaatgctgcggtagttcctgaaaatacgcagaagccatacagcgatattcagttcgcaacgaagatcacgccagtgaccaccgtcgcgcatctgtttaaagcatccaaacagatcatggacgatttcgcgcagttgcagtccaccattgacgccgaaatgcgttatggcctgaagttcgttgaagagcaggaaattctctttggtgatggtactggcgcccatctcgacgggattgttccgcaggcttctccgtttaatccggccttccaggttgagcagcagaacgggattgacgatctccgtctggcaatgttgcaggcgcaactggctcgcttcccggcgtccgggcatgtcctgcacttcattgactgggcgaaaatcgaactgaccaaagacagcctgggccgctacattctggcgaacccggcggcgctgaccggacccactctgtgggggctgccggtggttgcgactgaggccgctcagttcctgggtaaattcctgaccggagcatttaatgccggtgcgcaaatcttcgatcgtgaagaaacgaatgtggttatttctaccgaaaacgccgacgacttcgagaaaaacatgatcaccattcgttgcgaagaacgtctggcactggctgttaaacgtcctgaagcatttgtcttcggtactttctccggggctggtagctga

SEQ ID NO: 83311 - DNA, 849 bp, Citrobacter koseri
atgagtaaaaaacaacttccggtagcaccggcgggacgtccctgcgcgggtgttaccagcgagccgatgccagcagcgcttgagcgctggaatggtggcattcgtgcagcatcgagcgatgacaacaccatctcaatttttgatgtgatcgggaaagattactgggatgaaggtgtgacagcaaaacgcatttctggtgcgcttcgttcgctgaatggcgctgatgtgaccgttaacatcaactctcccggcggcgacatgttcgaaggcctggcgatttacaacctgttgcgggagtaccaggggaaggtcaccgtgaaagtgctgggcattgctgccagcgcggcttcgataattgcgatggcgggtgatgaaattcagattggccgtggtgccttcctgatgatccacaactgctgggtgtttgctgtaggtaatcgtcacgactttgcagaactggccgtctcgcttgagcctttcgataaagcaatggcagatatctacgctgcccgctccggtcttgaaatgtccaccgtacaaaaactgatggatgcagaaagctacatcggcggcagtgatgccgttgaaaaggggcttgctgacaatcttctttctgccgatgccgtcagtgacggtgatgaatcacccgccgcggcgctgagaaaactcgatgcgctgctggcaaaaaccaacactccgcgctctgagcggcggaaactgattaaggccctctccggtggcatgcctggcgctgttaccaaccctgacggtacgccgtgcgctgccgacgacattaaacctgaaaccctcaattcacttgaaaacgcactggctgcgttagtcaaataa

SEQ ID NO: 83312 - DNA, 1308 bp, Citrobacter koseri
atggcgaagaataaacagcaaccagggcgcataaagagcgctcttttaaactggcttggtgttccaataagcctgacgactggtgaattctggcgggagtggttcggaaccagcagtagcggaaaagtagtcaccgctgacaaagttatccggctttctgctgtatgggcgtgcgtgaggctcctgagcgagtctgtctccacgcttccgcttaaaatttacgagaggcaggcggatggatcacgaaagctggcccagaacaaccctgcctaccagatattatgcaggcgtcctaacccggaaatgacaccttcccgcttcatgctgatgattgtggccagcgtttgtctgcgtggtaatgcttttgtcgaaaagctgttcatcggcagcaagctggtatcgctggttccactgcttcctcagaatatggttgtaaagcggctcgatagtagaaaattacagtacacctacacggaaaacggcgttgagcggatcattcctgtagacaggatgatgcacattcgcgggtttggtcttgatggcgtgtgcggcatgatgccgacaatggccggggttgacgtcttcggcgcggccatgtcggtggatgaggcggcggcgaaaatcttcgaaaacggcctgcaaagtaccggtttcctttcttcaaaaacagcgctgaataaggatcagcgtgaaagactccgtaagagtcttcagtcctttattggctctaaaaacgccgggaaactgatggttctggaaaatgaactgacataccagaatgtcacgatgaacccggaagctgcacaattgctggaaagccgttcgtttagcattgaagaaatctgtcgctggtttcgcgtgccgccctttatggttggtcacacgacaaaacagtccagctgggcttcgagtcttgaaggcatgaatatgctgttcctgacccatacacttcgccctctgctggtaaatattgaacaggaaatctcgcgctgccttctgaacagcgatgaggatttatttgcagagttttccgttgagggacttctgcgcgccgacagcgcaggacgtgcagcgtactataccagtgctttgcagaatggctggatgtcgcgtaatgatgttcgccgccttgaaaatatgccgccgatagaggggggtgatatttacactgttcagcttaatctcacgcaactgaaaaatctcgaaagcagtaacccggcagttcaggcgctcgctatcagagaactgcacaaccacgtattccctgacattccttacgagcagtcgcctctcaaacaggccgcttag

SEQ ID NO: 83313 - DNA, 1743 bp, Citrobacter koseri
atggtggagaaaaagaagaagacccgctcaaccagttcttcggttgatcctgcaactcagtatgcaatggatgtaacagagggaaaagtagttgccggccctgatatccgtaatgcctgtaagcgccatttgcgtgatttaaaagaggggaaaaaacgcggtctgacttgggatgttgaatcggttacgcgggctatcaacttttttgctcaggtattgaaactgaatggcggtgagcacgaaggtgcgccatttattcttctgccctggcaatgttttatcgtcggctctgttttcggctggaagcgtgagaacggtacgcgtcgtttccgcacagtgtatgttgagtccgggaaaggttctggtaaatcgccgctggcggcgggggttggcctttactgcatgatggctgacaaagagccgcgcgcagaagtgtacgccgccgcgacgaaaaaagaccaggctatgatcctgtttcgtgatgctgtggctatggttgatcagtcgcctgcgcttctgtccagaattcagaaatcagggggagccggtaaagagtggaacctggcgtttcttcaaaacggttctttcttcaggcctatcagctctgatgatgggcagtcggggccgcgtcctcactgcgccctgattgatgagattcacgagcataaagataaccgtgcggttgagatgatgcgtgccgggactaaaggtcggcggcaggcgttaatttttatgataaccaacagcgggcatgacaaaaccagcgtctgctacgactaccaccagtacgggcagaaggtagccgctggtcagcgtgaaaatgatgcgttctttgcctttatctgttcactggatgaaggcgacgatccctttaaagatgagtcatgctgggggaaagctaacccatcaatggggcatacctttctccctgattacttgcgcgagcaggtagaagatgcccgcggcatgcctgcgaaagaaagcctggtgcgccgactgaacttctgtcagtgggtggatgcagagaatccgtggatcggcggcgatatctggatggcctgtgaaaaggaaatcagtattgagcagttacggggtaaaacttgctatggcgggctggatttatcgggcaagcgggaccttacatcactgtctctctattttcctgacatcagcgtaatgctgacagagttctggaccccgaaagatactttatacgatcgcgctcgcgttgatcgggttccttacgatgtgtgggagcgtgatggtcatatccatgcgcctcccggcacggccattgactacggatttgtcgcaaagcgcatggctgagctggctgcgatgtttgatatacgaaaagtcgctttcgaccgctatcacattgactatctgactcctgaactggatgacgaaggtgttacggttcctcttgtgccgcacgggcaggggtttggtaaatcggcggaatcaggtttgtggatgccgcactcaattgagctgtttgagcaactgattatggagaagcgaatcagtattgttctgaatccctgcctgcgatggtgtgccgcgaatgctgttattgaagaggataaaaacggcaaccgggttttcagcaagcgcagaagtaatggccgtatagatggcgttgtttctggtgcgatggcgattggcgcagcagaaggagatgaagaggatgatggcgatattgagggcttttttgacgatccgatcatagtgggtatctga

SEQ ID NO: 83314 - DNA, 465 bp, Citrobacter koseri
atggcaggacgtcgcccgaaaccgtcccacctgaaagtggtgaccggcaatccgggcaagcgaaaacttaacgataaagagccccagcccgcgagagaaatccccagccctccggcccaccttaccgactggggaaaagtcgcctggggaaaactcactgtgctgcttgacggtatgggcgtacttaccgtggctgacgtgctggcgctggagcgcctttgcgatatttacgccgacatactccagttgcggcttacgatcgctgacgaggggaggacgtataccgttcagactgaaggcggttttttaattaaggctaacccggcggttgcaatgctggccgacgcggatcgccgctttaaaagttacctggttgaattcggtcttaccccggccgccagaacgaaggtgaaagttgatggtggagaaaaagaagaagacccgctcaaccagttcttcggttga

SEQ ID NO: 83315 - DNA, 342 bp, Citrobacter koseri
atgaagaaagaaccgcgcatctatggcagcaagtgggatcgtgaacgacttgcctttctccgcgagcatcccctgtgtgtgatgtgccatgagcagggaagagtgacagcggcaaccgtcgttgaccatatcattccgcacaagctgaaagaggcgctgaacagcggagacgccggggcaatagcgaaggcgcaaaagctattctggagccgtaagaactggcagggactctgcaagcagcatcacgactcaacaaagcagcggatggagaaacgcggagcggtcatcggatgtgatgagcatggcgtgccgcttgatcctaactcgcactggtttaaatga

SEQ ID NO: 83316 - DNA, 594 bp, Citrobacter koseri
gtggaaacacaaataaagtttttagtggtcgggcatcactcaagagaacctcaggcgcgagcactggcttaccaaatcgggccagctgctcacgtcatgatcgacccaaataaccacggcgcgaactggaatcatcgccgcgcgcttgaatgggctgccgggcaatcctgtcgggttgtagtgctggaagacgacgcgatgcctgttgctggtttcactgatctggtgggtgagtggcttaaccgcttccctgattcattgatgagcttttacctgggcactggccgaccacctcagtaccagatgcagatagccgaacgactgatagtgtccgataagatgcgtaccaattacatcacgttgccgcgactgattcacggtgtttgctacagcgtcccacagcatcacattgagcgtgtgctgtcccggtgggacaacagtaaaccagctgattatgccgttggtgatgcttatggcggcgaggtgatttacccgtgctattcgctggttgatcatgcagacggcgaaccggtagagcgacacccagacaaaacgccgcgcacagagcgccgccgggcgtggaggctggcatga

SEQ ID NO: 83317 - DNA, 717 bp, Citrobacter koseri
atgagtaataaaaccattacgctatctggcgctgctactgacgtgctctacgcgctgttttaccgtggcgcattgctatctggtgacctgccgtctaaatccggtgccgccgaacttcgcgaactgggctttgctgaaaccagacatacagcgacgcaatatcagaaggaaaactattttactttcctgacaaccgaaggacaggcgtttgctgttgagcacctggtaaatacgcgctttggtgtgcctgctggtggttacatcggtagccctgtagatacgatgaaagaagatatccgtggctgctgcccaattgaaggttatgaatggggctggtttatcgataagtccgggcaagcttacatccataaagcgctgatcggcgatgtaattcacgctgcggaccccgaagatactcgctcggcgaccaatacctacaacatcagccttggtgttcgcaaagataagccagcacagaacacggtaacttttaccgctgatcggttcgaagttcactctggtgttgataccaatctcgaagccctgatcgaaaacatgctgaaaaataatgctgcttgtgcggctaaagatgtagcaaagaacgttgctgaacatcagaaagcgatggatgacctaaccagttttatccgcaaagcaattcgtaatgaatgccgtccaggtagtgcgatctggggcataagacgccgtggtatttaa

SEQ ID NO: 83318 - DNA, 144 bp, Citrobacter koseri
atgcaactggagaaagaatatgtgcagcatccccttggttcttttcgcatacccaacggcatttttcatgcttctggcaatctcaatagccctgaatggttgcatgatctgggcgcgattaaagaacaaataaccattctgtag

SEQ ID NO: 83319 - DNA, 201 bp, Citrobacter koseri
atgttaacagtaaaagtcatgtcgccaggtggtggcgaagagattcattgcggtctgagcgttggctttaatcccacccagcagagcattgcagtatcgggaatggacaaaaatgtgttcctgaagccgggagaggtcgcctacgtgatgaaccagaacggaaagacggtttctcgctacgagcataatgaccgccagtag

SEQ ID NO: 83320 - DNA, 243 bp, Citrobacter koseri
gtggataaatttaagtttgaccttaaccagtttgttgagttgtcgatcagcggcgaaatgggccatatcaaatcccgcgctgagagcatcaaccactgtaatcagtatctggttcactacaaagccgcagatggtcgtgctcaggaaagctggttcgatgaagatgacatcacagccgtagaagatgatgagcatcctggcgcacccatttacgccgtgaaagcggatgatgtgacagtctga

SEQ ID NO: 83321 - DNA, 258 bp, Citrobacter koseri
atgagcgaagcaaaaccgcaggacggaagcaccgttaagggctaccgcgaactctcttacggtgaaatcggcaagatgaaccagttcaaggacatcagccgtcagttcatcaaattgcttcgcgaacaaatgggtgacatccctcagggaatcgacagctgggaagcccaagagtggataagacaggccgaatacgacatgaaacgcgcatgtatggctgcatgtcgcgctgtggcccgtccagatgccgactgttaa

SEQ ID NO: 83322 - DNA, 816 bp, Citrobacter koseri
gtgaagcttgagtctgcccttaaacatttcagcccgcaggggatgcacatcagcgacagcgtgaaaggcacatcaccggatcggatcaccggcactgatgttatggcggccatcggtaccaccagcagccgtgcacggttcggcctgtctgccttctttggtaaggcggggatcagcaagacagatgagcaactggcagttcaggcgctggcgcgtcacgcgatggataccgcaccgaagaacgtcagaaaggccgccgggactgagttcggctggtgcatgcaggtgctggcgcagtttgcatttgctgagtattcccgttctgcggccaccagcgcgacatgccacagttgcaatggttccgggcgtgtaacggtgacccggacaatccgcaaagtatcttacccgtggggtaaagcgccatactgggccagcaagtcccgcgctgttcgtccttcagactgggagcaatggaacgaggttacagagagtgtcccggctgtctgtgaagtttgtgaaggtaagggaacgataagcgcccggtgtcgctgcggtggcaaaggggaggtgctcgatcgcaaggctacgaaagagcatggggcgccggtattcaaaatctgtgagcgttgtggtggtgaagggtattcgagagtgtcttctgtgaccgttcaccgcgctattctcaaacgtctaccggatctccatcagtcgtcgtggtctcgtaactggaagcccttctacgaaatgctggtggatatgttgcacaaaaaagaacgccatgcagcatcagaatttgagaaggcaaccagttattga

SEQ ID NO: 83323 - DNA, 684 bp, Citrobacter koseri
atgaattcatttgattttttgggctttaatcgttcggagatagagaaaactttaggattaaacctccatgataatctattagaatataatattgggttgaaaaaaaacttagatagttggttggtgccttatctttctcgcgacaatattctattgagtgatgcagcttgtttaattattggcgctaatcctcgattgggtttaagaggagagcaaaatagtgaatgtgaagcttacaaagaatctttatgggatgccattgacaatggaaaattaagtgcaaaagatatttcgtactacgataatatggatcacgaccgccgagattgtgtgcttgttcgaagtgaagttgagaaatgggttgctgatcatgagttcaattggcctctacctctacaacaaccacaggttattgaaaataacaatcagatatatcttgaccagtggggagagtttccgggtaaaaatacagcacttatgatgattgctggtatggctattgcgcttgaaaaagcgagtaaatcctttcggaatggagagcggttgaataaactcgctatagctagggctgtcgctcagaacctagcggcattggggtatcaggggatggttgtaacagagaagcaaatgactaacttgataaaagaagctttagaaatcactttgcctgatagtgaacagtag

SEQ ID NO: 83324 - DNA, 366 bp, Citrobacter koseri
atgcttaatccagcgatcgagttgaaagctaaaaagcaacaattcataagcatcagagagctaattgttagaatcgagtcaaaatatcccgatatgacgcgggatcagatagcgaactggataattatcaagctagatgaagagcaagagtatgctcctagcctgctaatacaagatgcccgaggaataactcgtaggccttccttcggagatccatcgtttagtgcttatgaacttttaagccgtgtaatggctagccccaatatggataacccgccttacgaagggtggacaccatctatgactaggacagagcaggaacaaagcaccacagaccttaactttgaagatgatattccattttga

SEQ ID NO: 83325 - DNA, 1701 bp, Citrobacter koseri
atgccatcaaacaacatcccccatcacctctataagcgtaaccacacatggtggtttagaaagcgttttgtctttcagagcagcgcaatcgagttcagagtgagtcttaaaaccactaatctctctcgagcacgcctccttgcactacatttacagccgctttgcttgagattggtaacttctttgggggggcacagcttaggtaagaaatcaatggacaaaacggtacaggaacagatttcagcaagactgcgagcccaagtagcagaatggacagcggaagaaacagaacgctggttttctcgttcaaatcgaacagaaggcgatcttaaccagattcttgaaaacattgacatgcatatgtctgatctcaaagagcgtattgcttgtgatgacaagccgcaccttcatcaagccgaagccaataccattcttgataaactccctcacgtaagggcttctctaagcgaagacgacattaaggaaatcgcccgtgaagtagctagtgctaaggtcgaatcattgcaggaaactcgtgacatcatactgggccgcaaatcacgtatgttttctttacaggcgacagcacctcatccagcgtcacccgttgagcagcaagaatccctcacactttctcaactgttcgagcagtatacaaacgagaacaaagctaagaaattagcgggccggacatacaaaaaatacgattggtacagagcccttgtgatcagcttttttggtgatattcagatacatacaattacaggcgctatggggcgtcaactttatgaaaatctaacaaagctaccattgaacctgcaaaaagaagatttgttgtctgcaagtctgctggaaattattgaaaaaagtaccgcccaaccgattggtttggtcacagctaatggtcaccatggcaaaattgctcagttttttgactgggtagttgaccgcaaacatattcaaaccagcccatttcctagcaagggcctcccccttcctaaaaaaaaccataaagatgatcgtcaggcgattacggatgccgaggccaaattggttttcaatcagcctttattcacatcacatcagggcttcaaaaccacgctggtacagcatcctcatcactttttcttaccgctaatctgtctgaccacaggtatgagaactggcgaggttgcacagctatacattgatgatattgaggatgttaaaggggtatcatgtatccgcgttgaccgacgccatgatgatcaatggctaaaaacacctaatgcaaaacgctatatccctctgcatgaagaactcatcagacttggtttccttcgttttgtcagcgatttaactgaaaagtttggcaaaaactcccgtctattcccaaatattccactcattcaggacagttattcagcaaaacctagcgaatggttcatcgctaacttcagaaacagcctagaccaacccaaacacgtcactctccatggtttcagacatatgttcagggacaagctaacaaatgtaacagactcagacgagaggatttgtcggttaatggggcaccaaaccagcaactacggcagttcgttaccgccagagcaacaagccatgaaagaattggttaattctattgattttcatagcattgtttcagatgtaaaaccctacacatcgttgagtatgttccataagttaaacgggagggcatag

SEQ ID NO: 83326 - DNA, 1068 bp, Citrobacter koseri
atgagcaaagccatccaccaacgcttgcttgctactcctgttgattctacccttccacgccatggaatgttccgtaaggcagaggatgaaaaatggcaagtaaacctctgtatgttatttaaaaatctacccaaatcgcgtggttcaatctcaagaaagtactggtataaaaccagccaaaacatggtgcaaatgctgcctgaagatatgttccaaagggaaattgatgaagtcattgctgttctgcacgacgatattgacccaaaaacatggatctccgctcgttcagcactagttttactcacttatggttcaaggaatagttatcatctcgaagtaattcaatgggttgagagatatacggaaatcaaacttccccgtcaaaaaggtttaagccgcagagaaattgtatttggtcgaagattacgtacatttcttgatggcgaactcacagaaaacacttacggcaattacgacttgcagcctcagtaccggatgtgcaatggcaagtactatgttgatttcgctgtaaggcactactggaacggtaatgaagactgcgcccattatgacctatatctcattgaattcgatgaggaagaacatgttctagcacctaacagagccgccgatttgattagagacactgaaatcaaaaaggaggccccaaatgcgacaatcatcagagtaaaacacgatgaaatcgatcgctggtttgaactcgtgcgtgataacaaccgtctgattggctttgaatcggctcttttagagggaatcatcaccgccagccacgcagttgaaggtaatgaaatcatcatcaatgcagcctctgcaaaaaaggcatacgattcagatgagaacctcaatgcagatagactcacttatgagaaacagccgctccgtggtcttaaagaagcgttgaagcaatgtagcatttgtttccacgacagcagaacaaggaagcaacggcagctcaaggtatcgttagaatcattcactactgttctccatcgctggttgcctggtagggcagccgaacacattcttcgtaacctgaaatcaggctaa

SEQ ID NO: 83327 - DNA, 573 bp, Citrobacter koseri
atggctacagttggctacgcccgtgtttctactaccgggcaaagtctggatacacaactcgaagccctatccggctgcgaaaagatcttcagggagaaaatcagcggggcaaaagatgatcgtccagaactacgggcaatgctggaatttgttcgtgagggcgatgtggttcaggtaacaaaactggatcgccttgcccgtaacacccgccatctgttggaaatctcggaatacctccaagataaatgcgtggcgttgaacattctcaatatcggcataaatactgccaccccaaccggaaagctgatgctaacgatgattggagcgattgcgacgttcgagcgtgaaatgatgcttgagcgtcaggctgaagggatagctctggcgaagctgaagggtaagtacaaaggccgtaaagcaacagctcgcagtaaagcactggaagttatcgaactgcttgaaaaggggctgagtaagccggaaatatcccaccagttggggataggcataaccagcatttaccggattgttcgcagcgaacgtcccgaactgttaggaaatcaaaaaggatga

SEQ ID NO: 83328 - DNA, 666 bp, Citrobacter koseri
atgaagtggctactagccgcatgctgtttagcggcatttcccgctcttgctgtatatcaaccaactgaatctgaattgaagttaattcaggtgaaccgagaagggctagagaagaacctgaaaaatgccctccctctgcaatctaaggtagatatatgtattggctacctaaagaactcgggactactcagggatgaggctggtcatgctaccgaaagttacaagaccctcgattactggaacatagttaagcattatgttgatttatcagtaaaatacgcagataaccgatttccacggctctattactatgatcagaagctgtacgaaaagttcggcccctatccaaaagacaatgcgagcataagtaagattttcgatgcagccgttgatagcgattatctcaacatcaaacactatgcttccgtaagccagcagttcgcagaatctttgcggaagaaagacctaaacaagatttgtgtagagtcagtgaccaaggggatgagggggcaacttttccctgctacagccagcatggataaactgttctatccggggatcacgtccgataacaccggggaaaaagatgctgaatactggggccaagccgccgaacacaggcaatttacccagttacttaatcaaatcgaagcatcatattactaa

SEQ ID NO: 83329 - DNA, 183 bp, Citrobacter koseri
atgagttcaaataattacaaagcagttcgtactggagatggtgctatatcgccgatgatgattaaagtatccaactctaatattgaaaaacatggcgcaacgatgccgaaaatgcagccagtccctagtcaatcatcaggctcagctccttcatcgactaaaacaacgaacaataagcagtag

SEQ ID NO: 83330 - DNA, 207 bp, Citrobacter koseri
atgaacgataagtctaagataatacagtcagattcactcgtgatggaaggagcacctattccctccatgcagcgtgtatttgcaggaaatggtgcaaatgttcctcagatgcaggcactcccgaccaccccagcttcgcaacaatcatcaaaagtggctgctcagcaaccttccgcaacttcgtctaatagccgtgataataaataa

SEQ ID NO: 83331 - DNA, 654 bp, Citrobacter koseri
gtggcaaggaatgaagagcagagagctcaggcaacatcaattttcgcaacttacaaagcggaagttgataagcgtgagctctctaatactgacaactatgataagaacattctaacgttatcatctgctggccttgccatctcattaactgtctttaaagacatagcacctcatgatcaaactgcatatatttggctgctttactctgcatggatattatttggatgtgcaatattagcaacaatatttagcttcttgattagtaacgcagcactgagagctgagttagaaattgcctataaatactacatcgaagaagatgaaagtgtttttgggaagataagcctggaatcaaagattttgaactgggtgaacagtttttcaggtggtttttttgttttagctataatctcggtgattatatttggtgtgatcaactttgatagaagaacggatgtgagcaaaagcgatatggttaaaaaaacgcagcagattaatcacgatgggttgccaccaccaatgatgcaaaaaatacctgttgataaaggtgctacggttcccctcatacaaccagtaacacaaaaaaatcagacagatacacctgcaataaactctcagtcatctgcaaattgtactggttctcccaaaaaataa

SEQ ID NO: 83332 - DNA, 249 bp, Citrobacter koseri
atggctattaacaaaaagcaatcctcacctaagcttgcttctcaagcagcgaaagccctacaaaacgaaaactcctctgaaattaagaagaagcttgctgcttcggtggttgcccaagcccgtacaggtaagcaaactggtgcagagatggagacgatagcctctgatgttatgaaaagctcaaagtatagcgaggaaaccaaaagctatgctgcctcactgttgtcgcagtcgaataagcctcgttaa

SEQ ID NO: 83333 - DNA, 144 bp, Citrobacter koseri
atgtcacactactatgtcacaaagattagctttgcttcaagtttcaaattactgtttataaaaacagtgatttctatgatctgcatcacgaatagtccttccagtaatgttgttattgaaggttttctgcaatactatatgtag

SEQ ID NO: 83334 - DNA, 3807 bp, Citrobacter koseri
atgataatgtttacgccatggctactgtctccccatgctgaaaacgacgataataaagtctgtacttttggctatgaagcactcaccccgacagagctcgagcctgaaaaggccagtagctacgtaggtgcactgaattatgcttatgaacaaccagatatccggaacattgctgtcacaggcccttatggcgcagggaaaagctcagtattaaaaacatggtgtaaaactaaggataggacactgagagttttaacagtctctcttgcagattttgatatgcaaaaatatgcagatgacagcaataccagtaacgtagagggcaatgcaggggaagaaaagaaaaccccaaactccatcgaaaaatccattgaatacagcatcctgcaacagattctttataagaataaaaaacatgaactaccccactcccgcattgaccgaatatcaagtgtaactgcgggacaaatactacagtctgcggcggttctcactggcaccatactactgaccggaattgccctgttcttcttggctccggattacgtcacggcaaaactgtctttgccggaaatattcagtcgttatcttcttgaacgaccttttgcggttcgcttagttggagcaacaatctctatggtaggctcattaggcctgcttctgagccaactgcatcgcatcggcatatttgacagaaaagtaagccttgataaagtagatctcctgaaaggggcggtcacagcccgggcgtcatcaccttcattactgaatgtatatattgatgaaattgtctatttttttgattcaactaagtatgatgtggtgatatttgaggatcttgaccgttttaataacggacgaattttcataaagcttcgggaaattaaccagataattaataattgtctttccgatagaaaaccaataaaatttatttatgctgtaagggatggtatttttaattctgctgaatccagaactaagttttttgattttgtcatgccggttattcctatcatggataatcagaatgcttctgagcacttcagtaataaatttaaagatgaagaaaaaaatgaaccaggtttaagtgagtgtattgctcgaatagcgacttttattcctaatatgcgggtaatgcacaatatcactaatgaattccgcctctatcaaaatattgttaacaaccgagaaaacctgacaaaactcctagcgatgatagcatacaagaatctttgtgcagaagattatcatggtatagacagtaaaaaaggcattctatataactttataaaaagttatatagaaaatgacattcagagtaatatattactgtctatcaacaatgaacttgaagagtctttacatttattagaaataattaaaaaagaaaaaaacacagagcgaaaaaaccttcgcagagaactacttgaaccttacatcaatgaaaaacataaaaatttaatagtttttcaagcaggaggaagattgactcttgaagaggcaaccgaagatgaggatagtttttttaaaattttagatgaacgagaaatttcgaccattcttgtcagccagaatcagtattttctcagaacgagtggaaatgaaacaaaacgattaaggactgagtacgaagaacgatgcccactaattgatggcaaatcagatagtcatttaaaagaaattaacaataaaatattaactttagagacattgaaaaggaaagtcctctctgagacagtgtctgaaattacaatcaggttcacgaatgaacgttttattgaatggattaaaacgcaatccgacgcaggagtaatcagcactcccgatgatcatgagcaaaataattttatctttttcttgctctctaacggatatctatctacagattatatgtcctacagatccatctttatggccggaggactgagtgaaagtgataattccttcctcaaagccgttatggcgggtaaagatccagaaaaaacattttctttccatctagataaagttaaaaatgttattgaccgtctaagaaaactgggtgtattacagcgtgaaaatgcccagcatcctgctgtaaccacatggttacttgaacacgacactcttacactaaagaaaaatattgagatcttactggtgattacagatggggaaagaagtctgacactgctggacattatccaaaaagattggccgctagagcaacgactcagatatctgacgttgtttatttcacatgaagatcttctggtcaaattagtcacactgctttgtgagtatactcaccttgcaatagtgcaggaaataacagcatgtttatgcagtctgcaaacgtttggaacacaacttaaaaaatgggttaatgttcatctggtaaaaaaactcttcaacaatcagaaggatttgcttagtaacctgccaaccggatatagtgatatttttgttgacaacatccatgcaatgaacattcatttaccacatatacctttggccagtaatgaggagcagagagagtgcattcagaatgtcgtcagtcagggactatttacttacagtgacattaatatagaaaatatctgccgttctctgactcgggatactaatataagccgggaagaattcttaagtcacccattgaagttgattgaatcacttcagatcccagcactagatgcggtacttcagaccaatatgggcacatttatttcttctatttttagtaaatccgaagaaactgatcgcgttccgagtatgctgaattctaaatacgtttcacttgaagcagcggaaatggttataagtcgaatggctttcaagattgaagatgttagattaatttccaaccggaaaaaaatttctgagaataaaaataatgagtcaaattgcaatatctatagtttactaattcagtgtgacaggctcgcggcaaacttttcaaacctcatctatcttttacatgatgaagccgtagatatcggtactgagcttgttacttgggtaaatgataaataccgtgagttaggttcttataattttattatttcctctattaaagtcctagataacttcatcgtcaagtttattggttcgcatcttttacatgaagaagcattactaactgtaatgaaagctttcaatatttccatcacacaaatacctaaaacaatcccgttacgtaatgcagagttgctatgtgcagagaataaactagcgcctacaataaatgtcttaacgggcttgtataacgctctgaacggtgaagtgaatcatgcccatagaattaatgtgttactgtgcaatcttattgctcagcgcccagccctactgctcgaagaacctgaagaaatattttatgttgggaacgattttgatatcgacctagcgcgagaggtactcaaccatcataaaatcagcattaatatcaggatcagtacattgacctggttaaaatctaacgatccggatcttctagacagcattagccttctgtcactgcgaactctcgcggagctgagtccctggatgttaaaggatgaactgcggttgccgctactcagagccatcctgatatccggagagggtgatacagataacctgcgtgtgattctgaacaatttcgccgatgataactatcatgggttgcttcccctggaaaggttcagaaaacttccctacacagccaacttatgggaaatggccgaattactcagcgaggcaggtttcattcatccacctaaaatggggtcgggacgtgatgaacacaaaattgttattaaaccaattcgccatcattatgaatga

SEQ ID NO: 83335 - DNA, 207 bp, Citrobacter koseri
atggaagctaaacatgaagttatcactattgaattaaccattgaaaatggtgttgttacctatgtacgcaaagttcaaaagggagaaattacagcctccttcgatacttttttctggttagcaaagcaggccggttacgaaattatcccaccacaagaaaacactcaagaatcacaagatattctaactttcgcagaagtcgattaa

SEQ ID NO: 83336 - DNA, 183 bp, Citrobacter koseri
atgctacgcccgcaaaagctcgctaaagggcctttaaaggcctttaagggtaagggagagaactgcaccattgtggctgtcaattcgttttgtttagctcttcctgattttcttcttgcctgggagaactggcatgttttttcgtttctggatccagaggagctgcgtccggcatcagagtaa

SEQ ID NO: 83337 - DNA, 234 bp, Citrobacter koseri
atgtcgcaactggcacaggatatgaaaaagctggcgcagggtatttctctgcgaacactacagaatgagatggcgatggtgcgttccattctggctgaagccggacgcatgcagttcagccagtccgaattaatcagcaataaatcactcggcatcagtggtgccagccgcgacggggcacaccgggccattccggatgtgctttaccagcaggtactgaatcggatccagtaa

SEQ ID NO: 83338 - DNA, 354 bp, Citrobacter koseri
atgtcatggctgaacgctaacagccgctgcccgaccttcctcggcggcgtgctgaaactgcttatcccgaacaatctgaggagcgcggtgaagaaagcagatcgtcacgaatccgtcatcaacgaaagttatctgcagacgctcagcccctttttccagctgtttatcccaggttttcagcgactggcaacactgtaccgcttcctgtccacgcaggcccatcacccgcgccagttgcagactggccgcgagacctgcatcggtttactggatccgattcagtacctgctggtaaagcacatccggaatggcccggtgtgccccgtcgcggctggcaccactgatgccgagtga

SEQ ID NO: 83339 - DNA, 318 bp, Citrobacter koseri
atgatattcaactcaatgggtacaccagaaacgcgggaagagttcgaagcacgctgttttcatctgttgaatgctatccgttcaggccaatataagggtatgcctggcgatcgacacagagaagagatcgtctttcttcctaatggcagagttgaccttgcaaatattgacaccatgacccgcctttcaatgaattcactttatgacttccactacaacaaggaaaattatccacattttgatttaacggagcagaatgaacatgaagttaatactcatctcttgtctcctgacatcagtgatggccccgacacttaa

SEQ ID NO: 83340 - DNA, 5817 bp, Citrobacter koseri
ttggataacgctgtgaaatatgccgccaccgaaaacgaaatcagattcgcaacggtgcagattgaatgcgaaggttccacaggctcagggacgttgattgcagcgaataaagtgctgactgctgcgcattgtgttgtgtcagataagcctggtgcccctgtaaccgtgacatttaccggtactgaaccagttatcagcatcagagcaacaatatctgacacagattattcgtgcgatgtatgcctgctaacactctctgagcctgtcaatattgcgccggttgcattaagcatcgtgcaggagcgggaaggcagtctttggaagagttttggctacccggcatcacgccttggcgctccacattatctgtacggtgcaatcagtcagtattttcccggcattatacatggcatagatatggatttatcggtcaatgccgactgtcgtctggaacaatacgaaggcgtatcaggggcagccgttttatccgggaataaaatgattgccatggtacgtatccggatggacggcgggctcggtgcagtgagtctagatacgttaagcgggatcctgctcagaaacggcctgatacccgaaaacattgttgagggttccgcactcataaagtcccgggaaacgatgcttgatcgcaccgaatttcttgacaactttgaaacctttattctcggaagcaccggacgcgctgttcttctggaaggcagcccgggtgttgggaaaacaacgttttgccgacactaccagcccctaaatgaaaagctcgccagtgtgggagtgtatgaatttacacctgaggatggtgccggcgcggcatttaaagttttacccgaagtctttgcggactggctcgccgatcgggtcgcgatcatcatttccggcaggcctgctcgccgggaagaaacagaaaaagtcaacctaacgcataaagtctctgagcttctcgctactctgtcagactactggaaacagaggggcaaatacggtgtcatttttattgatgctatcaatgaagcaagtgggctggggcaggcaatggttgcgccatttactgcgctactgcctgttacgcttcctgaacacattaaactggtttttactgcgccctcattatcagcagccggtaccgcatttcgccactggctcactcctcaggactgtatcagtctgacgctgctaagccaccaggaagtgttgcaactttcagctctcgcgctgaaagacatgtccccctctatgtcgctactgttgcgggtgtgtgacagggctcagggccatcccctctatctccgttatattcttgagtaccttaaagcaaatcctgacgagacctccctgaacactttccctgttttcagtggcagtatcgaaacttactacgaaagactctggcaggaactgattaaagacgactctgccgtgaacctgctggggctactttctcgtctgcgctggggtgttgagatggtatccctgcttcctgctctgtcagagacagaacaaaccgcgtttctgccaacccttgatcgtataaggcatctgctgcccgatccggcatcttcagcattatgccatcaatcctttgctgaatttattaacattaaaaccggcgcaattgacacattgctacacggacgcttggccgattattgtcttaacagtgttcagccctatggactgattaatcgtatctatcatctgcttttaagttcacaggataggcactctgaagcagcaatgacctgcactcaggattgggcggatgcctgcgtcaataacggagcaaggcctgaccttcttatacatgacatccgacatacgctcatcaacgcgctccatcgtgcagatgccgttgaatcaattcgtctgttgctgttattgcaaagaatcaccttcagacaccattttctttttctgcagtctgctttttattcggggctggcactagctgcattagggaagcccgatgaagctttagaacagtttatgccctcaggtcatctcgtcttggatctggcagatgcaatcgacagcgcgcatattcttacggatcatggctatcatcaacatgctctgaagctacttgaaaaagtgaaatcattggtcgatctcacatttgaaaatcatgaccttaacttgtctcaatttacacaccttaatctggcctgggtgcgtgctgaacttatagcaggagtcatcgacggtaaagggcgtacacgctctgtagtagaatacctttaccaagcagtacagaccattagtgaaaatattgataaagcggcacaacataatcccgtttatgaacgtgcgttcgtgccgctacaggcagaaatggaagcggtaaacatcgcctttaatgatcggtcggtgtcactgaagagcgttaaggatcgatttggcgaagtcccgaaaaatattcttgacctgatgctcagcgcattaatgcgtgcacatgacatgattattcggtacagactgcccatgccccagcaagctccgctgtcagtctgggaagatctcaaagagctccttcatgctgatgtttcgtttacagacagaatacgtttcaatgcgataacgagcctcattttcttcaatgcaccttcaggcctagttataaaaattgcggaagtcttctcactggatacgcttccggaaattgtgctaatcgaaaaaaatgaagcgcagactgacagcacttcaatagtcgagcaggggcaatttttgctaaccgttgcctacctcaaccccgcactaccatgcccggacattacccctgcgcagcaggattgccatagctggctgaaaagtttaaccgaagcagtattctggtgcagcgggcaagcacaacgcgcggttgtggacaacgatcatgaaagaacacaacaacttttagcgtttgtgcagaccaccctccttcctgcgctatcctcttcgcttgaggatcgtaccggctggcatgacgcctgggctctgccggagcacacgcttcccgtaatttatgaggagttgattagcatgttcggcgcatgctggcctgaaagcgtaaacttgttaacggatttcataattaacagagcacctgagcaatgtgggatttattcagagggtttcaggcgggtgatgaaaacgatcattcatgctcttcttaatgaaaatcggtttcccgatcaggctgacactgcgttcgaacttctggaaatcttgcatgcctttgtttcagcctatactgaaaacagacaagagctggttcctgaattattagaaatcatcccggcttatgttaggctggatgcaccacaactggcccatcagacttacactgagatgctgagtgtttcaatgggacccgcttggtataaagaagatcagtttaccctgctgacgaatatattgcaggtattgccgcatagcactgagacagacacaacgttgtctcaggttgcaggctacctcgaaaaggcttcgggtgaaatgaccttcagacgctatgtgagacacgataaatcccggtttatcggggagcttatccgtaggggccgatacgcacagtgctttgcctattaccgtcaacagtcctatggtacccatagcgaaatgctacatcaactcagtcagcccgcggcagatagtccccttccattaaaaagcatgcgattcccaggcggtgcactcgatgaaacctatgctgttgagctcattgtaagtaaattgcgaaacagggtcgactggcacctaaggtgggcacttcttgaaatatttagctttggctgcacaggcaatcttgctgagcctttcgcagaaatgatcaatgaattcacgccagatgataaagatctcagcgaggccgttagaagactgtttatcgtttttaacggcgacgtttctttctctgagcaacatgattttatccgtagttttttaggccagctttcagaagaacacaagccgttgtttacggcacttattgagatattgtcagaggatgccaactctgaaagcttccactcccccgcaactgacgatgagaatgggcaaagcgcttctgctgagctccgggaggatgttgctcttcaacccggactcttcggcaagcaggctgctataagagcagctgatgcccgtatcaaagaggctaataaagcagccgcacgcaaaaatacgttgcgggcaagtcagatagcggtggagagtctgcgcctcattcaggaaggtgactggtcagtgtggggcagaaatcaccatttgtcggacgtgacgaatgcacatattcttgccagtgcatctagtgcaggagaggtcttaagggcctatgctcccctcgtagagcatgagcgctacgctccatcctggaaaattgccagccaccttcttgaagcagcagccagtcatttttcaccacaggaagcacgagccgtcgctcaacgtgtacttgagcataatcgctatctgttggggtctaatggcaatgcggccgggcaatttgcctttcttgatgaaccggacatttcagatgccgctgaagaaacactgaacttcctgatgtggatgctggagcatccattaaaattccggcgagagcgtgcgctggaggccatgcaatggctggcttcaggtgatgatctgatattgcgtcagtgtgtggcagaggcactgacatcagactcagccgtccgggttgaggcacttatggcgctgactgaccggatgtctgctaaatatccgacgcgtgtctgggattgtatagcctcacaacgtagcctatttgaatggttggcagacaccagcacgcttagccagatttgcctttttgagcgtattgccagcagagccggcgtggatgttaaaaatgaaatcgccgcctattcgcgaacccgttcacgctcgcttgtttctcgcactagagaacaacctagccctctttctacctgggcacgaccggtggcgcatgtgcttgccgttatggaagaacaaaaaatagacgtcaggggtttaatcggactccttgaagagcgcattttacagcagagcggaatgactgatatcaacgtagcatttgagctggagcaacttcttgcaagagggttttccgtgcgtaacaccccttccccgcaccgttgggaggcgatggtgcgcttttcgttaaatcagattttgcatgaggcagctagttgccctgacctcaaaggtgttgagcctttactgcgcgtctggaacccagcttcacaggaacgtgttctctcacatgagatttgtaatcaaaccgcacggattatccgatccatcatggagcaaaatttcaagcaagtttcaggaactgatgaaggattttttctgcattatctggatgagattgagctgcccggcggagggccggcacatctggtcgaaatttcagctgtactgacaacggcctatgacggacatgagcatcgcagagccggagaagaaagtaggtttaatgcgaccctggtacccgatgcagatcgcgtgctggatgcacacctcacttgtcagcgagtttccctccagccgctattgttaggaggggcaaccccagcagtggtctcgaagaagtttatgcaaatgacgcataccgttccctcggattttatcagaaggcaatggcgcagcgggcgctcgctcagcaaaagccgatggggagagcctatcagcagaggtagcttgttaatcatgaaaagagatgtaactttgccgccggggctgggtctggcctggtctgtgacaatagacggagaactacaaagtatgttttcgtacgctcagaggagaccttcatga

SEQ ID NO: 83341 - DNA, 1146 bp, Citrobacter koseri
atgtatcccgcaagggatggggatgctttgctcattatctgtcatcagggaaaatgcggatttttcatcgacggcggttatgcagaaacctacaggcaatacatccagcctgatctcagagcattgagtcttaaggggtaccggttacgccttgtcatggcaacgcatattgacgctgatcacatcggcggtctcattgacttttttatcgacaatggccaagcatcacatccgtctgttattccggttgatgcggtatggcacaatagtctcagggcgatgactacgtctcatgaaaatgcatcagacgcagaaaacggcaaaatcacggattttttaaaacggcaatatcaccccgctgaaaagtcaggcagacccactgaaattagcgctcgtcagggaagttcgctcgcagccacattgctggccggcggctatcactggaatgaaggaactggatttcaaaagatctgctcctcaaggacaactgtccccccgttaaacgtaaacagttttcagatcctgagcccctcagaggaacggctctctgcactctgtttgtggtggcgccgtaaactggtatcactgggtttttctggccagtattccgcaaacggggcatttgatgatgcatttgagttcctttgcaaagaggatgcttcgcggccacctcctcctcatgtgataagcgctaaacttcctctgcttcagagggattatttacctgacacttcgccaaccaatggcagttccattgcctttagcctgacactcagcaacaagcgaatgctgatgctgggagacgcatgggctgaagaggtggtgacctcactcaatgccagcggtggtcctcaacatttcgacatcattaagatctcgcatcatggtagtataagaaacaccagcccggagctgttgagcctcatcgatgcaccaatgtatctgatctcaactgacggaaaaaaacattctaggcatcctgacctggcggtgctgaaggcagttgtggatagacctgcgacgtttacacgaacattattttttaactatgccacccgcgcatctgctttcatgaaaacatatgtttcagcaaacggcgcaccattcagggtgattgaaggagcaacggattggataacgctgtga

SEQ ID NO: 83342 - DNA, 2919 bp, Citrobacter koseri
atgcagtggaattttaaagcaccggttctgatgctcaggctggcaaaaaatcaaaataaatggatcgatatggacatgacagacagcgtacagactggaaagagcgatggaaaaatcatcatcaacttgtttgcgcccaatcttccgggcagtaccaaagaaaatgatctcattcagaaatctctgcgtgatcagctggtcgagagtatccgaaactcggttaccccgactgacacagataagttagctgggctaacacggtttattgatgagtccggacgtaatatattttttgtggatggtactcgcggtgcgggtaaaaccacttttatcaatagcgtggtcaaatctctgaacagtgacaaaggtgatgtcaaagtcagcatcaagtgtttgccgaccatcgacccgaccaagttgccgcgtcatgaacccattttggtcactgtgactgcccgtctgaataaaatggtgtccgacaagttaaaaggatgttggtcgtcgaatgaccataaaaaacaaaaagaacaatggcagaatcaccttgcgcagctccagcgtggtttacatctgctcacagacaaggaatataagccggaatatttcagtgatgctttgaagctggatgcccagcttgattactccattggtggccaggatttgtcagaaatctttgagaagctggttgaacgtgcttgtgaaattctcggctgcaaggccattttgatctcgtttgatgatattgatactcagtttgaagcggggtgggatgtacttgaatctattcgtaaattctttaatagccagaaattgttggtggtggcgacaggtgacttgcgcctatattcgcaattgattcgcggtaagcaatacgaaaattacagcaaaactttgctcgatcaggaaaaagagagcgcccgcttagcagagcggggctatatggttgaacaccttgagcagcaatatttattaaaactttttccggtacaaaagcgtattcagctgaaaaccatgttgcaactggtcggcgaaaagggaaaagtcggtaaagagaagatcaaggtgaaaaccgagtttgacatgcaggatattgatgccatagatgtccggcaagctgttggcgatgctgttagggaaggccttaatttgagagagggctctgatgcagacatgtatgtgaatgaactactgaagcagccagtgcggttgttaatgcaggtgcttcaggatttctataccaaaaaatatcatgctaaatcggtaaaacatgatggtaaacaaggcagccatgaaaggcctgatgagttatcagttccgaatttacttagaaatgccttatatggttcgatgctaagcagcatttatcgcgctgggttaaattatgaacaacatcggtttggtatggattcgctctgtaaggatatatttacctatgtaaagcaggatcgtgattttaataccggattttatttgcggcctcagtctgaaagtgaagcattaagaaattgctctatttatttagcgtctcaggtaagtgaaaactgtcaaggcagtctgtcaaagttcctacagatgcttttggttggttgtggttccgtcagcatatttaaccaatttgtgaccgagttagcacaggctgacaatgatagagaaaaattcgaacagcttgttagtgaatatgtagcttatatgtctgttggcagaaatgaaagcgcctcacattgggctaatcgatgttgtgcggtggttgcaaacaaccctaatgatgaaaaggttggcgtttttcttggcatggtgcagttaaatcgtaaatcacgccaaaacatgcccgagggttacaaaaaatttaacattgatactgagaatggtttggcaaaagccgcaatggcggcttccttgagtacggtagcttcaaataaccttatggatttcagtagtgtttttaatctgattggtgctattgcagatatctctacatgccgtcgtgaaaagcctgccattactaatgcttttaataaagttatagctcagacaacatgtatcgttcccccatggagcgaggctgctgctcgtgcagaaatgaaaggctcaagtataagtgcggataacgatgctgctattttggatgttgatcttgatcccaaggatgatggcataactgatgacagtcagcaggatgacacaacggaattttctgatgccattactaaagttgagcaatggcttaaaaaagtaaacgaaattgagattgaaattcgtccgtcggcacttttgattggtaaagtatggactcggttctatttcaaccttaataatgtggctgatcaacataaaaccaggctctataatgatgcagagcatggactaatggccagtcaatcaaatgctgcgaaaattatgcgttttaatgttttggcttttcttcatgcggtattggttgaagagagtttatatcattctgttagtgatagggaatatatcggtgaagggttaagactaaatccagttacttcggttgatgagtttgagaaaaagataaatgtaatgaacgaaggattgaaaacggataagaaaacatggaaagatacccatccattgtttttcttattaattagctgtccaattctacatccgttcatttttcctgtaggagggattaattgttcagcaaaagcactgagcaaggaagcaagtttccttaaactgattggtgagattgttggcgacaaattactttctgaagaagaatgggagtatttatctgaaaatgataatagcaaaagaaacattaaacaacagacatttcaaaacactataacatcactgaattcctccacaatcgtcggagcatcatacaataaggctacgccaactaggaaaagcaggttgctttcattaagtgatgacgtagaaaaataa

SEQ ID NO: 83343 - DNA, 1194 bp, Citrobacter koseri
gtggcacggacaacacgccccctgactaacaccgaagttctgcgcgctaaagcgttagagaaggatctaacgctgcatgatggcgatggtctttttctgatagtgaaaaccagcggtaagaagctttggcgtttccgttatcaacgtccggtaacaaagcagcggacaatgatggggctcggtgccttccccgccctctcgcttgctgatgcccgagggttaagagctgagtaccttgcattattagccaatggaatagacccgcaagttcaagctatagttgcaaaagaagagcagcaaatcgctctggacagtattttttcgacggtcgccgcaaactggttccggcttaaaagcaaaagcgttacacctgattatgctaaagatatatggcggtctctggaaaaagacgtattccctgtcatcggggagatccctgtccagcaaatcaaagcccgaacactggttgaagcccttgagccaatcaaagctcgtggggcgttggagactgttcgtaggctggtgcaacgtattaacgaaatcatgatctacgccgtcaacactggcctgattgatgctaatccagcatcaggtgttgggatggcctttgagaagcccaaaaaacaaaacatgccgacgcttcggccagaagagttgccaaaactcatgcgttctttggtgatgtcaaatctctctgtttcgactcgctgtttaattgaatggcaactcctgacgcttgtgcgcccttctgaggcctccggtgcccgttgggcagagatcgatctcgatacgaagctctggactattccagccgaacggatgaaagctaagcgggaacacattgttcctttgccaccacaggcattagaaattctggatgtgatgaaccctattagcgcacatcgggaacatgttttcccaagcaggaataacccaaagcaacctatgaatagccaaactgcaaatgctgctctgaaaagaattggttttggtaatcagttagttgcccatgaattacgttcaattgctagcaccgcaatgaacgaagcagggttatattcagatgtgattgaagcagccctagcacatagcgacaaaaatgaagtccgaagagcatataatcgttcaacctacttgaaacagcgtgtagaacttatggattggtggggtagttttgtacaaacccataaataa

SEQ ID NO: 83344 - DNA, 2508 bp, Citrobacter koseri
atgaataatgatattaagcaagctttgttagaaggaagaattatgcttctgttaggagcaggttcctcgttcggctcgttaacacaagcgcgtaaacaagttcctctcggcgaagaactagcaaaaatactagcagagcaagcacaactcccatattctggagaaacattatctcgagtatactctgcttgcaaacctattttaggagagagaatacataccattttagataactattttcggaattgcaccccatctaaagaatataatacactatcaaaatttgtttttgccagaatttacacacttaatattgatgatgcttttgaaaaagccctagatcgaaattcaaagcagcatttgtacataagatctcgtaacgaaaaagtatctccacccgatcaattatttcagaaactagactatataaaattaaacggtgatgtaaaaaaacctaacgaaggatatattttttcaccacaagagtacggagctgcatcagcaaaaccaccattatggtataaagagctaggtagtgacttcttcaattataaatttttatttatcggctctaaattagacgaacctcttttctaccatcaaatcgaacgatatagaggtgctacaaagagcgaagaacaaagaagctacgtaatcacgccttccgcttccccgatagatattgcaagtttaaaatcatccaatatagaacatatttcagccactttgtcagattttgtttcctggcttgaaagtgagcttcctacccctttaacgccgatacaaaccctaaaacgaagcaggcctgaatacaatgtttccgcagatgatgatgaagaaaaatacatgcgtatttttaaggaagtagtacctgtaaatcgcgcttgccttcaaattatgaatgaaagagatagtggaaatccaataagaaacttctttaaaggctttaagccaacatggaaagacattattgacaaagtaccagccgaacttgaaaatacgagaattatttacgaagaaatatactcattacttaaagatcaagagtgttcaaacatcaatctttactgtatttttggttccgctggctcaggaaaaaccactatagcaaaacaaattgcacttaaaatatccgagcataacacccctgtttattatgtagaaaacatcaatgccaacttaaaagatttaattaaagaactagagaagaaaagcccccaaaaatacctagtatttgttgaaagaatagcggactcagctcagattattggtgaaatacttagtgaacaaaaactaatgaaagggatttttgttggcacagagagcaagcaaatttggtcatatagagctaaggaatattttgaatctacacgatacaaaacaaaagacatatcgttaataaacagaagcgatgcaaggaaaatactaaccaaaataaaacagtatggtaactggactcgattagaaagaatgactcctagtgaaaggattagggaattagttaccaactcaaggaagcagttgcttataggtctaatggagacaacattgggcgaaggtttttatcagatcattagaagagattttcagaacatccctacagaatcacataaagccttgcttgcattaagcggcattgcaagttaccaaagaaccaacgcacacgagacaacgctaactagagcgctactgcatctaaacctaaatgcaaatgtaagcgaactcgttaaacaaatggatggcatcttattttataaaaatggaaatgtagaaaccagacattatgcatatgttgaaaaaatattcgatcaattcctcgacacccaatatatttatgagattcttgaagcatacataacgtcatttacagtttatgaatacccaatagttaaacacgttataaaatctgaagctgccatttataaatcattagtgaactccaagaatttaagaaaactattgaaaggagataaagaaaaaacgttatctttatataataaatttgaaaaagatctcgaaaacgaagggttatacttgatgcaatatggaatcgcacttcgagatttcgggatgtatccagaagcctatgagaaattaaaaacagcaaatgaagcctaccctaactcacctcaaattgagcatgcgtttgcgcaactaaaaataatcattgcattacagagcgatagtagcactgaagcatttagactatttggagaggctgaggaaattttatctcgactagacggaggtaaagttaaggttatcgatggatatcctttagttgctctttcagaaggacatatagccattgctagaaagtttttaagtgaagttgaagctcaaaagctcgcggcttattatcatgataaaatcaaaaaaatgtataacaatgactattcaggtgatacacgcattgaagaaacaagtgaaatgttattcaaatatgctacaacaggtatcttaaccaaaggtttagaagtacaaatagccgaaagagaatttaaataa

SEQ ID NO: 83345 - DNA, 237 bp, Citrobacter koseri
atgaaaaagccattacagcccgtattacgcgccgcgctctatcgccgtgccgtggcctgtgcctggctaaccctgtgcgaacgccagcaccgctacaagcctaacttatcgcagatatggggtgtcggggggcggaggttcaaatcctctcgtgccgaccaaaatcccttagaaaaaccaacctcttacggttggtttttttatgcctgtttttttgcacgggaagcttcggggtaa

SEQ ID NO: 83346 - DNA, 474 bp, Citrobacter koseri
gtggctaacgagctggttcacgctatcaaagctgctgttaatcggttcctgactgagaaagatattccggtggctgaactggtactgcttatcgacccggcttggttcagcatcctgatggaacataagaagctgatgaacgtccgttacagccgggatagtggcaacgattacgcatggcgtcgtgttggctatgtcgctggggtgcgagttattgagctgaacagttacccgcaggaagccattaccgggcatgaactgggcgctgattatgacgttaccgcagaggaagcgctgacgagggctacgctgttcaaaccttcctctgtgctgctgacggtcgaagcgcagagcgtcatcaatcgccagtgggatgatgagcgcgaaatgacgatggtgatggactcatatcgcctattcaatgttgggctgcgtcgccctgactgcgttgttaatttccgcgcggctgaataa

SEQ ID NO: 83347 - DNA, 528 bp, Citrobacter koseri
atggttaatgatccttacgccccggagctgctgcgctctttgtttcggtacgattcggagactggccgcctgttccatgcagtggacagggtaggcgctaataagcgtgtttacgctagagccggggaattggccgacaccgcaacggacagcgccgggtatcggcgcgtgtctgtccgcattggtggaaagtcatacatgctttacgcgcaccgtgtcgccctcatcattgctgatggtggtattcctgccgggatgcaaactgatcatatcaacggcatacgtgatgacaatcgtcggattaaccttcgcactgttacaccgcaggagaatcagcacaactaccgcaaagcgaagggatacagccgtcattcctgctctggtcggtgggaggcttacattcgcgttggtggcgttcgacatcacctcggtttgttcacgaccgaagcggctgcgcgtgctgcgtacctgaaagcgaagcgactctatcacccatcaacgccagccgacttgttaagggctgcttaa

SEQ ID NO: 83348 - DNA, 435 bp, Citrobacter koseri
atggctgatgaaaaacgaatcaggcagattagaccactggcagatgatgacccacgccgccagcggtacgccgaacttttggcgcaagctggccggatgaccatcccccggttgcatccgggcgacgctaacagcgtaatgagccaacttgcgacgatgcttggcgcacctgtcccgtttattgggactatgcgggagcacgccgctgcatggcgttcctgtctgctggagcaagggcttggcgatcttctggatggattgagtaaacaggtgctgacaatcttctttctactctgctggagagacagcgctttgcgattggctgggaaacaacgggaacaaatcgcagcggcaagtgaaggtctgaccctagagcgctaccgggcaatgcgcccggataacagcgaggataaagaagatgacattgacgattaa

SEQ ID NO: 83349 - DNA, 300 bp, Citrobacter koseri
atgacattgacgattaaattacggtggcggtacatcgagccgccgcctacggctggcgcactcgctgaccttaaacagtgggtaatggatgccggagagcctgagcttgaagctgaatttcgtaagctgctgggactgatgcgccgcaatggtatcagtgacgaacgtgttaacgcgatggccgatgaactttatgctttggtacgccaacaccagtgcgaagaatacgaagcctgcaagcgggctgcgtctgacaatggagattttgaatcatggttacacggacagaccagctactaa

SEQ ID NO: 83350 - DNA, 429 bp, Citrobacter koseri
atggttacacggacagaccagctactaagaaaagctatgaggggctatctggaatatctcggcaatatgccgctggcggaacggattacaaacgctgctgcattcgaagatgtttatcgctttctgttggatggttccgggcggctggagctgcgtcgcgctgacgtggccgctgttcgcgtcttcctgtggaattatcaataccagcgctgcgcgatgaccgggaagaaagtcgcactcaatcacacgacgcttgaccacgaccaccacaccgggaaagtgcgggctgtaattcatcgtgccgccaatagcgcggagggtggctatcgcaccgggaacatggctaggatgccgaaagcgacggcggacgcactggttagaacgtaccgccgccagtatcatggattggctgtgctgtatccttcttaa

SEQ ID NO: 83351 - DNA, 1224 bp, Citrobacter koseri
atgccaatcaagaagacttcttatctttatgcaaacaaagatgggatattcatctttcaaatctttatcccggtctacatgcgccacctctggaacgggcggcgctcgctcaagaaatcgacaggcacacgggacatcatgcaagctcgcattttccgtgatcaatacttactagagttccgcaagctacagctcatgatgaaaccggataaccctattacccggattcattccgctatttcagaccttcacttgttggcgggggtatccagcagcattaccactcccgcaactattccagcagagcgaggaaaaccagcctcgccaaaattggtagatgtcagtaaagagtacacagagcaatacaaagaccgccgctcatattccaccttgagtaaatcagttcgtgccgtgtcagcgttcactaaatcaattaaacgcccagccattacgattaacggaatcgggcggaggattgtctctgactttctggaagtgaatcaggataagttttcccggcagacgttgcaaaactggttaacttgcttagggactctgtacgacttcgctcggcgtaaatatgacaacatagcccctgacaatccttttcacggccacaatctggaagcccgccagacgaacgaaagctaccaaccatttgaaccaaaccagctacaggtattaacaaaagaggcaggtgacgaaataagagatgtaataataatcggtttatattccggtatgcgtcttgatgaaatttccagtattaaacgagatgagattattacaattgagggtgtacgatgctttttcgtcagtaaatccaaaacgaaggcaggcatcaggcatgtccctattcactcattattaataggtatcgttgataaataccttgagcaaaataatggggagtacctgttacctcagtcgaacaagattaaacgcgcagatggcaagcgtggcccgtggtactcgcaggcattcacacggctacgccgtcgcgtgctaccaatggcaacagatcgccaatgtttccactccctgcgtggtcatttcattacctgcttagatcgggctggtgtaccagagcagcgcattggcgctattacggggcacactgagaaaaaggccaaaacggaggcattcaagacatatagccaaggggcgggaatgcaagagctatcaaattatgttgagttagtccgctatccagaaattgcataa

SEQ ID NO: 83352 - DNA, 255 bp, Citrobacter koseri
atggaggatgagcagtactgggtgacgatggacccggaactgatggagccggatggtgaagtcctggtgctgatgcccgcgtggatgcaaaaagcgaaagtcaggggcgcgtttaatacagtggaaaaagggggcgaaacggaagaatggaaagtcagcgccgggacgccggttggatttatgggatgcacggaatcccccggggaagaaagcggacagattgacagcgagtggtatgtccatcttgaagtgtga

SEQ ID NO: 83353 - DNA, 1449 bp, Citrobacter koseri
gtgaaaaatttcttacaagtctcaagggatgagttcttgaacaagctgtacactgttgtccgtccggcagagccaatcgacgctaatgagttcttgtttggtcgaagcgatcaggtagagacactggaaacagcactacatgcgccgggccgccatgtatttatttatggtgatcgcggagtgggaaaatcctcgttagcgcatactgttgctttcaatatgcaggaagaatgtgaccctatatttgtgagctgtgtgccggagtccacgcttgctgggattattgcggatgcctttcgggatgcagccgagcgtgtggatttgagtcgctctgagtggactgcgagtgcgtctataggcataagcgctacttgggtaaaattagaaaataaagtacatcaacagcagcaagagaaagtagaaatcaccgatgtttcttctgctgtgtatgcgctaggtctgttgacaaaaatccattccaaagccccttatattgttatcgatgagtttgatcgtataacttcggttgaagaaaaagaaaagttcggaacgttattaaagcaacttggtgatagaaaaagccctgtaaagatcatatttacggggataggtgattcattacatgaattgttaggtggtcatgcttcaagttcgcgtcaaatacaagagttgaatctcgaaccgttatcatggagtggacggtatgctattattgatagagcctttaaggaatttggcctaatagtaccagacgatatacgctttagaattgcaggtctcagtgatggctatccacactacgtacaccttatctgtgaaaagatgttaattaaagcgtatcagaaaaatacaacagaaataaattttgagttatttttaaatggattaaaagatgcggttagttctgttgctgaattcttgaagaaagattataacttagctacggcagggagaagccccgatgtggcgtatgttctttgggctgtggctgactcagcagatatgcagcgcaagaaaagtgatatttttatttcttacactgacgttatcgatcaacttgtttggaaaaatttgatagagaatgtcccgccagacgagaaaaaatttggaagagtactgtctctcctaagcaagaatgattatggtgagattgttgtttctgcttttggaaataaaaggcgtggcttttataagtttaaagagagcatggtcagaggttatgtaaaaatgcacgctgaaatgcgatcaattaaattggattttgaaaagaatttcacaagtaacgagccaacagtcaaagcaaagttaagtacgcgcggatgtaaaactttttcacaaattgaaaaagagattgagcgggaagaagaaacgcgaacacttcaaaataagcgtgataatgagttactgaaatcccttagcaatgaatatgcgaagcgttcgaagcactga

SEQ ID NO: 83354 - DNA, 165 bp, Citrobacter koseri
atggaatactcagaaaataagtgtcgtgctaatgattcaagtgttgaactgagacggctattagctgagctggtagtgattcttgaaatgaaagaaatgattgaatcaatacaggagaggaagagttatttcggaattgataacactgattcagataatcattga

SEQ ID NO: 83355 - DNA, 642 bp, Citrobacter koseri
atgcagattcagcgtattgaaattatcatccgtgggtttcagctcaccgcaccacaactgacggaaagccgggctgtcacccattcgcgtaaagtcagcatggcgcatcgcttccagttggctcatgccgcgattgattcttttcagggtggcatcgtcgcaaatcaggaactcgcgacaggctttaagaaaggcgttttgccccgtggtcgcttccgggatggcgtgctcgcgcggtttcaatgcggcatcatcgacacgcacaccggggaaatctggcggcagcgggtcaacataacgagcgggcttcttgttcagccattgctcaatctcagcgcgtcggcaatggattacatcgccgggttggatgacttgacgcagcccgacatcagagcggcgagcatgatgcttgcggccgatgccgttcgcttctttccattcacggaacgacataacagaatcgtcagcgttaaagtaaaactctttggtttcggtattaaacgcagcctgtacaggtttacgtttgatgggacattgtttgttacgggacacaataatcttatcttgtacaagttgttgggcgtcagcggcagcagtgttaagagggtcaacgtctgcggcctgagccagcaggcggtttaa

SEQ ID NO: 83356 - DNA, 435 bp, Citrobacter koseri
atgcctaatgaaaccgcgctgcatcgcgcggggcgttctgacgccctgcttaatgcgcagctcgccttcgccctgaacgggtattcatttgacggactggccgaacgtcatcgcaagacccttaatcgtgaagccatccttcgcgatgtatctacaccgctggagcgatattgcctgctgaatgattgtgagccatgggagtgtatggccgctgtgctgaaccgcatgaaaaggccggatggctcacgcctttggaaagccgcccgcttatcgcgtgaggtttttaatggccgagtgcatccagtgcgcaagacgcctgatgaagtttacgccgccattgcccgccgtttatttctgccgaagcctgtgcatcaagaagtgatacagcacatccgtgcgcttggcctgttaccagttggagataaccaccaatga

SEQ ID NO: 83357 - DNA, 243 bp, Citrobacter koseri
atgttaatccgtacctttccggtgctgatgctgcgccgcagcaatcaccttacatggccgcacctgttggggctgataacggcgcttctcgctttagttctgcacctgctgatgctgattttctccgtactcagccagttaacggtaatgatggcggccaatggcataatggcaatattgctaatcagcaagaccagaacgctgacagcgccggggcgcaggtgggcgatactatccccctga

SEQ ID NO: 83358 - DNA, 600 bp, Citrobacter koseri
atgtatcaccacaaacgaaccgcccaccttcaggcttatctggctgctgctctccaggacaatatctccctccacgctgacgcccagcgtacccgccaccttccgtgccaggtcgcctttcacctccagactgtggctgcctttcaccagactgatatggtctccgcgggtggtgtgctcctgttttccgtccaccgtcaccctgcggtcattcgccacgtacagcccgtcgtcatggctgatgctcaccatccggtcgttcttcaccttcagcgtctggtcgttgcctaccgtcacgctctggtcatgagccaccgtcacagtctggtcatgccctccggcattctccttacccacagtgaccgtttgtcccagacccacggtgattttctggttgttaccgatggtttcggtgtggtccacctccacgtcggtggtacggttgttcagcacctccgtatccatgttcttctgcgcatggatataaacctgctcctggtccgtcgcatcctcaaagcgcagctcattaaacccgctgcctttgtatgtcttcgagcgaatagtcatctgcgtttttgtccccggcaggctgccgggtga

SEQ ID NO: 83359 - DNA, 132 bp, Citrobacter koseri
atgccctttgctttcgtaagtttgaacaacttccttataccgatcaatgatttttttactattttttttccattcagagttatcgagtgcttgtacggtttgctgtacaatgttgtcaatctttgcttttga

SEQ ID NO: 83360 - DNA, 1362 bp, Citrobacter koseri
atgggcacggaaatttcacttaaggtttcaggtgcaacgctagattggagtaaaaatagcttaggtgttgatcatggtgcattgttccagtcaaccgaccacataatgatacctcagcacgaacgctatgatctggaagaaaccgatgaaattgatgaagaaagacgccttcagtggaccgtactcaggaagcctcttgcagcagtagctgaacgggttgagttacttggtttttctcttactgctattcgtgcggaatatgaaaatcttgtaaagcatgaggtttatcaaagaaacgaaatgattgaagcctatcccgataattgggaacctttagaaaatctttttagttttgatgagtttctgggcttacttaagagctatgatctgggggagttaaacgataaagatatcgactttgataattcaaaaaaaacagagaatgataatttcattttgaagttattccctaacgacattttaaaaagaattcctctctatgatccttataacaacttttactggtcagaaaaaacagcgtttttcagtgtcataaacatacttcatccatactctatgatcaaacttttaagtgaaaacaaacataatcttagtgagtatgtcgagtgggactatggggaaatagtcgctaacggatgggttcacattaaccaaataaaaactgaaattaaccgtgaaaattcttttctcatagcaactgaaggttcctcggactcacatatattacaaaaggcatttaagctaattaagcctagcgtttgtgaattttttcgtttcatcgatgtaacatctggccatccattccccggcactgggggattatcaaagtttgctgagggattagtaaaaattgatgtacagaaccaaatcatttttgtactcgacaatgatagtgaaggggttgaagctttcaagaaaatcataaagatgaagcttcctcataatatgagttgcatatgtcttccggatcttaaggagtttgaaagtttccctacttgtggcccagacggcctaaccttatccaatattaatggaactgctgccgctatagagtgttacttggatttaacatatagtgaatatgactcatacattgttagatggactaactataaaaaagagaccgggatgtatcaaggcgcacttgagtttaaagagtattacgcaaaaagatatcttgatacatcagaagttaagcttatcgaaagtaaatatgacacctccaaacttgaggctttgcttaatgcgatcattgatgcttgttccaaattatctggagcaatacgtattgaaaaaataaagagtcactatccaaatatatggactgaagaaaaagtttaa

SEQ ID NO: 83361 - DNA, 588 bp, Citrobacter koseri
atgatcccttcactaaattacgccgtactcaccaatgccctgcaggcgcttaatgaaggcaatattcgtcactgtgaagatctcggtttcacatttgacgaaatgaatgccctcagccagctctcgccagatgcactctttacgctgagccgagcagccgcgccttttatcgcagtctcgctacgccacgatgttctgcaccagttgctggcccattctggtcaggaagaacagcgccgacaactaattgaccgggccatacgactgggcggctccatcgcactgatgaaccactattttggtctcacctccaatgaagtctgccttcgccgtcggttgctgggtgtcagcgtgccgtatggccgaacgcctgaaccggatgaaaagacagatgtggctatctggttgcaatggcagcagcgcagggtagaaaaccttgaatcgcccgatgcactgatcaccatgatgcaggtgacggaaatcctgcagccagaggccgaagcgctgtcactcaccacggtctggaaacgtatcgcactgtgcgaacaggaagccgctactggcaggaggactctccatgccggatga

SEQ ID NO: 83362 - DNA, 927 bp, Citrobacter koseri
atgttgaaaagcagcgagatcataaacggttcgcttccgaaacctgactgggtaaccatacaagaagccgttaacataattaatacagagagcaacgaaagaatcaaagagagtgatatttaccgttatgcattatataataaaattaatctcgccatatactttcaatctccaattattctgagaaaaataaaatatgcatttcaaaaagtaaaaatgcatccagctagagggacattgattcatcgtttatgtctgctagaaaaaaatagctttattaatggatgggactcaattttcagtactgagggcagatacgtccactccacacaaaatattattgatacatcacttattgggtttgaatgtattttaataaagcaatttctcgcatgctcattgaatataccattaccaattattgggaaaaacacggtaaattatggcatcactgttactatgtccaatgaagtttttcagctgtttgaaaaaacaacctggaagtgtagaattgaacatcaaataaaaaacctaccaacagatctggcgtttgatattatggagagaatttcttcagagggaacgataaatcaaaatacaaagcaagaatatttccccctctataatttgcctcaggattcctgctttgttattcgttactcagagattgagaaactaattagcacccaggttacagagaaatccctcccctcttcaactagaatatccacacccttgtcaaggttattttggctcgcttgtaggcacaatgatgttatcagtccattaataaaacaaccctataaattattgacaatttttgaagaatgggcggcagctgatggtatcactgaccgtctaagcggtgatactttaaaaacagcactagagcgtggctcccctccgtcctcatccttattaaattga

SEQ ID NO: 83363 - DNA, 477 bp, Citrobacter koseri
atgatcggagtagtaaggttttcagaactaatggagcactgggaggcaatttctctaccagcaccaggaagcatctatgagccaaagcagcgctcaagcaactgcctcaaacataacccttgcaacataaaagattggattactattgaattctctcaacagggatcctacaaacgaaaatatgaaaattttcgccataaagatcttgtactactactctttattatttcggctcgatattttattcatagagttttatcttcgttagtcttaatattattcagttcatccttcattatgctctcaggaaattgtctcctcatccatagttacgagagaaaatttcatagcgaactaaaaactagtttaacaattttatttttaaactctttactttataaaatagggttcatttgtacattatcgataatattcatgaataatgaaacagtgaatcgtaatttaagttttgcatag

SEQ ID NO: 83364 - DNA, 675 bp, Citrobacter koseri
atgtcggtatcaacaaagacctcaattgacactagaagaaaaaataaaatactttctaatgatatagttagtaacttacctgaaaaagcacaacgcgtgcttgaaggagcaaaagctatttttctggaaagaggctatgcagcagcatcaacagatatgatccaacaggctgctggagtctcaaaatcaaccgtatatgcatattatccaaataaagaagcattatttacagcagtgattgaaatagaatgtgagcgttttcttcaaaaagtacataaaattaaaatttcgggaaaagatatttatgataaattatttaaaatagcccgaacgtatctggatattgtgctttcggaaaatggcctcgctctctaccgtgttgtagcttctgaaacaccgcgttttcctgaattaggtagacgtttctatttagcaggtccagaaaagataaataacattgttgaagaaatactacaacaagctgaatctaaaggagaaatctcgttaggtggtattgggcgaaatgcagttgcttccttattcgtgaatatggtacgcggtgagcctcaaatacagtgcttaatgcatccaaaatcttccacttctgctgcacagcgtgatcaatgggcaaaggatgcggtcaatgcctttttattagcctttcgtaaaggataa

SEQ ID NO: 83365 - DNA, 1500 bp, Citrobacter koseri
atgaggtgtgtgtcaggttacagatttgcacatgggacgaagtcagtaaggtaccgtccgcattatctgaaaggatgtgttatctccgtgctcagtcttgctttggggtcatgtgctgcgatccccgatctgggaactgctcctcagccggagcaggctgcggcgctgatttcacaacgcagtttttccgctccgcatgctgactggccgcaggaaaaatggtggatggccttcggcgatacgcagcttaaccagctgatgagtgaagccaccgcgcattcaccttctctggcacaggcagaagcccgggtgcgtgaagccacggccagaaccggtgtcgcccgttcccggttatacccgtcaatggacgccagcgcgtccattgataaagagaagctcagctacaactacatctaccctaaaacagccgtgccgcacggatggaatgatatggggcaggccagcctcaactttagctgggaactggatttctggggtaaaaaccgggatgcgctgcgtgccgcgacatccgaagccagcgctgctgaggcagatgccgccgccgcgaaactgatgctgacgacgatgctcgcggacgcttatatccgtctgcagtaccagtatgacagtcgtgacattgcggcccgacaactgcgtaaccggacggataccgtcaggctggtgcagttacgccatgctcagggacttgattccagagtctccgtggaagaaagcggtgcccggctggatgtcgccagagcggcgctggctgaagccgatgagcaaatcaaattaacccaaaacggcatcgcggctttactgggccgggggccggacagagggctggatatcctcagaccccggttgcagatgcgccgccctgtcgggttacctgatgcgctgaacgcaaacctgctcggacgcaatccggaagtggtggccgcacggtggcgggttgaagccgccgccagcaatatcggtgttgccagagcgcagttttacccgaacgtgaacctgatggccttcgtcggataccagtcactggggctgaataacctgttcagctcgggctctgatatcgggagcgtcggacctgccatcagcttacccctttttgaaggcgggcgtttacgcgccaactataaaggtgcgagagcggaatatgaatatgcggtggcgtcgtataacgaggcgctgacacaggcattacgtgaaactgctgatgttacacggagccttgctgctctggtgggcaggtcagaagcaaccgcatctgctttgtcccacagcgaggaagcttatcatctggcaaaagcccggtatcagggggggctggccgattatcaggaagttctcatttctgaagatgcgttactccaggctgagctggcgaatacagccatgcattcccggggttatgtcttggatgtgtcactcgtcaaggcccttgggggcggatttgaatccagttcaacatttgatgcgcaggtgaaaccgtaa

SEQ ID NO: 83366 - DNA, 1200 bp, Citrobacter koseri
atgactgaagataaagataaaaacggcccacaggatatggacagggctctggataacacgaatgcaaaaccggatagcggtgataaaaaaaagcatcgccgtaaattattcgctttgtttggtggcgtcctgattcttatcgccatcggttatgccatctggctgattttctttgccggtaaatccgtctcaacggataacgcctataccgctgccgaagtcgcagacgtcacgccgcttgtcggcggaccggtgaagaaagtaaatgtggtcaacacgcagcttgtgcatgccggtgatgtactggtcgtgcttgatgagacggacgccagaattgcggtgtcacaggctgaagctgagcttggcagcgcccggcggaaggtgatgcagattatggccaatgacaccgctctgagcggacagcttgattcgcgtgaagcaggtattcagagcgccgaacatgatgtggcgagggcacgagcccggtttgataaggccacccttgatgagcgacgtcgccggaatctggtgaaagccggggccgtatctgagcaggattttacggatgcgcagacagaattacgggaggcaacggccgcgctgggagaagcggaagccagtctgaaagctgctcgcgctggcagtgtcgaagcaaaaggatcccggcaggcgaacgaggccctgtttctgaacagtaccgttgaaactaaccccattgtggtggcggccagaacccgtctcgatcaggcccgtataaacctggcgcgtatggttatccgggccccggtggatggagtggtaacacagcgctcagtggatatcgggcagcatgttcaggctggaaaccggctgatgcgggttgtgcccatcgaggatatttatgttgatgcgaatttcaaggaaggtcagctcagcgacgtcagaccgggccagaaggtagagctgacttcagacctgtacggcagcggtgttgtttatcacggtgtggttcagggatttgacggaggctccggttccgcgctttcactgataccggcgcagaatgccacgggtaactggattaaggtcgtgcagcgactgccggtgcgtgttcgtctggagcgggaagaactgcgtaaaaatcctctgcgcatcgggctgtccatggaagtgacggtggacctgacatcgaatgccagagatgaccacacggagaaataa

SEQ ID NO: 83367 - DNA, 1533 bp, Citrobacter koseri
atgtctggttcagcatttccacctctgtccggattcaaactggttgttgcggcaatcgtgctctcgctcgggaattttatggtggtactcgataccaccattgctaacgtcgcgatgcccacaatatccggttacctgggcgtgtcgacaacagaaggaatctggatcatcaccgcctatgcggtggctgaagccatcacggtgccgctgaccggctggctggcgatgcagttcggtcaggtgcgcgtattccttttttctgttgttgcatttgtgattttttctgtctgctgcggtctttcctggtcactaccgagcctggccattttccgtgtgctgcaggggcttgccggtggcccgctgatcccgctttcttccacgttgctgcttgcagccttcccgaagaaacaggccaacattgccgtggcgctctggggaatgatgacggtagtagcgcctatattcggtccgatactgggtgggcttatctcggataactggagctggcagtgggtattttacatcaatatcggctttggtctgattgtggggtttgggacctggtgggtgctgaaggggaaagaaacacatatcagccgttcccggctggacggcgtggggctgggtctgctcgtcatctttgtggcagcctttcagatcatgctggataaaggacgtgaactggactggttttcctcggatattatcattgtctgcgccattgtggccgctattgccctgatctcgctgattatctgggagctcaccgctgagcaaccggtgctggatctgagcgtatttaagtcacgtaactgggtggtatctaccgtcacgctctgtctgatgttcggtattttcttcgggaatatcgtgctgacccccctctggttacagcaatggatgggatacacggcaacctgggccgggtatgcgacgggccccatagggatcctggccgtcctgagctcgcccataattggtcgtctgctgccgaaggtcgatccccgtctgctggtgagctatggcatgggggtactggcggtctcctttgtgatgcgtgccctgctgacgtcgcaggctgactttatgtcagttgccgttcccatgttcgttctgggggccggagttcccgcctgccttatcacgctcacctcgctgggcgtgtccgaactgccgccggagaaagtggcagccggttccgggctgcagaacttcctgcgtgtcatgtgcatggcggtaggctcttccctgacccagacctactgggaacatatgacaaaatttaaccgagcggagctggtgacggcaatcaatcctgacgtgccagggattgtcagcaacacgctgggcgcggccggtattccgacagacacgtcagcggctctgttttcgagaatgatcgacagtcaggccatcatgctggcaacgaacgatttctatcagtcggccaccgttctgatgctggggtccataggcattatctggctaatcaaaaaaccgaaagggccgcttcagaagatgtcgggccattaa

SEQ ID NO: 83368 - DNA, 927 bp, Citrobacter koseri
atgcgatatcataaatataagaccattgtgaaatgcctgccggtaataacagggacgttattactaagcggatgtcatgctgttttacttgatcccaaagggcaaatcgctattgaacaacgggcgctaatcattacggctttttgtctgatgttagtggtcgttattcccgtggttctgatggcagttgtgtttacctggaaataccggaccacgaataccacggcgaaatatacgcctgactggtcccactccaataaagtggaggcggtggtctggacggtgcccgtcctgattattctgtttctggccgtgctgacatggaagtccacccatgcgcttgacccatccaggccactgacctctgcggtgaaacccatcgatatcgaagtcatctccctggactggaaatggttgtttatttatccccaacagggcattgccaccgtcaatcagattgtattcccggtaaatacccccttgaatttgcgtattacatccaattccgtgatgaatggcttttttattccggcactcggcagccagatttatgcgatgccgggcatgcagacccggctgcatctgatcgccggtgaaacgggaaccttcaacggaatctcgtccagttacagcggcaggggcttttccggcatgaaatttaaagcgactgccgtaccggataataccgcgtttgaacagtggatcgctgatgtgaagaaatcaccggatatgctgctcggtccggctgattttgaaaaactggctgagcctgacgaaaaccacccggttgaattcttctctgtcatcgatccgacgttgttcagatacgtgactgaaaaatttaaagcacacgatcacgataaggagacgggaatgactgggtcagagccggaacaacacctctcacacagagcgcggggaaattaa

SEQ ID NO: 83369 - DNA, 1998 bp, Citrobacter koseri
atgctcacaggaaaactgacgctggatgccatacctgaggacccgattgtcagggtaacgatcgttgctattctgatacttggtgtggcaattgttgccgccatcacatattacggtaagtggaaatatttatggtccgaatggctgacctccgttgaccataaaaagctcgggatcatgtacatcatcgtcgcgttcgtgatgttactgcgcggcttttccgatgcaatcatgatgcgcagccagcaggtactggcctcatccggagtggaaggggcggggtatctgccgccctggcactacgatcaaatttttacgggtcacggtgtaatcatgatttttttcgtggcgatgcctttcgttatcggcctgatgaatattgtggtgcccctgcagattggcgcgcgtgatgtggcttttcctttcctgaacaacctgagtttctggttaacggtggtaggcgtggtgctggttaatctctgcctgggagtgggggagtttgcgaccaccggctggctggcatatccgccgctttcggagttagcgtacagtcccggtgtcggggtggattactggatatggacactccagctgtcggggatcgggaccacactgaccgggattaacttcttcgtcaccatactgaaaatgcgtgcaccgggtatgacgatgtttaagatgccggtgttcacctgggcgtcgttgtgtaccaacgtgctgattatcgcttctttccctgtgctgaccgtcacgctgacattgctgacccttgaccgctatctgggcttccatttcttcaccaatgatatgggcggcaacatgatgatgtacgtcaacctgatttgggcgtggggccatccggaagtgtatatactggtgttgccggtcttcggggtctactcggaagtggtggcaaccttttccaggaaacgtctgttcggttatacctcgctggtgtgggcaacggtcgccatcactttgctttccttcctggtatggctgcatcacttcttcaccatgggagccggtgcgaacgttaacgccttcttcgggatcatgacgatgattatcgctatcccgactggtgtgaaaatcttcaactggttgttcaccatgtatcaggggcgcattcagatgcactccgctatgttatggacggtaggttttattgtcaccttttctatagggggtatgaccggcgtcctgctggccgtgccgggagctgactttgtcctgcacaacagcctgttcctgattgcccacttccataatgtcattatcggcggagtggtgttcggcagtatggctggtgtgtcctactggttcccgaaagcgatggggttcaccctgaatgaaaaatggaacaagagggcgttctggttctggatcatcggattttatgtggcgtttatgccgctctatgtgctggggttcatggggatgacccgccgcttgagtcagaatattgacccccagttccatcccctgctggtcgtggcagccagcggtgctgcgctgatagcctgcgggatactgtgccaggtcattatgttctgggtgtcggtgcgcgaccgccacgaaaaccgggatatgaccggcgacccgtggggcggacggacactggagtggtccacctcttccccgccgccattctataactttgctgaagtgccttttgtccacgaacgtgatgcgttctgggaaatgaaggaaagaggggaggcatacaagcaacctgctaactatgccgaaatccatatgccgaaaaacagcggggcggggctgattattggtctgctctgcatcgggtttggcttcggggctatctggcatatctggtggctggcgggattgtcattcctcgggattatcctgacctgggttattaaaagcttcgatgaagatgtggattattacgtacccgtcgccgagataaaaaaaatcgaggatcagcactttgcagaaataaacaaagccggtgtgacatatggtaagtga

SEQ ID NO: 83370 - DNA, 618 bp, Citrobacter koseri
atggtaagtgaagccctggattcatccttccgcacccgtgctgagcacgggcatcagggtacaggtaccagtaaggtcttcggcttctggatctacctgatgagcgactgcattatcttcgccacccagttcgcgacttacggcgtcatggttcataacattgcaggtggtccggcgggtaaggatattttcgaacctccgtttgtactggcggaaactgtgctgcttctgtttagctcgattacctatggttttgctgttatcagcatggataaagaccgcgagggcggtgtacttggatggctgaccctgacatttctgtgtggtctgggttttatcggaatggaagtctgggagttcagtcacctgactgctgagggtttcggcccacagcgcagtggcttcctgtcagcgctgtttactctggtgggcacccatggtctgcatgtgacatgtggactgatctggatgctgatcctgatgtatcaggttgcccgacgaggtctgtcaggattcagtcgcccccgtctgatatgcctgagtctgttctggcatttcctcgatgtcatctggatttgcgtgttcagtattgtttacctgatgggagcaatgccatga

SEQ ID NO: 83371 - DNA, 324 bp, Citrobacter koseri
atgagacattctgcagacgcacagggcgtagcttacggcaatacgatgtcttatataaccggctttctcctgtcggtcattctgacggtgatcccgttctggctggttatggacagtggtgtttccgcagggatcatcgcaggcggggtcatgacgtgtgccgttgttcaggtgctggtacatctggtgtattttcttcacctgaatgcttcttctgaaatgcgctggaacctcgtaaccattgtcttttccgctgtcattatctttatcattattaccgggtcgttgtggatcatgtggaatctcaatcatcagatgatgtga

SEQ ID NO: 83372 - DNA, 393 bp, Citrobacter koseri
atggacataaaaaaaatacggaaggaaaagataaaccgacttgtggtgtatgaaattatgcaatggattgatgagcatctggaggagccgctgaaggttgaggatgtttctgcaaaagctggttattcaaaatggcattttcaacggatgttcaaggaggtggcaggaataagtctagggaaatatataaagcttgaaaaactaagacgtgcttattttttactggagaatacggatatacccgtcatagaggtgtgctttatgctcgggtttaccagtcagcaggtatttacccgagcgatgagaaatgaaatgcatcatacaccaggggctgtcagaaggaataaacctgttctgaaaaagagttctggtataaagcgtgatgagttataa

SEQ ID NO: 83373 - DNA, 1269 bp, Citrobacter koseri
atgtctctcaacgacacgaaaatccgcagtctcaaaccttctgaaaaatccttcaaagtctccgattcacacggtctatacctcttggtcaatccaggcggctcacgtctctggtatcttaagtatcgaattaacggtaaagaatcccgccttggcttaggcgcttatcccgatgtatccctttccgacgcccggcaacaacgagacggtatccgcaagttgctggcgcagaacattaaccccgctcagcaacgtatagccgaaagagccgcccgctcaccggaaaaggtctttaagacagtggcgctggcgtggcataaaagcaataaaaaatggtcgcagaataccgctgaccgtctgcttgccagcatgcacaatcatatttttccggttatcggacatctgtccgtcacggaacttaaaccccgtcatttcattgacctgctgaaaagcattgagaaaaaaggtctgctggaagtcgcgtcccgcacgcggcagcacctctgtaacatcatgcgtcatgcggttcatcagggattcattgacagcaacccggcggcaaaccttgacggcgtgacagcgccccccgttaagcgccactaccccgccctgccgctggaacgcctgccggaattgctggggcgcattgatggttatcagcagggacgagggttaacccgtcaagcggtccttctgacccttcacctgtttatccgttccagtgaactgcgtttcgcccgatggagcgagtttgatttcaggaactgtatctggaccatccccgctacccgcgaagctcttcccggtgttcgttattccggacgcggagccaaaatgcgcacgccccacattgttccattatcccggcaagccatcgttatcctgaaacaagtagaggaaatctcaggtcatctggaactagtgttccccggtgaccataacccttacaggccaatgtgtgaaaatacagtcaacaaggcactgcgactgatgggctatgacacaaaaatggacatttgcggccatggctttcgggcaatggcatgcagcgccttaatggaatccggactctggtcgaaggatgctgttgaacgccaaatgagtcatcaggaacgcaacagcgtgcggatagcttatatccacaaagctgaacatctggaagcccgtaaagcgatgatgcagtggtggtctgattatctttatacgtgccgggaaaactatgttcccccatatatatatagtaaaaatatcagtcatgaagctacctga

SEQ ID NO: 83374 - DNA, 159 bp, Citrobacter koseri
atggataatcaacaattttttgattttctgtggcaagaacaaatgcgcaagcgaagtgaaaacgcacaaagccagtttcgccaatggctgcaacgtgaagaggaacggcgcctggattatgtgatttctcgggcgagacaagaaagctggagtttataa

SEQ ID NO: 83375 - DNA, 153 bp, Citrobacter koseri
atgtatttctctgagaccggtcagcaatggctgaccggctatgtattagtgtggttattggatgagtgtctgtatctaatattcagtatgaatagttttatcagaggtggtgtctgtgtgataacaaagtataagtctataacacttcaatga

SEQ ID NO: 83376 - DNA, 141 bp, Citrobacter koseri
atggcctttcactatgacgataaggaaactctccttacatccctgtctaaaaaaagccactttctgtgtaatttgtcagtaatactggactttccatcaaaaaaaacactacaaaaaaaccacgaaaaatctacctattga

SEQ ID NO: 83377 - DNA, 840 bp, Citrobacter koseri
atgacagagtttatttcacgcttatttattatctcagtgctttcatttccggccctaagttttgccatcaccattcctggtaatattcacccagagcgatacacgttctttctaacagatagaggcggtgaaatgcttcgcgaaatgaacgatgcggcagtcagcgtaaaactcaacaacaaagttggttttagcgctgaggcacagagcaaggctgctgctgcgaacatatctcctttgctgtacgcagcatcaccccttgaacagaactttatccgctacgacagtaaaccggttaaggctctgacttgtctcgtaacgacccgcactatgccgggtcagaataaaaattacacatgggaggaaacctactgccttgatgaaaccggtgctgcttacatcggcacaaaaggctggccgtcacgtgctatcgtcgaaaagagttgcgaggcgggtgtccccagttgtcctgtatatcttggtctaaacaatgatccaccgaccatgcggaatgatgctgcgcaatatattccttacaacagcaaacgcgtaagtaggaataaagaaagtaactctcagccaaaaccagcagctggagaaatggtcgcagagcaggacggttatgtggtgaattatgtaaaaggtagcagttgtgctgacaacaaactggttgttaaaaacacaagctccgggaaaaccgccgaaattgcaggattaaatggttgctcttttgacccgagaaaaaatacagtaattatcttccctcaaaatgaatacgtcggcgtttacagtggccccacaaacgcttctgaggaaatagcctcagtcgatctcccctaa

SEQ ID NO: 83378 - DNA, 192 bp, Citrobacter koseri
atgcccgccatccgcgcggagttcagccaggcctacggtgtactgttttgtaggccggataaggtgcttgcaccgccatccggcaatgcccgaagaggcaaaaagtttgatggcgttgaatgttttttcagcgccatttttatttacgcacgggaaggaaatccctacgcaaacgttttctttttctgttag

SEQ ID NO: 83379 - DNA, 1188 bp, Citrobacter koseri
atgatgctgaatgcccgcaaagttgaagccgctaaaggaaaagagaagagctataagctatctgatggaggtggcctgtaccttcaggttgaacctaatggctcgcgttactggcgtatgaagtaccgttttgctggtaaagagaagcgcttgtcctttggtgtctatccaacagtcaccctcgccgatgccagacaaaaacgcgaagacgcaaagaaactactcgtcgctggtgaagatcctggcgaagtgaaaaaagcaaagaagcatgctttaaacgcagcgatcgagacacttaacccattcagagaagtggcgttagagtggcacaaaatgaaatctcccaaatggtctgagggctatgcttcagacataattgaggcgtttgagaaagacattttcccgcatattggacacaggcccatagccgatattcagccccttgaactacttgaagtactgaggttgatagaagcacgaggtgctatggagaaagcgaagaaagtccgtcagcgatgcggtgaagttttccgctatgccatcgtaacaggtagagcaatctacaatcctgcaccggatcttgccagtgcgatgcaaggacatgaagcagtccactatccattcctcaaagccaacgagctgccggagttctttactgcccttaacgcttattcaggaagcccaattgtattgctgggggcacatttacttatcctgacgggtctaagaacaggagaactaagagcaggtgagtggcgtgaggtggattttgataatgcggtgtgggagatcccaaaagaacgtatgaaaatgcgtaggagccatattgtcccgttgccaaaacaagcattatcccatctcaaatgtttgaaagaactaactgggaactacccgctgatgttccctggacgcaacgatcctagcaaatttatgagtgaagcaagcattaatcaggtgtttaaacgtattggatatgcagggcgtgttacggggcatggttttaggcatacgatgagtacaattctgcatgagaaaggatttaacagcgcatggattgaaacccagcttgctcatttagataaaaatgctattcgcggaatttataaccatgctcaatatctggaaggacgcagagaaatgatgcaatggtatgctgattttattgagggaatgaatcgtaatggctaa

SEQ ID NO: 83380 - DNA, 798 bp, Citrobacter koseri
atggctaataaaaccattcctttgaaactatttcgcacgcattatcaagtagcagaagttgctaagatgctaaattgtgaagaggcggatgttttttatctggcaggagagaatgaactttcattctctgcatatgttggcagggagggtaatttctcaaagcatcgagttagatgtataaatgaatttgttaatcatcttgattcattggataaggatgacgaggggtatagttatattagtcaatatagtctcataaaaatacatgagataaaaaatgacaagaatttagttattttacgtataaaaggttattttaaatacccaccaagaatccagaaggattttatttattttagtgggcaattcccagtatacccatctcttcttgttccagcaggggaagtgttttcagaagagataaagttctttcagatagactggaaaaattctgatgggcttttttttgagcatgatggatatatagaaagcgatgatgttcgaaaactgtataatattattaataatgatgtttcttcttcggaggtatataagtcgctatcaattgcacaacaagagcgacatgcaacaaagcgaaatcaagttttgagtgtggccatttatctttacaaagaaaactctaatgtcaaaaaagacaatgctacagcgctaacaaagcttgttttttcccgagcagccgaattttggcctgataagaaagaaccgcccttatcattcgaagtaatctgcaaaatgattgctagtattttcaaaaaaccaatttttacaaataattaa

SEQ ID NO: 83381 - DNA, 201 bp, Citrobacter koseri
atggggtttactgataatcgtccttctgctgactcgctcattgatatgaaattcattacatctgattgtctgtttactgataaatggatttataaactgatttctctaggtcgttttcctaaaccaatcaaattaggtcgtatgtctcgatggcgtgccggtgactactatgcttggcgtgatagtcattcttcagagtaa

SEQ ID NO: 83382 - DNA, 591 bp, Citrobacter koseri
atgccagcgttaattaatccaggcaatgttcagttttcggttataaatttcttgcctcaccaggaatgcgcgggatatagtttaaaggttgccgcaaaatcggcagccgggcgtaggaacccgtgtaatctaacggcgacacaacacgcgccaggcgtgtttttttgtgtcgtagctttgactcacctaaaatttatggtgtggtggctgactgcatgtttttattttttacgccacatcatcagaattatggtagtccaggcggggcagctttcgggctggccggtatccgttagagccggtattcctacccccgtctgggctaccacccatgagcgtaggaactccggtggtagcgttacccgctatctaacggaggttgccattatggctacagtccctgttttatctcaccctgaatttacctttgtctttctggctgttcgccgtacagaccgtgatgcccgtccacgtcctgtgcgtgtaatcgcagactgcgagcatgctgcacgccttaaacttgccactgaatttatcctgagctttgctgcccgtatccctgtgaaaagtgccggggaggtgattgcatga

SEQ ID NO: 83383 - DNA, 1188 bp, Citrobacter koseri
atgatttactcatatggtttcaaaaattattttggttttaaggaaggagcgaatgtttcattccacttaaatggtagagttcctaaggatgtttcccatggtcgcgatgttgcaactatattgggagtcaaaggggctaatggtgcaggtaaaacaaatttattaaaagcactatcatttctttcatcattttgctcgtattccttttattctaaggacggttcttcaattgatgctgatccttactttcatagtgaagctccatctgaattctatatagaattcctttatggtgattatatttacacttatgagttggcggttaccgtaagtaaagtcgtttatgagagactctatagaaaaagtaaaaatggtgatggggagttaaaaaaaaccagaaaggtacctgttttcattcgtaacggaaatgatataagtgattgtctgtcagaaatagcacaagttaaagttatttctttaaaggataatgcatctttaattagtagtgccttccattacaagtttgatgagccgttaaagatattaaatgaagtttatatgttttttgcttcgtttatcactaatgttcattatactggacttaatgatttttcattagatacaaatagcatccgatttgtatctgaattttatttcaaaaatgaaaaagcatttaactttgtaaaaaatataattgtcaaaagtgatttgggaattagtgacattgaaattgctcaaggaatcgatgatagtggcaaaaagtactactttcctatttttgaacacaaagtaggaaaaaataaatacagtttgactatatacgatcagtctagtgggacgaaatctttatatgtcaagctgaatcattattggcgagcactttcatcaggtagtgtgcttgtcttggatgaatttgacctaaattgccatccgtttattcttccaaagttactagagttattcgaatcaacggatactaatccacttggcgctcaatttatttttacctcacatattaccgaggttcttgagaaattaagtaagtatagaacatatttagttaataaggaaagtaacgaatgttattgctatcgattggatgaaattggtggggacattctaaggcatggacgtgcaattgcacctatttataacgaaggtaagattggtggggtgccaaaattatga

SEQ ID NO: 83384 - DNA, 501 bp, Citrobacter koseri
atgagtccgagagatttttcaaataaaaggaaaattgcattccttgataatcttcctacaattagtcttgagtcaggggaaattgttgagcgttgcaagtttaacttttctttttttgataaggctcatccgcatgggcaagattttcaagattggtctcataatgaactaattaaactgatggagaaattgaaaaactactctggttcttcactagaatactggcgccatcagagagtaggaggaggagggttaaaggtatttgaaatatacggagactttccaaagaagagtaatttttctcatccaaagcatgttcctcacgacgtttcttgggcaaggttccgattagaaaacttagtgagactggttggatttgttgtgccaaaaggttttaaatgtgctgaagcggtggcacttcctcagccgtatgatagcaatacattttatgtagttttcttagatcgtgatcataagttttacttaactgaagacccataa

SEQ ID NO: 83385 - DNA, 288 bp, Citrobacter koseri
atggtctataaagatttctaccatttaatgttggagtatttcgctcaaccagttgaactgtttacaagtgcgaaaaagaagcctttcactctgtatgctgaagagcaaaagctgtttgtcagaaacgggaaaaacaatattagtcgcatcaatccgagtgaagttgcagcatttattgagcggtttgaagaaagcgaaagtttgttagctaaagactaccaggatgtgactttcaaagcatcctatttgctggctgcgatgaaatatatcactgtaaaaactcactga

SEQ ID NO: 83386 - DNA, 1359 bp, Citrobacter koseri
atgatgatccaggtccgggaatatgctctgcttacctgtgataactctcaaccagccagtatggatttgggaattgtctctgaggcaaccttttcctggcttgagcaattgcaacaaacgtggagtggtacttctcaaattctctgccgggaagggaagcgttttttgcgtttgggaagctatgtcggttatctacaatccccgaatggcgagtcaattgaaattctgccaaaaaccacatttgaagcgccaactgagatagcccccctacgtcagcttttacgccgaatgctaagcgcctctttaggtattacaccccgtgcggcgaaccaggcggcattgcaacgtagtgaccagcctctacatgaatggataatcagtgagtttttgcggcatcttgctgatttagtacgcaaagggctgcgtttcgattatcacctcatcgaggacgagcatagcgcgttcattcgtggtcaattaaatgtcactgcgcaaatgagaatgcctccgggcagaggcactcattttcatgtgcgctatgccgatttttcccctcagcgtattgagaaccgtctgctacggacggctttggattgtgcgtttaaaatgaccagacaagggcagaactggagacaagcaaattcacttagccaccaactggatggcatagagcctgtttttggcagtacaacacaactcttgaggcaatggagtgacggcaaatatctcttcggctatcgtgccataaagccgtggtgccagctcattcttgaacagatgaatccagattttcaatatggatcgcatcagggaatttctctgttgttccctatggaaaagttatatgagggctgggtaggatacggtctggctggggctttgcatcacgattaccagctcatagaacaggctaagagccggtacttgttagagcatgttcctgtgagcgaaaagtcatctcaacgatggttcatgcttaaaccagactttcttatcaccggcaggcaaacggtggttcttgatgctaaatggaaattattagatagcagagctgatgatagtctgagaaagtatgaaatcagccagcctgacctgtatcagatgttcgcctatgggcaaaagtatcttcatgggaaaggcaatatgatgctgatttatccgcgtcatcagtactttgctacaccattgccggtgttccgtttcgacgaagatttatctctatggtgtgtaccctttgaccttgaatcggctgagttggtaaaaggcgagtggcaaggttccctccactgcatttctggtgatgagattctgatggctcataatgagcaatcaaatagccctgtacttcctgggagataa

SEQ ID NO: 83387 - DNA, 1983 bp, Citrobacter koseri
atgctgaattctttcgagatataccaggcgttgaatgaattgggttaccggcttgaggcgggaaaattcgagccaagctatgcatccgaacatgcgctcgggaatggaaagtatctgtacgtcaaacgcagccgggacggcgtggttaataagagcccattggttcttgcaccagaaactctcgccttaaaggcggaaattgatcgcatcgagggtatccactgcctttgggaaaaagtaaaaagcaccagttaccgccgttatccgaaagataacggtacatcccaatatggtttcgcggctgatgttgagtcagttgaagcgttgcaggcgctggtggctttgctgggcggccaaccatcttttaccacccaacccggaataaaaagagataaccaaaacaaggaacaatcgccaatgtatccattaaatcagattctctttgggccaccaggcacgggtaaaacctacagtaccaccgagatggcggtcaaaattgcggataatgcatggtaccaacaggctacgctcgcacatcatggcaatgacttacgggagttggtaaaagagcgctataaagcgttggtagaaaagcagcgcattatgtttaccaccttccaccagagcttctcctatgaagattttatcgaagggattcgcgctactaccgatgaaaaatcgggagcacttcgctacgaagttgtggatggtatttttaaacagctgtgcctgaatgccagggttaaggttcaggggagtgcaacacaatctatctcactcaaaggtcgacggatctggaagatgtctttgggtaataccatgggtggagaagaggatgtgtatgaggattgcctggcaaacaattatgtcctgctaggttggggagaagatatcgattttagtaactgctctacctatgagtcagttaaagctcgaattgcatctgaaaaacagtcattggaaggcactagtaactacatggctgttgccgtaaataccttcaaaaatattattaagaatggcgatatagtcgtcgtctctgatggaaaccacaagttccgtgctatcgccgaaattacgggtgagtacagctatttacccaatgatgagcgtgaatattaccatcagatgcgctctgtgaaatggctaagaacatacaccccaagccttcctaaagagcaaattttcatcaagtcgttatctcagatgaccctttatgagttgcaggatacgactattgatcgtgaaaaattaactcagttgttggctccagttgagaatgttgatagtcaggatcttccacatgtactgatcatagacgaaatcaatcgcgggaatatagcgcgtatatttggtgagctgattacgcttcttgaggcagacaaacgtcaaggggctgatgatgagcggtcgctgatgctcccttattcgaaacaaacattctcagtaccacaaaatgtttatgtgattgggacgatgaatactgcggataaatcgctcattcagatggacctggcgttaagacgccgttttagctttagagaaatgcctgcacgaccggagttgttagctgggatcaccgcgtttggcgttgatgctgcacagttgctaacgcgtattaatcagcgtatcgaagcgctgctggatagtgagcatatgataggtcatgcttactttatgccactaaagaaattagaaaataatggcgaccgtgaagcctgtcttgccagcatcttccaggacaaaatcattcccttgctgagagagtatttctttgatgactatgaacgcattggttgggtgttgaatgattcggtgaaagcgaaagaaaaccgttttatcctgttgctgcaatcagcacaactaccagcattttctgcactattcccgaaagatattgcggatagtttgtctgacaggcgttttcgtatcaatgaagatgcttttgcgtcggcagaagcttatcagggtattgtcgcatga

SEQ ID NO: 83388 - DNA, 3249 bp, Citrobacter koseri
atgagcatggacagcaccaaagagctgattttccagaatgaaatgatcgctcagatggaagccaaaggttggagttatggcaaagcggaaggctacgatcgcgaacgtgcgctgtactcgcaggatgcactgacctttgtgcagaccacacagccgcaggagtgggagaagtttgccaaaatttaccctaccgataccgagcgtcatttcctcgatgcgctggtggcacagctgaaaaaagcggacatcaacgccaccgatatgctttctcgtacttacggtacgctcggcgtgctgcgtcatggtatcaaaagccataacgcgcgtttttccctgtgccagtttaagccggaacataacctcaatccggaaacccttacccgctacaaacagaatatctgccgtatcgtgccggagctggtttacagcccgcatgcgtcgaacgccgcatttggagaaacgggcgttaaggcgaagaaatggcgtatcgacctggtactgttcgtcaatggcctgccaatagcgactctggagctgaagtctgaatttaagcagacggtacaaaacgccatcacgcaatataagaaaacgcgtttgccgaaagatcccggcaccaataagcccgagccgctgctgacctttaaacgcggggcgctggtgcactttgccgtcagccagtacgaagtgtttatggcgaccaaactggatggcgataaaaccttcttcctgccgtttaacaaaggcacccatgacggcggcgcggggaacgacatcccggaagatgccaacgactacgccaccagctacctgtggaatgaggtgctgctgccggacaatctgctgaaaattctcgcgagtttcgtgcatctgcaaatcgtcgaaaaagaagatgccattggcctgaagtacaaaagcgagagcctgattttcccgcgctatcaccagtgggatgtggtgaacaaactgatcactgccgcaacagcagaaggcaccggcaataaatacctgattcagcatagcgcggggtcgggcaaatcgaactctatcgcctggacggcccatcagctttcccgcctgtacgatgaaaatggcgagaagcagttccactcggtgattgtagtgacggaccgcaccgtgcttgacgatcagctgcaggacaccatctaccagtttgagcatcaggatggcgtagtcgggcggatcaataacaaagaaggcgacggctctaaatcggagaagctggcgagcgcgctggaaaactcgcagccgattattatcgtcaccattcagaccttcccgtttgtcctgaaggcgattgaaaacagcgtcagcctcaagcagcgtaaatacgcggtgattgccgatgaagcgcactcctcgcagagcggttctacggcgcgtcagctgaaagaagtgctgatgaccgaagaagcagatgacgatgtggagatgtcttcagaagacattctggatgccactgtcgccgcacgtaaaggcagcaacaatctcaactattacgcctttaccgccacgccgaaagccaaaacgctggagctgtttggccgtcgtcctaatccacaggaaccggcatctaaaaccaataagccggaagcgttccacgtatactccatgcgccaggccatcgaagaaggctttattcttgatgtgctgaagaattacaccaactacaaagtggcgtataagctgctgcaaaagctggacgatcctgaccgggaagtggacagcaagaaagcgaaaatcaaactgaaccagtgggtgtcgctacacgatcataacgtgtcgcagaaagtgaaggtgattgttgagcacttccgtaagcatgtgatgcacttattggccggccaggcgaaagcgatggtggtgaccagttcgcgtaaagcggcggtgcgctacaagctggcgttcgataaatacatcgccgagcacaagtacgacaagataagcgcaatggtggcgttctccggggaagtggaattcaatgaagatgaccacaacagccttgcactacttaaccagaagttcaccgaaatcaatatgaacccagggctgaaaggccgggatatgcgcaaagcgtttgataccgacgactaccaggtgatgctggtggccaacaaattccagaccggttttgaccagcctaagctctgcgccatgtatgtggataaaaagctaggtggcgttgagtgtgtgcagacgctgtcgcgcctgaaccgtacctatcctgggaaggcccagtccggcacgtttgtgctcgatttttacaacgaacccgacgagattttgggggctttccagccgtactaccagacagccgagctgacggatgttagcgatccgcagctcgtctttgaactgtttgaaaagttacggaccagtggtattttcctgtggaacgaagtggagcagttctgcgaggcgttctttagtaaaaacaaatccaacgcagccattagcaatatctgcaagcctgcggtggagcgctggaagcaacgctatacctcggcgattgacgagtatgtaaaggccaaagcgatcttcgaacgcaccaagaagaccggcgatgttgtgctgatcaccaatgcggaaaacaccttcaaagagtgtgaaaaagaaaaaagtaagctggatatcttcaagaaagatctcggaagctttgtccgtttttacgagtttatgtcgcaaatcgtcgattacgacgacaagaacctggaaaagctgagcctgtttgcccgccatctgcgtccgttgctgcatgagcagtgcatcgaagaagacgaggttgatttgagcaacgtggagatgagccattatcgcctgtcgaaacttcacgagcagcatttgaagctacaggaagatgcggcggaatataaaatcaaaccggggaatgatgtcggtacggcgaagccgaaggataagaaagaagagtttctgtcgaatatcctggcgcgtcttaacgagctgttcgttaccgataatctcactgataaagacatgatcaattatgctttcgcggtgcgcgacaagctgtcagaaaaccaggcggtgatgacccagattgcgaacaatacccgcgaacaggcgatgctgggcgatttcccgaaagccattgatgatgccgtgatggacagcaacgacgctcagcaggagatgatggtgcagtatctctctaaccctgaactggcgaagggctttgcccgcgtggtgtttgatatgttgaaaggggcttaa

SEQ ID NO: 83389 - DNA, 1296 bp, Citrobacter koseri
atggctaagtataaggcgtatccagagtataaggattcagagattgagtggctgggaaaaattcctagtggttggttattgaaaaaagctaaatatatttttcagagagtccaacgtcctcttcgagatattgatggcgtggtgactgcattccgtgatgggcaggttactcttaggactaatcggcgaaccgatggatttacaaattctgttaaagaaattggttatcaaggtgtacgtcgtaacgatttggtaatccatgcgatggatgggtttgctggtgctataggtgttagtgattctgacgggaaatgctcacctgtttgttcggtatgtatcccttgggaaagtcagtctgtaaatatgcacttttatggatatttagttcggcagttagctgtaactgattttattttgtctttggcgaaaggtatacgtgaacgttccacagaattcaggtttagtgaattctcggggctaatgttagccattcctccaatatatgagcaaaaccagatagctacctttctcgattacgaaaccgcaaaaatcgacaacctgatcgagaagcaacagcaactgattgagctgctaaaagaaaaacgtcaggcagtgattagtcatgccgtcaccaaagggttaaacccagatgtgccgatgaaagattctggtgttgagtggttgggtgacgtgcctaaacactggaagtgtggatatctgcgttggtatatttctgtttcaagcggtacatatttaaataataaagattttgaaaccgatgaaagtaatgattgcataaacccagtaatcggggggaatggtgtaatgggttttacatcaaaaataaatgatgggaattgccttgttgttgggcgcgttggtgctttgtgcgggaatgtccatcaaatacgaagggcttgttgggtaacagataatgccttaaagattacatatggttgtgattttgacgtagattatcttgaaatgtatctgaaagttttagacttaaataagttggcaaatcataatgctcaacctttgattaccggcactatgataaaagaacaagtggcgattataccttcaattgatgaacaaaaaaatattacgaaatttatccaatcaaaggtgggtaaaatcgatctcttaattcaaaaaagttctgaagctgttgataaaataaaggagcgccgcactgccctcatctccgccgccgtcaccggaaaaattgacgtccgcgattgggttgccccggatacgcagggcgttgaggagtcacaggaggccaccgtatga

SEQ ID NO: 83390 - DNA, 2361 bp, Citrobacter koseri
atgactaacactaacttttctcaaacggctgcgtttatctggtcggtggctgatttgctgcgcggtgatttcaaacagtctcagtacgggcgcgtgatcctgccctttacgctactgcgccgtcttgagtgcgtgttggcggagaccaaagatgcggtggtggcgaaatatgatgagttaaaaaccagctcactgccggaagacgccaaagagaagtttctgctgcgcgccagcgagttgtccttcttcaatacctcgaagatggatctcggcaagatggggcagaatgacatcaaagccaacctggaaagctacgtacaggcgttctctccggatgcacgtgaaatcttcgaacacttcaaattcagtgagttcgttggcctgctggaagatgccaacctgctgttcaaagtggtgaagaaattcgccaccaccgatctcagcccgaaagcgatttccaactatgagatgggactggtgtttgaagagcttatccgtcgtttcgcggaaagctccaacgagacagctggtgagcacttcaccccacgcgatatcgtgcgtctgaccacctcgctggtgtttatggaagatgatgaagccctgacgcagcccggtatcatccgcaccatttatgacccgacggccgggaccggcgggttcctctcttcaggcatggaatatgtgcacgagctgaaccctaacgcggttatgcgtgcctttggtcaggagctgaacccagagtcttacgcgatctgtaaagccgatatgctgatcaaaggtcaggacgtcagccgcattaagctgggtaacaccctctccaacgaccagttaccgcaggatcagttcgactacatgctctctaacccaccgtttggcgtggactggaaaaagattgagggtgaaattaacgacgaacatacgcagaaaggttttaacggtcgctttggcccgggcctgccgcgtgtttcagacggctcgctgctgttcctgatgcacctgatcagcaaaatgcgcgacagccacaatgtggatggcaccgtgagcaacggtggacgtatcgggattatccttaacggttccccactgtttaccggtggtgcgggcagcggtgagagcgaaatccgccgctacattctggaagccgatttgctggaaggcatcgtcgcactgccaacagatatgttctataacaccggcattgccacttacgtctggatcctctctaacaagaaagcgcctgagcgtaaaggcaaagtacagctgattgatggcaccaacctgtgcggaaaaatgcgtaaatcgctgggttccaagcgtaacctgatgggcgatgacgatatcaaactgatcacccagaccttcggtaactttgaagtggtggatgctaccaccctggaggatctgggtctggaaaaagccgcagagcaaaaatccagccgtggccgtcagccagcaacggccaaaaccgaagcgccgaaaaccttcgccagcaaaatcttcaacagcactgactttggctatcgccgcctgaccattgagcgcccgttgcggttatccgctcaggtgacggatgaggcgattgcgacattgcgttttgcgccgaagccgtttaacgcgccgatggaacgtctgtatgaagagttcgcatcccaatggcaggaggacacttacggtgatttctccgaactggaagcagaagcgcgcgccatcatcaaagctgaatttgccgagctgaaagagaagcagattaaagacctgctcgacagcaaactgtggctggatcagcgcgccttgatggaaaaggctcagcagattcagacggctctgggtacgcaggcgggtggcaaaacgcgggtgagcaatgacttcaatcagttccagctgaccctgaaaggggccatcaaaacggctggcgtgaagctggatgcgaaagataacaagcagtttatcgatgccatgaccaccaaaaacccggatgccgagccggtagtgaagaaggtgctgaaagaagccgcccagccgctgtacggggcgtttgaatacaagggtaagattgttgagtttgagcaggacggcgagctgcgcgataacgaaaacgtgccgctgaacccggcaatgtctaccagcgacctgattgaaaactatttcaaatcagaagtgctgccgcatgtgaatgacgcgtggatcaacgccgataagcgcgatgcgaaagataatgaggtggggattgtcggttacgagatcccgtttaaccgccatttctatgtctatcagccgccgcgcccgctggaagaaattgatgccgatctggatgcggtcagctccgagattatgaaactgctgcaggaggtacattcctga

SEQ ID NO: 83391 - DNA, 156 bp, Citrobacter koseri
atgctcagtatcaggaaggtaatccaatatgtggcaaaacgtgtagcaaaaggctattcggcaatggatgcgttgtgctttctcaagtctcacatgaagttcactcgttggagtgtaattattatcgaagccagcagtattcaagtcatagattag

SEQ ID NO: 83392 - DNA, 180 bp, Citrobacter koseri
atgaaacggatctataaagttatggatctggccagtctgatatcttcgattaaactgaagtgttctacaaccgggccctgtgtcacagtcatctcgatggcgtcagtccgaaggcctccgaacatgcctcgtcttgaggactggatatgtctatgggggatgtacactctctgctcatag

SEQ ID NO: 83393 - DNA, 1407 bp, Citrobacter koseri
atggcaaataacttattagtagttgacacacaaagtgtcacaactgtagtggaccaatttaatacgtcacttgctgtctacctaacaagtctagacttgcccacaaataatgttctcgtagagaattcagaacgtcacagagttatttcaaatctccccgatgtcataagtaacatgacggcacaaacccggtctgggtcattatatttatcgaaattcgtcgcggcatgcggtgctggtctttttgatgctgctctgaatttcctctggaatgagactgtaaccaatttgagatggaaggtttcattaaatgatattgattatttttatgacagcataataaccgatcctaaaagacgagataaattaaaatctattgatgatcttgtaaaggttgaggagtgggaattaattaggggatgtcacctaacaggtctgctttcagatttagggtttaaacacttagattacattagggatatgcgaaattgggcaagcgcagcacaccctaaccagaatcagctaactggttttcaattagtttcttggttagaaacatgtataaaagaagtgatatcaaagcaacctgaacctgcagccttaaatgtaaatcgatttctgctaagcatcaaacaagagtctttagatacgactgccatagcccatatcaaaacaggcttacaaactctacctttagatgctctaaattctctcctgcgaactatatttggaatgtatacaaatgattctgcatcggtgcaaattaaaaacaatattaaaggtattgcaaatgattgttggaccttagcatctgatagtgcgaaatataactgcggcattaaataccagtcatttgctactaatggcgagaactctcggcgtgatgcagcaaacgaatttttgactattgttagtgggttgccatatttgcctgcagatacattatcagttgaaatgtcgataaagatatataatctatatcaagctcacagcggatggaataattttcatagtgaaccgcctcatgcttcagctttggctgcatatatatccagcaccggaattatacctgatgcagtaagaaaggattacgtcaaaaccataattatgtgtaaattaggcaatggatacggcgtttcaaatggggctgtatattattacgatcagatgattgctaagtttggtgacaacgaattaaaagagtttgtaagacttgtcttagatagtgaatttgcatccagagtttctatagctagatgtgctgagagttataaaaatctagctgcaacatttacttctactaatcaagttgtaattcaagctctgggttacatcgcaacagcaacactgcctcaactccctaatcttggaaaagtttctgcttatcaacgtttggttaattcatag

SEQ ID NO: 83394 - DNA, 582 bp, Citrobacter koseri
atgtctactgttacagatttagtatcagctttagcttggccattagcttttgtatggtttgttcagaaatatggtaatgatgttaaagagctaattctccggctatctaaagtaaaatttggaaatgcggaagctgaatttactttagggttaaaagccgcggaagagttagctaatggagctcccttggttgaagcatcaaaagatctacatgaggaagacatcgagttttctaaacgtatgtcgcagttagagcgcattgcggatgtatcgcctagggccgcaattatggagtcatggttactaattgaagaagcggcaggaaaagcaggttttgtccaaggagcatctattccacgaatcaatcctttattatttattgaatggttagtaagagaaggaaaaattgataaatcaaccgctatattggtcgataggatgagaaaactacgaaatgaagcgagtcatttgaaagatttcgaactcacaaaagatgaagctgaacgatacctaaaaatagccgttcagatctctctccttatcatcgagccggattcatccgtagtgttagaaaatgagtaa

SEQ ID NO: 83395 - DNA, 867 bp, Citrobacter koseri
atgcaaagaattgttcctgataaaaattggtgggaaaaagagcgtaaaaatcgtaatgcatcatcaatatgcccatacgctagttcacacagatgtcctcgatactatgagagtgtagttttgctctcacgcagcaatatgatagctggtatggcaactgaaaaagaaaaggaactgggcgaattttggaaaagaaccaatttctcatctttatgtaatgaagaagtccccgcagttactacaaaagaatttggcggcctttcatcagttagtaatttctgcccagaaatatcattcaaatatttgcactactatgctgattacatgcataaatatgttgatgaaatagatcaagatacaggcaggcgtattgcggaaaaagataatttagaaaatgattggaaatatacatggatgtcagtcaatcctaaattttatttagattgcgatgtttttgaaagtgtcaaaaatttcaatgaaaattttggtaatgattacttaaagagattgcacccaaatatcgttcagcaaatagatagaatgaataattgtttggatactaatgatccggcaggtacactgcacgcagcctctaatattttagaaactatggctaaggaaatcactcaaaacccgaatgtgtcaaatgaaccattgggtggcttttttaaacagttcgaaaaaatgtcaaaattacctcagaatcttattgatgcaattaaagatatttatgttttacgcaacaagttacctactgctggacacggaagcttgaacaagcctgaattgactatggtagaagctataattattgcggcaatgacaaaggcaattttagaaattgaatatcgaagcaaagctatctaa

SEQ ID NO: 83396 - DNA, 699 bp, Citrobacter koseri
atgagtagaattacgtgggaaaatccaacaattaaatttaacgatgatatttttttgtctgttgactgtcatatttgtgaaagaataactaatcataagagattggtcgaagtaaagttaagttccactcagcatgaagatgaccagtatgataactcagtcacatgttataaaaatctgaaaattttacaatgtcaaggctgcatggagccttcgttaaaaattgaggaatatgattcggaaaatattgatttctatactaacgaaccagaaatttctgtcgactattatcctaagcgtcagcaattacttcagtttgaacatacttaccggttacctacagcattaagagatatgtatattgaaactatcagcgcaataaatagtgaatgtttaacaattgctggtataggcattagagggttaattgaaattatttgcaaagaagaggggattaaaggtcgtaatcttgaagataaaataaacaatctttttactgaaggaaaaattagcggggatagcaaagtaatattacattcactcagaatcctttataacaaatctgcacatgaatcctttaaaccatctagagaacaattaaatttatcattggacattatagaattactcatgaaacagatctatgttcattcacatgaagctaagaagttcttacaaaataaatctcaagcagtttaa

SEQ ID NO: 83397 - DNA, 903 bp, Citrobacter koseri
atgcatgatcttgtcaaggaatttataaggaaaagagccatttcagaggacatcgagttaaatgaacctttacatgacgggttatactatctcgaaaaactgaatgaaatcattgagtattgttgtagagacaacgaagctaaacttgtggaagaagtttattggtcatcaatgcatgatatgtacagaaggaattatgagtattgttgtggagtgttcggtgtctttttaattggtcagattccttcatgtgaagccttgtgcagaacagcaatagagggaagtgttaatttacactatataagtcttggtgattcaatggccaagcaaatatcatatttcaaaaatcacttagaaactgagcgcaaacaaaatcaaaattggaaacgtagtatagaagactcttcatattctgatgaagctaaagctgaccacttgcagaggattgctgataaagatcggattctagatcagtatgaatatgcactaaaaacatcacttgcgttaaacaatattgatttcgatgaggttgatctaaaatggccaagtatctttgatcgtttcaaagaaatagggcaagaagtagagtatagaaccatttatgctgccttatgttctcaggcacataatgatgcagaggactctctaaatagaataatgtccagaattacagcaaatgtaaatgggatggaagaagctcaatggattgaacaatacaacttttctctatatatggctcttactgctttagattatcacgcttttgcctctgcaatgtaccttgcgaagtttggaattgacgtaaaagaaataatagagttaaagaataatatcattcagtcaattctttatataattgaaaatggtcctcacctggtctttgagaaaataaaattaaagtga

SEQ ID NO: 83398 - DNA, 984 bp, Citrobacter koseri
atggcgagaagatcgaagaagagcgaaccggaaacgctgcgtaaacagctcctggcgttaattaccgattttgaacacaagctcgcagaggactccctgcgggaacaggttctttctctcatccctgccaaccatctgctgcgggatctcggcagctctctgatgcatgaggagggctgtaattcggcacgcgaccgtattctggcttatctcatcaaatatccgcgcgtcatcattcacggggatgaactgatggtggtggctgggataagtgagtatgcgcggcggataagagagctccgggtccagtttggctggtccgtattaagcggtaccacgctgaaggaaatgattgaacaggatgagataacgctggaggaactccaggcccgcacaatgaccgctcttaaaacggatgtctatgcgctgatgacaacagaacaggacagggaggccgccctgcgatggaatgaggccaatgttctgcggcgaagtaagctttcgacgaaagacaaaattctctcctatctgcgtaaaaacgttggccgtccggtaacgggcgaagagttacgttatcttgcaaacgacagtaaggaatgggcccgccgtacacgcgagctgcgtaccgaagagggctggccgatcgccactaggaattcaggccgaccggagcttgaagtgggggcctatttgctcgaggaagatcgtcaggctgaggtacatgaccggaaaattcctgatccggtgcgcgtagccgtccttgagcgcgatcatcacgcctgccggaactgtggctggtcgcacgcccgtaaaacagcaaatgacccccgaacgttccttgaattgcatcatatagagcatcatgctgacggcggtgaaaatacgctggataacttaattacgctctgtaatgtctgccatgatgacgtgcaccgccgtaaagtgtcgggggaggcgcttttacacctgttgaagggagcctga

SEQ ID NO: 83399 - DNA, 1131 bp, Citrobacter koseri
atgagtaaaaccaataaattaaagatcattgatctgttttgtggcgctggcggcttgtcctgcggcttcatgaaagggaagaatggcgctcattttgaaagcgttctggctctggacaatgataaggcggccatcagaacgtacaacgccaactttggcgagcatggcatcgtcaccaacatagaagagtggatcacggaaaataccgtgcctgaagcggatattgttatcggtgggccgccgtgtcaggggttcagtttactcaataaaaaccgggaaggggaccatcgacgcgcgctctgggaaccgtacatggacatcattgagcgatcgggcgcttctgtctttgtgatggaaaatgtcccgggtctgttaaccagtgatgaattccaggatatccgtgaacgtgcggagagtatgggttttttgcttcttaacccttctgtgctgaatacggcagactatggtgccccccagacgcgtaaacgtgccattgcgatcggcattaagaaagaccgttttgtgcgggggggcatccctgcgttcccacctgcgccgtcgcatcggcatcccgataaagccggagatctgcctgcctggctgacggtcagagaattcatcggtgatttaccggagccggttggtacagaagtgcgcgatctgcctccgcctttagatctgcattttgggcgaaacccgactgcactgtctcaggagcgttatcgtgctgtgccggtcggcggaaaccgtttcgacttacaaaaaaacagacccgatattacgcctgcctgctggatcaaaaaaacgtccggtggtacggatttgtttggccgtttgtggtgggaacgtccttccgtaacgattcgcaccgagttcttcaaacccgagaaagggcgttatctgcatccggaatcacaccgcccaattacgcaccgggaagcggcgcgcctgatgagtttcccggatgattttgttttccttggatcaaaaaccgagatcgcacgtcagattggaaacgcggttccacccgtgtttgcgcaaaaaattgcgacctatgtgcttactttaatggaatatcagattcaacatggcgagaagatcgaagaagagcgaaccggaaacgctgcgtaa

SEQ ID NO: 83400 - DNA, 207 bp, Citrobacter koseri
atgaatggtgctttgttagtcgtagatagctcacttacaccatgcgatggctctctgctcgtttgcaggatagatgatgagttaaggataaagcacactaccgtgcccatccaaaacctcatcaagtcaatctggagaacggaaaatgtgaagagataccaggaaaaactggtgactacaatgcggcactgccagtatctggagtga

SEQ ID NO: 83401 - DNA, 240 bp, Citrobacter koseri
atgtttgttgagctggcttgtgacaagagaaacgttgccgggttgccaggtgcaagtagcatcattctggcagaactgacaaagcgggtgcaccggatttttcccgatgccgaggtgaaggtaaagccaatgcaggctaatacgttaaacagcgactgcacaaaaactgagaaagaaaggctgaaccgtatgcttgaggaaatgttcgaagagactgatatgcggctggtaaacaaatga

SEQ ID NO: 83402 - DNA, 210 bp, Citrobacter koseri
atgatgagcataggcaacatgattattgccggggtaagaatatactttcctcttggcaccgctctccctgttccgacatctgaactcaggacatttgccatcgtcagcaaagacctgccgggatatctggtgcttgagcacaaaaacgggtattgggttcctgttctgacacaactttttgatgattcagcgcatgccattccagtttga

SEQ ID NO: 83403 - DNA, 465 bp, Citrobacter koseri
atgagtcacaccaccagtctgtacacgcccgccagtactgacaacgcggctctcatcaccgctactttgctgcctgatgcgcagcggctttatttctggccgctgcactttggtggcattccgcagtggatactgctggagccgcgcatcttcggctggatggaccggctttgtgagaattacagcggcggcatctggcgtttttacacactcaccaatggtggggcctttatggcccccgagtcggatgatgagaacgatggacagtggacactgttcaataccatgaatggcaaccgtgccgaaatgagctccatggcggccggtatcgcggcctgtctgctggaatacagccatcatgcctgccgaacggaatgtgatgccatgacggcccactattaccggttgcgtggctacgcactaagccaccccgaatgcagcgccatcatgcacctcaccgactga

SEQ ID NO: 83404 - DNA, 1557 bp, Citrobacter koseri
atggctagcgaaaatgataaaaatcataaagttagggtcgcacagtacttgaggatgtctaccgaccatcagcaatattctttacataatcagtccgaatatatcaaagattatgctgaaaagaacaatatggaaatcgcttatacctacgatgatgcaggtaagagcggagtcagtatcataggccggcattctttgcagcagttacttagtgatgtagaacaaaagaaaatagatatacaggctgtattattttatgatgtgagccgttttggtcgttttcaaaatagtgatgaagctgcatattattcctttctatttgagagaaacggtgtagatcttatatactgttctgaacctattcccactaaagatttccctttagagtcttctgttatactgaatataaaaagatctagtgctgcatatcacagcaggaatttatcagaaaaggtatttatagggcaagtaaatttaataaagcttggttatcatcaaggcggaatggctggttatgggctgagacgtcttttagtagatgaaaatggcatagctaaagaaatattgggcttccgcaaaagaaagagtattcaaacagatagggtaatattaattcccggaccaaaaaatgagataaaaattgtaaatagcatctatgatctctttatagatgataacatgccagaattcattattgctgagagactaaatgaacagaatatacctgcagaaaatggaacattatggactcgtgcaaaaatacatcaaatcttaacaaatgaaaaatatattggaaataacatatataacaaaacctcatctaaactaaaaagtaggcttgtaaaaaacccaaaaaatgaatgggttagatgcgacaaggcatataaacccattatttcaaagaaaaaatataataaagctcaagaaataattcagctccgatccgtacatttgactaatgaagagcttttagaaaagctaaaacaaaaattagaaactaatggaaaactatctggctttatcattgatgaagatgatacaggcccttcatcttctgtttacagaacccgatttggtggtcttttaagagcatatactttgattggttataagccagaacatgattacagctatatccaaataaatgaagcactaagatcattttactcaggcataattgaggattttaagggggaaattttaaaaagcaactgctatatagacgaatataaatatgcaccaatgctttacatcaatgatgagtttttaatttccgtccttattactaaatgcacacatatgaaatcgggtaaacttagatggaaagtccggtttgataactcacagaaagcagacataacaattgttatacgaatggattcacaaaatattacaccacttgatttttatatcataccaaagattgaaaacgaatatagtaaaatgtgcatgacggaaacaaacaacattcgattagatctctatagatttgataatctggataaacttctacaaattattactcgaatgaaagtgagggaactatatgctgcctga

SEQ ID NO: 83405 - DNA, 531 bp, Citrobacter koseri
atggcgagcaccgaagaaaaacttctcacactcctgctgtcggcggagcatctgaaagaggccgcaaaagagcagcagaaagccgtggcggattcgctggcggtggcaagggaaaccctgaaaggctaccgggaaatatcagacagtgtggcacagcaggtacgggatgaagtccggcaggaagtgcagaaaatggatgttgcggggctgattggcgagcgtatcagcgctgattttcagcgtctggaaaaatccgtcgggaacatgaaaatcaatgcggacgcgctggacaaggaaatttccattatccgcagcaatatcatcgcggagtacaacacgctgcggggttacagctggaagtggtttgcaggggttgcggttgcctttgtcgtactgatatttgccacaagctggtttgtgaaaacggaactacaggacaattacaacgcgtctgctgccgtctatcagaaagtggcagaccttgaaaagctgctgacaacggaacagaaaccggaaaagaaaaagaactga

SEQ ID NO: 83406 - DNA, 936 bp, Citrobacter koseri
atggcaacctatcatctcagcgtgaaatttggcggcaagggtaaagcccttgctcatgccaattacatcacgcgggaagataagttcagtcagcgaaaagatctcgaacacaccgagcacggcaatatgccggaatgggcgaaagatgaccccgcccatttctggcaggctgcggatgcgttcgaacgtgccaacggttcaacgtaccgggaaatcgagatagcactaccccgtgaactgaacgaagcgcagcggctggagcttgtcagggattttgtgaagcaggaaacgggcggtcaacatacgtattcgtttgcgattcacaatccgcaagccagcattgacggcggcgaacagccgcacgcccatatcatgatgagccagcgtgttgatgacggtattaagcgcagcccagagcagtatttcaggcgctataacgccaaatttccggcgcgtggcggcgcgcgcaaggactcagggcataatttaacccctacagaacaaaaacaggcactgaaagccctgcgggagcgctgggagcgtacgcacaacgcgcatatgaaacgatatggctttgagcagggttttattgatagccggtcactgaaagcacagggtatagaccggaaaccggaacagcatctcggttttgaagcagccggacgactggacgacagccagaggcaggatattaaagacagccggacgttttcagtcgtggatgtgcctgaacaggcgaagcatatcgaccacagcgaccgtagctggatgaatgccagcggtatcgaggtaaaccggaaggaactggtcagatctctgacgcatgatatctcgcagcagtacgggcgggagatggctgcacgggtcacaaaacagggaaatgttgaaatagagcgcgtgaaatccctgtcacgcggattttccataagcaggtaa

SEQ ID NO: 83407 - DNA, 387 bp, Citrobacter koseri
atgcggatcagtaacgtcgaatggcttaaaaagcgcataggcttcatcagaaaactgggggagaaaacaacacggcaacggcagattatcgacctgctggatgatgaggcttcgctcagtgagactgacaggcgactgctccacgttctggcaaccgctgaaaaaaacgagttgcaggaacaggatgccgcgcagaaaaaggcggttcaggcacggatttcaggtcagaaaaaccgcagggaacgtaatcacaaactgttcttggctgccggactgatgattgacgcgggactggttgatacaaaaacgggtgagttgaattttgactctgaaaaattactgaccgcgctgaaacgggtacgctgtgatctggaaacatcggtgtga

SEQ ID NO: 83408 - DNA, 645 bp, Citrobacter koseri
atggaaaagcactttatcaatgaaaagttttcacgagatcaatttacggggaatagagttaaaaatattgccttttcaaattgtgatttttcaggggttgatttaactgatactgaatttgttgattgtagtttttacgacaggaatagcttggaagggtgtgattttaatagagccaaactaaaaaacgctagctttaaaagctgcgatttatcaatgagtaattttaaaaacattagcgccttaggtcttgaaattagtgagtgtttagctcaaggagctgattttcgaggggctaattttatgaatatgataactacaaggtcatggttttgtagtgcttatataaccaagacaaatcttagttacgctaatttttctagagtcatattagaaaagtgcgaactgtgggaaaatcgctggaatggcactgtgataactggcgccgtgtttcgtggctccgatctttcttgtggggagttttcatcgtttgattggtctttggctgattttactggttgtgatttaacgggtggggcgcttggcgagcttgatgcaaggcgaattaatttagatggagtgaagttggatggagagcaggcgcttcagcttgttgagagtttaggtgttattgttcaccgataa

SEQ ID NO: 83409 - DNA, 543 bp, Citrobacter koseri
atgtttggatttttgaagaaaaaagtacaagaggaaactcctgatacttttattgttggagggcttctgttcctccagccacgtaagccagatgacatggatcctataatcaatggacttgttgggcaggttgaaaaacgactcgtaagtgagattggaatttatcaattttttatggaagaaattgatgcagcaagacagggtaatgacactgccagaatgcttgagaaatactctggtttttatccgattgaatatcaatatgctttatcacaatcttctgaaatggatactgaaaatagtgctcagagctatttgaacaatgatgtaagtccagtcctcattggacattttggaatggacattgcgacacaatgtcgatgtgacatcgttgcaattattttgaacaagcatcgggtattgattgatcaaatcagggagaaagtggcacttgctaatcacaatcattttgtaacgcagggggatttttcttccgccgacaaatggattccagtactaaattcattacagggaacatcataa

SEQ ID NO: 83410 - DNA, 171 bp, Citrobacter koseri
atgttattcgttccgttaattccagaaaattttgttttcatgatccaccttaagtatcaagtaacgatattgaatatcgtatcaattattaaaattgaatcaaatttaattttttgttttcttttgtgtaaagtaggggctaattgttcaagattgaagtgtgacgggtaa

SEQ ID NO: 83411 - DNA, 630 bp, Citrobacter koseri
atggtctacatttcttcgatggaatattatggccaggtgacagaaggttatgaaaatgcgacggaggataagctaggctatattgatttaagcaagccgagaagttgctaccctgaaagtaaacgtgcttgtgaaactttatgtaacgcttatgcaactcagtacaatattaatgtttgcagtgcacgccttgcccaaacatttggtgctggggttcctttctcagataatcgagtatttgcacaatttgccaagagtgcgatgaataactcagatatcattttgcatacaacaggtgagtcagaagggaactattgttatacagccgatgctatatatgcgattttattgcttttgactaacggtaagaaagggcaaagttataatgttgcttgtgaccatagcagcattattaacatggctaaacttgttgccgaaaaaatagcagataatagaattaaagttgatatccagatacctcaagatttgaacaattatggatatgcgccaactgtaaaattgagacttaactcagataaactacgagcattaggctgggaaccttcaacggatcttgaacacatgttcaaaagaatgatcagcagttgggaaatatctatagataagtag

SEQ ID NO: 83412 - DNA, 510 bp, Citrobacter koseri
  misc_feature (313)..(322): n is a, c, g, or t
atgactcttaatgagcatgatttagttatagctccacttaacacggaagtacctttctacattgcagggcatcgtagtcatagctcccatcgaagccatagttctcatagatcttcgtctggtggtgggtactatggtggaagcactccttattatcctaaaacatacagttcaccaagctcatcaggctcatccacttcaggtacaaattcgccatcgtcttcttcatctgttcgttcgcttcgctctaatgacaccgatgcctctacgaccacaaactctgctggaatgaatggaactactcgtgcaagtnnnnnnnnnngtttgatcatgcgagtgcagttcgcattactggataaagggttttataacggcaatatagacggaagtatggggcctgcgacacgaactgctatcaaaaattacagagttgcatatgggcttcctactccagtaagagaaacattagatgctcagttattgaactctttgaatatactggctcgttaa

SEQ ID NO: 83413 - DNA, 228 bp, Citrobacter koseri
atgacgatgttcagttctgtttataaatgccttacaagtaatctgttgcgacagttaaataataaagaagctgttcttagagagctaaactcccttgttaattacattgataataaccagaaccaggcagaagatatttataacacttttaaagctcaatatgaaatgaaagtaattgagggagagttaacccatgaagtcgttagagtaaaaaatgttagattataa

SEQ ID NO: 83414 - DNA, 1158 bp, Citrobacter koseri
atgcctcccttgcggtgtaaaaaactatctggtaacaaggtggtattggtgtatcagtggccggtaaacttaggcgcagccctatttggaataataaaggattacactttgagacttaatgatgtaattactgactgcatcaagcttaaattaagtggaactgcaacagataatgttattcaatgcttcggtggcaatatactgaggaaagaaaatccagttttggcaattgaagtttcgagcaaagaaatattgctttggatgatgcaaggagcaacgaatgtacatgtttatatcagcgcaggtacttttcatgtaaatgcaatgtatgcaccaactttccgctttccagcagccagaatttattttatgaaatcaaaagaccttttctggtttggccatattggtgtttatctcgaacaacacggaatcaaactcactccagtagatgatgccagcttctcaaagctcattgatgatacggggtatgtacaacgctataagccgtggtacgaaaaaaggaaagctgactcgagattattcgatggtctgctgggagggcggcttaagaatactgctgtagatcaagctatatggctgtcctccgatggaaagtgcttggtttgtggtgaaaaagccgatcgcatggcgaccagtactgtttgggggaagtcagggatgatgattggtatgcagctgtgtttgacacacgaagaggaatctcagaagcaatcaattcttctcaactatctctcgaatcatttgggtggaatagttatgttctcaaatatgcgtccactgactactgaagaaatgcttgagcagacctgcgaaatacttaaagtaaatttcaagtgcactatcatgaaagttgtaggggaaactgtaaccgcccgaagaccgtcgggggtcactgtagtaatcagacaccaatctccgtcgaattatgcctatataataatgacccctgaaggaaaacagttgtctagggtcgattcagccgatcatcacaaagtaccttacggccctgatcatgtacattctgatctgcgtaaatctacaaaaaatgtcgtcgagacaagctttacatacggacatatttgtctagatatgaaactacttttaaagctgatccaagaggctgaagataaattataa

SEQ ID NO: 83415 - DNA, 615 bp, Citrobacter koseri
atgaatatcgattttatgttctctccacccatattgctttctctttcagcatgtattgcaatgcttttattctacctgttcaatattctgattagttctaatctgacgcgcccggtagtatgtatgcttgggctttgctttattggtgtcggtgtatttgtacatattacttccctcgatatgctagagcgttgcagggaactggaagtgtctggaaatgtgtcggcgaatgtactatcgcggtttgagcgctattacttagtgttcgcctacatgcttccattcatatcaggatcaattggcaccaacgttatttccgatgcgttactgaaacaccatacttatgagcgttccttttctttactccagtttatccaagatcttgcgcaaattattttgatgcctatcggtctcgccataggtattgttggcagcctcttctggttcatacatttctcgataacttccgttcgccgccttcttagttccaagcttccaagagcctgtcgctggataaatttgaaagttttaaaactcagcatcattacccgaaataattttcgctcggtgcgaggtagcctaaaagagccaggtcccggtgacactccccaataa

SEQ ID NO: 83416 - DNA, 291 bp, Citrobacter koseri
atgattgtaagaacctggcacggctgcgttccacttgaacatgcggatggctttgctaagcatcttgagaaaacaggagtagagcattcaaagagcatcccaggaaacataggcgcgtttgttcgtagagaaacgcagggtggctgggagcatttttttcttgctacctatactggcaggatctccagtcggtgcaggcgtttgctggagaaaactatcacgtggcggtcacctacccggatgacgaagagtttgaactactttctgatccttacgttttccagcatgtag

SEQ ID NO: 83417 - DNA, 726 bp, Citrobacter koseri
atggagaaagttttgcttttgataccctctcgcgaacaattcaaaaaatggactatgccaaccagagtctcatttattgcagccgtgtttggaattcctattgccttaattcagagtagcctctggattaaagatatttatcaatggctacagcccgccccattaaaattaagtgctcaagacctactcgtcattgataagaatccaacaaaattagatatagtcgcagtagaaaaatatagtcctaccgatgaaatggtgactatttctattaaaaattcatccaatgttacagcaaaaaatgttagggtcgatttttataattaccattcaaaaagattcacaaatgatgataaatattctaacggaattaatggttctggaatggatattagctctggagaaacccgaaagtataaaatagcttcgttaaacacctataaaaatttctttaaccctgaggccccaggcgcacaacttctaaacgtctcaaagaagaatcaatctgcaaccacgcctgagttgcaagcaattttttgtggaaaaaccaatggagaaatagctccatgtgatttcagttactcgacccgatccacggttgtagatattaaatatggttctatctttgggcaaagataccatgtacttactcagttttataatgagtttctcaatggtgacgtgaagtttctaccaagtctggaaacacctttaagcgaggactaa

SEQ ID NO: 83418 - DNA, 501 bp, Citrobacter koseri
atggatagtaactatataaaatggatgccgtttattacgggtgttttaagtgctcttattgctgctgttgtcgcatgtttcattgcgatgttcaataaccatactgggcggattaagtctcaaaatgaatggcggagagacaaagctattgaagtgataatagaattcaaaaaagcaatgaaggaatatgataacaccctccatcttaaggcatctgagttaagcaagggaaattgcaatgataaaaatcatgctaaacatctactaattattaattctttatgtgatgacaaaattgattctttagcaattgccaaggggaatcttgaattgtttataccaccagaagttaggagcgaattaatgaaggcgtacgtttcctatacggatcgcatcttgaattactatgcatcttatgctattaacgaggctcatggaataagtaaaaccgatattgatttacagcctttatttttaaaaataattgacaatttaaagtga

SEQ ID NO: 83419 - DNA, 1053 bp, Citrobacter koseri
gtgttagtaaaatactatggtttggtttttgataaaaaaaccaataacttttcaccaagaaccgaatttatatcaaacggtttatttagaatgactcagcctaaatatcttaatgataaaggaagtgaggcaaggctatggccatactttaatcgcttctcacccgcagattatgcatgggcaaagagagaacatgataaaatacaacttgaccctttttatactccttcaaatgaagagttagaaaacttttttttaaaaccgtgcggttctagatatggcgatacttttccgcatatgttacgtcaagaaggttttaaatcaatgggtgaatatgatctgatacaattgactaacgctgcaaagaaaattaataaattcttagttgaagcattaagttgccacttaggagtcctatctctttcaaagtctgacacaaatgaacttatgtggacacattatgctagtgaaggtcaaggcctggcggtaaccttcaatcaaaaccatcctttttttaatcagttgcccccgaaagatgtcagctatgctgcggagaaaagagcttctctcacatactataaaggtatgatgagaataaatggtattcctttaaaaaattttaacacacatgattttagcaacccattaaatattattcaattactctctggaaatggtatcgatatagtcgatttttcagaacgcttactatattcgaaagccgagaaatggtcttccgaagatgaagttagaattgtatgtcctttgatattctgtgaaaataaaaaagggccgttagttcaaccgaaatttgaattagagttaacctcagaacaatccattcttttcgaagagtattctgagattaacctcaagaaaataccatttgatgcttttgaatccatagtttttggttatgatatgagtgaatcagatatggcaactattgttagattggttaaggaaaacgatgagttatctcatttaaaattgcgtgttgccacacatgatatttatggaaacgttgagatatccgatttagttgaaaaatga

SEQ ID NO: 83420 - DNA, 1338 bp, Citrobacter koseri
atggctataacgtttacaataccatacgtaatatttctgattggcgttgcttacaacattcagcaaacattagatgcaatgggaatatctcttgttacaccccctatgattgattcaaatgggcatgctatggttacagcatttgatattcaatatggtattgatttcttgctctttttcctattaatttatctagctctaatgtttattttttctcttgttgcagcatattgtattggacggtggaaaggtttttttgttggatttattatttggtgtactccgggagttatgtctatattaggttattggcctaagattcaatttttaccagaaatgtataatattgggggggctggatatttaggtggttccattggtatgacatgtctattacttatggggttaatcaccggttggatatttttggtaattctaaccgatatattcagtttacaagatcggtttcgtcatttttatgatcatatttggtattcaatggctattattgctgccatattttttgttgccgatactagttccggtgagaatcaacgtcgtttacaagattacactcgacaatttcaacaggcaagcatgtatttgtcatatcagcttaagcaatatgatcaatattgtgctcaggaaaaactagatttggcatcatgctcttgggctcatcgtatgcgccaagaattagcagaatatggaacttataatgctaaattaattatcgcagtgatgccaaaaacgactagcgagctctatcttatttataatagagatgctgatgataagacagttaagaatattcgtgaagaatttgatgtttataataagttaaagtgtcaaaataaatcaagttcatatgattgtgtggcgacaccaactgcttattgtatagttaacgatcccccaaaggatttttatgattattctcaccgaaaaattatagtagcaaatgaatgtattatccctacattggttcttttacaaaaaagaattgataatgaaataaaaaaagtcaactcttcgtcagaacaaaagcatatacgctggtttttctactttgtattttctattcttgccggtggtaaagttgcgaatgcaacagctcgcttgagcaaatcagggaatagcaagataggtttaggagatgaacagcagataattctcatggccaaatttacttggcgtttattaatttcaactttccattttatttcctatgctttcaatgtattagtttccctttcatcaatcacattcacaaaaattagaattactactcatcagttagtaaaaagaaggcagacggatgaatccaatgatatgtag

SEQ ID NO: 83421 - DNA, 897 bp, Citrobacter koseri
atggctaaatcaccattatcacattactcaccaaaattctcaaataagccgtgggcagataatgaaggctatacatcttattttagctgctcatatagtcacgagattaagaagtcacataaaggttggaaacagtgggggcgaaagcgaggtctttactcttggtcagtagaaaaatcattggatcaagaattggaaactatagctagtcctatatatgaaaaaatcaccagttacaacgaattatctgaaacagagcgcattatttggtctcagtttatattgtctcaattagttcgtacgccgacatatataaagtatgagaataaatctcatgaattgtttggaataacagaaaaacccaagcattgtcgtgttggatgcagggattgtttagatttgaatttcctagcaaatagagattggtgcttactcttggctcatgatgatgatttttttgtaagaagtgacaatccaatattgcaaacaggatttattgaattaccgagtacatgcttattttatcctttaactcctcgactctgttttgttgcatgttccatgcctgatgattgggatgcttttaataataagcctaataaaacttgcgggtaccagctagctaaaggtaaggctcaccaaattaatttttgtttggcaaaatcggcaggagaatctttaatcatttccccaagagatgatggggttatagctgaaaaaatgtatagtgatattctggggatttatccccaaccaccatttcctctacacatattagatggtaatgatcctaaattagcatttgaaagtattcgaaaaattatgagttacactgatggtattgattacccaaattggcatcctgatgagattgggcctttttatcagaaaaaatag

SEQ ID NO: 83422 - DNA, 375 bp, Citrobacter koseri
atgaaaaatcccagttccgctcttactgactggcaggcgcttcatagtcttagtcttgcgatgttaaaacttgctcattccggtttgtgggatgagctgatcgcacatgaaattaactacgtccggttaattgaaagcattgcgaaaaatcccatctctacggctccccctgcacagatagagcaagcacgtaatctgctcaatatggttctgaaaaatgagaatgaattgaaagaactactgactgcccgaatggatgagcttcgaaagctcatcaaccaaacaggtaaacagcaatctattacctcaacttatggcaaactttcaggtaatatcctttaccctgaaaatttaacccgcgatccgcaaatatga

SEQ ID NO: 83423 - DNA, 411 bp, Citrobacter koseri
atgtatgcaaacaatggcgtcagggcttaccagcaagtagggttggaaagcgcagtgatgagcgcaagtcctcaccaactggttgtcatgctttttgatggggcacttagtgcccttgttcgcgccaggcttttccttgaagaaggcaaaatcccggaaaaaggtgaagcattatccaaagcgataaatattatcgacaatgggctaaaagctggcctgaatatggaagtagacagtgaattgccagccaatctcgctgctctttacgactacatgatccgccgtttactattggcaaacttacgcaatgacatggatgcaatagccgaagtcgaggatttattaaacaacattgcagatgcgtggaaacaaattggtcccagtgtttcctcgctccaggataatatctga

SEQ ID NO: 83424 - DNA, 1440 bp, Citrobacter koseri
atggcgagtagcacaattagtggtcttggggtaggttccgggcttgacctgacaacgctatataacaatcttgaaaccgctgaaagaagtaagcttacgagcattaccagtcagcaaagctcttacaacgcgcaattgagtgcatttagtaaattacaaagtgctctgcaaaacttacaaacagccacagctgcactggcaaaaacggatacatggaatgcagcatccgttagttcaacgaacgcttcttttactgcaacgacggctactggcgcgacggtgggttcttatgatgtgcaagtcctctcaatggctaaagcccaggtattaacctccgccagccagaccagtgcgacagcaaaactgggcgacgctacaggcactccccgcacaattaccattacgcaagaaggaactgacgaaccactcaccgttcagctttcggattcagatacaagtctgaacggtattgccagcgcgattaataaagcgaacgggaatgtgacggctacggtagtaaaagccaaagacggcgaatacacgctaatgctggcatcgaaaacctctggcaccgcaaatgatatgacaattaccgttacaggggatcaggcgcttcaggatattattggttacgactcagcgagccagacaggggcaatgacacaacaaattgcctcccaaaacgctgttgtggtgatcaacgatatcaccatcgaacgttccagcaataccatcagtgatgcgttacccggggtgacactcacgctcaaagctgaaggtaaggatagcgaaattcttgacgtgtctcgttcgactgacgacacgaagaaggcgatcactgactgggtcagcgcgtataacgctctgcaatcgaccatcgcctctgtaacaaagtatgtaaaagtcgatcctggctccgataaccaatcagcaaataacggtgcgcttattggtaataacacggtacgttcagttcagtcacaattacgtgctctgctgacgaatatacaagaaggttcttatgccattctggcacagttgggcgtgacgcaagacactattataggttctggtggcgagcagggtaacctgaaaatcgacgatgatacgttaacaaaagcactcagcaataacccggaagctgtacaagcttattttatgggtgatggcaaaatgacaggtctggcaactcaaatggataccaagctgaccaatatgctgagcaccactacgggaaaagaagggatcattaaaaacgccactgacggaattaacagtacactcaggaatttggataaaagatacgacgccatggaagccaatattgaagcgacaatggcgcgttataaaatgcaattcacgaatctcgataccttaataaataaattaaacaataccgctaactatttgactgaacaatttagcaaatccaatagttaa

SEQ ID NO: 83425 - DNA, 840 bp, Citrobacter koseri
atggcagtaatcaatactaacctgatgtccctgactactcagaacaacctgaacaaatctcagtctgcactgggtacggctattgagcgtctgtcctccggcctgcgaatcaacagcgcgaaagatgatgcagcgggtcaggcgattgccaaccgtatgaatgcgcagatcaaagggatgaatcaagcggcacgtaacgcgaatgatggtatttccctgattcagaccgctgaaggtaacctgaacgaaattaataccaacttacagcgtgttcgcgaactgtctgtacaggctgcgaacggaacgaacgatgctactgatatcacttcaattcaggccgaaattactcagcgtctggaagagattgatcgtattgctggctctgctagctttaatggtaaaacattattcactgaaaatgatgtgacgattcaggttggtgctggtgacacgactaatgatactatcaccatttctaaagatgctttaattaaagctacgtccgcagatcttaatactgccctgaagtctgatggcacaattgatttgggcgataatactaaagcgcaggcatttattacagctgttgacgatgctctggaaaaagttgatggtgctcgtagtaatttaggtgcaattcaaaaccgcctagagtctacggttaacaacttaaacaactctgttaacaacctgtctgctgcgcaatcccgtattcaggatgccgattacgcaactgaagtttccaacatgagccgtgcgcagattctgcaacaggcaggtacttccgtgctgtctcaggcaaatcaggttccgcagacaatgctgtctctgctgcgttaa

SEQ ID NO: 83426 - DNA, 126 bp, Citrobacter koseri
atgaaactcatgtgccgtatcgaacctatcattcatgtccagaccggtagacggattggcggtgaggtactctgccagccggaaggggaagatccagagctatggaaggtgcgaacaagtccctga

SEQ ID NO: 83427 - DNA, 1668 bp, Citrobacter koseri
atgccaatggagaactgtaagcaaatgaacgccgtagaaattgaacaagccatcacggatcttgcagagcaaccctttgatcccatagagtttccttatgctttccttgaagcctttggtaacaaggaaacgactatcaaacgcttgcgagccggagcatcgaataagtccgatttgggcggcgttcttcagaccaataacattcacattttggctagtgaagaagggcaagtaacacaaatgcttgcttcactcaaggccagcccggcaacaggcaaggccaaggccaaattcatcctcgccacagatggaaaagacttcgaagctgaagacctcatcagcggccagactgtcgcttgtgcctttaaagactttcccgatcacttcggtttctttttgccactggcaggtatcagcactgttcggcagatcagcgaagacgcctttgacatccgggctacaagccgcctgaaccgcctttacgttgaactgctgaaagacaaccctgaatggggtactgcggagcgtcgtcatgacatgaataagttcatggcgcgtctaatattctgtttttttgctgaagatactgacatattcataggcaaggggcgctttactgacaccattgcacagatgagtgagcgcgatgcttctaatatgcacgaggtcatcggcacgctctttcgtgctatgaacactccagactatgagcgtgccgcagtaggtattccgcgctgggctgcagaatttccatatgttaacggcgctttgttctcaggtacggaagaggtgccgcgcttcagccgtatcgcgcgctcctacctgcttcacgttggcaatctggactggaccagaataaatccggacatattcggctcgatgattcaagcaattgccgaagatgaagagcgcggtgaattagggatgcactacactagtgttcccaacatcctgaaggtactgaacccactattcctcgacgaactgcgttcaaagctggaagatgcgggcgaaaatccacgcgctttgctcaatttgcgcaagcgtatcgcccgtatacgcatttttgatccagcctgtggttcgggcaactttttggtcattgcttataaagaaatgcgtgccattgaagctgagattaactggaggcgaggcgaacctgatcgcccatctgatattccggtcacaaattttcgtggcattgagctgcgcgacttcccggcagagctcgcccgccttgcgttgattatcgcagaataccagtgtgatgtactctatcgtgggcagaagttggccttggccgaattcttgccactacgcagcgagaattggatcacttgtggaaatgcgctgcggatcgattggtatagcttaatggatgtgagtggctcaggagttaaggtggtttcagacgatatcctgcaaactccacttgatcaagctgaaatcgagtttgaacatgaaggcagcgaaacatatatctgtggaaaccctccttataaaggaaccaaaaatcaatccgctgaacagaaggcagatctattgtttgtcttttctaaggaaggtgcgaataagcggggaaattcttctcggctgactcagtcatttcatttcttcatgtttgagccgattttttctcccgtaaatgccttgaatcagcctatttag

SEQ ID NO: 83428 - DNA, 1062 bp, Citrobacter koseri
atgcgcagcgccttccgggttatccggaccgtgcgggaaaaacacgcctgtacaaaatgcgacgctatcgtgcaggcccccgcgccttcacgtcccatcgagcggggtatcgccggagcggggctgctggcccgggtactgggctcaaagtatgcagagcataccccgctgtaccgccagtctgaaatatatagccgccagggtgtggaactgagccgctccctcctgtcgggctgggtggatgcatgctgcaggctgctgtcaccgctggaggaggcgcttcggggctatgtcctgagcgacggcaaactccatgtcgatgataccccggtccagatgctgctgtcgggcaataagaagacgaagtccgggcgattgtggaagtacgttcgtgatgaccgcaacgccgggtcagcagtcgcaccggcggtgtggttcgcttacagcccggacagaaaagccatccacccgcagacccatcttgccggcttcaggggagtgctgcaggcggatgcgtatgcaggattcaacgagttgtaccgcggtggccagataacggaagccgcctgctgggctcacgcccgccgtaaaatccacgatgtgtacgcccgcacgccgtcggcgctgacggaggatgccctgaagcgtatcggcgggttgtatgccatcggggcggaaataaggggaatgccggcggagcaacgtcttgctgaacgtcagcagaaagcgaaaccgctgctgaaatccctggaaagctggctgcgtgaaaagatgaacaccctgtcacgacactcagagctggcgaaagcgttcgcgtacgcccttaaccagtggccggccctgacgcactatgcaggcaatggctggacagaagccgataacaacatcgctgaaaaggcgctgcggatggtcagtttggggagaaaaaactggctgttcttcggctcagaccacggaggtgagcgtgtagcgctgatgtacagtctgatcgggacgtgcaaactaaacggcgtggatccagaaagctaccttcgtcatgtgcttgacgtcatagctgactga

SEQ ID NO: 83429 - DNA, 369 bp, Citrobacter koseri
atgataaatcttcctgcaggcactaaaatctggctggttgccggtatcaccgacatgcgcagcggcttcaacgggctggcggcaaaagtgcagacggcactgaaagacgacccgatgtccggccaagtcttcatcttccggggctgcagtggcagtcaggtaaaattgctgtggtctaccggcgacaggctgtgtctgctgaccaaacggctggagcgtggtcgcttcgccagacccgcacccgtaaaccgttccccgaatcactccctcgtgacgaaaaacggctgttgtcggcggcatcatgctgcccggactgtggcgattcactgcgctggctgggtgaagatactgctgaacagctggagctga

SEQ ID NO: 83430 - DNA, 714 bp, Citrobacter koseri
atgtctcaagctgagcgtcgttatgaccgcctgtctgtccggctgtcgctgattatcagccgtctgctcgcgggtgaaacgctgaatatgcgcaaactggcggcggagtttggcgtctcggagcgtaccctgcatcgtgatttccgcgagcgtctgatttatctcgatctcgaatatcaggatggctgctgccgtctgctgaccgggggccgtcaggagatccgggaggatgcagcattgcagtttgcctttcagtcaggcactggcgcgttgtttcctgatatggaccaccatctggtcagttcattgctgagtggtcagcgcgcctcaccatgccttatctggcatcagggggcatccgtaccgtcttcccgcccgggcatcttcacgcgactggtcagggctgtgtcagaacagcggagggtaaccctgctggctgacgggtgccgttgcgacagccttgctccctaccggctgattttcagcactggcgagtggtttctggtgggagaacacctcggccggatgaccgtttttgcgctgcacaccgttcactccgtgacgtttcacgcggaaaccttcacaccagacgggcatttcacccgcattctgtcacgccctgattttttacaggcgttacctcatttccggttcattggtgaagtgctgtccggcttcgtccctgaaccacatcaacccgcaacagaaggataa

SEQ ID NO: 83431 - DNA, 216 bp, Citrobacter koseri; identical to SEQ ID NO: 40220

SEQ ID NO: 83432 - DNA, 948 bp, Citrobacter koseri
atgatgaaaagggtaaaactttccacctgtgcgaaatggctggcgctcggcctgcttgttgtggttaacagcagttatgctgcctcccgggtgaaaacagcggctcaggcgattcagtgtcagcctgatactcaggaaaacggctacaacgggacctgtccgtatcctgccgacctttaccgcgccgaccccgtctggaaaaaagatatggaatcggccttacagcaggcgggtatccgtaacgtactgggaccggatggcagtctgaacgggccggaagagacgctggagcccgtcaccgtcggtggcaggcaatggcttcagggctcgctgtgtgagcaggggaactgtggcgaccattatctgcgttttttatattcgccgggtacgcatcaggttctgggtttctacgttgacggtcaggcacgctgggtcgggaaaccaccggcagaagaagcgaaactgctgcgcggcaatgccgacgccatcgcggagaaaacaccgttaccgtctgccctgcccgcagcacctgcagcgcctgcggacggggcaccggcagacactatctggacctttaagggcgatggcggcaaatcgttatggcaggtctgtggtggtcagaacagcagctgtaccattatcgctaacacgaagtattacgttgctgtgctgaaccgtaaatccgcaacgggttgtgctttcggtgatttttatgtcgctgcccgggataccgcatcatggcaacagtatgataccggcacctgcagcccggatgcgtatatccgcaagggcagcatcaacaacggtcagtatctgtccgtcgatatcggtatcaacggggtgctggtgaagcagttcccgattggttactggtcaatgcgcaaggaattttccggtagccgacgcccgtcgtggtcaaaggttaaggaaaaaaatcagcagcactga

SEQ ID NO: 83433 - DNA, 234 bp, Citrobacter koseri; identical to SEQ ID NO: 40218

SEQ ID NO: 83434 - DNA, 822 bp, Citrobacter koseri
atgcgactcgccagccgttttgggcggacaaaccagatccgccgcgaccgaccgttaacccgcgaagaactgatgcagcatgttcccagcgttttcagcgaagacaaacacgactcccgctctgagcgctattgctacataccgacgataaccctgctggataacctgcagcgcgaagggtttcaccccttttttgcctgccagtcacgcgttcgtaaccctgaacgtcgggaacacactaaacatctgcttcgcttacgtcgggcgggccagataaatggtcagcatgtacctgaaatcattattttaaacagccacgatggggcatcgagttttcagttacttccaggaatattccgcagcgtatgtacaaacagcctcgtctgcggacagtcgtttggcgaaatcagtgttccgcatcgcggcgatattgtcgggaaagtgattgaaggtgcttacgaagtgctcagcgtctttgaccgggtggaagagaagcgagatgccatgcagtcgctgctgctacctccaccagcacaacacgcgctggcaaacgccgcactgacgtatcgctttggcgaagaacaccagccggtgactgccacacagatcctgacgccgcgacgcaatgaagatcgccaggacgacctgtggacgacctaccagaggctgcaggagaacctgctgaaaggcggcctgcccggacgtaccgcacagggtaaacgtacccatacccgcgccattaacggcatcgacggtgacgtaaagttaaaccgcgcgttatgggtgatggcggagaacatgatggatttattaagccagtag

SEQ ID NO: 83435 - DNA, 471 bp, Citrobacter koseri; identical to SEQ ID NO: 40216

SEQ ID NO: 83436 - DNA, 480 bp, Citrobacter koseri
atggaacaccagttaccgttgtttgcccgtgaattatcctctgccgaccagcaaaccatcagggaggcattaaccctgctggcgtgccagctacgcgaacccggcgcgtcatttacctccagccatgccgtccgcgactggctgtgcctgcagctcgcctcagtggagcgggaagaatttaccgcgcttttcctcgataaccagcatcggctgatagcccacgaaacgctctttaccggcactatcaaccatacgcaggtccatccccgggaagtggtgaaggccggtctgaagcataactgcgccgctgtcattgtggcccattgccacccgtcagggcttgccgaacccagcaaggccgatcgtcagatcaccacgcgtattcagcaggcgctggaactggtggatatccgtctgctggatcacctggtggtcggcggcatggaaatagtttcgttttctgagagaggctggctttaa

SEQ ID NO: 83437 - DNA, 645 bp, Citrobacter koseri
gtgagcagaattatctccaccactgtttatacgctggatgaactctccgacgcggcccgcgagaacgcccgcaactggtatcgcgaacatgcgctgaatgatgactggtatcagaacgtgtttgacgagttcaccggcatctgcaatatcctgggcgtggatattaagctgtacaggatccctctgctgtctggcggcagccgtcagcaccactgcatctggtccagcggtttttgccatcagggcagcggcgcggctttcgagggtgattatgcttaccaaccgcaggccgtataccggatcagggaacattatcctgaagacgctgaccttcaccatatcgccgatttactgcagaccatccagttgcacaacagcggcgagcttcgcgccacgatccgtcatcacggcctgcatatccatgaatcctgtatgaccgtcacggtcgaacgccacagcctctccgggcaggacatgaccacagacagtgaggaggcgataaccgaagccatccgggcgctggcccgctggttatacgactggctggaaagcgaatacggctggcagacatcccccgccattgttgacaacgacatcatcgacggtgaacacaccttcactgcatccggccagcgcttcggctga

SEQ ID NO: 83438 - DNA, 357 bp, Citrobacter koseri; identical to SEQ ID NO: 40214

SEQ ID NO: 83439 - DNA, 375 bp, Citrobacter koseri; identical to SEQ ID NO: 40213

SEQ ID NO: 83440 - DNA, 378 bp, Citrobacter koseri
atgcaaacccaaacactatccccaacgcgggaggcttcaccacgcccgtctcccgtagagatctggcagcagcttctgagccacctgctggatcgtcactacggtctgacgctcaacgacacacctttcggcaacgatggcgtaattcaggagcatatcgacgtcggtatctcactgtgcgacgcggtgaactttatcgtggagaaatacgatctggtacgcaccgaccgtcgcggtttcagcgcagaaacacagtcgcagcttctcaccagtatcgatattctccgcgcccgcaaagccaccggactgatgacccgcaacgactacagaacggtgaccgacatcaccaccggcaaataccgggaggtgcagccatga

SEQ ID NO: 83441 - DNA, 492 bp, Citrobacter koseri
atgaagctgtccctcactgtggaagctgatgccatcaacgtactggccctgaatgcgggccggatcgctgtcgatatcgatggtattgaactggccgacctgattaacgtggtctgtgacaacggttattcccttcgcgttgctgactcccccggaaagctggttgttgaagatccgcttccgcccgtcgcccgcgtcaactgtatccagtgcagtaccgcgcatatcacggagcaagacaatgctctgctgtttaccctttcacaccagtatgaagactttggcgaccaggaatggatttcttacactggctcgggttatctgctctacctgggggcgtggtcatttccggtcttacacctcaaacgcctcggtctgtcgaaagcctgccgccggttagtggtgacgctgatgcgtcgctacgccgctggaattattcacctggatgcctgtggcgaagtgctgcctggctttgtcaccttcgactggtaa

SEQ ID NO: 83442 - DNA, 204 bp, Citrobacter koseri
atgccggaattaaccaccgaagcggcactcaacgttctgattgactggctgcagaacaacatcgattgtgggaacgtgattatcttcgacaacgacaatgacgacactgattcagccgtactgctgccctggattgtgatggcgattagagacgtttgcgctctccgatatcttcagcttatgcatcaggccagtacagtttaa

SEQ ID NO: 83443 - DNA, 351 bp, Citrobacter koseri
atgatatcagaccttactctcaccgaacccgaagtattaatcagccacaccgatgtgatttgctccaccagcattgagcgtattgtcacgggacgtaatgtcgctctggcgcagattgaagcgctgatacagcaacttgacgatgtctcgacgctgacccgcagtattggcggcaaaaccgcgctggactgggcaatgaagcaggattttcgttgcggctgctggttgatggagaaaagagaagcggcgatgaaagccattacccgcaatctcgatcacggtatatggcgggatttaatgaagcgctcaggaatgctgtcgattatggacgctcaggctcgtgaccagtga

SEQ ID NO: 83444 - DNA, 405 bp, Citrobacter koseri
ttgaacgcggcgtcattaaacgtcttcaaggagctaagctgggatttcaagacaaactcgccctgcaaatttggtgcgaaaatcatcgtcacgggactggtcaaattcgacaggtggggatttgggcttaactggggctggcagcgtaaccgcttagcagtccttgaacatatgctaatgcttctggatggcaagcctgtccccgacaaccgcgctgacgttacccgtcggctgggagaccatatccatgagaataggcacagtaatcgttatgaggatgagatgtttgcgatcaaatactttcagaaggggacggcgcatatcactttcaggcgacctgagctggttgataagcttaacgacatcattgcccggcactatccgggagcgctggcggcaaagtaa

SEQ ID NO: 83445 - DNA, 342 bp, Citrobacter koseri
atgaaacctcaatctgcaacaacttcgcgggcggcgaagccttgcctgtcacccgtggcagtttggcaaatgctgctgacccgactgctcgaaaaacactatggcctgacgctaaacgacaccccgttcagtgatgaaactgtgattcaggaaaacattgatgccggtattacgctggctgatgccgttaattttctggtggaaaaatacgaactggttcgtatcgacaggaatggatttagctggcaggaacaatcaccatatcttcgggccgtcgatatcttgcgggcacgacaggccaccggcttgttgcaacgaaaccgaaaacacgctgcattgtga

SEQ ID NO: 83446 - DNA, 462 bp, Citrobacter koseri
atgacaacagcgacaaaaaacaacctcgcatctgctgctaacgaatccgaatttgaactgaccgtaacgcagatacccgacgaacagcgtatctgcttctggccgcagtactttggctctatcccacaatggataacgctggaaccccgcattttcgcctggatggaccgcttctgtgacgagtacaacagtggtatctggtccttttacacgctcagcaatggcggcgcgtttatggcccctgatgctgacgttgacgataaatggcatctgttcaacggcatgaacggcaatggtgcgcaaatgagcgcggaagccgcaggtatcgctgtctgtctgattgaatacagccatcacgcctgtcgcaccgaatgtgatgccatgactgagcactattaccgcctgcgggattacgcccagcagcaccctgaatccagcgccattttgcgcattattgattaa

SEQ ID NO: 83447 - DNA, 1530 bp, Citrobacter koseri
atggtcctgggactagcaatagcggtaggtgttcttgctgttttattcgtggttatgattgcgatacatattttattgaagaaaaagcatgcaatcgttcttttacgttatagcaagattgttgatcttgaagaagaagcacgaaaaatgaaaaagactatggatgatgaagaaaagtccagtcgcaatgctattgataaagaagtgaaagataagcgtactgaaatagatagtgaagtgaatgaaaaacgccaagcgatagataaagaggttaaagataaagatgcagatatacagaggcgtgaaaaaatagcgagagagctcattgcgtctcaggagcaagagctaaccgacttaaaaaaatcttataatgaaaagcgccaactcttgttggaactctctgcaaaattagcagaagtaagtgattctgttgatatgattgattatggtatatataaaccgcgtttcgactatcatgattccaaagctttccaggaagccattagttacaataaagaaaggcagaaaagtctaattcgacaagatgctgcttgtgactttaatactagttgggaggtgaatggtagtaagtcggaaggtaaaaaaatgatcaagcgctatgtgaaattgctcgtaagagcattcaatagcgagtgtgatgctgcgataggaaaaattaaggtaggcaatgttgagcaacttaaaaaacgcattgaaagcgcttttgatgcactcaataaatttgggcaatcaatgaatataagtatcacttatgattatctgaatttgcggctggaagagttactgctttgccacgaaaaagaacttaaaattcaggatgagaaagaaatccttagagaagaacgtgaattgcaacgagaggaagagaaagcacagcgtgaatacgagaaagctattcgcgatgaacaaaaggcagagaaagacttccagaaggcaatggaaagagccagaaaagagcttgaaaaggcaaatgctgaagaaaaatcccgtattgaagccaaaattgctgatctcgaactccaggtagaagaggcaagagctttgtctgagcgcgcaaaatctcaggcgcagttaactcgaagcggtcatgtctatgtgatttctaatattggagcgtttggagagaatgtctataaaattggtttaaccagacgacttgaacctgaagatcgtgttaatgaactgggatctgcatcagtgccttttaaatttgatattcacgccttgatttactcagatgatgctccagcacttgaaactagcttgcacaatgaattttccgcacaccggataaacatggtaaataatcgcaaggaattctttaaaattaatttatcagatattgaaaacaaggttaaatcacttggttttgatgcgtcatttacggagtatgcacttgctcctgaatatcgtagtacgctctctattttgaattcaaaagacaaagaaaaatcaattgcagatgcagtagagcataaagttgaagagttgttccccgaaatggcttaa

SEQ ID NO: 83448 - DNA, 1998 bp, Citrobacter koseri
atgagtgagaatgaaaccccaataaaaaagtctgaaaaccatattaacaagccggtgtttttcacctcggcgttgttaatatttctccttgtcgcctttgccgcggctttccccgatctggccgataaaaacttcaaacttctgcagaatcaaatcttcaccaacgccagctggttttacattctggccgtagcgctgatcctcctgagcgtgacgttcctcgggctgtcgcgctacggcgatattaaacttgggcccgaccacgcccaacctgatttcagctatcattcctggttcgcgatgctgttttccgccgggatggggatcggcctaatgttcttcggggtggcagaaccggtgatgcattacctctctccgccggttggtaccccggaaacggtcgaagccgccaagcaggccatgcgcctgaccttcttccactggggactccatgcatgggcgatttacgcgatagtggcgttgatactggccttctttagctatcgtcacggcttgccactgaccctgcgttcggcgctgtatccgattatcggggatcgtatttacggaccgattggccatgcggtcgatatctttgcagttatcggcaccgtgcttggcgtggccacctccctcggttatggcgtgctgcaggttaacgccgggcttaatcatctcttcggcgtgccaattaatgaaacggtgcaggtgatcctgatcgtggtcatcactggcctggcaacgatttcggtggtgtcgggactggataagggcattcgtattctgtccgagatcaacctgagcctggcgctgttgctgctagtgatggtgatgttgctgggacctacggttctgctgttgaaatcgttcgttgagaacactggcggttatctgtccgaaatggtcagtaaaacctttaatttgtatgcctacgagcctaaatcgagcaactggttaggtggctggacgctgctgtactggggatggtggctctcctggtcaccgtttgtcggcatgtttatcgcccgcgtctctcgcggcagaaccatccgcgaatttgtgaccggcgtgctcttcgtcccggcgggtttcaccctgttatggatgaccgtcttcggaaacagcgcgatttatctgatcatgcagaaaggggcgacggacctcgccaataccgtccagcaggatgtggccctggcgctgtttaatttccttgagcacttcccgttctcaagcattctttcgttcatcgccatggcgatggtcatcgtattttttgtcacctcggcagattccggagcgatggtggtggataccctggcctccgggggctccagcaatacgcccgtctggcagcgtattttctgggctgcactgatggggctggtcgccattgcgttgctgcttgcgggcggccttagcgccttgcagacggtgaccattgccagcgccctgccgttctcggtgattttgttgatatcgatatacggattgctgaaagcattgcgacgggacatcaccaagcgcgacagccagaatatgaccaccattgcacctaccgctgcgcgtaatcctattccgtggcagcgcagactgcgcaatatcgcccatctgccaaaacgttcgttggttaaacgttttatggatgatgtcattcagcctgccatgacaatggttcaggatgagttgaacaaacagagcaccgtaagccatatcaacaacagtggcgaagaccgtattcgcttcgaagtggatttaggcaatgagcttaacttcatctacgaagtcagactccgtggttatgttgctcctacctttgcgatctccgggctggataatgaggagcagcaggcagaacagcataaatactatcgggctgaaatctacctgaaagaaggcggtcaggattacgatgtgatgggctggaatcaggaacagattatcaacgatattctcgaccagtatgaaaagcatcttcacttcttacatttggttcgctaa

SEQ ID NO: 83449 - DNA, 300 bp, Citrobacter koseri
atggcgctgatactgatcccggagttaacccgcgcaggttactggccggctgaatatgccgacagaaatcaggccgttacccggcaacggctgacgggaagtaatgcgtactggaaatggcacacggcttacaaccgacattcggtggcagaaacggcaatgtaccgtgtcaaacagctgtttggcgggcatcttacgtttcgggattatgatgcgcaggttggagaggctatggccatgatccgtgccttaaacaaaatgacgtgtgcaggcatgccagaaagtgtacggattgcctga

SEQ ID NO: 83450 - DNA, 231 bp, Citrobacter koseri
atgagaaccgtatcgatatttaaaaacggcaacaaccgcgccatccgtctgccccgcgatctggattttgagggagtgagcgagctggagatcgtccgggaagggaactgcatcatccttcgtcccgtccggccgagctggagctcattcgccatgatgggcagggccgatccggagtttatggcggagcgcggggacgttgtcagctacaaaggaaggagtgaacagtga

SEQ ID NO: 83451 - DNA, 396 bp, Citrobacter koseri
atgcttgatacccgtttctgcgcgttcatcctgcgcgagcagccggaagccgtgctcacgcgactggagcaggcggtgctgcgcggccaccgtatcgtgatctctgccgtcacctgggccgaactgtcacaggcggcacgggcgtccggtcccgccacgcaggcactggccgacgcgttctgcgccagtctcgatgccgtgctggcctgggaccgggctgctgtggaggccaccactgaagtgaaagcgtccctggctgcagccggaacgcccatcggtccgaacgatacggcgatcgccgggcacgccattgccgccggtgccgtactggtgacgaggaacgggggggagtttgagcgggtgccgggactcacgctggaagactgggcccgctag

SEQ ID NO: 83452 - DNA, 999 bp, Citrobacter koseri
atgaataaagatatgcgtgacagaaaagaagaaaaaagattacattcactctacaccatgggcatcctcgacagtaacactgaggagcgttttgacaggctgacaaggatcgcctcaaaacttttccaggttcctgttgcgctgatttcattggttgatcgagatcgccagtggttcaaatcagcctgtggtctggatatcagatccacgccgagaactgattctttttgtgctgttgcggttgaaaacgggcgtccgcttgttgtcaacgatacgctcagtgagccagcattttctcataatcgtctggtgcttaatgaacccaatatccgcttttacgcaggctatcccgtacacctgccggacggcgaaattgccggaacaatctgtatccttgatactaaaccccgtgaatttacagctgatgagttttccttactgcaggatcttgcttttattgttgaagacgaattccggataatcaaccaggcaacgactgatgccttgaccgggctctgtaacagacgttctttaacactgatagcggacgaaatacagcgaaaatcgctcaggaataacaatacattttgcctgatcatcatagaccttaatgatttcaagctaatcaacgacacctacgggcatgcggaaggcaacagagccctgaaggatttttctgaaatactgcagaacacagtaagtgaaaatggtttcattgcaaggatggggggggatgagtttgccgtgctcatcccggaagcatcggaaacggaaggtgagacgtttataacgcagatgaacgaatccgtaaaaaaatataatttaaagcatacagactacagacttgatttctctggcggagtggctgtctttgataaatacaaactaaactctgtttcacttatgatgaaacaggccgacagagagatgtatcgtaaaaaaatcatcaatatgatgctgtcagaagttgacggtcgagtcatacagcgttatcgttag

SEQ ID NO: 83453 - DNA, 705 bp, Citrobacter koseri
atgggttctgtcaacaggttcggacagaaaactggtcgtgaaaccagaaactggtccagacgggaaaaaccggaaagtatagaactgaatgggttatggtgtcagatcagaccattaaggacagatgatgcagaaactctttttcatgaatggtatagtattgatgatgacagggactggacctacctcagtcacaataaaccacaatctatactacaatgcatcgactattttaaaaaactaagtgaatgcagccattctattcatcttgcagtgacagataaaaatgacaacctcgtcaaggggatattctctgtagataatattgactgtgataatggtgtttttgaacttgctgatgtcaactggactccgcaaatgaaaagaacaagagtaagcactgaaagtatctaccttgttctgtctctcttttttaataaacttggctacagacgatgcgaatggagaacaaacatttataatgaggatgccatcaaatcagcgaacaggctgggttttactcatgaaggtatattgagagacaaaaaaatcacaaaaggttattccgaagatatttccgttttttctgtaacttccggtgactggcccgggataaatgatgcattgatagcctggctcaggaaggaaaattttgatgagcgcgggagacagataagacacctcagtgatttttatctcccctga

SEQ ID NO: 83454 - DNA, 1584 bp, Citrobacter koseri
atgattatgcttaagataaaaaaatggatttattttggaaaaaagaaatataatcctgtgattttgatattttctttacttttatctggtttgtttttcttcatatccttagaagggatcgcatacctgatttttcgggacagaattaaggattatacttctgatgttcttaaccgtgctgagtctctcatgcttcaggttgatactgttaacgcggcagcaagatcaagctcggatgtgagcagttggccctgttcctatgagaatcttcagcatctcagaggtgttgtttggccttattctctgattaaagatgtaggctacacgtcgaaaatcgggttaacctgtagcgctatttgggggggtatgcgcctcccattatctcttgatcattttgagaaaaaaatccaatcaaaggaaggcatatggttgtttggtgttgcattaaaaaatggtatttctgccgatgcatatatctccaaagaaatagcagttattgtctcaccattttcatttaagcgatttgaaactgatctgcatacaaaaaatttcagtgcagtagtgggaaatagaaaacataatgaacacttctttaaaattggacctgactctgcgcttctggataaacatgccaacctccctatgagatttattcagtccgaagcgtgcagtcaccattatgatctctgcattgccgggggaggatactttttgaatgtattatttgaacactggagtataactgtattattagtaatagtatccctaatatcaggcttgatgatctatatcatcattatggataaacgtgaaattaatgactccctttcggtaagatttacaaaagcgctaaaagatagaagattatcagtggcctaccaacctatttacaagattaataacgataccatctgcggattcgaatctttacttaggtggaaggatgaaagacttggaaatattggtcctgatgtgtttatacctctttcagaaaaagaggggttacagggagaagttacattatacgtagttacacatgcaataaatgattttattcagattgccaaacaaaacaaattatttctaagtataaatattaacgcgtgtgatcttgattcggttaaatttaaggaaacacttacttcactaatttcaaaatacaatattccctttgggacgattattcttgaaataacggagcgtcaaggcggagattttgaagaaatgaaagaacatatcgatttttataaaaaacatggcgtcaggtttgctattgatgattttggaacggggtattccaatttaaatttgatcaccgctcttgacgttgatgaaattaaaatagacaaatcactgacggatgctatcggcacagaatcgctgagttacaatctgcttcccggtttatatgaaatgttccggaatatttctgataaaattgtgtttgaaggggtggaaacgcaggagcaggtgaattatctgaagaagttctggccacagagtagtgctcaggggtggtattattcccgggcgctgacacttgcagaagcgacagaacttatatgccgacataatacaaaataa

SEQ ID NO: 83455 - DNA, 1659 bp, Citrobacter koseri
atgaaaatagtgattgttggtggtgttgccggcggggcatccgctgcagccagagctcgtcggttatcagaggatgtcagtattgttgtgtttgaacggggaagcgatgtctctttcgccaactgtggattaccttatcatataggcggaaaaattcctttaaggcagtcactgattctgaaaaccccggaggattttaaatcccgctttaacatagacgtccgtatctgtcatgaagtgacgtcagtggatccggttaataaaacggtgacggttaaaaatctgacctcaggggaggtctatagcgaagaatgggatcgtctgctcctcagtaccggcgccgctccggttgtccctcctttgcccgggctacaggaagagggtgtctttacgctgcgaaatcttactgacatggatgctatcctagggtggattgagcaacatcacgtagctcacaccacgcttgtcggggggggatttatcggacttgaagtgatggaggctctgagcgaacgggggatcagtgtgaccctgctggagatgggggaacaggttatggctccggttgatcctgaaatggcatctgccctgcatcaggaaatccggagtcatggcgtggatctgcgtctcagaacggcgctcaccgaggtactgcggacagagacgggattccgcgttgcactgtctgagggtgggtttctgcagaccgacatggttattctcgccatcggggtaaaacctgagaacagccttgccacaggagccgggctcgcagtaggtaaacggggaggcataagcgtcaatgcctgtatgcagaccagtatccctgacatctacgccgtgggggatgccgttgaaaccccagactttgtctttcaggaacccgctaattttcctctggcagggcccgccaaccgccagggacgcattgctgctgataacatgctagatcgtcacagcctttaccatggcagtcaggggacatccatttgtaaggtattttcgctgagtattggcagcgtcggtgcgaatgaaaagcagctgaaagttcatggcacccgatacgagaaggtttacgtccatgccgctgatcatgccggttactacccgggggcaacgatgatcagtctgaaactgctgttcagccccgataccggtaaaattctcggggctcaggcatcagggaaaaaaggggttgataaacgcatcgatgtcctgtctgtcgcacagcgcgcggggcttaccgtcaacgatctcgaacatcttgagctgacttatgctccaccttttaacagtgcaagggacgtcgttaaccaggctggtatggtggcgacaaatgtaatgaaaggagatacggtcatatgtcatgtcagcgatgtgttacaacgggaaccgggcagttattgtttacttgatattcgctctcctgccgaactgacacaatttggtgaatatcctgacgcgctatccatccctcttgattccctgcgggaaaaccttggaaaattgcctaaagataaagaaatttttataggatgtcagagtggcctgcgcgggcatgtggcataccgtattctgcaggctcacggcttccgggcatataatctgagtggtggttttataacctggcaggcggttacggagtcaatgagtaaataa

SEQ ID NO: 83456 - DNA, 351 bp, Citrobacter koseri
atgctcatgaatgaagacacaaaacgtcagacagatatgaagaatgcggccctgagggcagcagatgtcttacggggactggccaacagcgaccggttgctgttgatgtgtcagttaagcctgggggaagcgaatgtggccgggctggaagcggcggtcggtatcactcagccgaccctgtcccagcagctgggtgtcatgcgccgcctgaagctggtcgagacccgacgggcaggtaaaatggtatattaccgtattgaggataaccgtatcatgacgttgttaaataccttatatgatctctactgcccgcaggcaggcaccggtaaaggaagccataacaacgaataa

SEQ ID NO: 83457 - DNA, 477 bp, Citrobacter koseri
atgagtaaacaaatcattgatattggtattgctgaatcatcccgggtggagattgcagacggcctgtcccggcttcttgctgacacctataccctgtatataaaaacacattactatcactggaatgtaactggccccatgtttaacagcttacatttaatgtttgaaaatcaatacaatgagctggccactgccgttgatgatatcgctgaacgtatacgctcgctcggatgcttcgcgcccggcacatatcatgaattttcacgtttaacagcggttaatgaagataaggatattccggcagcaaaaaacatgattgaaaatcttgtccagggccaggagaccgtggttaaaactgcacgctccctgttcccgctcgttaataatgcgaatgatgaagccacagcagatctgcttacacaacgtatccagttacatgagaaaactgcctggatgttgcgtagcctgcttgaataa

SEQ ID NO: 83458 - DNA, 438 bp, Citrobacter koseri
atgaattgttatcttgatgccagaaaggcccatacctgttgtatggtctgtagttcccgcgacaacaaccctgatacggttaacttaatgttttcagagcagccggatggctctgtatgtgcggactacacggccaatcacaggcatcaggggtatacgggtcttttacatggcggaatgacgagtaccctgctggatgcagcaatgactcattgtttgttcatgcagggtgtgcaagccctgacggctgaactgacggtaagattcatttcacccgtttgtaccggagacaaactgatggtatgtgccagactgcttgggcaacgcagggggatttacttgcttgaagcatggctgacaaaaggacagcagacagtggcacgtgccacggcgaaattcattgttccgtcgcaggatattgctctggcgcatcgctag

SEQ ID NO: 83459 - DNA, 168 bp, Citrobacter koseri
atgcgtgccagggtgggcgtcagcatcatcacggaaacgggcgctgttgccattcatgagtttatttcatcacgggcggtgatttttatcagacccgtattgtgtataaaccaggagccggaatgtgtggaggaggcagtaatgatgccgggggagcccctcagctga

SEQ ID NO: 83460 - DNA, 462 bp, Citrobacter koseri
atgatcacagccattccagtgaatgacgaccgggtagcaaatcattttaccaaagcgagtcaccttgtcctggtggatgagcgcggtgtggagctcagccggacagaaaaccccgcgctgggcgcagattgttcaggtaaacggaagctggttgacctgctggttcaacagcaggtcagccgcgttgtgctccgtaacatcggggaacggatgctgggtaaattactggggcatcagatcgcggtgtaccagactgactgtggtcgtcgtttgttcactgaactgtgtgatccggatacccgtgttctgactgaactgaataagccggagcagggacgccagtcctttaatcatgaggcgaaagggaaaaaatgctgtcactctgacgggaacacagcagaaaatgcgtgccagggtgggcgtcagcatcatcacggaaacgggcgctgttgccattcatga

SEQ ID NO: 83461 - DNA, 321 bp, Citrobacter koseri
atgccaagacccagaattccccgtaaaatctgtggccgccctgcggatacctgttttaagcccaatgcgcgaccgatgagccagcttgaacatgttcatttaaaagaagatgagtttgaagcgttacggctggtcgatttactgggcatgcagcagcaggaagcggctgttgcaatgggggtttcaaggcagacactggccaatgtcctgaaagcagcccgttttaaggttgtggactgtctcactcagggcaaggccttaataatgcactctgaaagggaaggagttacacaagatgatcacagccattccagtgaatga

SEQ ID NO: 83462 - DNA, 228 bp, Citrobacter koseri
atgaaaaatgtacttgttatctttaactctcagcccgctgaattagtaaaaacccttagggaagccaatatcatcaggcgcgtatacccgaatggagaagaggctcatctcaaaatcatgctttccgggatgcactcggttggacaaaagaaatgtgagatttttatagcttcagacagagacctgaggcatgacgaaattataactgctgtgaatgctctgctgtga

SEQ ID NO: 83463 - DNA, 288 bp, Citrobacter koseri
atggatctttttgcccgcagggttatcggctggagtctgtcagcggatgccgataccgcactgataagcagtgccctgcggatggcctgtgaaacgcgtggtcaaccgcgagatgtcatgttccatagcgaccaaggcagtcagtttgcagcccttaaatatcaacaacttatcttgaattacagaataaaccaaagcgtcagtcggcggggaaactgctgggataacagcccgatggaacgcttcttccgcagtctgaaaacagaatgggtgccgacggagggttga

SEQ ID NO: 83464 - DNA, 237 bp, Citrobacter koseri
atgcgcctgacgggcatttttgtactaatgttttccgggctgacaattgctcaggttcagatatttcatcagacgcacggcacggtaacggctcatcgggacgccattttggaccagcatctcagctattcagctatagtgagcgcccccgcagagccccggctctggttccacgcccgtcgtatttcgctgtacagtctgtacacgcgccggattaaccgtatcgcgtcgttttag

SEQ ID NO: 83465 - DNA, 174 bp, Citrobacter koseri
atgaacaagaaaaccaaacgtacattcaccgctgagttcaggctggaatgtgcacagctgattgttgataagggctactcatatcgacaagccagtgaagcgatgaatgtcggttctaccacgcttgagagctggaaaagcaggttcgccgcctggaagaacagaatacgataa

SEQ ID NO: 83466 - DNA, 204 bp, Citrobacter koseri
atgaccaggcaagaatggctcttacttctccgacgctgtacttccaaggatacacttgaaaaagtaattgaaaaaaataaatatgctttatccgatgacgagctggaaggtttttatgccgccgcagaccatagactggcagaactgacaatgggaaagctgtatgacaaagtgccgccaagtgtgtggaagtatgtaaagtga

SEQ ID NO: 83467 - DNA, 525 bp, Citrobacter koseri
atgaaagtaacatcgatctccgcaacatttacaactgttatgcctgcttttcttttggtgggatgcgcagcgtcttttcaaccggttttacctgattacaatggtacagatgtagcctatttacggtttgacaacagtcccgtttatacgagccttcgacaggcatctggtcaaatgcttcaacctgtaccttacattgtaaaatcgtcaggcgagccggataaggaatacagtgttaatgctcgattctcaatcatgggtattaagtctagctacggaaaaaaggtagaaggcagtgctcctgtttcctcaaaatttgctgacaaaagctatatggaatataaagttaagtctggagagacctatgccattaagtgggtatttacagataaaggaatgtacaatagcttcgatcgttcatgggttggttcagtgacacctgaagctggacatacatacgaagttactattggtggcggttcagatggtaatgatgtagtaattaatgacataactagtcgctag

SEQ ID NO: 83468 - DNA, 864 bp, Citrobacter koseri
atgaataaccagcaaggtttgcagtcattaaaccattcgatttccggcctgccgcaatgggtgtctgaacgcatactgcagcagataaatcagttaacccagtacgagccggtgatcggcattatgggtaaaaccggggcgggaaagagtagcctttgcaatgccttgtttgttggcgaagtatcgccggtcagcgatgtggcagcctgtacccgtgaacctttgcgatttcgcctgcaggttggagagcgctttatgaccatcgtggacctgcccggcgtgggcgaaagcggcgctcgcgatatcgagtatgctgcgctgtaccgtaaacaacttcctcgacttgacctggtattgtggcttattaaggccgatgaccgggcgctggcggtggatgagcacttttatcatcaggtgattggggaagcttaccggcataaggtgctgtttattatcagccagtcagataagactgaacccaccagcggtagtggtcaattgtctacggagcagaagcagaatatcagccgcaaaatctgtcttctgcatgaactgttccaacccgtgcatccggtatatgcagtgtcggtccggctgcagtggggactgaaggtgatggccgagcggatgataaagtgcctaccgcgtgaggccagcagccccgtggtggcgcaactgcagtctcactttcgcacaacagcagtccaggaaaaagcgcgtgacgattttggtgaaaccgtcggtgcagccctagatgcggtaagtgccctgccgataataccagctccggtacgggcagtaatatgcgcggtgcgcgacaccgtagtgtcagtggcccgggccgtatggaatttcttcttctga

SEQ ID NO: 83469 - DNA, 615 bp, Citrobacter koseri
gtggcgagtaatcctctatcaccgaccaattcagaaaagccagcccacgggctggctttttgctgcccggaatttaacgaggatgagaacctccgggggcaagaggttcgactcgagcgtagcgagagaacgttgcgcgagcaacggcccgaagggcgagccacgcagtggcgagtaatcctctatcaccgaccaattcagaaaagccagcccacgggctggctttttgctatctggaatttaacgaggatgagcattgtaggcctgataagcgcagcgccatcaggcaggatcgatcgctcattttcggtaacgccggatggcggcgcaggcgccttatccggcctacggctcagtattgtaggcctgataagcgaagcgccatcaggcgggctcggttgcccactttcggcaacgccggatgacggcgcaggcgccttatccagcctacggagcagcattgtaggcctgataagcgcagcgccatcaggcaggatcggtcgctcactttcggcaacgccggatggcggcgcaagcgccttatccggcctacggcgatttcgccattggcaaaaaatgtgcatcacttctcactgtttgttcacgtttttgtga

SEQ ID NO: 83470 - DNA, 330 bp, Citrobacter koseri
atgattgtgatgggattcaaaaaaggagcggggccagagaacgaatttgccggatggcgacgctggcgcgtcttatccggcctacaggtgtgcgggttgtgtgaacattgccggatggcgatgctggcgcatcttatccggcctacggatcggattcctgtaggccggataagcgtagcgccatccggcacgcatttcagattacagtttcctgaagaagtcgttatacagcatatacaggtgcgcggcgctccaggagaagttcggcgcgccctgctgtgcgccggtcaacgggttgtagttttcctgaatcggcccgtcggcggttag

SEQ ID NO: 83471 - DNA, 2085 bp, Citrobacter koseri
atggccagcaataagcaattgaatgccacaataaccatagggggagccgtcagcagcagcctgaaatccgcctttggtactgtggccaaatcaacggagagggttggcggtgccatcgctgacctgacccgacgacaaaaaacgctcagtcagtcaattcagacgtttggccgccagggtaaggacgtggacgggatgcgccagcgttatgcagcgctgggaagtcagattgaccgacttaaatcctcatatgaccgcctgaaccgcgttgaggctgcgcgtgatcgcaacatggcgaagcgtgaagggtacaaatccggcatcatgggcacagtggcacttggtgcgtctgtggccgttccggtcaaagccgctatggattttgaaaccacgatggctgatgttcgcaaagtggtggattttgacactcctgatgggctgaggaagatgggcgatgccatcctggaaatgtcgacacgcctgccaatggctgctaacgacattggcaagattgttgccgctggtggtcagtcaggcattgccgccaaagatcttaccgcgttcgctgaatccgccatcaaaatgggtgtggcgtttgatatcagcgcggaacaggctggccagtcaatggctgaactgcgttctgctttccgcctgacgcagccacaggtaaacgtattggctgacaaaattaactaccttggcaacaacacagccgcgtcagccaaagatatcatggagatcgtgcagcgcatcgggccgcttggtgaagtggctggttctgcgtcaggttcgattgcagcgatgggggcaacccttcgcggtatgggcgtggccaatgagattgccgccactggcatcaagaatatgctgctgaccctgacatctggcaaggccgccacaaaagcacaggtggcagtgtttaaacagcttggatttactgcaacgcaggtttcaaaatccatgcagttgaacgcggatgaaactatccgtgtcatcctggcgaagatttccagactacctaagcacgcgcaggcatccgcactggctgaactgttcggtaaggagtcaatcggggccatcgcgccactgctgaccaacctggaccagctacagggcaatcttaaaatggttggagacgctaccaaatacgccggttcaatgaacaaggagtatgaggcagccgcagctaccacagccaatcaggtgaaactgtttaatggccaggttaacgccctgggggtcaccatcggcagcgtgttgttgccagccgttaacggcgtgctgaaaaccgtaagcccgtggattggcaaggttgtgtctctggcaaaagaacaccccgtggttacgcaggctattgttggcaccgctggcgcactggcaaccctgaccgttgtaacttacggggccggatttgcctggacgttcctgaaaggtggattgctcaacaccgttggtctgtttgcccgcgttgctgctggtgccactctggctggcgcggccaacactacagccgcagcaggcacaacgctgcttggaaccgcgttccggttcgtaggtaaatccattttgtgggctggccgtgcgctactgcttaacccgattggcctggcggtcactgccatcgccggtggcgcgtacctaatttacaagaattgggaaccgctgaaaaagtggtttaccgacctgtgggcagacatcaccgcaacgtttgacgcagcgatcgggaaaatcattgggctgattaacagcgttggcgagaagtggaacaccttcaaaactacagttagtgaaggcgttggcgatgcctggaagggtactaaacaattcttcggcattgatgacgacagcagcaagccagccgcttcccctggtgcgcctgtgctggtggcaccggcaccgccgcagatggccaaccgtgctggcggaacgcagattaccaccaatgacagttatcaaatcagtgtgcaggccacgcctggcatggatgaagatgcactggccagaaaggtggcgcagcagctacggcagcagcaatctgtaaggcagcgcagcatgatgacggatggcgtgctaacaccataa

SEQ ID NO: 83472 - DNA, 210 bp, Citrobacter koseri
atgacacgcatgaaccccacacgaaacgatgacccggcaacagtatgggatgcgtatgtagtggccgccctgcgaaaaatgcccgtatgcaccacgcaggaggaaaaagcccaacatacagaactgcgccgtaatgaagccctgcaactggccgctgccgccctgcgggctgctggcgaatactccctggcagaaaacctactcgattaa

SEQ ID NO: 83473 - DNA, 333 bp, Citrobacter koseri
atgaaaactcaaaacctatacgaacaaatgaccgaagaagctcgcctgctggcgagtgaaaccaaaagattccagatcgtatctgcgaaaaaccctatctgccgcgaggctgccgaactgctggcaagcatcagaaaccgtttaaacgcatttgagcacatgacggatgaatccggcctggtcatgcgcagcgcagccgaaagccacagcgccaccctggaacgccagcaaatcaaggttaagaaatctccacgattgagagccatcagccctggtgagcgtgcaaagcgccaggcaatgaagcgcggcgctctgctggttcgtggggtttga

SEQ ID NO: 83474 - DNA, 168 bp, Citrobacter koseri
atgagcaaagaaaacgcagcacgtcagcatgtgacggttcgcctggcacctgaactggtgcgccaggtggaacgcgaacaaacaaaactggagcgaagaacaggcatccgcccgtcacgcagccaggtacttgaaaaattcttgaacatagggctgaacggcaagtaa

SEQ ID NO: 83475 - DNA, 378 bp, Citrobacter koseri
atggtgcaacgcacaggcgttggttccggattctgcgtacttctggaaatacggggcttaatcatgggctggggcatcaagaaagtggcggcggaacgcgccgccttatcgggcgaagtgctggccgccattgaaggtgccgccatgtacacgcgccacggcgatgatgaatcaccgcgcatcatcgtacagccagcaggctacaccggctttatctacagcgacgaagcagcagaaaagtgggttaggcgcgcgtttatcgaactgacaccgcatcaggtggaacgtgcagtgaattatctcgcctccctggtgcgggaacaccaccgggagcaacagccaaagcgccagcgcaataattgggtgaacaggtggtga

SEQ ID NO: 83476 - DNA, 912 bp, Citrobacter koseri
atgaatgacgttctttctggacttattcggtcagccctggaacatcagggcgctcatctgcgctttgatggtaacggcgatatcaatcaaattatcccggtagagcctgccgctgttcgctacctgtcactaaacgaagtgctgacgccgaaagccggtagccaaaccacgttcaacggcatcattgctgcgcgctccttagtagctgccgcaggcgctgaaatcatccgcatccctggcccaatgactcagcagccagacattgacaccgaaggcaaccgccgcccactgaaacagcaagaagtgccacgccactacatcgttgtagcgcctggtaagttcgcagcagtagctgatgatgccgaaatcaccctgagtaatgcaccttatctggttgccagctacgacgatgccaccgcgccatcctacggtatcggctacaccctgacccgtcagcaattgaaacacacctttgctgaccctgacaccgttttgcgtgccgtcaacatcgctatcgagcagggcattgcccgcctggctgacagcgttctgctgaccgacctgaacaccaaagccgcgacactgaccgacgacacagttgacgaagtggcgaaggttgcagccgctaagggctgccgctgggctgacctttcagccatcgccggaaccagtgctgctggcgtgaccctgggcggtgacggaaccctgcgagcctgtgcggttaaggccgaactgaccgacaccattacaacaactattgttggcgatttcagccgtgcagccgtggcgattgatgacgaactgcgcgtaaccgccaaacgcatcaacaacggtgccgtcgagatcgtcgtatggtgcaacgcacaggcgttggttccggattctgcgtacttctggaaatacggggcttaa

SEQ ID NO: 83477 - DNA, 222 bp, Citrobacter koseri
atgagataccaagctgaaattacaattttttgcgaaggcagagatccgtttagtattctttttaacgagaaatttgacagcaagatagaggcatttaaccacggccagaagcaaatcactgacttcaccagtaagaccgaaaaacgtgtgctgcatatagactgcaatgtggttgaagtgcctgaaattggtaacgctgagatattgccgtttaaaaaatga

SEQ ID NO: 83478 - DNA, 1689 bp, Citrobacter koseri
atgcgaagcgctcctaacgttaagcagttacccaaagatgtttttactgaagccattatttttgctggcgctgacgcttggagtcatgcaaaacattggcaggaagctgctggccctgcggcaggtgataatactccgcccgtttaccttgggccaaagcagctggctgaactgaacaacttgcgcattattgatgatggtcggcgttctgcgcgtgtataccttgctggcgacattgagccgataaaaatcaacgctatcgctgaaaagctggctttggctggggttaaggaagctcgattatttaaaggcattcctgaccgtgagccagagaactggagcaactatttaaccaggattcgtgacgaccaccagcgtggtgaaagtctggttgagatgttgtccgaaccggttcaatgccttccgttagacaagccagtgccaacgccaggggatgtctaccatccagatcacatcgactggaaacgagataaagttacgcaggaatgggttttccataaagcaaaaggcacagcggaaaatttatcaaggcttatgaaggcatatggcgttcgcgttcggtacaacgagttatcacgcgatgtcgagattagcgtgaacggcaacctgccagccggagacctcgcgcggaacgtgtccctgtcaaagattgaggacatttgccgcatcaacgattacccgtacacagcagcagccagccatctggataacttagcgtcagcggattcgtataacccggcattggattgggttaaatctcgcccgtgggacggcactagtcgtttgcgtgaattgttcgactgcctgacactggcagatacagggaaatcggaaatcagttggacgctgttccgtaagtggttctttggtgctgccgccctgctgagtggaaaaaccaacaagtttgaacacgtcctgattctggttgaccctatgggtggccttggcaaaacgcggttctttaacaccctttgccctaaagactttcaggctgacggcgtgaccctcaacccggatgacaaagacagcgttttgcaggtagtcagtaaatggctggtggagcttggcgagataggcgcgacgtttagcaaatcggatattgaaagtcttaaagcgtttttgagtaaagacaaagacgaactgcgaccggcctatgccagggcagctaatcgttaccaacgccgcactgctttctttggcagcgttaacaacgtgcaatttctgatggatgacacaaacaaccgccgtttctggccaatccaagtggctgcggtgaactaccagcacaccatcgacatgcagcaggtatgggctgaagcactggcgcgcatcagtgccggtgaaacatggcacttggaccagcaggaaaaccgagtgattggtgagcataacgacgcgttccgcagtaaagaccgcattgaggaaatgatactggcctcttatgacccaagcgcgcagccaggccgctacgtatcagccagtgacgtgttgaatgaaattggtgtgctgaatccaaagcagaccgatacccgcaaggcatcagcactactccgcaaaatgttcgctcataagattagccgtggcttgacggtttatcatatgccgagcgctaaaggctttcgccatttggtttcggttaatactgaatataaagaaggcccattctga

SEQ ID NO: 83479 - DNA, 282 bp, Citrobacter koseri
atgaagaagctaacagttaaccaggctatcagtcgctacaacgcactgctgcgtaatcctgtgcgtcatctaactgtgggagaacttacggcacaacggatgttggcagcacaaacattgttattgctttgcatccaacgtggtgtaacgcgtccttggacgattatcagtagtcatgcagaaatggccgaaacactcgtcccgttccgtattagcgatgctgacgcatgggcaatgtatctcgatcttaagcgcgaggtgcaagatgcgaagcgctcctaa

SEQ ID NO: 83480 - DNA, 180 bp, Citrobacter koseri
atggaattactgactgctaagcaagtcacaacactaacaacattatcccgcatgactatctggcgctatatccaggctggcacgtttcctaattgcataaaattagggccaaaacgtgtggcctggcggcgcaaagatgttatggcgtggcttgaaagccgccagccagttcagcgctga

SEQ ID NO: 83481 - DNA, 1236 bp, Citrobacter koseri
atggccgaaaataaactctcagatgttcaattgcgtgcgttaacccgcaaagtcatcgaaaaaccttttgatgttgctgatggtggcagcctttctgttcgcgttacaccatcaaggcgcaaaatccttgatggtgagaagagaccggccaataacatccaatggttgttccgttataagaataagcataaaagcgccaatacgttgacgctggtgctgggcaagtatcctgccttatctcttgctgaggcgagggggaaacgcgaccaatgcaaacggtggcttgctcataatctagatcctaaagaccagtttgaccaagagtcagccaaaaccatgaagcctgtcactatcagggaagcactggaacgctggattaatgagtacgcggcggaaaaccgggtcaactttgaaaggcatagacgccaattcgaaagacatatttaccctttcatcggcgaattgccacttgaacagtgctctaaagcaagatggatggagacatttagcagaatcaaaaaagtcgcgccggtagcgagcggctacatattaggtaactgcaagcaggcgttgattcacaaccgcaggctgcacgatgtttacagtgatgcgctggaggatatcaaagttactgatgttggaagaaagcaggcaaaacgtgatcgtgttttaacttctgaagaacttagtggcctttggaatgcgctaaaaagcgaatatgcgtttctaccttactacaccgcgcttttaaaattgctaatagtgtttggtgcaagaacacaagaaattcgtctttcgacatggtcggaatggaacgtgaaagaatggatttggacagttccgcgagaacatagcaagggtggggagaaaatcatccgacccgtgcctgaatctatacagccatttattttacagttacgccaaaatcaccttgatagcggaatgctgcttggtgaaatgaagaaacccgaagctgtcagccagtgggggcgtatcttatacagccgattagagcattcaacgccgtggacgttgcatgacctgcgccgcacttttgccaccagtctaaataacttggggatagccccgcatgtggttgaacagttgctgggccactcaatgccaggagtgatggcggtgtacaaccgtagccagtacatcccggaaaaacggttagccttggacaaatggataaaatatttagaaaaaataaaccctttaaaatcagacaattaa

SEQ ID NO: 83482 - DNA, 249 bp, Citrobacter koseri
atggcgatatcattcagacccaccgaatatgtgattaccgctgacggggaatgggtgactgttgatgaactcacttccctgcatgcaagaccactgcgctgtggctcctgccatatccctgcggtggtaacgcagagtgattctggctggcagctgattcaccgaccacgttcagagatggacaggaagcgggtgagccgctgttgctacagagagcgctctgtatcagcaggaatacgcagattgtaa

SEQ ID NO: 83483 - DNA, 480 bp, Citrobacter koseri
atgcgcataatggcatgtcatctggctctcaaccgcaaaggggcgctgacaggggcccggagtgcggtcagcaagcctgacgaaagctggcgctgcccatcctgtgattccccgttgatactgcaccccggaggtagcgatactcacccctggtttgaacacaatcagcggtcagcgaatgattacgcactgatgcactgccagtaccgggaccatcgtgatggattaccgggcgagagtagacggataatgctgtacaccatccatgagcaggagatctgcacgatggcagatgcctggtattgcgtctggtgtgggtgtcactatgcgggggagaagcactgtgcaacctgcagcactggtatttacagcatcgaagaaaccatatggcgggagaactatacctgtccggttgatagtccaggtcagggggcacctgaggaccagcgtttgttcccttcggcgtcaggaggaggctga

SEQ ID NO: 83484 - DNA, 210 bp, Citrobacter koseri
atgatgattaccgaatactcagtcctgaatgaccagttcgttgatatgaagtttattacttggttaacaggcctaacggataagtggttctacaggcttatccaagatggcctgttcccgaagcccattaagctgggacgtagctcccgctggctgcggagcgaagtggaagcctggttacagcagcgtattgctgaatcgcggagctga

SEQ ID NO: 83485 - DNA, 633 bp, Citrobacter koseri
atgcgttacgaaatagagacgaatggcaaataccagatgaataaccagatacttcctgaactggtacaacacttctacaggcttcttaccaaatattcaaaggtgatcccattacggatggacttcgggtatcgacatacagaattataccatcaccccgatgactgggatatgtatcgacttgcagaggaactcatgcgaggtagaaaaatattgggttactcatgggtaatggaatactcaccgctcaagcagtaccacttccatgtcatgttttatctcgatggtcagagttttaaaagcagctatcgtatagcaagatatattggcgagaggtgggtggcaaaaacacatggggaagggatataccatacttcaaataagaaaccatatcatcaggtcagtggtacaaaaatgatcctacataacgacaggagacgccagcgggaaattgaatacatccttagctacatggccaaagaagagcagaaagaggcgctggagacgcttatttacgatgtcagccttatccctcctgttagtggtcgtggtcgtccaagaaaatcatctgcagtggctgacattattaaacaactcagcggcggtaattcaacaccattcaaggagagataa

SEQ ID NO: 83486 - DNA, 996 bp, Citrobacter koseri
atggatagctttgaagtagttgatgatatgtttgataaaatgcttgatgaaaagaaatttaggagaattaaaagcagacgggaggctatttgtatcgcttatgcttttgattatcctaaattactatcaaagtttttatatgggttaagtggcgattacatctctttagaaaacacaatatacaaatctgaaccgggaaacaaagaatacatacagcgaaaaattaaaaataaaatagaaaacctaatccctgacaatgaatatagctggattcgttctgatgaaaaggcttcaatgtttgtgtggatctcgatacttgaatggagaaagtttggatttcaaaatcctatttatgccactaatattaccaatgaatttcaagatgctaaaagcggggagagcattaaaaaagaaacacctctcgttattaatgatgaaacatttaaagcattaacagataatatcaacgtatcagtcactgaccataatagtcgaattagggctatagaattcttattcgatatatcagattctttccatggtgacaagacacttactcttttattaatgaaaaatactttctctcggatggaggcaagagactatttttcatggttaaaccttaaagatacaggaatgattaaatggttatcagagtatcttctcagtaatgaggtgatggataaaaacttcatcacaaccactaagaaggataaattttatgccatttttgcttttgtatatttctttgcagcaaagaaccatcacaatgacagagatgactcgacaacggtatttatgtcgaagctgaacaaatcaagatatcaaaaaacgttcagagatagcaagaaagggatgaaggctgtgaatatatttctgcccgagagttccaaagaaaaactggactggctatgtgacgaacttaacagaagcatgtcagaagtaattgaaaaaatgattgagtcagaagtcataagaaaaagacagcgaagataa

SEQ ID NO: 83487 - DNA, 888 bp, Citrobacter koseri
atgaagcagccatccggatatcagattatccgtcgccatttacgtcgctatccccgggtattacgccacgctctgattaaggatctcagccagcttattacttacgaacctgtcattggcattatgggcaaaacaggtgtcggtaaatcatcgctctgtaatgcactgtttcgtagtgaagtctgcgcagtcaatgccgttgaagcatgtacccgcgagccacagcgtgtacgtctgcgatttgggcaacattatctcaccctggttgacctgccgggtgtgggagaaagccagttgcgagatactgaatatcgcgaactctatcgggaacagctcccggagttggatatggtgctatgggtgttaaaagcggatgacagagcgttctctgtggaagaggaattttatcagtccattctggctcagtccggcaatgctatacctccggtgctgtgggtgctcaatcaggtcgataaggtagagccatctgagcagtggaaccggcactctgcgacgccatctcccgaccagtttgagagtatcaagcgtaagcaacgtgccgttgcccaccagctacagatagaggaagaggatatcatcccggcgtccgtaaaggggcgttaccaccttgcccgtattgtggagcagatgataaaacgcctcccaaagcaggcacgcagtccgctgctgccccatctgcatcagtcatatcactccgctcccgtccgggaaacagcccgcagcagttttggcgatgctgtagttgatacggttgaccgggtcattgactgcactccgttgccgcagattgcccgtaaagcgctacaggccgtcacgcacaccgttatccacgttgcccgcagcgtctggtccttctttttcgattag

SEQ ID NO: 83488 - DNA, 465 bp, Citrobacter koseri
atgagtaacaccaccagcttgcacacgcttgccgatgctgacaacacagctctcatcaccgccacgttgctgcccgatgcacagcggcttcatttctggccgcagaactttggcggtatcccgcagtggatactgctggagccacgcatcttcggctggatggaccggctttgtgagaattacagcggcggcatctggcgtttttacacactcagtaatggcggggcctttatggcccccgaaccggatgatgagaacgatgaacagtggacgctgttcaacaccatgaacggcaacagcgctgaaatgagctccatggcggccggtatcgcggcctgtctgctggaatacacccatcgtgcctgccgtacggaatgtgatgccatgacggcgcattattaccgcctacgggattatgcccttcgccaccccgaatgcagcgccatcatgcacctcatcgactga

SEQ ID NO: 83489 - DNA, 222 bp, Citrobacter koseri
atgaaaattattagcaaacgccaggcgatggcgatataccgccaacatcctgaatcccggttgtttcgcttctgtaccgggaaatatcactggtccggcagcgtctgtcactactacggccgtgaggtgcaggatatcaatggtgtactggctgtctttgccgaacgccgacaggaccataacggaccttatatcgttctgcgcagcatcatcctcaactaa

SEQ ID NO: 83490 - DNA, 354 bp, Citrobacter koseri
atgaaaaaagacaccagcaataaagccacaggcacgctgcaatgggggctggaatgcaacatcacgccgcatttcggcgcgcgcctggtgcaggagggcaaccgcctgcattacctggccgaccgcgccggtatcatcggggtattcagcgaggcagatttgcgtcatcttgaccaggcctttccgctgctgctgaagcaactggagctgatgctctcaaccggtgaacttaatccccgttgccagcatgccgttaccctgtatgcaaaaggactaacctgcaacgccgacacgctgggcagttgtggttatgtttacctcgcgatttacccgacattcaaaataaccccgtaa

SEQ ID NO: 83491 - DNA, 669 bp, Citrobacter koseri
atgtccttcactcgacgaaaatttgtgcttggtatggggacggtgatttttttcagcgggcccggccaaaatttgttagcgaacacgaagaatagcaacgcggtgcgttatgccatgattcatgatgaatcccggtgtaacggctgcaatctctgcgcccgggcgtgtcgcaagaccaaccatgttccgactcagggcagtcgtttatccatcgcgcatattcctgtttcggataatgaaaacgaaaccgtttatcactatttccgccagtcctgccagcactgtgaagatgcgccctgtattgatgtttgcccgactggtgcctcctggcgtgatgagcgcggtattgtgcgggtagatgaatcgcgttgtatcggctgtagctactgtataggcgcttgtccgtatcaggtgcgttatctcaatccacaaaccaaagtggcggataaatgcgacttttgcgccgaatctcgcctggcaaaggggttcccgccgatttgcgtgaatgcctgcccggagcacgcattgatttttggtcgtgaagacagcacggaaattcagacctggctgaaggagaacaaattctatcaacaccaactcgcaggcgccggaaaaccgcatctgtatcgccggttcggtcaacatttgattaaaaaggaaaatgtatga

SEQ ID NO: 83492 - DNA, 1242 bp, Citrobacter koseri
atgatttcagtagcaatggtatccgcaactgcgctggctataattaagaaagggaaagacttaggcatcattgcacttggattggttatcagttacgcaacagcatcaatcttatgcgcttatgcagaggcaggagcatggttcagtgaggccaagatattcgcccatctcaacggggcaactgtaagaaactcatcactcgctgcaatgataatgatttcagcgtacctgacatacaaatcattatccagagtgataacatttaagggcgggatttcagaatcaatcaaccgattgcttctttctgcgtgctgttcactctctctgctgctttcacttatccttgttggcatcaacgtcaggtacggacacccaaacgactacaatgtagacaggttctattactgggcaaacatagccccatcttggggcgaatacgttaatttcatgtctacccaaatggctgtcttccttggattagcatatggttgcagaagaagtcgcatgtatctcggaattttccttttcagcctacttgctcaatacatggtgggtgagaaggcgactggattatacgcatcactactgatgttcatcattccgctgttcatttcaagaaacatctatttaggtacagccatctttaagccaaaatttgtggttatgtcactcattgtcgtggcgggcttgttttgtgcaatttatctaagctacgccgcgatgggtggcgaggcaaatgctattgcgatgcttctgaacaggctggtgctccaatcgcagatgtggtggactgtggatagtatttcggacggtggtgttacgtacagtgagattaaacaggccatatttggtggcagtgatggcgtttcagggattcaatatctcatgagagaagtagccgatccgacaacattcgcatggttccaggataaaggcgtaaactggacaatggcatcacctgccaatctcacatacctatttggctattcaggcgcttttctcccagcaatattgataggcgttatattcggagtcacttcacatatagttgtaaaagccattgaatttaaggatgtagtattaatattcctctccataaaactatataacggagtgtggcaagccgctaccatggggaatatagactcacttttatcaattaaggtcctgtttgttttgctcgtggctgtcttctatttgatcggagctagagtatttccaaaaacatactcaatacaataa

SEQ ID NO: 83493 - DNA, 2127 bp, Citrobacter koseri
atgacgacttacaacaccggcaatccgctggggtctgctgctgcaaaagatttgtacgataacgcgcaaaaccttgatcacctttcaaatgaccaggaaaacgagctatggcctgaccgttttggtaaaaatcgtcttacctggcacggaatggaagagcgttataaaacagcgctcgcaaacctcggtttaaatcctgtcgggacatttcagggcggggcggttattaattccgtcggtgacatcattcaggatgagacaacaggcgcatggtatcgctgggatgatcttacgaccctaccgaaaactgttccttccggctctactccagattcatccggtggtacaggtgtcggaaaatggctggccgtagatgtcagtgacgtacttaggaaagacctggcaaaacagactggcgcgggcctcgtgggtgctagcagcgtagtcggggaagcggtaacacttgaaacgtatgtagccaaaataaacaaggctgtttaccttaccgagttaacgccattgataacaggtactgactggaccgctgcattccagtttgtaaatgataatcccagcattacatgcctcatcatccccgctgggacgtacacctcggatgttgaacttcgaccagccccgtacacgatcgtcatctcacaagatgcgactataaacatcacaactgtcaatattcagcaaggtggtattcaccccaaaacaggcaccaagtttttggggaaattgactatcaatcttggcgatactaatgcatacgcatggcaaagggctcatgtccgcataggggaatacgatagcggtgccggtgatagcgatatctttatcgaggacgtaaccctgttaggcggacacattgactgcaacggtgtgttcattactggtgacagcttcaatattgaatttggcaatattaaaattccagataatgcgaaaatcggtcgtggtttccttgcgcactggggtggtgcgagcggcctgacatacgacgtggctaccaataccgttacatgggacggcgttacgtacaccaagcaccctcacaacattaccgttaatgcaatggatgtaggaatcctaagtgcttacgattccgccccagctttcgataaggctgctgtatttatcagtgcttcatataatattgcgatcaagaatattaccgttgccagagctggttacggatatgttgcatctggaggcgattacgggtttgtttattgcggaaatacacaactgcaactgacaaaacaaaaaggactcactcttgagaatgcgactttccagttaacgcgcgcaagaggaattagcattagcgcaagaacaacaaatgacgtcaacggtcaattttatatcccatcagaaaacgtaaactgctcattgtccatgcgtaatgtgacgatgttgggggaacggcttaacgccacgaatggcagccaccaactatacatgcaggatgttagtgatgtggtattggatagcgtttatgtatctggcgcagctttgaaaggagtttggttgaacgggcagtgccagagagttagggggaatgttacggttacaaactgcaatcacacaagcttagctgtcaccggttctgtttcagcaacagctaaagatatcaatatagatttagtttctagtaatgaaaacaggttggattcatctgatccaggtttaggatctgctgtatggatgagtgggtgcgaacgagtaacaattaccgggagatgtggtaatacggcatcaccttctaactatgtccacggtgcacaatttggctcaacatgtacggattgtgaagttgtaatgaggattggagagccatcagccacatatggtggaaaatgtgtcaacggtgatagctttgcattttcggcaagaaacagatgtgatcgatcaataatacttaaatacggaagtatcgctggtaatttcataagctatgattcttcaggtcaccgtgtaatcactgggtctacattcccagcatcaggcgcatggctgaagggtgatacttgctggaatacagagaatatcgtttcaggagcatctattggatggagggttgacgcatctggggtttggaagtctcttgggctgatcccataa

SEQ ID NO: 83494 - DNA, 1659 bp, Citrobacter koseri
ttggtaggggctacagatcaggatggcgatccatctactgttcagggagagcttgataatatatcttcgcatttcccccagactccgaaagattattttgtagggtcgttttttgccagcaatagcgataatacattgactctgtttaggtcttttaatgggcatgattttacaaaattaaatcagtctcaactggtttctgaagatagtaatactattggcaatagagacccaagtatcacttattacaaaggaaattggtatgtatctgctaccactggcggaacatcaggagcaggtagtacagatgctgattttctaatttttaaaagctctgacttaatatcatggaagttatataagtgcttggctgggcctaccttactgaaggggcagccaggtagtgtgatcggtggtaccattcccacaatttctccaatttgggcaccttcgctattagtaaaagataatgagctttgggttcaattaagtatcggatacaaaccccaggctccagatgttaatggtacaatggttaactggtgtgcgccatttgcatgtaaatgcaataatttaaataatctcacttttgattttccacagctaatgatgagcgatacaagcgtacagagaattgatgttgaaatttcaataaatccgcttggtggatatgttcttgtaataaaaaatgaatacaacaagcatatcgaggtctggacatcattatcatacataggcggatacagtaaaatcgctgatttagacttcggcggggtggctgttgaagggccaagtcttgtatgggtaaatagtcagagcatctggcgtctttatgctgatgcatttagtgctaatgggacaacatactatactgaatctgctgatcttgtagactggacagttccacaaattgttcagtcaccatggccgctacgacacggcactgtattaaaccttgccaacttgcccgacgctaaaaaagctatcaatagctttatgttagcaaacggattgatgtcttctgacattgttgttccttgctgggctgaagggggaacaatagttgcgggtgcacaaacaattgttccaaagtgcaattatgtctatcgtatcggtggaacattgcaagctacggtaacaattaatgagcgtggaggagactggttttatttactcgtagcttcaggacaaccggttgctggtataacgatagttggcaccgccgtagatggagctttttcaataggttttggtcagtctaaccaacggatctttaaagtttggtataatcctgtttcaggtttctacgagcttgagggtatgccgaatgcaaagagcgactcagcaggcttttcatcgcaggcaggttggccgaatatcaacacttcgtttatccctgtatatggacgcacttacactacgtctggttccgatagtagtaataccataatatcaaatctcaccagtcagttgcctgatgggtcctttttccatatatgggtaggaagcgatacgtctaatggaagcgtaactatcagagcatcaggtagtaacatacaaatcggtagcagcgatgtaatactatcaggggcgtcgggtagcggtaataggctgtatacaatgaaaaaggttggcgggctttggcgattggcagcataa

SEQ ID NO: 83495 - DNA, 1068 bp, Citrobacter koseri
atgaatgagaaaaaacactttaacagactggaccatatcagattttatgctgcatctttggttgttctattccattttagaggtaaatactattcgcaggcaggcggaatattcgatttaaaatcggttttagcatcatggattaatagcggtgcgtcaggtgtagccttatttctaacgatgtctggattcctcttctgcttgatttcttcagaaggtgcgaagaacatagactatcgtaaatttataaaaaacagaatccttagaattttccccttgcttaccgtggttgtgttttctcttatttgcgtcacgcgcagcacttcatcacccgaagatatatttaggttgttaacgttacagttaaacactggccctctcaatgataaaatatttccaataggtcccatttggacgattgccgtggagtttcaattctatctaatcttcccttttcttgctctctttcttaacaaatttggggttaaatacattaccttattaatactcatggcaattgttataaagtgggggattgtaacaatcaaaggagaatcacaatacggaaacctttacaacactataacgggaagattagatcagtttctgatgggaatgctgttcgcagttttatataacaggattgataatatcatttttttaagatcgggcattttcaaatggttgttacttccggcatctttagtcgtaatttccttttacttcatgctagacaaatcaaccctattcaggagcgtgctgggattcactgtagagtctgctatgtgggggagtttcatagtaggctatttaatatttccaattaagatacctccatttgctgataaaatactgatgagcctcggtggggtaagcttttctatgtacctactccatatgcccataggctatgccttaagagcttcaggtgtaaataatctgtatggcggtgatttcataatgattgctatcacaataatactgcctatagttatagctatttcttatttaagttattacacaatagaaaaaccattcttatcaatgcgagttaagtatttaaattag

SEQ ID NO: 83496 - DNA, 378 bp, Citrobacter koseri
atgagcaagtacccaagccaaatgcaggataaattcaacctcagattcccggacggaatgcgtgaagctatagcagatagagctaagaggaatggtcgttcgatgaactcggagatcgtgcagatactcgaggatgcgctaacgcaacctgcggtaaaggttcaaagtgagttgaacgtcgatttgttctccggcgatttagcggatgatgataagatcatcatttcaaagtctcagcttctacaaaaaatcaatgaaaccgttcagggaactattgacgccaccgcagaacacctagccaaagcaaccgctgatgccacgttaaaaagcttgtctgaaaaatacgatttcgttcccaaaaacaaaaagcccacctga

SEQ ID NO: 83497 - DNA, 174 bp, Citrobacter koseri
atgcaagatacgctttttactgagcgaaaaaacatcaaaatcaacctccgactaccttctcgactcgatcaggatcttcgtagactggcggaaatggactgcgtttcgctgaactctgcgattgttcgtttattagctaagggggtgagggaagaggtggcaaatggtcgttaa

SEQ ID NO: 83498 - DNA, 717 bp, Citrobacter koseri
atggtcgttaaaaatgttgaagccccaactgctcgaacagtcagggcttcagtgtcaaatgattccagcgaaggaaatatcgacatgaatattgtagcaaaatcagattataacttccaaggcattgatttagttcctgcgccagtaaatgacggaatctggctgacatcgtcagatattgccaaagctcttgggtatgcctcaagcaagagcgtatcgactatttactcacgcaattccgatgagtttacaagcagtatgtcaatggtcatcaaaatgaagaccaacggaataaacaataacttacgtgaaaaatcggttcgtgttttctctctacgtgggtgccatctgatcgcaatgttcgccactacgaaagtagctaaggatttccgccgctgggtgttggatattcttgatcgcgaagttgcccactcaccgatctccaggcagtttacggacgaagagttatgtactcttgcgtatttgtggcgttcggctgcggtgatgtatgaggcgtgccgagaagttcatccgctgctgttggttgctgagcatagactggttccgcgctttacttccattggcactaattacagccgtaacatcaataaggcgcgctccatcctgcggagagaaacagatcacatcaaagaacaaccatggggagacagtaactggaaaaatgtattttcatacgggacgggagtattgcagtga

SEQ ID NO: 83499 - DNA, 738 bp, Citrobacter koseri
atgactgcattaaagatagcagaccaaagatcgcatgtcactatgtccagccgtgagattgcgaagctcacagggaaggaccataaaaatgttatccgtgatatctgggaaatggttgaagacctttatggtattgcgaaagatggctcaaatctgagccataagaaaaatcaaacagttacgttgtttgatggtgttgatgtaacggttgatactcgcggttatgtgtcgcacttccggctggataagccacatgttgagtgtctacttaccggatacagcgccatattgcgtatgacggtaattaaacacatttacaagcttgaggagcaagttaaccgcaggtctctgccgggaagctacaaagaggccctgcttgccctagttcaggcagaaacagaaaaagagcagatttctttagagcgagatcaggctattgaaacaaaagcttggattggtgagaagcgtgaagctaccgcaatggcaaccgcatcagcagccgtccgtgccaaaaacaaattggctgaacgggtaggggaaggaaagaactacgccgcaatcattccggtagaaaagaagttggggcagaaatttaaatggcagccacttcgcaaatggtgccgggagaatgacgccaccccacacgacgtagatgaccctcgttttggctcggttaagtcgtggcctcgcgcggcttggcttgcggtgtacggtgtagaccttcgcaagctgttttaa

SEQ ID NO: 83500 - DNA, 324 bp, Citrobacter koseri
atgtcaatcacaccacctcatgaatggggtatacaaaacgatatcaccccacgatttggcgcgagattagttcaggaaggcaatcggctgaattacctggctgacagggctggtttgacggggagctttagcccggagcaactgcagaaacttgatcagactttcccgctgtttataggtcaattggaagcaatgctgcggttcggtgagctaaatccacagcagcaacatcaggtgaacattcatcttactggtttaacctgcatagctgacacccgtggtagctgtggctacgtttacatttctatctatccaacccagtaa

SEQ ID NO: 83501 - DNA, 192 bp, Citrobacter koseri
atgaatacccctaaaacacccggcgatacacagccagaaacagagtctgtggatctgagctggcccattgttttcagcgtcgccggactcacgctgttacgaagtaagtcggtcgtgtgccagacgttgggagccactatgacaacaatcagcctgataaggcttataaaaaaactcgccatccttacctaa

SEQ ID NO: 83502 - DNA, 702 bp, Citrobacter koseri
atgctgcgcgatatgaacgatgctgcagtgagcgtcaaggtcaacaataaagcaggcttcacggttgaggcgcaaagaatggccgctgccgcgaatatttcgcccttgctctatgccgcatcaccacttgaaggaaactttatccgctacgacagcaaacccgttaaggccctgacctgccttatcacttcccgtaacatgccgggtaccaataaaaattattcatgggaggaaacctactgcctggatgaaaccggtgcagcttacattggcacccagggctggccgtcacgcgcaatattcgacaaaagctgtgaggtgggcgcatctgactgccctgtctatctaagcttgaaaaatgacccaccaaccatgcgtaacgatgcagcacagtatatcccttacaacagcagtcatatcactaaagagaaagaaaagcgccctcaaccaacagctactgagactgtcgctgagcaagacggttatgaggtgatttttacaaaagccagtagttgcgcagacaacaagctaattgtgaaaaacatcagtacaggaaaaatcgctgcaattacaggattaaatggatgcgctttcgatccgaagaaaaatgcagtcgttatcttcccccaaaatgaatacgtcggcgtttacagtggctcctctagcgcttctaaagaaatagcttctgtcgatcttccctag

SEQ ID NO: 83503 - DNA, 414 bp, Citrobacter koseri
ttgaacattcgcacagttctttttctctgctcatcgctgacagcgactgctgcacaggccgttactcccgaacaacagtggggtgactggtatggctacatcaatgccatggagtttgaaattagcaccgacaatgccaccggagagcgcctgacgctgacctgctcaggcgagcatatgaccttctcttacagtgttccagcaaaggactatcgggtttcagccaccggtataagcattaacgcagcctcatacgttccaggcgaaacggcctttattgcgctcaaaaattccgatggccaggagccgataaagatcacgatgaaagataagccccttccgggaacctttaaaaccacggggctgcgcgaagcgttgactgacctgagctggcaggactgtatcagccattaa

SEQ ID NO: 83504 - DNA, 624 bp, Citrobacter koseri
atgagcaacgatatgggttataatcagcattacattaatcgtattcatgaaacgctgcagagttcattacgtgaatacccaaggacgtttatcctgaatattattcttaggtttcctgatgccaattacgaaagctataaggctgaccatacagtcataactcgctttattgaatccttaaaatcacagattaaatacacgcagaagagaaaggtaaaacagggaaagcgagttcatctcagtaaagttcgctatgtatgggccagagagtttggtgaagaaaaggggaagaaacattatcatgtggcattgatgctaaataacgatgcctggtgtagtgctggtacctattatccgatagaaggacagtacgctcactgtctggcattgatgattatggaggcatgggtcagaacgttgaatcttcatgctcagcaggagtatcaaaagaaatattatcccctgatagagtttgtccttgaaggtgatttccgtctgaatacctatgagaaaaatttcttatgggattacgaaaccatcatgagaagactgtcttatctggctaagcgatttagcaaagataattctgacgaacacagaaattttggttgcagccagtcctga

SEQ ID NO: 83505 - DNA, 1533 bp, Citrobacter koseri
atgtcatatttaccccctgcactaccactggttaatccagtcagtcccttccccattgatgcattgccattattaatgcaaaacgccatcagctatcttcaggatggtggaaaagtaccgacagtacttgccgtgaacgctgttttagcggcagtatccctggcctgccattcgcatatcaatgtactcaatccttacacggacatagaggagcattgttcactcaacatcctgacgctcgctgattcagggacaggcaaatcgtccatcagcaaacaggtaatgaagccctttgatgctttcaggactgagttggccgaatcacatcgggttaacctggctgtctggcgcgaagattatgtcgtctggaaagccagtttaaaggcactggaaagtaaactgcgcgatgcagttaaaaaagaccagtgcacagacgaggcccaggcagccctgaaatctcacgcatcgattgaacccctcaagcccttactgcccacgctggtctacaatgacacctcgcttgccgcgctcatcgctggcctgaatgcctatccctgtgcaggtctgatttctgatgaagccagcaacttctttgacgcacgtcttaaagataatctggcgttcttcaataaagcctgggatggcgatgtgtatgagcataatcgtcatcagcgtgccacccagtgcttcaaaccgacgctgacggtgtccttgatgttacagccttcgctttttctcgattacatgaaaaaggatggtgataaagcattagagagcggttttttatcccgcttcctcttttcaaatatccccccgaacaacacgctgagttcctgcgtgttgagctaccattatcgtccggatactgcttaccgtgatgaaaatgctttaacctgctttcacgaccttattggtaaattactcgggcagcagcttaaacaaattaattcaggtaaaggtgagaagaaggttctcaagctttcacctgaagctgaagcccactgggagaatatgcgtgagaactggctgacatacacactcccaggttgtgcctggtcatatatcaaacccatggtattgaaagccagtacgaatgcgttgcgtatcgctgcgctgcttaattacttcgccaaccaagacgacgacattattactcttgatgttatttcgcgggcatcagcgatgatgaactggtatctcaatcataccgcagcctggttttatcagttcacggatgagtataaattccagcaggacgtgcaaatactaactcagtggatctatcataaattcaggtccactaatggcttaccgttcaaaaagaacgatgtcattaaatatggtccgaacaaatttcgccgcagcgaaagactggaaccattgctgaatgccatcatgaacacaggtgctttcgcttatattgttaaatcccctgaaaacccggcgatttatattacctggcgcatgaacgatggtagctatatgccattttatgatgataaacagccaccttcgcctcagaaccctgcttag

SEQ ID NO: 83506 - DNA, 213 bp, Citrobacter koseri
atgtccacatctaacgtgaaagtgctgcgtatcgctgcagtggttaacaagctcgggatcgccagatcgaccatctatgactggctcaatgccaaatcgccacgtcatgacccggcgttcccgaagccctattctctcggtaaacagtcggttggctggctggaatccgaactggacgactgggttttgcagcgcaggcccgttatgccctga

SEQ ID NO: 83507 - DNA, 264 bp, Citrobacter koseri
atgagtggaaaacggtactctgaagagttcagggcagaggcggtaaggctggtgactgaggataaacaggctgttccggccatagcggcaaagcttggcatcacaacgcacagcctgtatgcatggctaaaaaaatcaggacatcactcctcttaccagcccgacgcagaaatccgtaggcttaaaagagcactaaaacgtgtgactgaagagcgtgatgcgttaaaaaaagcccaggcgtacttcactatccagtcaaagtga

SEQ ID NO: 83508 - DNA, 861 bp, Citrobacter koseri
gtgaagtacgcctatattcgtgagcatgctgaagtctggcccgttcgcctcttggcccggctgctgtatattcatcccagcggctactatgcatggctgaagcaacctaaacctcttcacgacgctgaagagcaccggctgcgtgatcgaatccgcgacctgtggcagaaatccagaggtgaatatggttatcggcaagtttttgagatgcttcgcgacaccggggaggtatgcagtctgggccgcgcccgtgctctgttgaagtctgtcaaagccgaagcacaatccggcatcattgaacctttgtctccggcagggacctctgtcatcccaatcacaaataatattcaacctcctctgccaaatctgcgctgggtagtcggcgtctctgctatcccgacggaggagggcagtgtcaaccttgggattatcattgatgctttctctggcagaattatccgatggggactgcatgacagtggtgtcagggaacttcagctagttttgcttcagggaatattaattggtcgtcaggttcaacagaaattgcttattcatttcgacagtgccacccggtatacacacaaggaatggcgtcatgcattgcggctcattgacccggaaaggaggataagcaggcggggcccctgtagtaaccatcagcaagtctcgtctttttttcattggctgcagaatgagataattgccgaagcaacacccgaaacggctaaaaaacttcagaatcagctgtttaacttcattaatgaatttaacagcctgcaaagatcagaaagtacgcttaatccgctactgtatcgaatatcggatctgacttatggcggttttgatggcgtgctatga

SEQ ID NO: 83509 - DNA, 726 bp, Citrobacter koseri
gtggaaaaagatgtcgggatcaactacgaagaagattatcaggcgttatgtaggaagtatgagcttaagttcaaccagatgaacgacaaggataatctttcgcaggctgaagttgattccgtaattgcatccggacgtcattgggcttcagattttcttcaacgatacggagagaatgacattgcaagccattatgaaggggcacttgctaatgagtttgaacaaatttgtcggcaggctcatcgcgataaaactatgttcggtgacattgatatcgcagtcgctctttatacgcttggtcaaatcttcagggcgcaaggcagagtcagagaggcctgccggtacctggcaatagcgtgcggttatcttgagttgaacagagatttatctatgctgtttaacgtggcgatgagtgatgaagtagacagagagaaagagcaaaagaaaatagaggcaagtaaagctgaacctggaagaagacgaaaatttgaactgattcgtcaaaaggtcattcagcttttggaaacaacggaacgacccgagcaaggatggcaaaggaataccttagccttcaaggccatcgacgaagccttatggcagtttatagaagaagaaggcattgacctggattatggtgaacttcgttcacgagttttgcgttggtcatgggagaggggcaatgttcgtgaggcatttgcgagagtcgttgctcataagaaaaaatga

SEQ ID NO: 83510 - DNA, 273 bp, Citrobacter koseri
atgatatcaatgttaactcttggctcggatctgcaagaaatcgaggtcataaggtctgctttgagcgaggtgcggatgttcacaactgtcattgccattgataatgctctactcaccttcccgtgcgttaaccgacagggagcaggtcagttattccatagtggtatctccaggagtgaagggagagggaacggttcaggattttgtttgatgatgccgtgccgcagtattatagtgaggtatcccatgggtgttaagtcatgccagagttag

SEQ ID NO: 83511 - DNA, 1350 bp, Citrobacter koseri
gtgttaagtcatgccagagttagttaccaacaaaaggaatatcgattgtttaatatgataatggaaagtcataatacagactggataatggttgagggcgaccgggggagttcaaatttcccgctatctcgttttcttgaatccacaccttcagatatttcgcagaaaatagttcctgttacagacgactcactgaaaatattggaggaaacatatgtattatttatcagcgaacttcacagtagacaaatacaagaatcggaagaatattttgattacatagatatcaaaataggaaaaatacatcgattgagcctttccaataagatggtgcattacgagtttacattacttcaagattacggcgaaagatatgtgagtagtgaaagtaagcttagtgaggctttagatgtcgatattaacaacttcggacttaccagaactcattggtccattaagaataaaaaccttcgtgaagttttagataaagtaaatgaatctcttgcgctaccaatagatatccctctcgccctagtgattacaaacacccaattagatgtgattgggagtaccagaaagaataaagaaagcatagataatctccaagattatattaagttaattctggaaattgaatccagtgatgaagaagaaacattttatcgtggacattcagaccacgaataccggctcgagccttctattttgaggaaggataagaagacaggcgaatacacgcattattttaacgaaaaaaatttaaacagtgaaatgctaaccgttcaacccggtgaattttcatcagataaatacatgttggataagttagtgaggatgcagcattttgggcttcctaccagactgctagatttgacttacaaccccctagtcgccctgtattttgcatgttcttcaataaagaaagataaagagggcaaggaaatagatggtgaggtcatcattctaaaaactaataaatcgcaggttaaattttttgattctgacacggtcagctgcatcacgaacttatcaaatctgagtaaagaacagaagaatgagttgaccaaggctattgatatatcgaaagataaggctaaagctcactatattggccgggaaaaaaccgacacctatcgtgaggacgttatagacaaatttaatgaggtaggagtctgtggtcatcttcttcattgtattaaagatgagaagccttactttaaagatataataaatccattagatttaggaaggatattatttgtacgcggtaaaatttctaatacgcgcattgcatcccagtcgggtgcatttttacaaaaaacacattatggatcaactgagtatccttaa

SEQ ID NO: 83512 - DNA, 642 bp, Citrobacter koseri
atgaataaaccaaaaactaatgaaatttatgactttcttaatgaggtatcgggattggtggtacatttctcggggtgtccaaaaggtatggggcgtgaaaataacctttattaccccgatgatttaaataaaataattaagggtgaagtgcatggtggaattgcatgttcattaattataccaggagatcttttctctttttgctcggatgaaaccaaagctatcggggctattggtgtcatcgtcggctttgatgaggatgggttagtagcagtatcgtctaaagattgtggaagttatacagatgatgattacatccgacatactgataaaaaagatataaggatagaagatcttagacgttctttgactgaacgtcaaacttacaacgaatggatcatccaacaaaataaaatactcggcatatttgtatttaatactacagacatctctgttaccggatatgagaaaattgaagagagtggtgaatgtgtaattggaatcaggtatccaaaatttgatgaagtcaaagatacattcatgaatttgaaaatatatacatttttaaatgggaatattgtacaactagaccgcgacaccggagaatttattaagataactcaggaaaaaatttattgttaa

SEQ ID NO: 83513 - DNA, 453 bp, Citrobacter koseri
atgactgaccgggtgatattgcagcgtgagttttctgagcttatgaacgggctgcacggaagcatcttaaaatatgctactgaccgagccgaatactatcagtgtgaggtttatctgtgcgtgaacaacaaatcgcactgcgatcaaatactagagcgcatctttgaaaaaagagttgttaataaacttaagttaaatcaggttatctccgttaacggacggaatttgagcttacattcgcccctgaccctgaataagagttatctgccggaagcggtgtatttattgatgttccccggccctgaactgcttaaatctgttgaatatcaggcgagccttagccccgttcatgaaattatcgtgtttaccgaatcagacgggcatacggaggctacagataactggatgtcggaacataaggtgcgcatgctgggaaccggaaaaacagcctaa

SEQ ID NO: 83514 - DNA, 666 bp, Citrobacter koseri
atggatatgaaagtttttattggacctgtagccacagttactgcagtctgcctagctgcgtattttgctttacgaaatgagcggaaaaagaaagcacttgagattaaaacggctcaactagatcgaatatctgagttagtaaaccgaacatctattaatctgatgcagtacgcaggttgtcttgcatccatactggaaacgcaagcgaagggaacttaccctccaaactacaaattcgatattgctacaattagcaaatggaaggatgatatcgacggacatgaaagttggaacctcgacatacagcagctcagagcatgtcagcacagcctagagtttcatcgtgaaaaacaatgggcagaatggctaaaaatagcatcaccattaacttctgaaattgaaaatttttttcttatatccaagccaggaaaaccagttacgatcataaatgggcaaagtaaaacagtcagtgaacttctcgatttctcaagatatttacaaaaacgaacagaggaaattgactcaatgcgtaagattttacttactcagatgagagaagaattcatcgaattgacaaggtttgagcctgtcacaatatttagtttgtctaaatcgataaagaagagtgtcatgcaatttttttgtatcggtgttcttaaagattga

SEQ ID NO: 83515 - DNA, 384 bp, Citrobacter koseri
gtgggacttcgtgacgaacttcaggcagaaatcgccgctgcgttcgacgatgatcttgccgacgctgttaatgcgttcaccggttcctatgtgattcaaacagaatgggatcccgttacggaaaccggagggaaaaccactgttacgtataccgggcgtggcgtgctggctgattacagcgttgagcgcattgatggcttgaacatcctcaaaggtgatattgagctggtggcgcttgtgaacgaagtgaccgataagccgaaagttgaccatatcatcgaagcgcctgacctggttactggtgagcaacagagatacaaggcgatttctgtggaaacagatccagcgggagccacttattccattcagttgcggagggtgtga

SEQ ID NO: 83516 - DNA, 393 bp, Citrobacter koseri
atgatcacctacatcactgttgcggacgttgatcaaatcctcggtgccgactggactgatgccagtaaaaaagagaagtctgtgaaaatggcgaatgcctggctgaacggattgaatcttcgagtttgcccggatgacattcccggtgatgtcaaagaggctggcgcgtatgtttcgtcggttgcggcagccgggaaactttaccagcaaaaaactgattcaggcgtagtgaccagcaaatcggtcgaggctaaaggcgtcagtgtgtcgaaatcattcgcagaattatccaccaacagcactgcattgctcgatcctgacttgcagttcgctctggcgttgctaaagccatatggcgtcaatcagtcacaaatccggctggtgagggggtga

SEQ ID NO: 83517 - DNA, 246 bp, Citrobacter koseri
atggccggattgacgaaagagcagcgcgctcagcgagcggcggaaaaacttgctgctgaactggcggcaagaaacaattctgagcagcaggagcagcaggagcagcaggagcagcaggagcacggtgctcagttggttgctatgttcactgacttcccggcatttcccggcgcgcccactaccgcagacgtgcatcctgacgaagtggaaaactggaaggcggcaggctggcgcatagaggagtga

SEQ ID NO: 83518 - DNA, 174 bp, Citrobacter koseri
atggattcacaaaaacaaagagaccttattgcaagcctgtatgaagagctagtaatcgcaagggggctcattaaagagatttgcacagtgcgaagcattgcggaaccaaaggcttctttgcagagaatggataaagccattaaagacgcaaaagatatgcttgaaaatatctaa

SEQ ID NO: 83519 - DNA, 1485 bp, Citrobacter koseri
atgaagccggaacatctcgcactgctgcgtgacaagctctggcgtctgaacaatctctactggatcaccaacaaagaaggtaagccggttcggttcaaaatgacgccggagcaattggaatacttcgaggggatgcatactcgtaacatcatcctcaaggcgcgtcagcttggatttaccactgaggtctgcattatccagctcgacgcggcattgtttgaggctgcccgttgcgcacttatcgcacacacgctcaatgacgcaaaacgcctgttcagggagaagattaagtatgcctatgaccgactgcctgacgaaattaaggcggccaatcctgcgagcaatgatgcggctggcgaactggtatttcagaagggtggctcgctttatatcagcacatctttccgtggcggcacgctccgctatctccacgtttcggagttcggaaagatatgcgccaagtttcccgataaagcccgcgagattgtcaccggtgcttttgaggctgtttcgtctgactgtttcacgacgattgagagcacagcggaaggtcgggcgggttatttcttcgattactgccagtcagctgaaaaagcgcagatacaaggaaaaaccctctctcagttagactggaaatttttctttttttcgtggtggaagaatcccctttatgcaattgagccggtcgagccacttccgcaacggctggttgattattttgctgagcttgaatcaaagcacagcatagcgctgaacgatcgccagaaagcatggtattacgccaaagagaaaactctcggcgacgacatgaagcgggaatatccgtcgataccagatgaagcattccagcagtcggtcgagggcgcgtactacgctaaacagttccgctggctatacaccaacaagcggatcggccaaatcccggataactcgcacctcccggtgcacacgttctgggatatcggtgttggcgactccactgctatctggtttgttcgcgaggttggcacggagtatcacgttatcgactactacgagaactctggcgaggggctgagacactacatgaaggtgctgaaagaccggggatatatctacggcgagcactgggggccgcacgatattgacaatcgcgagtttggcagtgatgccaagtcacgccgcgaactggcgcgcgaaggttatgaaattgacgggcagaaatattcactccgatttcaggtggtgccaaaggaatctatcgatactggtattgagtccgcgcgtgaaattctcaagaagtgcgcttttgatgaagtgaagtgcgccgaggggctaaatgcgctggaaaactaccgcaaggagtgggacgacaagcgcggctgctggaaagataaaccgcttcacgactggacatcccacggtgcagacgcattccgttacttcgctgtgacgaaaaataatcgacgtaaaccgactggtaaagtcactcaacttcggatctaa

SEQ ID NO: 83520 - DNA, 174 bp, Citrobacter koseri
atgctattgcgaggattgggggattttttgcggacaatttcgcaatactgctttgttatgcgccagaatgtcgcgtttcgtctgcttatccagaacatcgatatcatgctctgtaaggtagatgatgtttacccagtcacaggccgtgtccgttacttcaggttttgcgggtaa

SEQ ID NO: 83521 - DNA, 270 bp, Citrobacter koseri
atgagcattgaaactattttcgggattgtgattgctgttgtggcggccatcacgggcgcatttggtttcggtcacgtgcgcggcaccagtaaagcggaagccaaagcagacaagcagcgcaccgaagaacgtgcagcagccaccgaagccgttgcagaacgccgggtagagacaacgaaaggagcaagggatgttcagcagactgttaatcatcttcctgatgacgatgttgaccgcgagttgcgtgagaaatttacccgcaaaacctga

SEQ ID NO: 83522 - DNA, 174 bp, Citrobacter koseri
atgtctgaatttcgtgatgggctcgcatacgacaactggcgcggtgtgtacctcattcaggataagcaaactgggcgggaatacatcggcataagcggtatcgggatttcagaagtcggttctcacagtcaactggttggaaaagtccagcaatcagtaagggatgagcgatga

SEQ ID NO: 83523 - DNA, 171 bp, Citrobacter koseri
atgtcaactccactttcccgcgtcataaccaacgaaatcttccgcgttccagcgcgccgccagcgcaagcccgtggttaagccgtccgacatcccgactcttaaggactacaccgccagcctggtggatcagaaatggctgcgcctcgcggcacggaggaagcatggctaa

SEQ ID NO: 83524 - DNA, 255 bp, Citrobacter koseri
atgcaagactgcattcttgatgaaggaaatggtcgtactcgattgatgaggatcgaggaaggaaggcaagagttaaccatagccaggcccaatgaagactactattacggttttcaggtccggcaatatgtattggggggtggcgatgaggctaaggtttatcttatcgctagtgaagaccctttagagctttctgaagcggccgatcttgtttcccaattaaaccctactcctatcgccactaattcggattga

SEQ ID NO: 83525 - DNA, 276 bp, Citrobacter koseri
atggctgagttacgcgcaggtggactggctttaattatcaaatcaaaatttgctgaaaatgtggggaagaccgtaagactcattaaattcaatggatttgacgagacattaggtggggatacgtgggagcttactgcgctttcatggttaacgggtaatcttcatccagtaaagcctggtggattatgtattggacagagcaaaaacttaatgcctatcgacggcgacaacttcagcaatgaagacgaacaccagaaggaaagggagcatgcctaa

SEQ ID NO: 83526 - DNA, 591 bp, Citrobacter koseri
atgaaattcttaccagttgttggctgggaagggatctaccaggttaatgagcgtggggatgtcctaagcattcccagggtaattttgaggagagatggctctaaacagcgatttaaaggaaagcaactaaagccgtttctaaacgaggctggctatctcgttgtcaggttgagcgatgcctcgaatggccgaagggaaattgcaagagtgcataggttagttgcagaagcatttataccaaatccaaatggcaagccagaggttaaccatatcgatggggataaagccaacccatccttaagcaatcttgagtgggttacaccccatgaaaataggcaacacgcctggaatacagggctaagaaaccggtcacacctgccagcatacaaaggggagatgcaggccaattcgaaattaaacgatgcaagcgtcatagaaataagatcgcttaggtgctctggggtttcatacggagttctatctaaacgatatggagtttcgaaacgaaccattatcagggttgttactggagggtcatggtctcacttaccaatgccagcagaaccaccgcaggaggtgaatcatggctga

SEQ ID NO: 83527 - DNA, 231 bp, Citrobacter koseri
atggctattgcatcaggatattccattgacgcctattgcgactgcgaacaatgcgtaaataacatcgacccagttggtcgttggtgccgtcaagaaatgatcagcgcaaccggagagtcttacgcagaatgcgctgcgctaatccgtagctatggctggaagttaagtcgcaacaagatgcatgcgcttgcacctgggcataaaaaaccgaaatcatggggtaaattatga

SEQ ID NO: 83528 - DNA, 705 bp, Citrobacter koseri
atgagcaacatcgacaaacaggcgctgcgcaaattggcaactgacgcacacgagctaggcatcatcaagcgttacacgaaaggcatcgaggcgcagaagaaattcattgctgaaatgacccccgccaccgttctggcgctgctggatgagctggaagcgctccagtctttccgtaccgcattcaatgagtggcacgataaaacagaatggatgcagggtgataagcgatttgacgtcattaagccgtggggtaagcaccgcgccgacgttctgaagctctatatcgatcatctggagtcaaagctggaagccacagaagaacagcgagctaactggtttcagatggcgcagaagttaggcgaggatttggacgccgcagagaagcgcatagcagaactggaggcgcgggcgttcaatcctgcaattctggatgtgatagcagagcgccagcggcagaaagccgttgagggctggacgtctgagcatgacgacaaatacggaaaatcgcagttgttgtgggcatcctcatgctacgtcctgaacaccatccagccgtttaaccgcattccgatggactggccgtgggcacccgaatggtggaagccgacaggcccgcgccgtgacctggtgaaagctggcgcgcttattctggctgaacttgaaagaattgaccgcgccgctggcatcaacatggaggctgagtga

SEQ ID NO: 83529 - DNA, 198 bp, Citrobacter koseri
atgaaaatcgaagatatcaaaaacgtagcggtgttcttcaatttgaacggcaagacagtagcattgcgaatggatgctgagcagaagcgtatcgtcgcattaatgacactgaacaccgctgatgctcgggcagaactgattgaagtgccgcacatgactttaccagcagatccagccatgcaggagtccgcccaatga

SEQ ID NO: 83530 - DNA, 819 bp, Citrobacter koseri
gtggataacctcgcaaaagtaatacctttcagaccgtctttatcggtcgtggagcgtcaggtggcagatatcgatgatgggtatacccgcatcgctaacgagctgctggaagcggttatggctgctgatttaacagctcgccagctgaaggtcgttctggcggtgatccgcaaaacctacgggttcgggaaaaagtttgaccgcattaccaatacccagattgcagcaatgaccggcattcaccacacacatgtctgcaaggccaagaacgagatgattgcaatgaacatcatcgttaccaatggcctggcgatcggggtgaacaaggttatttctgactggaatttcactattagccaacatagcaaaacattagccgtaacagctaatgaaacattagccaagtcagctaatacccataagccaactcagctaaacacaaaagaaactattcaaaagaaagaaagaaaagatccccctaaatcccccaagggggaatgtggcgggcaggaagaaccacccgtttcacagaaaaaaccagcaatcgactatcaggctgtgttgtcagcatacaactccacactgggagaccgactgccgcaggcagaagccctaaacgacaaacgtcgccgtggcatcaagcgtctgctgtcggaactgaaggagccaacagtcgaagctgttgagaactatttttcagcgttctcccgctctgcaaagccgttttacttcggtgaaaacgatacaggatggcgtgctagttttgactacctcctgcgttccgacacgctggttaaaacacgggagggttcattgtga

SEQ ID NO: 83531 - DNA, 147 bp, Citrobacter koseri
atggcaaaaaatacacgtcattgccataccgatgaacacaaaaacattacccgcgctcgttttatccgcaccgtaaacccggcagtggcagaaaagatgcgcgcaatcctggaagaactgaaacgcaaggagagcggtcgtggataa

SEQ ID NO: 83532 - DNA, 543 bp, Citrobacter koseri
atgcaatcacttatgtatcaacacaataccggattcattccgggagcgatgataaatcgagctcaacctaagctagcgccagatcacgacaagatccgtgatgcagtgcgtgcctggtcgtcggcgctggacaatcaggacgtcgtgtcggcgctgatcatcaacgagtaccgggagcagggcgggaccgccatcaacttcccggaagatatcagccgcgcgcgccagaagttatttcgcttcctggataaccgcttcgactccgatcagtaccgcgagaacgttagagaactgaccccagcaatcatggctgtccttcctgttgagtttcgtacgcgtctggcgccacagaacgacaccatgtcgctcattgcatctgccatgaaggaatgttcagaagcaaagcaagccgttctcctgaacgcaccagagcaccagaaactgaaagaggtaagcgagggtatagcgtcgctcttccgcctcatgccggagcaggtcggaccgctgatgacgatggtcacttcgatgttgggggttatgtga

SEQ ID NO: 83533 - DNA, 231 bp, Citrobacter koseri
atggttaacaacgcaatcaattcagcaattgaaattgttggaagccagcagaagctcgccgatgcatgtgaagtaagtcagccaaccgtttgggcatggctgcatggtcgaaaaaaagcatccgcacagaacgctgtgcgcattgaaaaggcgacctgcgggaaaatccgggcgtatcaaatccgacctgatttgactgagttgtttccgcatccgaattctgccgcttga

SEQ ID NO: 83534 - DNA, 609 bp, Citrobacter koseri
atgtcccagccgagcgtatggaagctgtcatcagggaaaacacaaaacactcggaagctttttgaaatcgcaagagttcttggggttagccctgactggctcgccaatggtgatggactgatgagaattgaaggtcagcagccgattgctccgacgatcagtgctgagcggaatattttccgcattgaggttctcgacttcactgttagcgcaggtgatggggccataaacaacgaatttgtagaggtgctccactccgtcgaatatcccattgaagaagctcggcatatgtttaatggaaggaagcaggaacagatccgtatcattaacgtgcgtggagacagcatgtctggaaccattgagccaggagaccttctattcgtagatataagcatccagcactttgatggggatgggatttatgcctttttgtacgacggtacagcccatgtgaagcgcctgcaaaagatgaaaaataagctattggtgatatcagataacaaaacctatgccccatgggaaccaatagagcgtgaagaaatgaatcaactgtatgttttcggaaaaataattggcagtatgcctcagacatacaggaagcatggttag

SEQ ID NO: 83535 - DNA, 1017 bp, Citrobacter koseri
atgacagatatcattgagcacgaaagcgataaagagccatcgggtaaagccaaaggtggtaaagcaagagctgcaaaaatgacacccgaggaaagaaaagcggcggcagtaaaaatggcagaggcaaaaaaagagttagcaaaacttcctgaggttgcttacggttcaccagacaccccccttcgtataggcgacgtcgaaatacaatgctatgtattaagcgatgggactagagttttatctcaacgaggcatagcaacgggtcttggatggtcggggtcagctgccggtgatcgacttttaaatttggtcggcggtgatagggtaaaaccctttttcaacaatgagttaatgccggttatcgaaagcccgataaaattcaaaaacccatcaggtggtggtatagcgcatggctatccagcaactctgttagctgatatttgtgatgcattgctggccgcgagaaaggctggaaccctacagaaacagcaagagcatatggctgaaagagctgaaatattggttcgtggttttgccagggttgggattgttgctctcattgatgaggttactggctaccagagggacagaaagcgtgatgctcttgcggctatcctagagaaatatatcgcaaaagaaatgagaccgtggcttaaaacattccaattagagttttttgaagaactatgtcgcgtgtggggatactctatgcccgaaaaacccggagcatatccgccggtgttcgcccatgtaatacgaaatatcgtttatgacagattggcacccggtgtaagatcgcaactgcaggacatcaagaagaaaagaggcggcaagatgcatcagtggctaacgggaaatgccggatataacgacttaaccaggcatctcggtgaactaacaatgcttttgcgcgtgacaccagatggacaaaaagatcaatttttacaaaatctggataagttcaaaccaatttatacagttgagcaactgattgaggcttccaactcaaaggtgtaa

SEQ ID NO: 83536 - DNA, 177 bp, Citrobacter koseri
atgcatatcgcggaaatgcggagtcggctgttaagcaagctcttcgtcagcatcgagacgacaacgtcagcattggaagtcatggagaggttcttcttcatggtggaaggacagtgcgaattcaatagacccgctccggcgggttttttatcggacatacctcaccgttttcaatga

SEQ ID NO: 83537 - DNA, 240 bp, Citrobacter koseri
atgagcaataaaactggagggcgcgctttcccgtgtgattctatcgtggagcgcgacgaagttggtcacttacatggtttcgaagtcagctctggcggcatgacgctgcgcgattacttcgcagctaaggctatgcagggtcgattagcgaatcctgactggttgtgtagcgatgaccgcacggcaaccgaagcataccagatagctgacgcaatgcttcgcgcccggggggcatcatga

SEQ ID NO: 83538 - DNA, 282 bp, Citrobacter koseri
atgaacgcatatctcacttacgaccgaatagaagatcggcgctgggttgagcaacagctcaccgaggataaagaaaagtggattgatgaccgggcgaaagaactgatcgccatgttcccgaaagacccactttcaatgcgatccctcttccttccagcagcagccactcttgcgctaaccggtgataaagcagttgagcattacaacgactatatcactcgcctttgctacgaccgcgcagaagaagagtgggatcgccttcacccaacctgcccgttttaa

SEQ ID NO: 83539 - DNA, 1077 bp, Citrobacter koseri
atgagcaaagtaggcgattatttctttgagttcccggcgtcgcgcggcacgcagggtggtacggtgacttacatgatcacggctcctgcccgcgcgctgacacgcattcttgcgtcggacaatcacggcagcacgctagaacgctcgcaacgcgaaatcaatcaggcccgcgtgaagaagttttaccagtacctcgtcgatgcctacaaaaataaagaaccattcatcatcccgccgctggtcggaaactgcgacgcggttattgagttcgaagagttcggcaatacgaatgttggcgtagcgcgattcccgatggatgcggttataaagctgttcgacggccagcaccgcgctgccgggttagctgagttctgccggacatacggagaaccaatcagcatcccgctgatgctgacccataatctcccgctgaaggcacgccagcagttcttctccgatatcaataacaacgtctcgaaaccttccgctgcgatcaacatggcctatgacgggcgtaatgatgtggcccaggggatggtgacgttcctgtctcagcatgacaccttcgcagaggtgacagacttcgagcacaacgtcgttccggcgaaaagtaagttgtgggtgagcttcaaggcgcttagcgacgcgacggccaagtttgccaacgcgggcagtaagccgctggaaatgggcgacatcgaatccatctgggaggcctggttggcactgacgcagatcgaagcgattcgccacggcaccagccaggcagactacaagcgtgacttcattcagttccacgcggtgatgatcaatgccttcggctacgccgttcagcggttgatggctgaccactcaattatcgatatcgtccagatgattgaggatctggcaagtgatgcgggctcctccgagatggaagacttcttcctgatttcccgatggggtggtatctgcgtgaatgccgaaaaagaccgcccaacggtcattgcctccgttcctgcgcagaagtcagctgctgaaaggttggtgtccgtaataagaaacggtgaactggagcaaaaaaatgccgcagcataa

SEQ ID NO: 83540 - DNA, 519 bp, Citrobacter koseri
atgccgcagcataactatccaaatggtaagccctggtctgattccgacattgcttttctccggagaatggccggtgtaatgacgttgcgtgatattgcgtcagaactgaaccgcactcatgcggcggtacgaacgatgagtacgagactgtccctcaatcttcgagaaagttacagcaggtggaccttagcagagattcagatattgagatcgtgtgcgggcaccatgagtgccaatcaaattgctggaaagctcgggcgcactctcgattctgttaaggggaaagccagcctgttgggattaagcctgctatgtattggcgaaagacatcatcatgcagtttacagtgatcacgacgtatctctgtgtgttgcgcttcacgaagagggcctgtcacaggcagtcattgctgaaaaaatggagataccggcccacagcgttcatgcgtttatacacggcagacgacttactcatgatgatactacgtggaggaatatgtctcggaaaggaggcgattga

SEQ ID NO: 83541 - DNA, 231 bp, Citrobacter koseri
gtgaccaaatacgcgaaactggatagcgaagtgttaagcgctatcggcgctcagcctacctcgttttctgagctatttagcccttccgtcagacaggagtgcctcgtcattgctgaagcagaaggaaagcacccaatggacgtcttccgcatccttgaccgccgactccagtcgctcaggaagcttggcgttattcagcacgtcaaaggtaaagggtggatacagccatga

SEQ ID NO: 83542 - DNA, 246 bp, Citrobacter koseri
atgagcaataagtgcacgttggatggaaatcaaattaatcgctgcgacatgctggctaaggccctcgagtacggtaacccatcatatcgttcgaaaggcgcttttatacctgagcgagtgaatttcaacactggcaagccggcaatcgatattgcacaactacactccggcgagtatgtcggacgtggcatcgctatgcatttctgccccttctgcggggaaaatattaagacatgggagcagtga

SEQ ID NO: 83543 - DNA, 447 bp, Citrobacter koseri
atggattacggcaagctaactgacgatgaaatcaatgcgttggtaataaagcaacttatcctcacgggcttttacaccgacgatccgcaggaagttagccaccggcaatacgttagcgatggatggtgctggggccgaggtacagaaaccggaatgcgcaacaaagacggctctgttttcgttactcaccagaacggacatcgccttgatttttgcaatgacgccgatgtggcctggcagctgatcgccaagcacagaatctccatcgagtttgacggtgaccacagcacagagcaacaaactacctggtgccatacgcgaaatctggacaggacgtgcggtactgattaccagaagaaccccctgcgcgccgcgatgattaccttcctcttaatgcaggagcttcccaatgttccagctaattcaacggggtcagatttacgctga

SEQ ID NO: 83544 - DNA, 327 bp, Citrobacter koseri
gtgaaaccttacgaatcgaagaaatcacagttcaccagaaacctgatccggcggcgccacgctgaatggtcagaaaagaccttcggcaatgtcggccccatcggacctctgaagcacctttcgaaagaggcgctggaagctgctgccgatcctgccgacctaagtgaatgggctgatatgcagttcctgctttgggacgcgcagcggcgcgccggtatcaccgatgagcaaatcaccgcggcgctggaagaaaaactaaaggtgaacatgacccgccactggccggaaccgaaagaaggtgagccgcgcctccacatcaaaccatga

SEQ ID NO: 83545 - DNA, 321 bp, Citrobacter koseri
gtgccggaaggggccagggatgaagctgtcccgcagaacgtcagacacctcctggttcagtgtgcctatttcgacgagcagcagttgcgccggcgtgccggcctgccggctcagacatttagccactggcgtgaccgcaatgcggtccttaatctgtcgtctgaccaggcatctgatgcgctctggctgtcagcgtggcgtgatttccgggcacaactggcctcggcctacccggccccggcggaaaaaaaggcacaggggaaagaggccgtacccgccggcacgaagcccggcactgagcatgggagtgcggcggattga

SEQ ID NO: 83546 - DNA, 249 bp, Citrobacter koseri
ttgaccggttttgacttgatcctgtggcgacggggcctgaactggacccaggagcgcgccgcggctgagctcggtatcagccgtaccagcctggtaaaatatgaggacggtgagacagtaccccggaccatacaacttgccaccgtcgcgctgacgctgaaagcggaatggcccaccctgaaaaccatgagcaaagacaggctgctgcggcagctgaagtatgaagtgctgaggatcgataatgaatga

SEQ ID NO: 83547 - DNA, 588 bp, Citrobacter koseri
atgaatgagtttatccatgttgtcggctcatttatccttgcgggtatcctgctgtatggcctctggcagggtacacggcgacgccggcgccggcatgaacggaaacaggccagtgcggtgcgtgtgatcgataaaattaatacgttcccgcatttcgggcagaaaattgcctatctgcgcaagattgacccgtttgtgttcgaagagctgctgcttgaaggctttgaacgccggggctttgaagtgatccgtaaccgccggtataccggtgacggcgggattgatggccgcgtgaagattgatggccagacctggcttatccaggccaaacgctataccagctatattgccgttggccacgtccgtgacttcagcgacctgctgaacgccaccggtgcccgcggttttttctgccataccggcaaaacgcgcgaaggcaccaaatcgctcattcgcggagacagccgcatgatcctggtcagtggccagaagctgctagaccttattgccaccgatgcgccgtttatcccgtatccgggataccggccaccggccgaaatggttcatcctgaacaggagacaacatga

SEQ ID NO: 83548 - DNA, 486 bp, Citrobacter koseri
atgaaactgaaaggatacgtcgccgccctgccggcactgctgctgacagggtgcgccatgctccccggacagcccaccgattatgaccgcttctgtaacgtctcaggcatcgccagccacggcgaaacctaccgtgtcagtgacagtcaggatttctggttaaccccgaacggccgctatctcagccaggctgagtacagcagtccggcagatacgcttcagaaactgacgggcgtggtcagtggtgaagatcctgaccaggtgcggaagaacgccgtcagggtaagggtgttccgtgttgaaagtgagagcgccagtaaaggggcgtgcctgcccgtgcgttatgacgataaaaacgcgcggcggaaaatggattcgctgactaacggccgccgtatgatggtgtacagtgaagatgaaggccagtctggccagcagatttacaataacagccgcggtgccggcttcagttacaggttgctatga

SEQ ID NO: 83549 - DNA, 249 bp, Citrobacter koseri
atgagtggattgaaaggccgccgtatcagtgcggatatgtttgccataatgctgaagatatctgccgggcagctggtttttgcagcacggcatgacaagccgttacgcggactgaccctacccccttacagaatcgaaggcggaaaaagctggagctcgaccacctccacccgcagtatgacgtttgatatgcaggatgcggtcgatttcagcgagaaatttcataaaattcagtcgcctgacggctga

SEQ ID NO: 83550 - DNA, 729 bp, Citrobacter koseri
ttgaacactttccccctgcaaatttctcagaattcacgtagcgacgccatcgggacatatgcctacttcgattatgccgatgcgctggcgctgcgggagatggccagccaggctgatttacccaaatacctgctggccccggaggtgtcggtgtttctgcggtatgtgccagacctgcgccagcaggtccttttcgataccctctggaacacgggcgcgcgtattaatgaggcgctggcgctgaccggcgccagctttcagcttgacggttcccggccgtttgtccggctgaagacgcttaaacagcgtcagcgtggccgcggcaggccgggcaaggatgaagaggtgttccgtcttgttcctctgaccgatcctcaatatgtcaggaaggtgcgtgaatttctgaccaccctgcgtattggtaaacagcagctgctctggccggtgcagagtgataacacgccgcgtaactggatcaggaaggcactggacctcgcaaaacgtgactctgtcacttttagtatccctgttacctgccacacgttccggcacagcttctgtatgcacctgatccagcatggggttccgctgaaagttgtacaggcttatgccgggcattcccggctggaaaccacagaaacctacacgcgcgtgtttgcgctcgatgttggtcgtcagtatggcgtccggttcagcctgccagacagtcatttaacgctcccggaataa

SEQ ID NO: 83551 - DNA, 975 bp, Citrobacter koseri
atgcgtatttttgttgacgacggttccaccaacatcaaactggcatggatggaagacggtgcggtcaaaacgttgatcagtccgaacagcttcaagcccgaatggtccatgacgttgctgacagattcatcagtgccggcttccgccaactatgaaattgacggggaaaagtacagctttgaccagctgagcccggatgccgtgcgcaccacggaaacccgctatcagtacagtgatgtgaatgtcgtcgctatccaccatgccctgatgcagtccggcattgaaccgcagccggttgatgttgtggtgacgctgccgctgggcgagtacctggatgaaaacgatcagcctaatatggccaacatcgagcggaaaaaagcgaacgtgaagcgcgcggtggccgttcaggggcgtgagagctttaccgtgcgtaaagtcagcgtactgccagagtcggtccctgcaggcttcagtgtgctgaaggatctggacgatctggactccctgctgattgtggatatcggtggaaccacgctggatatcgcgcacgttcgcagcaaaatgtccggcttcaccaagacacattgcgatcctaaaaccggcgtatccatcatcaccgaagccgtaaaacatgcactggataccagcgtgagcacccgtaccagttcgtattttgccgaccgtctgatccaggcgcgaaatgacgaaacgtttctttcccgttacctccagaacgctgaccagcgggcccaggtgatgaaggtactgcatgagcgtgaaaaagccctgacgcaccgtgtcaccgattcagttggccgctttgccggcttcacgcacgtcatggtggtcggtggcggtgccagcctggtcgccggcgcagtgaagcaggcaacgggggtgagtgacgatcgtttcttcgtcagtgataacccgcaattcgatctggttctgggtatggtggcaatgaagggctga

SEQ ID NO: 83552 - DNA, 444 bp, Citrobacter koseri
atgactgataaccgtaagtgctcgttttatatctacccggagcgcaatgcggcggaccgggtagccgacggctttcttgagaaactgcctcagaaagagcgtggccgcgcgatgcgcgccatgatgctctgtggtgccgcgttgatgaagcaggacgaacgcctgccgttcctgatcgctgaattcctgacggagagcacctcgatgcaggatattcagcggatcatcagcagtacgctgccgcagcaggatacaggagaaatggcgcgtctggttgaggcgtttctgcaggccaccggcggtggcagcaatacggtgtcgccggcaggcggcgctgcgccggaaaacagtcccgccgtgactcccgaaccggccgcaccggaggataagaatctggaagaaacccgtaagaacgtccagcatctgttcccggatgatgattaa

SEQ ID NO: 83553 - DNA, 552 bp, Citrobacter koseri
gtgaaaaaatatgtgctgttaaccctgaccctcatcgccggcgccgtggcagcaaacccggtaacagcggccggcaatgttcaggcgcaaactgcgactgaagtgaaaaccgggttttcacccggcgggaccgcattaaatctggttctggattcaatcgaccacgcgcagcatgagattctggttgccgcgtacagcctgaccagtcgtcctgttgccggcgcgttgcgtgccgcaaaaaaacggggcgtatcggtggtggtggtggccgatcgcaaagcgaacgacaaccggtacaccgaagtgaactttctggccaataaccgcgtggcggtgcggatcaacgataactacgaggccatgcatgataaattcatggtctttgaccgccgcgccgtcttgaccggatcgtttaacttcagcgccagtgcagacagtcgtaatgcggaaaatgtggtgctgatcagcggcgcgcctgcagtaactgaagcctacgtgaacgagttttcccgtttatggggcgaaggaaaggacgtggccccacggtactga

SEQ ID NO: 83554 - DNA, 507 bp, Citrobacter koseri
atgcaatcattccccctgttcgtttcccgtgtcgtacctgtgatcaccctgagccattgccttcggcagcggcgctggtccctgcacaacacgtcatgccagattgacctgagatcaggttgtcacctgcgctcacagcctttcggcacgctatccagacgggaaataagcgaccgaccaccggctatgccccgcggttactggttcaggcaatgcagccgggatgtcatgtttacggggcgcatcgatcaggcagatcctatgaaacaggtctattacaacgaaggctggagcggtccgaacaagtatacgtttgaagtttatcagctggagaacgggagttaccgggcgctggcccgcaaatggaatggcaaaatcaacaaggtgcagcaggaaacgcagtacctgtctgacacgcgggaggggctgaagcaccaggactatccccgcacgcgccaggtgaaaatttttctgaattcagacttctgggagaaaggtaatgattaa

SEQ ID NO: 83555 - DNA, 480 bp, Citrobacter koseri
atgattaagatggttagcgtcgttccgcagccggaaacagtgaagacgctccgggaaaaaatgggcatgactgaaaccgcattaggggctgtcatggggtacgaactgcgcgcctggcagcgtaaggaagctatcagcgacgatctcagccagtacaacaagaccagtcttcgcccaggcgaatataacatgctgatgctgatcgccggcgtgcatcctgattaccgcctgaacagggcattcagtccggatgatatggtcaaagatcccgccacggccgaagacgttcgccgcctgcgtctggcgctggggctgaagcacgctgaaattgcagcgctgtttggctataaaccggcgtcatggcagaccaaagaaaaggctgctcagcgcggcgtaaagctcaaaaccggggaattcaatttcctgttacttctggccggtgagcatccttcactgcagctggttgagaaggtgaaataa

SEQ ID NO: 83556 - DNA, 411 bp, Citrobacter koseri
atgatcaccacacgccgaatgttaatgctgtatgcctgccttgtgcccgtagccctgacagggtgtgatctggctgattatttcccgaatgtgccacagcccgtgcccgtgatttcgcccggctatcaggttgatatcgatggccacccggtccgaatatcaggatttgatgactgcccgcgggataaagatgaagcccggcacgcagctgcacaagatgagaaaggctgcattgtgctgtctgcagagcgttccgaggtgaaggtcagactgtatcagccagccggcaccgtcaccgaaacctggcggatcatccgggaaaaagacgctcgccagaacgatattattcgcatgcagcgcccgaacggtgcgcttgtgatgcaaaatttacaggggaaagagtctccttaa

SEQ ID NO: 83557 - DNA, 264 bp, Citrobacter koseri
atgactgctctcaattctcagcaacaggctgatgttgcccgctatatccgggaacatggcaataaaaccgttatttcccctgaatggtcacttatttatttctcgctgtgtcagtgtgaattacatcaatcgcatgaagccattatttttcataatggccgacctgcagggctatttcttctgaatgaaacaggcgagctcaccgaattatatctgctggggtcgctttctgacattctcaccgccgctgcggtcaacaaatag

SEQ ID NO: 83558 - DNA, 363 bp, Citrobacter koseri
atgaccatgcaatcagaacttgtttttactgatcctatgctcaacgtcgttattgctgaagttaagcgttttaattgcccgcttctttttgtcaaagatcatggcgtgtatgtgatggcggcgaaaggtgagaaaaacagtaatgggatgcacaatgtctgttacgccaatggtttcaatccggatacaacggattttgacgagctctgggaccggatgcgtgatgcctgtggcggggatgatttttgcgaatccctggacctcgatccgaggtcgattgagcttctcagccgtaccaaaccctgcctgaaaattatgctttcagagacggaactggaagttattgcagggggacagaaataa

SEQ ID NO: 83559 - DNA, 450 bp, Citrobacter koseri
atgaaattttcagcagaagaactcaacattatccgccaggcggacgccattattgccggtaaaattaccacaacggattttatcaccggcgccgatgccgcgcgttccttactgcggtttcgtcttgttgcagaaccacgcgaatcattctgcgcgttctttcttaactgccacaacggcgtgattgcgtttgaagaactgtttaagggcactatcagcagcgtcaccgttcatccgcgtatcgtcctgcaacgcgccctgcatcataatgccgccgccgtggtactggcgcataaccatccttccgctaacactgcacccagccaggctgacaagctgatcaccgagcgtctggcgcaggtgctggggatggttgatgtcaaagtcctcgatcacctgattgtgggcggcagcgatatttactcttttgctgaacatggtctgatttga

SEQ ID NO: 83560 - DNA, 267 bp, Citrobacter koseri
atgggcaataaatataccgtgccgcttaacgtgggcgcgatccgcgaaagttgtttccgtcccgctgataaatggaccccgccgacgggggatgaactccgctatctgctggaaaatgtgctcaacctcagtcaggaggggctggcgcgacatgttggcgtgaacggcagaacggtgcgccgctgggtgaacggagaaagtgacatcgcgtattccgtctggtgtgtcctttgcatcgatgccggcttaccgccgatctggaaatag

SEQ ID NO: 83561 - DNA, 1284 bp, Citrobacter koseri
atgaatactgataactattttttcagagtcccggccacacgcggaatacagggcggcatagaacaatacatgctgacggttcctatggtcgtgttacgtcgtattcttgcaatggacaatgatggcgatgttatggatcgcagccagcgagaagcgaacaaaacgcgggccaaaaaaatacggaattatgttgccggcgcaacatcaaaacgagctccctatattttgccgtcaattaccggaaatattgatagtcatgttgaattccttcccagcgaactctcgccggcagtcggtattcttaaaattccgatggacgctgatttaaaattattcgatggccagcaccgtgcgctgggtatttttgaatttgtacgcgattattccaacacggaagatacgatcagcttattgcttaccgttggcctgccacttgagttacgccagcagtttttcgctgatattaataacaacgcgagcaaaccggcagcggcgatcagtatggcatataacaacaatgatccggtcaaccagctggcaatgcatctggcccgaaccgtcaccgggctggcgggcacagtggattttgaacacaacgtggtcccggcaaaaagctcacggcttatcagctttaaagcgctgaacgatgcgacgaaaaaaatgctcaacctgcgggccaacagcattccctcgccgcaacagcgtgacatggcagaaagactctggactgcctgggcgcaggcgatgcgctggaatgatattgcccaggatgatatcgccgcggagtaccgtcaggaggcgctgggactgcatggcatcatgattaatgcgatcggtatggcaacggccaggatgttacggcacagaacccctgaaagcatcgagaacctactggcctgtgctgaaaacggtgacaacggttttcattaccgggagtcgtttgtacctgagtgctgggaagggaagtgtgttgatccggaaacaggcaccatcaaaaccgacaggcggtcgctcgaagcaacggctgaagcgttgcaaaagctgatagatccgttcgcagatgcgctatggttgcgtgattacctgccagctgaggaggcgactgatatggcattactgaaatatgcagccgacatcgagaattataagcagcgtactgccgcgccgatgatcaatatcgtggagaagctgaaggcgctgggtgacggcgaaccgcagttcagagcgtcggtgctggcttccagtgaaggactgagccactatctggccggggctgaaggctga

SEQ ID NO: 83562 - DNA, 180 bp, Citrobacter koseri
atgagtaaagcactgaccccttcccagcttaaagctgaactggacacgcagaaagatgcgctgctgaaggcgtgcctgtatgccctcaacgaaatccctaaccgccgtttaagtggtccgtattcgtccacgtatgcgctggccgcgcagattagtaaactgcttcagagctgcaaataa

SEQ ID NO: 83563 - DNA, 861 bp, Citrobacter koseri
atgtcatctaaaaatactctcccgtcggtcgatctgatgtcctgccagcatggcggtgacgtgatcccgtccattgctattgagcgcattatctcgttgcgggatgaaggtatccgcgtctatctcgacggcatagacaagctgcgaaaagcgcgcgatctgatgcagcaggccggaggctgtcagtacctgtatgactacgacaaagcagtagagagcgccatcaaatggagcgacaccacgccagaccaggccgaaacggctatttcccgcgttatcgacggaaaaatctgggatcggctgatgacggaaaccggcatgtatacgctgatgagcaacaagcaacgtcaggaatgggatcggcaggtggcaggcaaagaaatgccgccgataacgctggataacgttatgagcacgttccggcacctgaacgcaagcaaggcggatactttcacgcaagggctgatagatatctttaaatccctgtcgtgggattataaaaccaataacccctgcatgtttggcaagcgtatcatcatcgcgccgttgctcgatgtctggcgcagtggctgggtgcgcttcagctcagacgggcacaccaaaattgacgatctggcgcgtccgttctacgtgctggacgggcgtaacgtgcctgattaccgtgtttctgacggcgccaaactggatgcttttttcagtgaaaaccagttcaacggtaaggtgttcgagtgtgattacttcagcgtgcgatattacaaaaagggcagcgcgcacattacgtttaaacgcccggatctggttgagaagatcaataatctggtcgccagtcactatcctgggatgttaccccctcgcgtgtaa

SEQ ID NO: 83564 - DNA, 339 bp, Citrobacter koseri
atggctattcaatcccttcagttccgtaacggctccgtttctcttggtgatgtttttgtttccagctggggttatgagcagacaaatacctgtttctatcaggttatcgccctgcgcggtaagaaaaccgccgtactgcgccgcatcgctgcgcagcaggtgaaagcagacagtgcgatgtcaggcgagttaaagccggttttgaacgagtttaaaggcgaacccgtgacccgtcgcattcgtgaaaaccatgagcatccctctgtcagcattgacgagtacgaacaggcttataagaccgatcctaacgaaagccatttttacagcacctggggctga

SEQ ID NO: 83565 - DNA, 231 bp, Citrobacter koseri
atggcggaaacagtttatcaggcgcggaggcgtttttaccttctccgttttcggcgcagccgtaacccggacacactggaaaaaatgtacgaatccatgcgggatcgtggacaggtgccgccggaggactccgaggcttttgaggctgccgccgaccatcgccgcgcagagctggcatcgggacgcatctgggataagatcccgccgcatgtctggcagtatgtaaaataa

SEQ ID NO: 83566 - DNA, 237 bp, Citrobacter koseri
gtgacaacgctgcatattcgagaaattcccactgatggcgcaccgcctatctgtgcaggccgctcaatctcagatgatgacctttgcgcctcatgccagcatctcgactatcgccctgggcacctcagcgcctgcctgctgtcaggttgcgggcgtgacgactggccttcagaactggatgaaaacggctacagcgttgcctgtagccgctatgagcgtgaaaaattgcttgattaa

SEQ ID NO: 83567 - DNA, 411 bp, Citrobacter koseri
atgcacggtaacgtaaatgaaatttgcgcaaggcttctcgatagttttgaaccacagcagcggatcagccttctgatctggactgctgaagatgtccatgactgcaccagtgatatgaacctcactgacgatgaggccgaagccgttctggcagaaatcgcggaatgcagttcacacagccgttatggcgtcggaaaagataccgtctggagcctggcaaagcaggtgcgcgaagatgccgcccgcgatcgaaaaatcgaggtcaatgccgaggcgctgcaaaaagtcgtggcgctggcggcgcagtttatccggctggaagagatccagtctggtgaaggagctgcacgccgactttatccgcaggagtctgaggcgctggagtgcatcacgaaggtgattaacggctaa

SEQ ID NO: 83568 - DNA, 306 bp, Citrobacter koseri
atgtcccagaatgaagcctattacgacacgctggccctgattgaaaaggggcaatggtgtttcggcagtatggacgaagaaaacgaagagcgggcaatcaaggccgctaaggcgctggcgctgtttgcgcgcctgaatgagcaggactgcgacggacacccggtttccgaaatcatcgttgattttatcgctaacctgatgcacctgggggaagcgataaattttcgtgtgctcgatgaggaaagcgcggtgatcccgttggtcaggatggcagccgtacactttaacgctgaaacaaagtcatag

SEQ ID NO: 83569 - DNA, 441 bp, Citrobacter koseri
atgtctactgaactgaatcaacccgccatcactgcacgcattatccccaataaccgccgcatggcctttctgccacgcctgttcggcgcctggtatctcacaggtgaggccggtgtctacaaccacgcacgctctctctgcgccgattatcaaggcggttcctgggagttcgtcgaactgtcttgcggtagcggcttcatgtacccactgagcgcagagcgcttcacggtatcggttagcggtaacttgttcgaaggggaactgtccgcagaagctaccggtatcgtgctgaccctgttcaccctgaaccacatgatctggcacgcacatgaagaaggctatcagcacatctgcgacatgctgatcacccagcaggaaaagctcaaattatatgccgaccagcacgccgaagccggtttgatttaccgcgcgattgactga

SEQ ID NO: 83570 - DNA, 285 bp, Citrobacter koseri
atgttaacactaactgatattcgcgccagcaatacggtgctggttacggaatttggcggcgtgcgtgctgtgcatttctgtctgcatgaaaaattaagcggtagcgacaacgatctgtggtttccgctggccaatggggccgacctgttcgaggcgctggaaagcattatgtgcatcaattttgccgctgctaacgttgtctcgctggagttcctgcggcagaacgggaagtgcaaagactaccggatcacctacaacaaggccaaattcaagccattatgttag

SEQ ID NO: 83571 - DNA, 222 bp, Citrobacter koseri
atgaaagaagcagaccaaaaaaaagtgaatgccgtaatggcaattgctgattatctcggtgtaaaaaatcaaatcgaggtgatcgaatactcagccgaatcagtgcaggttgagtggcgaaatcctaaaacaaaacagcttattcatcgtgattacacttttgcaatttcctttgtaaaagactttgaaaaagccctgaaatcgaacgtgaagttttactga

SEQ ID NO: 83572 - DNA, 435 bp, Citrobacter koseri
atgtggaaacgtggcgaaaacaaagtgattctgatggggcgtgctggcaaagatgcagaagtgcgttacaccccaaacggaacggccattgcgagcctgacgctggctactgaaatcagctacagcgacaacgaagggaaggagcaaaaagaaacggaatggcatgatattgtcatttttggaaagaaagctgaagcagctgggaagtacttcaaaaagggtatgatgctgtattttgtcgggcgcattcgtaataacaaatggcaagggacagacggcaaaatgcgcagcaataaggaaattgtgatcgataataacggcgaaatgcagatgctgccgggagctgggccacgtaacaccagtgctgaaggtctgggaggtactgaaaatcatgatgaaccgccgttcccggatatgaatgattacccgcagtga

SEQ ID NO: 83573 - DNA, 312 bp, Citrobacter koseri
atgaatattagtgaacaatatcgggtggctgtcgtcagtaccggccatgtaaaaaaagaagacgcggagctactggataaggtctgtaacgatgacttgtccggtgaaggtttattctggatcgagaaaaatcgctatgggtggatattgcgtatttctgctactgaacaatggcgtgtggaattaaccagggcggggatcagtgcaagtgctttggataatatagccgcgttaaatggtgccgggttcgactggatttggtttgaccgggatgcagaacaggtgccagaactgaccgtttgggagtggtaa

SEQ ID NO: 83574 - DNA, 537 bp, Citrobacter koseri
atggcgaccttatacccttatgaggtttatacccttattgtgtcagaattaatcgtaagccattttaatgatgtcgctatggtatatccgggaagcgaagaaattaaaaagaactacgacagtgaattaagtgctgtacaggtagttaatggcatcagagaaaaactgattgaagatggtgttatacagtgcgaacagtgcccactgctatccgagtgggatgagaacaaggttatcaaccagctaattaaagattaccgcctgattctcaatcgtgactatgaactaaaccgtgttcgtcagcagctggccccggagctgatcgcacagatagaaaactggaaagagcagaagtattccgattctgcgaaggaatacgaggtgctctatgaaaccatcaacatcaacggaaaggaggttacaggaaaactaaacgtagttgcagtaagtcgctttgatgctgttttcatcgtaggacagcgtcacgctaacgataactttttggttctggatgtaaaggaggtgatgaatcattga

SEQ ID NO: 83575 - DNA, 141 bp, Citrobacter koseri
atgccgttgtggattatacactatgctgaagatgtcgcaaacggagtgcaaacaaagtcgcatccgatgaacgcagcgcaatgggatcacttccgtttctggttggcagtgttccggcggattaaagaagccgcgatgtaa

SEQ ID NO: 83576 - DNA, 366 bp, Citrobacter koseri
atgcctgcaaaaaagaaagcattctatagcagtgaggacatcggaaaattcaaaagcattctcgacgacttgcctgatgtgacgtcagaaaggcttgagaaaaagcacgtactcgatgaacttaagtctgacattaagaagctgaaagattcgaaagggtatgaagataaagagatactgaaattcctcaacgatgcgggtttttcagatgttacattacgtgatatcaaggacattactgccggacgagttggtaaaaaacgaaccagcaacagccgaaaaaaaaccactggagttgacgaagagcagcgcacgcaaaatggctctacaggtcagaatcctgatgcttcaggtccgcagtattaa

SEQ ID NO: 83577 - DNA, 318 bp, Citrobacter koseri
atgagccgtagcgagagcagaaaaacagacgatcgaatccaggtgagatgttccacagaagtgaaagctaaactcaccgaaaaggcccatgaagcagggcttagtcttagtcaatatcttatcaaatctgggcttggaaagcgcattcaatcgaaaggtaattacaatgcacttgccgctcttgtaaagataacagcccttcaaaaacatctgtttaacgaaggtgccggagttcatagcaaggagtattcagagattctgatcgaggtcaaaaaggccgcacagaaactgcaacaggagatggatggtgatacctaa

SEQ ID NO: 83578 - DNA, 1980 bp, Citrobacter koseri
atggtgatacctaaaatcattgagggccgaagggacaaaaagtccagctttggtcagctgattaagtacatggcagacaagccgtctcaggagttgactgatacagttcagcctactcctgagacggctttagctgttaaatcggatatgttcgaagggttaaacaattacctgacccgtaagcagaaagtgatcagcacaccggtggatgttgagccaggtgtacagcgtgttgtggttggtgatgttacctgccagtacaataccttctcgctcgatggtgcagcacaggaaatgaattcagtttctcagcaaagcacacgctgtaaagatccagttatgcactatgttctttcatggcctgactatgaaaagccgaatgatgatcaggttttcgattcggtgaagtttacactggcatcgatgggcatgtccgatcaccagtatgttgctgccatccaccgggatacagataacctgcatgtgcatgttgctgttaaccgcatcaatccccagacatataaagcagcctcatcgagctttaccaaagacactcttcatcaggcgtgccgcttactggaattgaagaatggttggtcccattcaaacggtgcatatgtggttaatgaccgtcaacagattgtccggaaccctcacagcaagaaagagcggggcaactggcgctcactcgatcgcatcaacaagatggagaataaagagggggttgaaacgctctatcgctatatcgttggtgatgaacaggtaggcggtagtcgtcaaaacttgatccatgtttcagctgggcttcgtgaagccaaaagctgggatgatgtgcataagacatttgcagacatcggtcttcgtgtcgaaaaagcacaggggaaaaagggctacgtcattacccacgaacatcaaaaccagaagacggctgttaaggcgagtctggtatttaacaaggcgcaatataccctgaagtcgatggaagagcgctttggtgaataccagccttcacatattgaaccggccaaagtatcggtatttaaaaccgcatatacccctggtgcttatcgtcgagatgccaataaacgtctgcagcgtaaaattgagcgcgcagaagaaagaatgctgctcaaggggcgctatcgcgcctaccggaacaatttaccggtatattctccggataaggatcgcatcgccgatgaataccggaaaattgcccaacatacccggttggtgaaaaataacgtccggcattctgtttcagatcctcataccagaaagctgatgtacaacctggctgagttcaaacgcctgcaggcggttgccaatctgcggcttagcttgcgtgaagaacgcaacggtttcagagcggctaacccacggctttcttaccgggagtgggtcgaacaggaagcactgaagggtgataaggcagcgctcagccaaatgaggggctttgcctattcctccaggaagaaggagaagtataaacagcagctggttgagcagatcgggttcaaccgtacctttaacgccatcaccagtcatgatcgtgatgatgtggccgtaatggcctcagcacgtcatggtgtcaagccacggcttttgaaagacggtactgttatctttgagcgcgacggtaaaccggtagcggctgatcgtggtcatattgtgctgacagaaagtaatggaatcgacaaagagaaaacggctgatcttgcaattgcattaacgattgctggtaaagccaaatctgtacgtgttgatggtgacggcgagtttaaggaactgtgctgtaatcgtatcgtcgatgcagctgtgaaccacaatcaccctgtcgcgcagggcattaccttcacagatgccgctcagcaggcgtatgctcaaaacgagaaacatcgtttgattcgtgagcaaaataatagtaaaaatgaaatgcaattcagaagtgaaagagacgacaaattcaatccgaagtaa

SEQ ID NO: 83579 - DNA, 501 bp, Citrobacter koseri
atgaaaatcaaaatgcaaacggtcctcgcggccgtttctgtgttagctcttgccgggtgtgcctctcaaagcgaaaaggaaaaacaaatctctgcacagcagctggtagatcaggaattgcgtgagcaagccattaagataaaactcgcacaggatgagctttaccaggctggagccattaacaggacccgttacaaattccctaccattatcaatgcaaacagtcagtatgttcgtgtgagctggcagggtgatgcttacgaattactggagcaactggctaaacagcgtggccttcaattcaccagtcaggggattaagttaccgcttccactcaatatcgatgttggtggttcgaaggttacgtttgaacagttgctgaccctgatccgacaacaaacgcagtaccgtgccaccatcaaccagaaacccggtgaactgcagctgctttacctcacaccatcgaagaaaggttcattcctcagagggacccgcccatga

SEQ ID NO: 83580 - DNA, 780 bp, Citrobacter koseri
atgaaacttaaactgatcgtgcttctgacgttaccgctgcttgctgcgaacgttgcacgcgcggacgactccgatgttaaaggcctggattactacatggacccgccaagccaaagtgacgatgaggccgatgttactggcagtatgctaaacgacgcagcgcacaccattggatttcgcggcggtaaggcagaacgcgctaaagaaattcgcgccgcgctggaaaatcagcgcagcaaccttgattacatgtattcgttccagccgctgatctcttctgaaggctacctgcctccagtcattgctgaagctaaagacgttgcacacattaccaatgagcaaatccgaacggccaaccgtgcctatgacattgtggtgccggcgcgctttgtcagtaacccaccgacatggaaaagctatcttctgaccgggctgatggcgcagcggatcgaattgcctgaaccggcggcaatgccgaaggacgggaaacaacgtgatatctggaaaaaagctgtcgcgctgggctggtctgacggtcgccaaaaagctgatgagatattcactgctaatttcaatcgcctcacacgggattacaccggcatgttgcgctacagcacgctactgcagcagggcatgattaaggctccagtcatcacacagcagcagcaaacagttacaggggataaaaaccgcctcatgctgggcgataaaacgaaacgtatgaagcagcaagctgagtttgacatcaacaaacgcagctggaaaccgaccatacgttaa

SEQ ID NO: 83581 - DNA, 1164 bp, Citrobacter koseri
atggaagcattcaattttggtccaacgctgacgccccagacgctggaacgttttctcgtacactgctcaaacaatgaagtgtccgatattctgttgcagggcggagataaaatctgggtagaacgtcatgggcgccagttgcccatgacatcttacccgctcgacaacctggagctggaacgtaccgttgataaggtgttcggtcaggagatcaaagggacgctgaaaagtgctgcggtcgttaataccgctatccagctaagaggtgatgaagcgggcacgattggactcggccgcggcgaaacccgccggttccgcgcgaactttactcaggccgatatttataaaacagaagcggcaatgtctctgacactccgtgttctgaatgaggttattcctcagcttaaacaaatgggtattgagccggacctgtttaattctctgttgccggctgccggcctcggactgatatgcggcgagacgggatcgggcaagtcaaccttgatggccagcatattccagtattgcggtgaaacgtaccaggaccggaaaatcatcacggttgaagatcccatcgagtatcgcctgggaagtcgagactggattgcgccggcgccggcacagtcacagattgggcgcgatattgattccttccacaattttatcactctctccgggctccgtcgttctccgaagattatgggggttggtgagctccttaaccgcctgtcatttgaagctgctgtactggcaggtaaatccggccacttttgtcttggcacactgcacgtcaaaacggtcggagaagccatttcccgatcattgcagaactatccgccggaaatgcgtgaagctgccgcctttgacctgctgagtatcctttcttacatcatcgtgcaacgcttgcttaaaacaaaagacggccggcgcaaggctgtccgtgaatatctcgtcattgataacagcctgcgccgcaaactctatgacgttgattacagcaagtggggccgctacatcgacgacctgttgatcgctgaaaaccgcagtctgattcagaatgcctgggcaatgcaccaggaaggtttgatcgacgaagcggaagtcatcgaggtcgcaggatatatggactatctggcgttaaaagagggcaagtatggacattaa

SEQ ID NO: 83582 - DNA, 261 bp, Citrobacter koseri
atggacattaacaaatggcgttatgccggccggccactgacggtttttggtgtgcctgttatctcgtttcttgtgtacttcatctggtttccgttcccgtcagtaaaaacctttgttatctgcacctgtgtggttctcttttactttctgctggccatgatgggctacacgttaccggtgctgtaccaggtcattctccgggttatccgcgggaaaaaacttaccgggcggccgtggtggtaccggcgctctcagcgataa

SEQ ID NO: 83583 - DNA, 3213 bp, Citrobacter koseri
atggcgaaacctgaaattgcaactgaaagaacccgtctgagtattccctttgacgatcgccaacgtgcaatacgtgcggccggcaaactggctgatggcagtaatgctctggactacgtgaaggaagaaaaggtgtggtatgcacagccgggggccaacctgagccggctgaaagagtggatttttgaccccaataaggtgatcgaagaaccgcccctggatattcaagccattgaagatgaatttacggcgtggcttgaagagcgcggtgccattatcaaagaccccatagagttcgatggccagaagcattatgtcgatacagtggacggtaaagctggttcaagaaagggggtgtatgccgcctttctggatggccgacctgcagggtggtacagggactataagaacggtggtgaaattcagaaatgggtatctaccggcgcagcccctaaccctgaacaaatggccatgctccgtgctgatgctgcggcaaggcgtgaacaaagagctgcagcgcaagcggataagtttgatcagaccgctaaccggttgatggaagaatataaccggcttccggatgccacgggagatctggcatacctgaaaaacaaacaggtcattgccgctaacggccttaaagctgatgagcggggcaacgttgtgatccctctgtttaatgctgatggcgagttcaggacccttgagcgcatctggtccgacggtagtaaacaccttgaaaaagacggccaggcatgggggagttttttcgttgtgggtggccaactgaaggatggtgacaacctgctttatgccgagggatatgcgacagcagccagtatcagcgaagccatcaatcagcctgtgatcatgacggttaatgccggcaacatggtggaagttgctggccgcctgaaagacacctttccaaacagcactcattacttccttgctgacaatgacatttataaagacgagaacgttgggctagaaaaagcgacagaagctgcagagctgactgccggccatgttctggtccctgcctttagcaacccgaaagaagggcttactgactacaacgatttgcatgtctctgaagggctggagcaagtcagattgcaggtagaaggagccattaatcaaatgaacagggtagacactatgccgactgataacccgaacattactgacgttaatcacagctcgactgacagcgctgccgttgcagctcctgaaaaagccgcgccggtggccagcacccctgcagctgctgaaccggtggaagccgcgccggtggccagcgcccctgcagctgctgaagcggtggaagccgcgccggtggccagcgcccctgcagctgctgaaccggtggaaaccgcgccggtggcaagcacccctgaagctgctgaaccggtggaagccgcgccggtggccagcgcccctgcagctgccgaaccggaatacgtcgcaccaacagatcgagacggcgatgatgaagagagtaatagcgccagtgatcttgaggcgtatgccgctatgatggcctttggcggtgaaacaactgacactgctcagcaaaagcctgaagggatagcgcccagcgaacctgtagctaataccgccccggctgaaaatgaaaccgaggagaagaaaaaaacaaacgaagaactggaaaacggcatacgctgggcaaccaacgataatgcagaaacgccaccaaaagaacgtatagacctggaagggttaattgcccggtttgggtacagagcagagaaagactatacggcgtatacgcttgatgggcaggatgcgttttacgattacggttcacatctgcgtatggctacccctgaagccagccagagtgacgagatgatcctggcggccgttcttaccgcggataagcaacatcatcgtggtattgaaatcaccggcagtgacgaatttaaagagcgagtgtttaaccttatcagtgaatacaacattgaggtgaaactgactaacccagaacaaagggttaaattgctcgaactcaaaaaagcaaatgaaacagcaaaagaaacggcaaaagaaaatgttgctgattcaaatgcgaataagcaggaaggggcaaacgaaaaggcaaattcatcagttcagcagaatggaatgcgctgggaagaatcggcctctgtacagccgaagaagcagaatgcatctgatactcaaaaggaagataaagctgcgggtgaatcctgggagaaaggcgttatcgtcgcgcatggacgtgctaagtatgagtggaaagatgatgaatccatgaactactttgtcaccctcaaaaatgaacatggagagaagacactctgggggaaagaccttgagagagcggttaaagatgctggtgtagacaccgaacgtcttgttacagtcagaaagctgggatttgtggatgttgaggtgaatgcacctgtccgtgatgaaagcaacaagatcgttcgttatgaaactatccagaccaaacgtaatgagtgggaagtaaaacctgtatacccacagccaacagcagggaatgaacaggcctataagccttctgaactggttccgtatgatgctgcaaccttccagaagctccgcacaacaattcagcagattaccggtgttgatctcagccgtgaggccgtgcctgaaaaagaactgtattggttcctgccgaatggtaagccagctcctgaaagcatgacaaaacccacaggctataaactccctcaagagtcaaaaaccgcgggtacacctttgctggtcgcaccgcataaaaaaggcgaacgcccggattattaccttgttgagtctcgtaaaggattcatgcaggggatcgcaaaggataaggaatctggcgagtaccatagcgtaattggtaaagtgaacaagcgtattgataaagatggaaactggaaaacgtatatgacactttcagcaatcaataaaaatgcagaaagtggaattgttttgcacggatacggccatgttgatcagggaggtaaaaacctgctttacaaaaacacaattgcaaatgaaaaacagcctcagcatttacaaccggcctcagatgaggtaaaaaacaaaacagtaatgaagcagctttttcatccttctaatgctgcaaaaagaaaagatgatgaaaggagagaacagactcatgcaccagtcgcaaagtcagcgcctcggccataa

SEQ ID NO: 83584 - DNA, 513 bp, Citrobacter koseri
atgcaccagtcgcaaagtcagcgcctcggccataaaacaaaaaccctactcgtagcagtagggttttcctgcatttctgtgagctcatttgcagccacacagacctgtgcagcatacgaactggcaaaagctggtgctgatgctgcctataaacaggaggttgaacggattaacaacgccgctaaaagtgaatccagtacatctgattctctcggacagtgcctggggtcgctatcggtatcactaaaaatccctcaatttccgtctatcagcgacatcattgataaggtgaaggatgaggtatgcaatacggttaaatcgaagataaatgagaagtgggggagcctgactaatacaacgctggacccgtggtcaacgatttcatcccgactgccagatacgtcaggtatcctgcccaacgcatcttctaagaatgtgcaattaaacaatccggcagctgcgagtggaagtggtgaggatgcaaacagtgatgcattcccgttccatttgtaa

SEQ ID NO: 83585 - DNA, 198 bp, Citrobacter koseri; identical to SEQ ID NO: 21570

SEQ ID NO: 83586 - DNA, 411 bp, Citrobacter koseri; identical to SEQ ID NO: 21571

SEQ ID NO: 83587 - DNA, 714 bp, Citrobacter koseri
atgaaaacacaaaatggtgaaaatattatggatcaaactgactcggatcaaaactcagtcgttgatgatgacagcaacgcccttgctccagctctggctgaagagagtaaccgaacggtacaagaaatcgtatcgaaacatggtttaaaagtaattttgattcaaacgctaatcatattagtcgcaatcattatcattggtcttcagggttactggcttcaccagaaaaaaatcaaatatattgcaacgaatgggggcatgatcacagaagttcatccaaccgatgaacccgcttacacggcggaagaggtgatggactttgccaaccgtacaatgatcaaatcgctttcactgaactttgtgaattacgaaaaccaattaaccagcgtccgcggcgattttagcgctgaagggtacgttagtttccgtaaagcgctgtccgatagtgggctgctgaaagatatcagtgaaaaacgtctgaacgtaaaactttccacaactcctggaaccctgatcacggaaggtcttatccgtggcaccaaaacctatgcctggcaataccgcattccggtgactgttcagcttgttgggcaggctcaggactacagaccgcaaccttacgatttgatggttcaggtacgccgcgtcaaagaagacgaagatccacggggtattcaagtagcacaggccattctcaaaccccggaactactga

SEQ ID NO: 83588 - DNA, 1152 bp, Citrobacter koseri
atgaagattaaactgttaactgtacttatggccgcactgttttcggcaaattctgtatctgcagctgatgcgccgactggtaatggagcgccgcagcaaacggcgccagctgtgcctggtggtgatattgctcaatggcagcaggccagttccgggttgcccgtaaatcagcagtcacaggtgcaacagcctccacagcaaacagcacaggaacaaggtcagcagcaggcgcaaggccaacaaccacaggcacaggcccaacagcggccaacgactgcactgcctcctgcacccatgccgcagattcctccaccacagcagcaggttactcatgttaatccgcagacactggaagagttacctgcacctgttctgcagcagatccagcctattacccctggtcaggtgcggtcggcccgcagcgcaatggaagatatgagcgcggcggccaaaacctcaccattaacgccgatcccacgaatttcaagccagacggtatcactgtcagctggcgcatccattccgcaggtacgggtatttccaaaccaggcaacgacagtgacgttttcagatgcaaccggacacccctgggtattaggtgcccctccatataattcgagtccctgtgcttcaggtggtgaactgtgtgttggctatattccaggatcggcggtattcacaatccagccgaccaatgcctatgccagcgggaacatcacagtgcttctgaaggggctggccacgccggtcattattaacgtgaagggggcagaaccctccgttaaatcaaaaaccgttgatgttgattatcgtctggatctccgtatcccgaagcgcagtcctgacacaccggtttataccgctacgcctgagaaaaaaatctcactgtatgacaagcagctgcagagcgtgctcgatggcatcccgcctgaagatgctcagcggttgaaacttaaaaacgcgccagggagtaccaaagtctggcagatcggtgatgagctctacgtcagaagtaacatgcagctgcaggatgagtttgaaaaaacgctttccgctatcgatggcacacatgtttacgtgctgccggcaacaccagtgctgactttttctgttaatggtcaggcgcgtgacgttgaagttgagctgaattaa

SEQ ID NO: 83589 - DNA, 1350 bp, Citrobacter koseri
atggctacagataaaggtaaagaaaccagaaaaatgatgctctacgtcggtggtgctgctgcagtggtggcgcttctgggagggtactggttgtttggctcatcagatgagccggcaacgggcgggtcgcaggtgaaagcccaggggctggaagggaaaactggcagggaaaaagctaatgatccccaatacaacaagctgctgaatgagtggaatgttgataattcagataaagcggctctcacaggggatagcttcatctccacgttgtcagccagtaatccggtggccgttgattacggcaccaaagcaccgccaccaaaatattcgtgggaatcgtcagcaaagccgtcgggcgataacagtaaggcgaatgatgctgagcagaaagagcgtgagcgtcaggctaaagcggtggctacgttactgcagaaaatagaccaggccagaacaccagttgtcacgggtgttgctcttgcaacccctctgggagcagaaggaaatgacaagaacggcggtaccttctcagggtggaccgattcggtctatccgcagaacaaaaagccggatgctgaaaaacaacagggggcgaagaataaggccaaagataaaggagcccggcttgtatcggcttacacgcttgtgccggcagtaatggatacggcgatggacagtgacgatcagaacagtattgctattgcccatgttccaactggagcgcaggccggcgccaaattctattctggccaaaaccgtcttgccggcgatggtattcgaattcacttcaccggcatggagctgaacggagtgcagtgtaaggtcgatgcgtatggcgtggcttccgactcgttgcgcgcggccgtttcctcaaatgtaaataaccgctggttcagccgtattattctgccggctgtcgctaacggattaggccgaactggtcagctctatgcggacagcaattcgcagatgattatcactgacggcgggaacgcatatcgttcaactgatacacctgatggcaaagcggtagccggtaccattattggcgggatgggtgagcaagcagggcgtgtcctggccgacgatgcagcccgcctgccgattaagcaggttacggttgaccgtaaccaactcataggcatccagtttgtcgcgccagtgtatgaaagcgactgtggcgagaatttggaaaatgcttctgcagagcaggcgcagcagcaagcaactccgacactatctagtgtgcaacctcagcagatgcctcagcctccggctcctaattaccctcagcaaaactttccaagctaccccggctacgggtatggcaccaataacccgtattaccgttaa

SEQ ID NO: 83590 - DNA, 675 bp, Citrobacter koseri
atgaatctgtttgaagatgacaataaaaaagaagcagctcctgcccaggaaccggtgtctgctaagactgctgaaaagccaaaaccgacagtgacgccagcagcaaaagcaaacaaaaagccgcttaagattagtgactatgcatggattggtggtatcgctgtcatagctatcctgcttttagtctggttgtttgggggctccgatagtggcactgcgcctgcggccgggaatggcacgatccagtcttcagggcaacgtcagaacgtacaggctgcccctgccgggcaggattctggtgacttccgcgagcagatttccgggattttgctgcagcaaaaggaacggctggacgcgatagaatcaacttctaaaaatggaatgatgatcctttccagtcagttacaaagcgctaatgagcaaatcaaaaatctgaacaatcaggttcaggaactgaaaatgaaagccgctggttatgggccttcatttagtaatcagagtggaacaatttcgggggcaacgtcgcaggcatttttatctggcgatcttgcttgggtaaaatacaaaaaccagacgtatgctgtgaaggtcggtagtcaacttggcggagtcaccattacgggtatcgatactgaaaatagaatcgttactacaagtaaaggccttatccgctaa

SEQ ID NO: 83591 - DNA, 531 bp, Citrobacter koseri
atggatttagaatcggtattaattcaggttgctaacggtggtcaggaaccgctgacaaggctaatcataggtgtcgctgcagtcgttgggatcattggtgttattggatatctgatgagcctgcggaagcaggccaggcattcaacaaaaggtgtggaagttggcagaatttttgccggtatcatcttctgtgtatgcctcatcacgttgaaggcacagatgaactcaggcggtgccactttaggatttggcgatgttagcttcggacccgtcagttatgcgagcgaatctacgtttggcatgggagccgcagcagtcaacgcagtgctggggattgttagaattctcggcgcatactttttttacaggggtataaaggggttgaaagactcttaccttgagggccatacggagctgtcagcttcgggtacgagaggggcatccattgtgaaaattgtatgtggactacttctgatgttcgatacacaaacgctcgatgcgttgcagagcacattaaacattcactggtaa

SEQ ID NO: 83592 - DNA, 390 bp, Citrobacter koseri
atgaaaattgttaagcttatcaaagacaaggcattatctgcatccatcgcagcgtatcagctgcgcggaacggtggcaaaatcgttagtggtattgccgctggcattactgagcaaagaggctgcggctgaaacgactgtctgggagaaaatcaataccttcacggaaggtcttgccagtacccagcctggtctgattaccggcggtaaagtcattggtgttgtgttctttattgtcgggcttgtttctcttttccttaaaaacaaacgcgggaaagatatcagtggcagcttcatcttctggtcaatggttgttggtgcttgcctggtcggcctgaccgcatggatctcttctgttggttcaactgttggcgttgacgcaaccctgtaa

SEQ ID NO: 83593 - DNA, 495 bp, Citrobacter koseri
atgaaagattttaagctcatcaggaatgaacaacctgccagatgccatgtgtgcgggataaagagcaaagatgttttctccctcgcagaagatggacagaaagagagaatgctttgctctgtatgcctgtcgctcgaacatccggagaaaatgaaactagagactcaaaccggacttctgctgaagagaaatacaaaccgaaaactctacagcctgctgtttcgttcaattgcaaaggcggaaaagtcaacggacgattcttaccgtgaaaaggcgcagaaacttaaacagatattgctcagcacaactgacgtagttctaaacgaaaccggcagtgatgatggatacgatttactgcacctgataaaaaaacaccatcagttacttcccatgaattttgacgatgagtttgtcgcttctgttgcagagtcagacgaattgccggatgtaagtgactggaatgaaatttacaagggtaagagaggttttaaatga

SEQ ID NO: 83594 - DNA, 3051 bp, Citrobacter koseri
atgatttctttctttgaggatgtgatcgaaggtatctcacgcaatctgacatcaaatgactcgttaaaatactgtgatttgacaacggttgtagggcttacgtcgcaggatcgcgttgagcatcctgaaatcagggctccgtacattctgaccactaagaacaacgattttcttaccgttattgaggttcagggcgctaaatcatcgtttgacgagaagtcgtttaatgacttcatcatgcacctatcaaactccttgtcgaattcctttattaacagcggccataagttgtctgtggtgttcgaacgcgactttaccaagaaccaggaagagctgaataatgtttataaaccgcaggtagcagcaatagagcgtctgcagatagacattaaagacctgatcgccgatgacgcaaaaaaaatcgccgctcattacagccgtgaacgcgcttacatcgtgctgtatacctcgaaggggatgattgcgaaggatgaacttaaaaacgaacaggcaaaagctgccggcgtactgaaggatatcccgcagacgcgcttcagtcagaacccaatcgaatttcagcttgaaggtttgaagatcacgcatgacgcgatgctgtggcgcctgattggtatgcttcagggggatgatgaatcaggaatggggcttctggttgatgtcctcgatgtcaaacacgctggcgcaatgatgcgtcagatgctgttccggaattcaacatcagaaaactggtaccctcgcacgccgtttgaccaaaatctgcgaatttatggcgccccacggaaagacaatatcgactccgtgctgccgccgcggctgaatatccagatcatggaaggggaactggaagaagatggtggcctgatttactgtgatggtaagtattacggctctgttgcccttgagttaccaccacttcaccctgtcaaatttaagcagttattcaacgcgattaaccggaaaatcccgtaccggataaaatatgactttataggcgggggcaaaaaagcactgttctggccatcagtaatcatatctttccttcgtttcattccctcactcggtaatatcgcgcgtgatatggattatgtccgggcccagagcgaaaccgatccaacggctatcatggccatcaactttgccacctggggcgacactaaggatgaagccaaacgcaacctggcggctttaactaaggcgattgaaggctggggtgtatcaggtgtgtccaagacatatggcaatccaggtagcgcactgattgcatccgttccggggctgacgacggccacacctggctcattgcattatccgccgttgagtgaaggcttgcggatgttaccttttgaacgtccggccagtccctggcatggtaaaggcaatatcaacttcatcacgctcgatggcaagctgttcccctatcaaatcgccagtcccctgcaggagaaatttaccgatgtcatcaccggtgttcctggttccggtaaaagcgtgctggccaaccgccttaacctgagttcgatttaccgggctgataaaaaactgccttatctgaccatcattgataagggctacagtgcaaaaggtatcgccgatctgattagcgctgagctgccgtcagagaaacgtcaccagattgccagtatcaccctgaacaatgacgaatcgcactgtattaacatctgcgatacgcagttaggttcaaggtatctgacgcagtttgaggaagtattcttaaagcagatgcttaacgcattctgtattgatccggcaattggccagccgccagatgcaatgagcgttggccaaatcgtcagtaaggttgtatcaaacgtatacaaagcaaaagcgcattcaagtgctaacttgtttaagtataacgacccggtgattaatgaagctctgaaagaatcaggtctggataaagagcttggtgaagactggtttgaaagagctacatggtgggaagtcgttgataagctgtttgccaaaaaatatcttcatgctgcgacggttgctcagcgttatgctgtgccaaccattcacgattttattgctgaactacaaactgaatcatttaaaaaccaatacgctgacgtaaaagttaatgggagtgagcctgtagtaggcttcgttgcacgttgcttccaggctgctgcagctgagtatgccattttctcagggataacggtttatgatttcagcccggagactcgcattgcgatcctggacatgcaaaacgtcctcggtgacagaacgacacctgcaggtaagctcaagtccggcattatgtatctttttgcgcgccagatggctgtgcgtaactactacctgcctcagtccgcagaaaccttcattcctgctttaccggagcagtacagggcatatcaccaggcgcgcatcagggagctttcagaagaggttaaacataccttttatgatgagtgtcataactttgccggcatcgactttattcaaaatgcgctgaacaccgctgaccttgaagatcgtaaattcaacgtccgtactgccttctcgtctcagtatctgagccatatgccttcgagtgtgcttaaaaccatgaacagcctgtttatgatgcgcctgacggaaggggatgaagagtatctgaagcaattagagatcaacatcccggccgatatcctgcgtcgtttcagacagcttccgcaaggggtttatccggacggaagtggtactgcattcctcggtatttttaaaacaaaacgtggtcttatttgccacattctgaaaaacacattaggaccaaaactgctttgggctttgaactcatctgcaaaagatagagcgctcagagatgtgctttatgaagagctgggaacgaaaaaagcaagggaagaattagcaaatagattccctatgggaagtgcatcaagtatcattgatgaaatggtggtcaatcagggtggtgagcgtgattctgaagaagaatcacaaactatggcgatgaagctcgctaaagaaatcatttctgatgtgagaaggggattcagatga

SEQ ID NO: 83595 - DNA, 1209 bp, Citrobacter koseri
atgataaaaatcggaaaagcaaaacggtcagtgatggccgtttcaattctggccttcagcgtacagtcagcatttgcctatacggtcaacgttaacagcagcattcccatctcaacgcaggttatgccggcgttgagcacagctaatggcctgttaggtaatatccaggccacgctgattaacattggtacggcaatcagccagcagggcgatcgccaggcagcattaatgcagcaggtggctgaaactaaccgacagttcgaagtcgagcaaaaacgtaatgaccggctgctgcaggcacaggataagtaccgtgttccggatgatatctgtgcgcagtctattggcggtggcgccgcgggggtatcctctgcggccgctggcggtcagcgaacgctgggaagcgccagttctgcgaaagatgttaaggctatttttgaagtgccggcacgcgcaaccgacgtggatgcatcttcaacggccgaagttcacagccagtactgcgacagttcggattatgctgcatttggtgggacttcattctgcccaagtgtatctgacatgccgcgggcagatacgtcgctgagctcgttgctttatggcgccggcaaagaaggcaaggcacctgatctgacgtttacagatgagcagacagatgcggcgctgcgctatatgaaaaataccgcgttgcgcagtgctggtcgtcagctgagtcgtggggaagttaaaggcgccagcgggcgaatttacctgggcatgattcagcaataccaggcgctcaccgacgcggccgcacaacctcagatggaaatgatcgccaactccaaaccgaacccggccactgatgccgcgcttgcagatgcgcgcaaagtgccggaagtcgaatcctatttccaggcgacggccagtaacagggcgaaacagcttaaccgtatgtctgccagagagtttgaggaattcgaagtaggtcgccgttacagcaaccctgcttaccaggcgacgctgaccaacaagaacaccgaagatttgatgcgtgagcaaatcaatatcgccaatctgaacaactggttagtgctgaaaaccaaacagcagctggagaaacaaaatgtgctgcttggccagatcctggcgaacgacgcatatcaaacatacaaaccgatgctggcagcacagctggagagtgtgaacgcgggagtatccagaaaatga

SEQ ID NO: 83596 - DNA, 651 bp, Citrobacter koseri
atgaccgacgaaaataaaacaggggataaagacacagccaaatcagggaaattaaaaaaaggccttgatgttgtaacaggtgtcaatgacctcccggaagggaaggctaaacgaacgatatattatattactggcatcagcgatatatattttattatcgcgtcagtaaagcaaacattcagcctgctctttcagcgggcttcattcgttaagaagcaaataaaaaaccttgatggtccacctgttgattctgatgcaaatcagccgttcgccgaagttatgaaacggagcaatagacctgtatcagaattgttggataaggccagtttatacaagaaatactggctttgttgtttttttgcattagtcctcattctgctttttttaacgtctggttatgccagattgcttctaaatggctcaccgaacatgagcttgttaagagcaactctcacctgtggcgtcctgtttgctgctgggatctttactttcattaaggctctcacatgtgagttcatggggtggcagttacgaaaccaggctcactctgatgcagagcaaggtacgttacgttatttccttaatgatgggggagtgcgtaatacatttaatttttcgcaggctggtcaagagcgggggccacatgagtaa

SEQ ID NO: 83597 - DNA, 2181 bp, Citrobacter koseri
atgagtaaattaaaaaggttgcttctatctcttttcgttgtggcgtcgccttcatattcagcggatttggggattgatggcataactgaagcggctaaacgttcaggtgacctatcgcgtcaaatgttacataccgtttttggtgaggtagttaataatccgtttagcccttccggcgatggcttacttaataacgttttcttcactgtcaacgaagttatcgcgattcttgcccttgtctatatggggataatcagcattaagaaacttcaccaggcaggtcagttgggaagtttcattgagggtgatggcaataacgcattcaaaattgttaaaacgacttttgggtggttgttgcttgtacctaccgttgtcggttggtctgtggcgcagctgctttttctatggtgcggttcaatcattggcgtaggatctgccaatgttattgcagataaaacggcttcggaattagcgagtggtaaagctgtctatatagcccctgttatgccagaaatggcgtctgttgcaaaagggatgtttgaaacaaacctttgtgctttgggtgtaaatcaggggattgctcaaatggaggcttctggccaacattatgagaataacgccagaatgcaataccaaacaggtgacagcacatattctatatctgtaaacaacggctcagctgtatgtgggaccgtttcgctgccacaacgtccagcaggatggacttctatcttcgctagcggttatgcggattccgtctacagcgttcagcaacaagcaacggacacgttgtggggaaaaatgaagactgctgcagagcagtttaatgcagcatatatggcaaaaatgcgttccggggacggtgagctgccagatgttgaaagcgcgatccagactgctgcgcgtgattaccagcttcaggttcaacatgctgctaattcagcagccggtgacgacgaaattgttcaaaaaatggagtcggatatcaaagagaaagggtggctatatcttggtgtgtactatcacacattagctactgcgaataccgagatgaaagatgttgctaacctgaagccggtagtttcaggaatgagtaacgatggcgatatcggctctatcgattactttaaaggcttgttccaggcttaccattctcaactgaaaaatagtaattatacgccgcctcttggcaccgaatctaacgcacttgcaaggaacattgatcaaaaaagccttgaaaatgccgccacaactggagacggaacgtcccttattacaaaaattttcgacttcaacgttacaaactggcttgcaacgagtaactacggcactggtgatggttacagtgacgtgaccaaccctttactcaaaatgaaagctatcggcgattacacgttaggtgtagctgaggttggactcgccagttggaccgctatcaatgttgcagtgaaggtttcagaagggaagagtctacccggttttgctgcgggaatgatgaacaaacttacagggattcgagatgctattgctggcgtattagaatcggtttcgttcttggtttacccgctgttttatagcctctttggtatcggtcttgcactatctatctggctgccgtttataccgatgatttattggtttgttgctatggcagattggctggttacgcttatgacaggtgtattggcgtcttccctgtgggcagctacccatatcaacattggccagagtaatgatgagcggagtacatatggttatgtgttccttatcgatgtaatgattcggccgatgctcatggtaatggggtttatttttgcttctctggccatcgtagctttgggaacagcgttaaacatgatgtttaaattcgctatggaacaggtccagtctgactctttcactggcctgctgtcatcgatcggatttttgatgttatatgcaaggctttgcacaggtatggtggctcgcgtatttgcacttcctgcgaggatgccgaactatgttataaactggattggacagaagatgaacgattcagtgttgggtgatatgcagaaccatgttcatgacatctttgctgcgttcggtcgtggagccaaaaatatgaaccgtaacaaccctaagcaatttaatcctgacgcaggtgtagataagagcaaggacggcatcaaaggagcttaa

SEQ ID NO: 83598 - DNA, 654 bp, Citrobacter koseri
atgaatgcgttatcaaacactgactttaagaaaattagtaacaatgcgcgtcctaaaaggcttggatactacgcatcatggctctggatgatgtttgtattcctctttctgttcgttagcgctttcgtgtttctgagcggcttatactggacggttagagacggttcaattcaggagcactggtttagtacagtcggtatctttgtgatcgatgcagtgctgatctggatgttgaaaaaggacttcaggagccgcaagctctaccaagtaactgcttcaatgaagaactctggtttcttcgagcctcataaggactgcgagcactatgacctggcccggagaacttacatcggctttgacttcagtactggaatcataggagtagcatccctgtatgccacatccagtattaaacgtgagcggctattttttgaagccgaaacagtcgagtcatgggagtcagtcggcagggagttaatcataaacctgcgaaatacggggcttacgacgataacgatcacagctccaaatatcaataaagcgtacagggatatggaaatcatctgcagaacgcataaaaatagggatgaaaactatcagcatctgaagagtaaactgacagacgctggatggttcataaacagcaattattga

SEQ ID NO: 83599 - DNA, 231 bp, Citrobacter koseri
gtgaacagagttactgagcgccaggaacagaagagtaacccggagttccagagagagtaccggaaccgtatccgggaaacacacgaccagttaaacctttatctccccaaagatgcaaaaagaatgttgatagagatcacaaaagttaaaaaactcactcaggctgaagtcattgaatttcttgtcaaaagttattacgacggattgaaatttgacgattctgaagagtga

SEQ ID NO: 83600 - DNA, 1056 bp, Citrobacter koseri
gtgaatcaaaagaatccatacctacagctttctgacattgagtcagtagaaggtctttcgccggagttcatctcctggcttgaaagccagtcccctaaagaatcgcccctgcagctgcttctcgatgaaggcaccaggcccgtgcgcaaaacccgccgtcgtcgcggtacgcactcaacggcgtgtctctgcccggagcccagctggtaccgaccggacaatttcaaaaagctccctggccagcttggccatgcctacaaccgccttgttcgccgcgatcgcaaaacgggcgcgttaagtctgcgtatgcggatcagccgccacccgtacttcgtgcagctgcgcgagcaggctggccggcagcgcgacttccgcccggagcgggagaaattactcgatgcgattgtgccgctcctggtcagcaccgttgaccgggctacccatattgacactatcaacctcagtaaaatggcgtggcagctcagcgaaaaggacagcgaagggaacgtgatccggaaagtgacggtaccgcgggtttgccggctgctgcagcacatgatggaattcgggttactggcgctgcctgaaggcgtcacatgggacccgtttaaccgcaagtggttccccaagcatgtggtgctgacggaacgcctctggaagatgatcggtgttgatctcgataagctgtatgcggagcaggccgaacaggtggccgctgaagctgcaggctggataacccgtgatgaacatggccaggcggaagaaatctctgttaaagccgcgcgccggcgctggtatgaaaaaatgatgcacgccacgctggttcgccggcgtgaagccgccctgaagggtaagcgcgagaagaagctgaaagcgctggcagaacagccctatgacgaccgggcttacgccatgtccgttcatctgatacggacgctgccgaaagacgaactgcacgcgctgtcgcctgagcagtttacccagcgagtacgcagccacctgtatcagctcgatctggggctggagagggaatccggtccccctgattatcactga

SEQ ID NO: 83601 - DNA, 1371 bp, Citrobacter koseri
atgatgggacagttaccgggaggacagcagcgcctgttctactcgttcaatctggaagatcacgtcccggcccaacatctcctgcgcagcatcgaccagtgcttggatctcagtgatctacgtgcctacctggcagatttctatagccccatcgggcgtccctcgattgacccggagttgatggtgcgcatgctggtcgtcggctactgctatggcattcgttccgagcggcgattgtgcgaagaggtgcacctgaacctggcctatcgctggttctgccggttgggtctggaagacgaagtccccaatcactcgaccttctcgaagaatcgccatgggcgttttcgtgacagcgatctattccgctggttattcaatgaggtgctgcggcgctgcatggcagccggcctagtcaagggtgaaggtttcgccgtcgacgccagcatcattaaggcggatgccagccggcaacgtggggtggcgggagatgaggtcgattggaacgatccaaagctcagcagccgcgcagtgcgcgagtacctcgaagcccttgatgaagaggcgctggctgaggctcttcccaagaaaatttcgctcactgatcctcagtcccgttggacagcagcgccaggtggcccggccttttttgcctactccacgaattacctgatcgacactgagcacggtgtgatcatggacgtggaagctaccccggcgcaccgtaccgccgaagtcgattcgactaggacgatggtcgagcgtgtcgaggcgcagttcgatctcacaccggaacgccttatcggcgataccgcttatggcaccgccccgatgctggcctggatggtcgaagaaaaggacatcgaaccgcatgtgccggtgtgggacaagaccgagcgcaaggacgacagcctctccagtaacgactttcactggagtcaggacgccaatgaatatcgctgcccagccggcaaaccgctacgcagtgaatggcgcgccttcacccagcaaaggtcgcgggtaactaaggccaaaaccgtcatttaccgctccagccaaaccgactgcgccacctgcccgttgaaagcgaaatgctgccccaacacgccgaatcggaagatcgtccgcagcatccatgaggctgcccgcgacgtggctcgacgcatcgccaagacaccggagtacctcgtctctcgctgcgaacgaaagaaggtggagatgcttttcgcccacctcaaacggatcatgaaactcgaccgtttacgactgcgtggcctaacgggtgccactgacgaattcaccttggctgcgatggtgcagaacctgcgccgcatggccaagcttttgcctcaagggccaccgctgacgggatag

SEQ ID NO: 83602 - DNA, 1137 bp, Citrobacter koseri
gtgtctcaactctcccagcttcgaagccccgccgccgtgcaggctgccatcgatgagttcgtgcaactgggccgcacgaaattcctggcgcgccacggctacggcaagtcccgcgacttcctggtacgtgatccgaagaccggcaccgattgcgattccaaggccatcgccggtgtggccttcggcaagcaatttcccgagcagggcccgctcactgctgacagcttctccggtggcgagacgaccgtcgttccggcgctgacgcggctcgggtttcgcatcattcgcatcggcgaagactggtccgaagaagaggtcctggccacggtcgaagactatttcgacatgctgcgtgccgaggcggctggggagccgtaccacaagtccgagcacaaccaggcactgcgccaactgctgaacggtcgcagcaagtcttcagtcgagctcaagcaccagaacattagcgccgtactcgatgccctgggcctgccctatatcaacggctacaagccacgcggcaacagccaactgctgctgcgtaaatccgtacacgcctacgttctggaacatcagcagacggtcggcgctcttgtcgatgccctggaggaggtaaaacttccgggtgacaaaacctaccgagcggctttggtagaaccacccgcccgtgaagtgcttgtgcgtaccccggcatctctacggcaacgcctaccgcgaaagttcgattatgccgctcgcgatgaagccaaccgcaagctgggccgggcaggggagcagtgggtgattggctacgaacagcaacgcctgaccgagctcggccacccagagctttttcagcggctggattgggtgtccgacacccagggagacggtgcggggttcgacatcctgtcgttcgaagaggacgcccatgagcgcttcatcgaggtgaaaaccaccaatggcggggtaggctcgtctttcttggtcagccacaacgaactcgaattctccaaggaggcgggcgatcaattccatctgtatcgcgtgttccagtttcgggacggtccgcgcctgttcacgctacccggcgacctcagccaacatgtgcatctcaagccgacggactaccgggcgagtttccggagtttggtggggtaa

SEQ ID NO: 83603 - DNA, 228 bp, Citrobacter koseri; identical to SEQ ID NO: 6111

SEQ ID NO: 83604 - DNA, 705 bp, Citrobacter koseri
atgaacccattcaaaggccggcattttcagcgtgacatcattctgtgggccgtacgctggtactgcaaatacggcatcagttaccgtgagctgcaggagatgctggctgaacgcggagtgaatgtcgatcactccacgatttaccgctgggttcagcgttatgcgcctgaaatggaaaaacggctgcgctggtactggcgtaacccttccgatctttgcccgtggcacatggatgaaacctacgtgaaggtcaatggccgctgggcgtatctgtaccgggccgtcgacagccggggccgcactgtcgatttttatctctcctcccgtcgtaacagcaaagctgcataccggtttctgggtaaaatcctcaacaacgtgaagaagtggcagatcccgcgattcatcaacacggataaagcgcccgcctatggtcgcgcgcttgctctgctcaaacgcgaaggccggtgcccgtctgacgttgaacaccgacagattaagtaccggaacaacgtgattgaatgcgatcatggcaaactgaaacggataatcaacgccacgctgggatttaaatccatgaagacggcttacgccaccatcaaaggtattgaggtgatgcgtgcactacgcaaaggccaggcctcagcattttattatggtgatcccctgggcgaaatgcgcctggtaagcagagtttttgaaatgtaa

SEQ ID NO: 83605 - DNA, 510 bp, Citrobacter koseri
atggctgataaagaagaattaacggaaaaaattcaatgcctggagtgtggaaaatacttctcgttcctggctccgcacctgaacaaaacccatcagatgaacgccagggaataccgcgaacgctgggctattccgttacacaccccccttgccagcgtcagccattcccgtcagtgcagagagaatgtattgaaccgcatacggcgaggcgagattaatcccgatgaacagctcgcgctcatggctgaaggaaggaagcacgccccggaacgtgcaaccagcaccaggctgcataaagtggctgcgcgaaacgtagcgcagacacatcagatctggaagcactcgccagtagtgaaagtggtaccagaagcgctcagggctgaagccgtgaaaaggatggaggccagaaaagtaacgggggaaaaagttaaggcaattgctgctgatctgaacctgtcggttgggtgtctgtataagtgggtgtcggccgctaaacagactgtaaactga

SEQ ID NO: 83606 - DNA, 2088 bp, Citrobacter koseri
atgcaacaggaatctgtagacagtaaaaaagtcatccgcccagatggttcgttcatggagtggttcctcactccgaacgtacagtttggcctgctggccatactgaccgtgctgggtctgtttctcccctttaccatgctgctgagcatcctcatccttccgccgctgatggtggcattcacggatcgtaaattccggccaccgctgcgaatgccgaaagactgcgaaatgttcgacgacaccctgaccacggaaacccaggcggaataccgtctggggcccattcgcatcccgcataaggtccgggagcgaaagaaagcgaagggaattttatatgtcgggtatgagcggggacgcctgttcggccgcgagctgtggctgaacatgacggacctgctgcgccacatggtattttttggtaccaccgggtcgggtaaaaccgaaaccttctatgggtttatcgttaacttcctgctgtggtgccgtggctactgcctctcagacggtaaagcagataacaagctggccttcgccacctggtcgctggcgcgccgtttcggccgtgaggatgattattacgtcctcaacctgctgaccggcagtattgacaggttcgtgaacctggtgaagcaggaaagcatccccgcgcaatccaactcagtcaacctcttcagcgttgccccgccgaccttcatcatccagttgatggaatccatgctcccccaggtgggcggagattcggcacagtggcaggatacggcaaaagccatgatgtcggcgctgatcaatgccctgtgttataagcgcgcccgcggcgaactgcttttgtcacagcgcactattcagaaaaacatgtcgctgccggcaatggccgcgctgtacgttgaggcaaagaaaaacggctggcacagcgagggttacgccgcgctggaaagttatctggaaaatacaccaggcttcctgctggccaacgcggaatacccggaaacgtgggaagcccgcgccttcgaacagcataactacatgagccgtcagttcctgaagacgctctccctgttcaatgaaacttatggccatgtttttccggaagacagcggcgatatccggatggacgatattttccacaatgaccgcattctcatcgtcatgatcccgtcgctggagctgtcacgcggtgaagcggccacgcttggccgtttatatgtgacgctgcagcgaatgaccatcagtaaggacctgggctaccagctggaagggaaaaaagaggaagtcctgctcactcacgcgctgaataatcaggcgccatacgggctgatttatgacgagctgggccagtatttcaccagcggtatggatacgctgagtgcgcagatgcgttcactggaaaaaatgggcgtattttcctcccaggatcacccgtcgctcgcccgcggcgcgaacggcgaggtggattcgctgatcgccaacacccgcgtgaaatattttgagtcgattgaagaccggaaaacctttgaaatactgcgcgaaaccgtcggccaggattattattcagagctctccgggcaggaagccgaacacggcacgttttccaaaacggtccgggaaggggatctgtaccaaatccgtgaaaaggaccgcgtgaacattcgtgagctgcgtaagcagaccgaaggtcagggggtaatttctttccaggatgccctggtacgcagcgcagcgttttacattccggacaatgagaagttttccagcgaactgccgatgcggataaaccgctttatcgaggtattaccgccatcgccggcgacgctgtacagcatctatccggaacgtaaggatgatgaactggcggaaacgaacccggatgcaatgcacttcccgccgatcaagctgttcggctacgacaaagcggccaacagcctgctggaaaaaattgaggtcttctacgagctgcagtgtggcgcaatttcaccggaggaaatgtcggtgtgcctgtttgaactgttcgctgactggcttgatgggacggacacagacgacgtgctttaccaccaggaagacgatctgtttccgatgatcgagatgtaa

SEQ ID NO: 83607 - DNA, 951 bp, Citrobacter koseri
atgaaactcaccgtaaaaaccgatcgcaacacactttatctttccgctgacggaagctaccaggaacaagccctgcactccttccccctgtcagcctgtcattttggacttggccatgatgccggcagcggccacatcctgacgcacaatacgttttctggtgaagcggtgcagctgttccgctttgaaaacgaatatcaggccatcgaggcgctgaacaatatccgtaaaaagctgaaacagcagcgcggactcaatgccgtgcgccggctgtctaactttatcttctggccagtcgccgcgctgggctttatcgtctccatcaacggcgcgttgatgaatatgcatcagccggcacagccactgcaggcaaactcgtatgctcccgcgccgggtctgcagcagcctgtcactgcgccggagcagctgcaggttcaggcagcacctgaagcccctaaaaaactggctgataacgacttgctgtcactgaaagatgccgtcaccagcggacgctttacgatctcgctttcaaccgggcataaacacaccctgtatgtgttttccgatccgatgtgcccgcactgccgcgcgctggaaccccggctgcaggaactgagcaaacgctataacgtcgagattttccccgtgtccgtttatggcgacctgcgctcgatggtccgcgccgctcctgtactcgataccgggaaagatacccgactgaaaagctgggaagacacgattaacatgggatacaccaccatgaacccgaaaattgacgatccgaaaacagccccggataccaccggcgcccgcctggttgacgcgaacaatatggcatttgcgaaattcgggtttatcggcaccccgtccatcgttgccgattcgggtgatgtgatcccggtttccgtcgtcaaagacgatgcccgcctgcagcaggcaataggagaataa

SEQ ID NO: 83608 - DNA, 1308 bp, Citrobacter koseri
atgcaaaaccagccacaacggaaagggggaggggatgatggcctgatgattatcggggcccttctcatcatgatcacagtgatgtggtttggctttcgtgattatgtgatttacggagcctgtcgcctgctttactggatctacggtgtactgccggacgccattacaccgggtaatgcgaccgagcgccgggacatgctgctgtcggcggcgcggtataatcaccaggtttcgctgtgggactttatcagcgtgatgaacgacacggccagcgtgctctttcccctgttcattttaatcatcgggttgttcgtctgggttatctcgcgcaatccttactaccgtctgacccgtaaactgaccatccggaacctgccctgggtgatggtaaaaaactatccggggatagcccatatcctcgcccggtttggccacctcgatcagctgctgctgaatgaagatccggaagaagcacgcagcgcgcagtcacccgttgagtttgcccaggaacataacctgattgataccgctaaacgccgcctccgtaaaaaagccgcacataaggtattcctgtcacaggtaaacctggctcccgaaggggcggccctttccctggcaccctgggaaaaagcactcgcagcctcgtttgtacatctgcggtttatgggcgaccggccaacggctaaatccattctcgacgatctcaaccgttcctgcctgcggactaaagacggcttccctgattattcgctggccgccgggctctggaccgtcgccagccagtgcgaagcgttcagagaatttgcaaaggggcgccgcagctcccgttcgctactctacgcgctgttcgatgatgacctgcagctgccatccgcaaatttccggtggctgaaaggcgtggaccgcacgttatggtatgcactttcaagcgccggccgcgggaagttcttcattgaaggaggtggcgttattgcctggagtcagtgcgaaagttaccggctgacgctcgatgaagaaaaggcggcgaaattcccgccaaccgtgcgggcggccgtgctgggccttgagctggatctgctccattaccgccatattgaccgccgcgatcccgccattccggtcgctcactggcaggaagacgttataccgccatttgcatttgaatctgacgctgaagcggaagacgagccggctacgccgcctgcagctccgcacgacaccccgaacaacagtctgcgactgacagacgatgaaccgacgccggctaaacctcagccggcaacccgtcccgatcacctggaactctaa

SEQ ID NO: 83609 - DNA, 396 bp, Citrobacter koseri
atggttgatgccccgccctcaatcccgctgccaacctgcatggttgaagcagcacagatttatcacattcctctccgtggattcctcgccttgtggctgactgaaggcgggaaaccgggaatgaaaaataaaaacaaaaacggtacttacgattacggcgcattccagataaacaccatctgggcgaataagctggcggctgattttggtgtgagagcggagcagctgcagcacgacttttgcgcctctgcaatggccagtgcctacatcctcaaatacaacatcattctcgaagggggggatttctggcagggtgtcggccgctatcactccaatacgccggcgcgtaaggcctggtatatcgggaaggtttaccaaaattctctgaggttctga

SEQ ID NO: 83610 - DNA, 351 bp, Citrobacter koseri
atgaaatccaacacgaagattgctctcattctgaccgcatccgtaatcagttgcagtgcctttgctcagagtgtatccgcgccgaaaaccgattcgttgctcagcagcattctgggtgaacaggtacagacaaaccaacatcttgtacaactgctggcaaaggatcagaatgccagtcttacactgaccccggaacaaaagaaaaccgcctgcctgtatgaaagtcattactacagcagtggcgcacggcttaccgtcggaaaagagacgcttcgctgcacgctgagtggcgaaatcccgacatgggaaaatgcgaatgagggcaacattgtctctgtcgaaggcaaataa

SEQ ID NO: 83611 - DNA, 654 bp, Citrobacter koseri
atgattcagtcacgtaataaatatctgcaatttatgctggttctgctggcagcctgggccatagcctggggggccctgtttgtcatggggcagaccgttctgctctatgggctggggaaaaatacgctgttcttcattcatggtgctgttctggtgtacctgctgtgtgtgttcctggtttaccgccgctgggtcgcaccgctaccggttgttggccagctgcgtaacgttggcgcaccgtggctggtcggtgcgatggccgtggtgtatgtcggagaatttctgctgggtaaagtgctggacctgcccgctgagccgtttatgacgaaactttttgccgataaatccatacccgacgtgatcctgacgttgctggccatctttatccttgcaccgctgaatgaggaaacgctgttccgggggatcatgctgaacgtcttccgttcacggtaccgctggacgatgtggctgggggcgctgataacgtcattgctgttcgtcgccgcgcacagccagtatcagaacctgctgaccctggcagaactgttcctggtggggttgattacatcagctgcccggatcagaagcggcggcctgctgctgccggtattgctgcatatggaagcaaccgcgctgggtttactgtttggctga

SEQ ID NO: 83612 - DNA, 258 bp, Citrobacter koseri
atgcataccacccgactgaagaaggttggcggctcagttatgctgaccgttccaccggcactgctgaatgcgctgtcgctgggtacagataatgaagttggcatggtcattgataatggccggctgattgtggagccgcacagacgcccgcagtattcactggctgagctactagcgcagtgcgatccgaatgctgaaatctcggctgaagaacgtgaatggctggatgcgccggtggctggtcaggaggaaatctga

SEQ ID NO: 83613 - DNA, 333 bp, Citrobacter koseri
atggaaagaggggaaatctggcttgtctcgcttgaccctaccgcaggtcatgagcagcagggaacgcggccggtgctgattgtcacgccggctgcttttaaccgcgtgacccgtctgcctgttgttgtgcccgtgaccagcggaggcaattttgcccgcactgctggctttgcggtgtcgctggacggcgccggcatacgtaccaccggcgttgtgcgttgcgatcaaccccggacgatcgatatgaaagcccgcggcggcaaacgactcgaacgggtgccagaggctatcatggatgacgttcttggtcgtctggccacgattctgacttga

SEQ ID NO: 83614 - DNA, 1263 bp, Citrobacter koseri; identical to SEQ ID NO: 67462

SEQ ID NO: 83615 - DNA, 123 bp, Citrobacter koseri; identical to SEQ ID NO: 8077

SEQ ID NO: 83616 - DNA, 876 bp, Citrobacter koseri
atggttaaaaaatcactgcgccagttcacgctgatggcgacggcaaccgtcacgctgttgttaggaagtgtgccgctgtatgcgcaaacggcggacgtacagcaaaaacttgccgaattagagcggcagtcgggaggcagactgggtgtggcattgattaacacagcagataattcgcaaatactttatcgtgctgatgagcgctttgcgatgtgcagcaccagtaaagtgatggccgcggccgcggtgctgaagaaaagtgaaagcgaaccgaatctgttaaatcagcgagttgagatcaaaaaatctgaccttgttaactataatccgattgcggaaaagcacgtcaatgggacgatgtcactggctgagcttagcgcggccgcgctacagtacagcgataacgtggcgatgaataagctgattgctcacgttggcggcccggctagcgtcaccgcgttcgcccgacagctgggagacgaaacgttccgtctcgaccgtaccgagccgacgttaaacaccgccattccgggcgatccgcgtgataccacttcacctcgggcaatggcgcaaactctgcggaatctgacgctgggtaaagcattgggcgacagccaacgggcgcagctggtgacatggatgaaaggcaataccaccggtgcagcgagcattcaggctggactgcctgcttcctgggttgtgggggataaaaccggcagcggtgactatggcaccaccaacgatatcgcggtgatctggccaaaagatcgtgcgccgctgattctggtcacttacttcacccagcctcaacctaaggcagaaagccgtcgcgatgtattagcgtcggcggctaaaatcgtcaccgacggtttgtaa

SEQ ID NO: 83617 - DNA, 321 bp, Citrobacter koseri
atggggaaactcattccgtttttgtttatcgccttagacggcaaaagtgctgtcgcccacctgcgcttgcgcataccaggccataagctccgtggttcctggttctccttccgctggagcccagtgcgcatagtcatcggcagccacgggttgatagccaccgtgttttacttcaaaaattatgccaccggtatccagcgacagcacggcatgccaggttcctgcggccatctccagcaccgtacaggtttcccccaatatcgcccgatgggtgacggtaccccgatcgtcaaaattcagcaccacgaaacgaccccttaa

SEQ ID NO: 83618 - DNA, 435 bp, Citrobacter koseri
atggcgctggatctcgtttatccccggccttcagtggaaggcgccgcacttcctttttttgccgaacccgttgcggccggctttcccagtccggccgcaggctatgaggcaaatgaacttaacctgcatgattactgcgtgcggcgtccggccgcaacgtacttcttgcgtgtgtccggagattctatgcgtgatgcccgcattcatgatggcgatgtgctggtcgtcgatcgggcagaagagccccggcacggcagcatcgtgattgccagcatcgataatgaatttacggtcaagcagctgcagctccgcccttacccctgcctgatgccgctgaatccggcttttccgccaatcaggtttgatccggaggcgctgcagatatggggtgtggttacgttcactgttatgagtcaccgcccgtgtacgccttaa

SEQ ID NO: 83619 - DNA, 1305 bp, Citrobacter koseri
atggggtgtggttacgttcactgttatgagtcaccgcccgtgtacgccttaatcgacgtcaattcgatgtactgcagctgcgaagaggcgttccgccctgatttgcgggggcgccctgtggtcgtcctcagcaacaacgacggggcgcttgttgcggtcaatcgcgcggcgaaagcgctgggagtgcgccgcggggaaccctatttccgctgccgtcgcctgctggaacagcataacgtcgccgtattcagttccaactacaccctttacgcctcattctccgccagatttgcaaccgtagtggaaagtctggcgccgcggacgtttgtttactcaattgatgagctctttgcggatgcgtctcacatggagggcgtgatgtcgccgcaggcgtttggccagcttttgcgggctgaagtgctgcgccagacaacgctcacctgtggagtgggcgtcgcgccaacgaagacgctggccaagctgtgcaaccacgccgcaaagacgtggcctgccaccgggggggttgtggcgctcagtgatcctgtgagactgaaaaggctgatgagcctggtgtcggccggcgatgtgtggggggttggccatcgtaccgaaaaagggctggcgacaatggggatcaaaacggcgctggcgctcgcagagatggatatccgacttgcacgccggctgtacggtgtgacgctggaacggaccatccgtgagctgcgtggcgaggcctgctttgccctggaagaaggtaccggcgcgaaacagcagcttgttgtatcccgctcgtttggatcgcgggtcacgcaactggcgcagatgcagcaggcggtgactaaatatgccacacgggcaggggaaaagttgcgccaggaaaaccgtctggcgaaggtggtaacggtctttatccgcagcagtgcttatgacgccggcggtgtgccctacagtaaccaggctacggaagtgctttccgtgccaagccaggatacccgcgacatcatcgccgcggcgcagctggggctgtcgcgtatctggcgtgagggtgtgcggtatgcaaaagccggcgtgatgctcagcgatctgcagggacatgaaacccagctggatctgtttgcgccggctgcagtgcggccgggcagcgaaaaactgatggccaccatcgacaaaataaacagggaaggaaggtcaagggtcttcttcgccggggaaggtattgatccggaatatgccatgcgccgtgaaatgttgtctccggcctacaccacgcagtggaaggatattcccgcggcgtttatgcgataa

SEQ ID NO: 83620 - DNA, 849 bp, Citrobacter koseri
atgaagaatgatgagctggccacacgacgcgcagaggcgatagccggcgatcggtgcttcacgaaagggcgcctgcgcgatgaattcagaatgaagccggctcccggtgctgagccggtgaaatggtacaaaagcgcctatggcggcaagtacgccgtataccgcattgcagactgtgttccgatgcgggaaaaacggccgccgaccgagaagcagcagcaggccggcctgcgtctttccgtcctgtcccggcttaacagcaccagtggccggatggcacggcgggcacacgactggctgagtctggcgccgctctttctggataccgaaacgacggggctgggtaataccgcagaagcgctggaaatcggcctgaccgatgcggccggccgggtgatatttgaaacccgcctgaagccgacggtcgccatcgaggcgcaggccgccgccgtgcatggtatcgatgagccggcactcagcggcgcaccatcctggccagatgtggcgctgcagctgcgacacgccatcggggaccggccagtgattatctttaacgccccctttgatacccgcattctgaaacagacggccgccgcacatggcgatccggccgactggctgggagaactgacagtatattgcgcgatggagctggcagcagggtattttggggccaccaatcgctatggcaccatttcgctggccagcgcggccagtcaggcagcattggcctgggaaggggaggcacactcggcaatcgccgatgcacggatgacggccggggtggtgaacgccattgccgcataccatctggcattgctgcaggagcaggaacggctgcagggctga

SEQ ID NO: 83621 - DNA, 321 bp, Citrobacter koseri
atgaataagatgcaaagtaaagccccctcgatgcggctctccggtgtgcaaaaagacgtattgtttgttctgtatggtctggcagaacgtcagctggcgggcccgttcccggcgatgcagcttttcagcatcctcaataagggacgcctccagcccgttgccgataccaattttcgtcgctcctgccatacgctgaaccgtcacggcctgctcagcaaataccgggataatcagtcactgacgctcgcgtttgggctgacagaggcaggcctggagatcgccagagaggtttatcacaaacgcctgacggagatggaataa

SEQ ID NO: 83622 - DNA, 639 bp, Citrobacter koseri
atgttatacatggctttatgctgctttatgatgatcatggcgttcagtgagatgatccgcacgatgacggcgcttggcaatgggagctataccggcaaccgcttcttacccctcgttttcgttctgctgacgctggcgctggcttcacctttccttgtcacattttatgcgctgagccggccgttatcgatggatgcactctcccgcctgtcagtcggtgcgcagtgggcaggtatcgctgccgccattctgctgtgcattctgtatggctatcgggcctggaaaaacggccgtttctggtataccggtgcggccattgcctcagtggtgattgccgttatttttgccaacagcctgctttttgtgtccaggcccgatgccggcatcgtggccacttttgtactgaacaacgatgacagtaatgacgtgcagtgtgaccgttcagtactgctggttcattacaacaagggaacccccacggagtggcgctgcccgaccggtatcatgttcatgtctgatacgtcaaaaccctttcttccgtggccggattatcacggcgggcggagtcagcatctgacggcagcactggatttgctcacagacagcgccctgcgcattgacccagaccagaaaccataa

SEQ ID NO: 83623 - DNA, 210 bp, Citrobacter koseri
atgaaagatgaaattcgccacgaaaaacccgttgaagtgaatatacagctgacacacagagaagcgcaggctctggcgcaactggttaagcggctgggattcagtgactgccgcggcctggcgacgtcagatattgaggcatatctgatgatggatggaatcaaccagatcatgaaagcactggctgaagagggctatgcaccccgataa

SEQ ID NO: 83624 - DNA, 219 bp, Citrobacter koseri
atgttcagcatcatttatcacgccggcgcagccgtccttttcctggtcatgagcctggcggccggcgccggcctcctgcttcatggccatgaatatacgacaggtcatttctggaacatgacggggctgtgcattgtgtcaactctcgtctggatctgggctgtagctcaggcaaaagaagcctggtacatttcacgaaacatcaaaaaaggactctga

SEQ ID NO: 83625 - DNA, 684 bp, Citrobacter koseri
atgaacaaacgtcttcacctcatcaccacctgtacccggcgcaaggcgggcagcgtggaggataccgtttttccgggcgacgcttcccttgatgacgcctttgacggctggtacaggctgatcgcccaggctgcccgccgtcctggcagggtgctggaaacgggagagctttaccggggcgcacactggctgcgtgcccgcggtatcgcggcgcggtggccgggcatcgagctgtgggccatgtcggccggtctggggctgcgccaccataccgatccggcggtcgcgtatgaggcaacgtttcacgccatgcccttcgcgccggcgaccgtctggggctcactgacggcacggcccccgctggcgggccgctgcgcctccctggctgagctgatgcaacgctgcccggacgatcgctttgtgatcgccggttcacccgtgtatatcagcgcggctgagcaggatattctggccggcgtgtcggcactgcatgatgcggccactcagctgattatcgtgacctcacagggctatcgtggtccgctgcagccgtttctgaaaagaagccgcgcggacatgatggcgaccctgaaatcgaacatgacgtgcctgaatattgcctgcgccggcgccctgattgacgccatgatgcaggcagacgcccggcaggcggcgaccatttaa

SEQ ID NO: 83626 - DNA, 273 bp, Citrobacter koseri
atgaaaacgacctgtcatgcggccggcatcacggcggcgccgctttccccgcaggagtggcgggcgctgctcagggcgaaaggctggaagcagaaggagctggcccgccgctggaatgtgtcagaaacctggatcagtaagctggccaataaccccgatcggggcacgcactggaacgatgcctgccggggtctgcccgatattcgtgcccggcggcccggcgaaccgcgcgcggcaggcacagacgcaccagagccgggaggcactgaatga

SEQ ID NO: 83627 - DNA, 1275 bp, Citrobacter koseri
atgaccggtttttttgaacgtaaaaagcgggccaaaaacgcccagctgaccgtgcgtctcgatgagcagctgaagaaacgcgccgaactgcgtctggaggcaatgggcatgaccgccacggaagcagtggagcagctttaccgcttcatcgccgatcacggccggatgcccgtcacggagcgtatcgtcacatttgacatccagtcacagcgcggccgcgccatcgccctcaatcccgccgacgctgtgaccgaaaacacccggcggtttctgcagtcgctgggatctgcagaagtggtctgctgcgatcccgctgcatttgaacaggcggtgctggaatacttcagcctgtatgtggccgaccaggctgcctgtttactggccggtgtactgaacgtcacgttcatggttaatgccgccaatcgcgtgaaagatgactggcatgacaggctgctgtccctgttacagcacgactttgatttcagcgaagaacagtcagtgacgttcattaacagcatcgtggacagcgaacatgtcgatccggccatcgtcagtcgaaataatacggtctggcggagcggaaaaagcaccgggtccgacgccggcgctgaacaggccttactggataacaccaacgtcagggtcttctatccctccggagaagcgcccgtctccggcgagatcggcgccgccgtcctgcagcgtttcctgacgttcctggcggagcggggcgtcagctgcagcgatccgcagagactgaacgaaagcgccggccgtgcatggggcgtgcgtgaaaatatgatcgggaatatgcccccggacatgcagcaggccataaacgatggcgtcatttttgaggccagcgctgacacgccggacttttcccctgagctggcggcggcgtttggcttcacacaggcccaggcagaagcggtgctgaaacccgccctgaccgccagggatctccccggtttcctgcagcgctttctggcgttcctggccgaccggggtatcagctgcagcaatccccggcggtttactgaaaaggtcacggaatacgccagccatgagggaccgcaccggcttattgcaatgttgatgtcgcgcatcagggatgagggggtcagttttgtctttcacaatgaatccccggacgaactgccgcgcctggccgcgtcactgcccggcgaactggccgataccttcgggtttacgggatggcaggcaacaacaatactgcgtcaaatccagccggcacggccggggcaggattag

SEQ ID NO: 83628 - DNA, 357 bp, Citrobacter koseri
atggaatatgaagcgtacaaggttcgcggttacggcttcggactgaaaaaagagatcaccggcgtgctggggcgttaccccaccctggaagaggcgcagaaggtcgcggatgactacacgcaggcctgcctgccggataacctgccggacagctacgatatgggcatggtccggccggtcgctgccggcgaacctgccgccctcgatccggacgtgtttcgcggtccgggcgcgccgttcctgatggatgccggccagataaccacgggtcacacggtatgcctgggcaaagcagcggatggaaaacggttttattttggcggggagcattccgatggccaccaaacatataaatga

SEQ ID NO: 83629 - DNA, 585 bp, Citrobacter koseri
atggccaccaaacatataaatgatgagctctggaatcgcattgaggcgctgaccgtcaaagctaacgccaggcatgggttgttgcggccgattaaagaggctgaagtactgcatcttgtcctgcagcgtggcctggaactgcttacggacgacgatctgctgcagctgggcaagtaccggcgtccgataggatttgtgctgcgtcgtccgggcgtggaaatggtgaagctggatatgctgaatatggcagatgcggcaaccgttcttctgcgcagtggacccgcaacgctgtgcatctggagccgcgacgatatcctgcgcgaggccagtgaagcggtgatccgcgaacggctgccggatgcagccctgctgtcggagggggatgaccgggcccggttccagacgctgctgcccggattctggaacgccgcgcaccggggcgaaacggccgtgatttccctgcgtgctgacaatgcggatctcgctattgcacgcatcactgacctgatgtgcgaatccctgctgggttataaggggcagcgggcataccgggcgggtgaaaacgaacagggagaagagtcatga

SEQ ID NO: 83630 - DNA, 720 bp, Citrobacter koseri
atgaacatgcgaggcattctttttgtcctgccgctgtgcgccgggctcctggcgggctgtgataacaaacaggaagcgctgcagtttgaagccgcccgcacggcggcgctgaaggccgacgatccgtttctggcgctggactcgttcgaacagcagtccggcgactacggccgggactgcgactcgctgggggcatttctgtttggtaattttgcttccacggataaagcatgtcgggcgcgggatgaggccacgcgggatatggtcctgaaagccgtagaaaagggttccgtgccggcactggtgttcctgtttgacccaggcagcaagacgccggatgtgtatccgcgcgatattgacccacagaaggccgggcaggcggctgagcggcttgttgcactggcagagtcggcgccggtggacagcaaaaatcaggcgctgctgatgcgtgccggcgatgtactgcaggcgggccagtacgttctgcaggattcccggagagcggcggccctgtacgtcaaagcctggcaggcaggggatcagcgtgccgcggacgagctggtcaatgtctatcactttctcaaggacagccggcgtacctacttctgggcggtccggagcaaagacgtgcagcagctggacaatcgggctgagctgaccggagatgagatcattgctattcagaaactggctgcggacagttcacggaccgacatttga

SEQ ID NO: 83631 - DNA, 546 bp, Citrobacter koseri
atggatatcaactactacgatgaacatcaggaagaatttgaggcggttaaactggcgctgaggggcgaaatggagaggatctggggctccatgctgaaagaacgcggggacaacctggatgatgaagccacgtacctgaacctgtttgaagaactgcagtataacttctctccgtccagtttcagtaagctcaccccggcgcaggaactggataaagataaaatagcggcctttgtggccagaacccgcggctataagcacggcatcacgatcaaatgccggccgggtcgcccgcagaagtggctgaaaggccgaatcaaaccacttgaggacgcggaaggcacaaacctctgctggatcgacacggccaccatcgtgcatatcggtgctggtcagcagtttgacgatcagtattatctcaccgtgaccacacagaccgggcagagttaccgcgtaaatgaactccgtctgccaggtcgtctgctggaagcagcccaggaaagcctgttcagggcactggattcaaccaccggcggtcatttctga

SEQ ID NO: 83632 - DNA, 285 bp, Citrobacter koseri
ttggatgcagagattccctatgaatattattccaccgcgtttgttaatttaattcagtcttgtttggttagtttagtaagaataaaaaatgccaagtcaaggaacatgtatcgtcagatgattaatgaacgttacaaagatctaagcgtaagcgaaattctttcttgttattcattgaataaattcaaattattgactttacttgcaaaaaataaaataacgcttactttactcagtattgttttgagtcctatagtatcattctcagataaaaaaggtaaatga

SEQ ID NO: 83633 - DNA, 558 bp, Citrobacter koseri
atgaataaaataagtacaaactatataaagattacacaacctataggtgaattttactgttgtgtaatgaaggcgcaagatctttacgatattgcgttttctgacgttcgtcgccttgaaaaagagcaaggtaagaatgattttgaaacttacttaggaatccagagagaattaagcccttctcgggtgaaaaaaataaaagaatacataaaatctgttgatgcgacgtttcctaactcaattatcgttgcaatagacgataagtttgtatcattaaaaaatgacagaatggaaattaattttcattctgaccaaacaggaaaaatcgcaaagatattagatggacaacatagattagctggatttgaggattctaattttaaatttgtatctcaagacgggcaactaaaagattttgaagtattagtaacagtttttattgaagctgatttacatactcaagctcaagtatttactatgttctcaacaaaggctgcttgggtaataagttcattttgtacgccttccgtttttacccctaacctttttattctatga

SEQ ID NO: 83634 - DNA, 279 bp, Citrobacter koseri
ttgctcaataaacctgttgtggtatttggcgatgttttttacaatgagcatccttttgtttataaaatttcaggctatcgcgatattcctaaagccattgattttatcaatacatcaagtgtcggagagaataactatatcaatgagaagttcgtggcagcttattacaaaattacttttcctctatatgtggattatagggttaatggttccgaattagctgataaggggaaagagatagcgttaatcattgactgtaaattgaattcacgatcataa

SEQ ID NO: 83635 - DNA, 1773 bp, Citrobacter koseri; identical to SEQ ID NO: 75957

SEQ ID NO: 83636 - DNA, 243 bp, Citrobacter koseri
atgaaaattctgtctactgttaaatataaaattgctttggcttcaactgcgctttttatttctgcaagttcttttgcggctgaaggcgctacaggtggtactgattatgcaggtcaggcaatggatgctttgttgactcaggcaaatgatctcattggtaaagtatggcctgttgttgttgctgtggttggcgctgggcttgccattcgtattttcaaaaaattctcttcaaaagcggtttga

SEQ ID NO: 83637 - DNA, 318 bp, Citrobacter koseri; identical to SEQ ID NO: 76484

SEQ ID NO: 83638 - DNA, 735 bp, Citrobacter koseri
atgatcactatagaagaagcaacatcggtccatgaatatttaacaaattactatcaaaactctgatgatcctatctctcctccgggaataaaaaacatagagcttttagagtctgccatagcaagaccttttatgaccatgaacagaaaggatgtctatccagatgatttagataaagccgcagctctatttcatggtgtcatatccaaccactgtttccataatggtaataaaagaacagcacttctactaaccatgtgctttttagaccgagctggatattggctggataagtgtgatgacctgcaactctttgaatttacaagaggtgttgcggcacatgagatatgtgaaaatagaattgatgaaataaaaacaatcaaggcatttttccgaagtaattcacggaagaaaaaaatcacagatgaacaattgagttttattgcattaagcaggcatctaaccaacgcaggtttcaatatagaagacgatggtgactattactctatctttaaaaataataaaagatatacaaaaataataaaaaaaggcgcatcaggacatgaaaaatacgatccacaatacataaaatcccttagaaaaagattgcttcttaccccgaagtatggatgggatagtataaggttttatcaattatattcatcattgacggaaaacattggtgaattattacgtttacgtggagaggtaatggactggcttgcaaaaatataa

SEQ ID NO: 83639 - DNA, 945 bp, Citrobacter koseri
atgaacaccaaagcgcgtaaagtgatgatcattggggcaggtaatgttggcgcatcagcagcttacgctctgctcaatcagaatatttgtgaagaactgattctggtcgatttgaacagagatcgttcggaaggccatgctttggatctcgccgatgcagcggcctacatgccggggatgatgaccatttccacccgggaggcgcatgaatgcgccgatgtcgatatcgccgtgattaccgtttccggcggcgcattaaaaccagggcaaacacggcttgatgagctgaacaacaccgcgcggatcgtccaaaagatcgtaccggaaatgatggatggcggctttaacggcatctttcttatcgccaccaatccttgcgatatcattacctggcaggtatggacgctatcaggcctgccgcgcagccaggtaatcggcaccggcgtctggctggacaccacccgtttacggcgcgcgctggcgcaggaactggatatcggcgcgcaaagcatcgatgcctttattctgggagagcatggcgatacgcaattcccggtctggtcccactcctccgtctacggttctccgattgcggatgtttatcaacgccgtacgggtaaaatcctggacgtcgaagcgatggcggaaaaagtgcgcaaacatgggtttgaaatctataaccgcaagggctgcactgaatatggtattgccggaaccattgcggaaatttgccggaacgtcttcaccggaagccatcgggcgctggccatctcctgtgtactggagggggaatacggcgttgacggcgtcgctatcggcgtaccggcggtgctgactcaaagcggtgttcaacaaattatcgaattacagttagccgatgatgagctggcgaaattcagatactccgccgaagtcatcaaagcgaatatcgcaaaactcccctga

SEQ ID NO: 83640 - DNA, 192 bp, Citrobacter koseri
gtgaccgcgccgctggagcaggtgcagatagaccatacggtcatcgacctgatcgtggtcgatgaccgcgaccggcaacctattggccgcccgtacctgaccctcgccatcgacgtgttcacccgctgcgtgctcggcatggtcgtcacgctggaagcgccgtctgccccgatttattgttcacagcgatag

SEQ ID NO: 83641 - DNA, 861 bp, Citrobacter koseri; identical to SEQ ID NO: 19455

SEQ ID NO: 83642 - DNA, 1515 bp, Citrobacter koseri; identical to SEQ ID NO: 52478

SEQ ID NO: 83643 - DNA, 786 bp, Citrobacter koseri; identical to SEQ ID NO: 16905

SEQ ID NO: 83644 - DNA, 501 bp, Citrobacter koseri
atggacagcgaggagcctccgaacgttcgggtcgcctgctcgggtgatatcgacgaggttgtgcggctgatgcacgacgctgcggcgtggatgtccgccaagggaacgcccgcctgggacgtcgcgcggatcgaccggacattcgcggagaccttcgtcctgagatccgagctcctagtcgcgagttgcagcgacggcatcgtcggctgttgcaccttgtcggccgaggatcccgagttctggcccgacgccctcaagggggaggccgcatatctgcacaagctcgcggtgcgacggacacatgcgggccggggtgtcagctccgcgctgatcgaggcttgccgccatgccgcgcgaacgcaggggtgcgccaagctgcggctcgactgccacccgaacctgcgtggcctatacgagcggctcggattcacccacgtcgacactttcaatcccggctgggatccaaccttcatcgcagaacgcctagaactcgaaatctaa

SEQ ID NO: 83645 - DNA, 840 bp, Citrobacter koseri; identical to SEQ ID NO: 6027

SEQ ID NO: 83646 - DNA, 348 bp, Citrobacter koseri; identical to SEQ ID NO: 6026

SEQ ID NO: 83647 - DNA, 378 bp, Citrobacter koseri; identical to SEQ ID NO: 16790

SEQ ID NO: 83648 - DNA, 660 bp, Citrobacter koseri; identical to SEQ ID NO: 52324

SEQ ID NO: 83649 - DNA, 1281 bp, Citrobacter koseri
gtgtggccactcccggaactcgtcccgcgcaatgatgatttgcgcgcagcgggcaaacagcattttttgcacacggatcaccgcctcgtcgtccatcgagccgataacgtacaggcagccgccgccgttgataatccccgccacatcgataccactgtccgtctgcaggacgctcaggtcagcgacgttttccagcctagtgatcaaccccttcacgtcctttttcagggcctccggcagcgcgtacgccgccgccagcacctgctgaatgtttgccccctgcggaaactgctccgcaatcagcttcgccgctttctgctcgctgatgcggtagtggtccgccacgtcgccggtctcgcccaggttaagcccggcaatcagcaggtttttcagcgcgtactggtcgagatcgcggaacagattcagctgcgccggtttccccggccgcagatccagcagggtgaagtccggacagtgcgcccggaagacgtgcggcgcccatgcgtcccctttggggtcgaagtacaccaccgcgtccccgaaatcgcgtacgcagcgaatgagcgcgttggtggccatcacgctcttgccgctcccgggcaggccgaggatctgaatgttggtcttgcgccaggtatcacgcggaaccagcaccggcttgccctgctcatccttacccagaaacaccgcctgctcctgccgggcctgctccgaggaaaaatcggccagcgcattaaccggtaccggctccccgaaatgcaggtggcgcacgtcggtcatctctcctgtccgctggctgctgcgccggctctcctgattcagtttcgcgttcaccgcctcgtcagcagccgcaaaatgaccgtcaagcagcaggaacgccagcagccgcgccaacacaatcccgacagccagcccgcccgcgcaccaggcaatcccgaacaggttagccggctgcagcaggtaataatctgcgtttgcgtagaggtccggacgcaggacggtttctccccagctctcgataaacacggcgacaaccagcccccccagaagggccagaccggccgcgccggtcagccagtacgcgtagttccagacatgtcgacgtgccctgaccatccgcccgggcgaatccagcgaggccagcaccgaaaatggcgctggccgtttattatcgcgcttatagcgatcggcatactcccgtcgctccttatgactcagccccacaaaacgcatccgtccggcccaaagttcagccagaccgaaaaacaggccgataactag

SEQ ID NO: 83650 - DNA, 2757 bp, Citrobacter koseri
atgaccaactacagcctgcgcgcacgcatgatgattctgatcctggccccgaccgtcctcattggtttactgctcagtatctttttcgttgtgcatcgctataacgacttgcagcgtcaactggaagatgctggcgccagcattatcgaacctcttgcggtctccagcgaatatggcatgaacctgcaaaaccgcgaatcaatcgggcagctcatcagcgttctccatcgccgccactccgacatcgtgcgcgccatttccgtttatgacgagaataaccggctgtttgtcacatccaatttccatctcgatccgtcagaaatgcagctcgccaccggggagccgtttccccgcaggctgagcgtgacccgccacggggacattatgatcctgcgaacgccgattatctccgaaaggtattcgccggacgaatcccccgtaacagacgccaaaacgccgagaaatatgttgggatatgtggcgcttgaactggatctcaagtccgtccgcctgcaacagtacaaagagattttcatctccagcgtgatgatgctgttctgtatcggcattgccttaatttttggctggcgtctgatgcgcgacgtcaccggccccattcgtaatatggtcaataccgttgaccgcattcgtcgtgggcagctcgacagccgcgtcgagggctttatgctgggcgagctggatatgctgaaaaacggcatcaactcgatggcgatgtcgcttgccgcttaccatgaagagatgcagcataatatcgatcaggccacttcggatctgcgcgaaacgctggaacagatggagatccagaacgttgagctggatctggcgaagaagcgcgctcaggaagcggcgcgtattaagtctgagtttttggccaacatgtcgcacgaactgcgcacgccgcttaacggcgtgattggctttacccgtctgacgctaaaaaccgaacttaatacaacccagcgcgatcacctcaatactatcgagcgttcggccaacaacctgctggcgatcatcaatgacgtgctcgatttttccaagctggaagcgggcaagctgattctggaaagcattcctttcccgctacgcagcacgctggatgaagtggtgacgctgctggcgcattcatcccatgacaaagggctggaactcacgctaaacatcaaaaatgacgtaccggataacgtcatcggcgacccgctgcgcctacagcaggtcattaccaatctggtcggtaatgccattaaatttaccgaaagcggcaatatcgatattctggttgaaaagcgcgcgctcagtaataccaaagtacagattgaaatccagatccgcgataccggcatcggcattcccgagcgcgaccagtcgcgtctgttccaggctttccgccaggcggacgccagcatttcacgccgtcatggcggaaccggtctggggctggtgattacgcaaaaactggtcaatgagatgggcggcgatatctcgttccacagtcagcccaatcgcggttccactttctggttccacattaatctcgatctcaacccgaatgtgataagcgacgcgccgccaacgcgctgtctggtcggaaaacggctggcctacgtcgaaccgaacgccaccgccgcgcaatgcacgctggatatgctgagcgacacgccgctggaggtgatctacagcccgacgttctcagcgttgccgctggatcactacgatatcctgctcatcagcgttccggtgacctttaacgaaccgctcaccatgcagcaagaacggctggcaaaagccgccgccatgacggacttcctgctgctggcgctgccttgccatgcccagattaacgccgaaaaactcaagcaaggcggcgcggcggcctgtctgttaaaaccactcacctcaacgcgtttactgcctgcgctgacggaatactgccatttaaatcagcatgttgaaccgctgctgacggatgagaacaaaatcgccatgacggtaatggcggtcgacgataacccggccaacctgaagctgatcggcgcgctgctggaggacaaagtccagcatgtggagctttgcgacagcgggcatcaggcggtggaacgggccaaacagatgcagtttgatttgatcctgatggacattcagatgccggatatggacggtatccgcgcctgtgagctgattcatcagcttccgcatcagcagcaaactccggtgatcgccgtgacggcacatgcgatggcgggtcagaaagagaagctgctgagcgcggggatgaatgactatctggccaagccgatagaagaagaaaagctgcacagcctgctgttgcgctataagccgggggccgtggtagcgacccgattacccgccgctgaatcgacagagtttatcgtcaacccgaacgcaacgctcgactggcaactggcgctgcgccaggcggccggaaaatccgatctggcgcgggatctgctgcaaatgctcatcgacttcctgccggaagtgcgtaacaaaattgaagaacagctggtgggagaggcgcccgaagggctggtggatctcatccacacgctgcacggcagctgcggctacagcggggtgccgcgcatgaaaaacttgtgccagttaattgagcagcagttacgcagcggcaccaaagaagaggagcttgaacccgagttcctggagctgcttgatgagatggacaacgtcgcgcgcgaagcaaagaaaatattaggatga

SEQ ID NO: 83651 - DNA, 1299 bp, Citrobacter koseri
atggcgcaattctactctgcaaaacgacgcgtgacgacgcgtcagatcataaccgttacggtcaatgacctcgatccttttggtcagggcgtggctcgccataatggaaaggcgctgtttataccgggattactgccccaggaaaagggcgacgtcgtcattaccgaagataaaaaacagttcgctcgcgcgcaagttaagcgtcgcctgaatgatagcccggaacgggaaacgccgcgctgcccacactttggcgtctgtggcggctgccagcagcagcatgccagcgtcgcgctgcaacaacgcagcaaaagcgccgcgctgtcgcgcttaatgaaatgcgatgtcgccgaggtgatcgccgatacgccgtggggctatcgacgtcgcgcgcgtttaagcctgaattatctgcctaaaactcagcaattgcagatgggatttcgcaaggcgggctccagcgatatcgtggatgtcaggcagtgccccattctggtgccccagcttgaggcgctgctgcctcgcgtcagggcgtgtctggaaagtttgcaaggaaaccgccactttggccatgtcgagctggtacaggcggggaatggcaccctgatggtgctgcgtcatacggcgcccttgagcgcggcggacagagaaaaactggaacgcttttcgcattctgagggactgtctctgtttctggcccctcaaagcgacatacttgaaccgcttaccggggagacgccctggtatgattcaaacgggctacgcttaaccttcagcccgcgcgactttattcaggtcaacgaaggggtgaaccagaaaatggtcgcccgggcgctggaatggctggatattcaacctggcgaccgcgttctggatctgttctgcggcatggggaattttactctgccgctggcgacgcgcgccgtcagcgttgtgggcgttgaaggcgttccggcgctggtggaaaaaggccgggaaaacgcgcggcgtaacggattacagaatgtgacattctttcacgaaaatctcgaggaagatgtcacgaagcagcaatgggcgaaaaacggttttgacaaaattttgctcgatcccgctcgtgccggggcggcaggcgtgatgaaacacattataaagttaaaaccaattcgtattgtttatgtatcctgtaatcctgctacgctggcacgggatagcgacgccttgttgaatgccggataccaaattcagcggctggcgatgctcgacatgttcccacacactgggcatctggaatcaatggtgttgtttgagcgtttgtaa

SEQ ID NO: 83652 - DNA, 2235 bp, Citrobacter koseri
atggttgcggtaagaagtgcacatcttaataaagctggtgagtttgatccgaaaaaatggatcgcgagtctgagtatctccagccagcagtcgtgtgaacgcttagccgaaacctgggcgtattgcctgcaacagacacaaggacatcccgatgcggaactgttgctgtggcgtggcgtggagatggtggaaatcctctctacgttaagtatggatatcgacacgctgcgggcggcgctgctcttccccctggctgacgccaatgttgtcagcgaagatatcctgcgcgagagcgtggggacatcgatcgtcaatctgattcacggtgtgcgcgatatggcggcgattcgtcagctgaaagcgacgcataacgattccgtctcctccgagcaggtggataacgttcgtcggatgctgctggcgatggtggacgacttccgctgcgtggtcatcaagctggcggaacgcatcgcccatctgcgcgaggttaaagacgcgccggaagatgaacgcgtactggcggcgaaagagtgcaccaatatctatgctccgctggctaaccggctgggcatcgggcaactgaagtgggagctggaagattactgcttccgctatctgcacccggcggaatacaagcggatcgccaaactgctgcacgaacgccgcattgaccgcgagcattacattgaagagtttgtcgggcatctgcgttctgaaatgaaaaccgaaggcgtgaaggcggaggtctatggccgcccgaaacacatctacagcatctggcgcaaaatgcagaaaaagcatctggcgtttgacgagctgtttgacgtgcgcgccgtgcgtattgtggctgaacgtttgcaggactgctatgccgcgctggggattgtgcatacgcactatcgccatctgccggacgagttcgatgattacgtcgccaatccgaaacctaatggctaccagtcaatccatacggtggtgcttggccctggcggtaaaaccgttgagatccagattcgtaccaaacagatgcatgaagatgccgaactgggcgtcgcggcgcactggaagtacaaagagggagcggtctccgggggggcgcgcacgggccatgaagacagaattgcgtggctgcgtaagctgatcgcctggcaggaagagatggcggattctggcgaaatgctggatgaagtgcgcagccaggtctttgacgaccgggtgtatgtctttacgccaaaaggcgatgtggtggatctgcccgcaggctccacgccgcttgactttgcctaccatatccacagcgatgtggggcatcgctgcatcggggcgaaaatcggcgggcgtatcgtgccgtttacctatcagttgcagatgggcgatcagattgaaatcatcacccagaaacagccaaaccctagccgggactggctcaacccgaacctgggctatgtgacgaccagccgtggccgttctaaaattcacgcctggttccgcaagcaggatcgggacaagaacattctcgccgggcggcaaatcctcgacgatgaactggcgcatttgggcatcagcctgaaagaggcagaaaaacacctgctgccgcgctacaacttcaatgagttggaggaactgctggcggcgattggcggcggggatattcgccttaaccagatggtgaacttcctgcaatcgcagtttaataagccgagcgccgctgaacaggatgccgccgcgctgaaacagcttcagcagaaaacatacgccccgcagaatcgccgtaaagacgatggccgcgtggtggtggaaggggtcggcaacctgatgcaccacattgcgcgctgctgccagccgattccaggagatgagattgtcgggtttatcacccaggggcgcggtatttccgtacaccgggcggactgcgaacagcttgtggagctgcgttctcatgcaccggaacgtatcgtggatgcggtgtggggcgagagctactctgcgggatattcgctggtggtacgcgttcaggccaacgatcgcagcggcttgttgcgggatatcaccaccattctggctaacgagaaggtgaacgtgctgggggtggctagccgcagcgacacccggcagcagctcgccaccatcgatatgaccatcgaaatttacaacctgcaagtgctggggcgcgttctcagtaaactcaaccaggtgccggatgtgatcgacgcgcgtcgtttgcacggtaattaa

SEQ ID NO: 83653 - DNA, 1449 bp, Citrobacter koseri
ttgaaaaaatattctgcagaactttctgttcttaaaatagaacaatctctgaaaaacctaaaacttataaataaagagttatcagattcagttgtctgtctggaccgaaggccttctgataacatcctgactaaggataaagaaagcttaggttatgtttctatcgaggactcattagatactcctgaaaatacaggcgtagatattggtgaggataatataattgatggagacgatcttaagaaacaattattcgcagccgaaacaaaattaggtgttgcaaagattaggatgatgactccaacgttatcgttaatttttgacagggttgagttcaaagatattgagttacaaccagatttccaaaggaaggaccgtatatggaaggctgataagaagtcaaagcttgtcgaatccatattaatgcgcttgccattgcctgttttttattttggcgaaaaatcagatggttcatggattgttgttgatggtttgcaaagaactacctctatctatgatttcatgagtaataagttcccattggctaatctggaaattttatctaatctaaacggaaaatattttaaggatttatcgaggacagaacaacgggacataagagaatatgcaataactgcatatcttattgatgttgatgagcgaaattcaaatttggttgttgagcttttccatagaattaatacctatggagttaaattgagtgaccaagaaattcgttcagctttaaatcaaggttccagcgttaagttccttcgtttccttgcttcattgaattcctttaaagaagcaacaagatataaggttaaacctgacaggcaaaaagatatggagctttgcctctcagctctttcgtttatggttcgtggatataaagattatgggcagggttcgtatgatagtttcttatccggaacgatgtcatacttaaatgcctttgaattgcatttagaaaatgaggatgatattgataacggtaattcaataattcgtacagactgtaaggaatatatagaaatatatgaaaaatatgactctgcattaaaattagcgaaagagatatttggggattttgcatttgtaaaagagcctattagcaacagttctccaattagtaagcagttatttgagttggtgatttattatttctcaaaaatgtctcctgctcaaagagaaatattgcgtaaaaatgcatctgaatttatcgatcatttgtatacagcaatagaagaaaattccaaggagtatgccgactggtattcaaaaacatacaatgagacagatagagggtttaaggatgctttatcaacatctacaggtaaaagaataactgtgttgtatcgctttgaagcgtttgcagaaatccttaaaaccactactggtattgtttttgactattatgatggagagaatactcatgttaatgattga

SEQ ID NO: 83654 - DNA, 1026 bp, Citrobacter koseri
atgaataaatttataacaattgatggccgcaatattggtaaagaccatcctccctatattattgctgaactttcggctaaccataatggtgatcttaatcgcgcattcaaaattatggaagaagctaaagcagcaggagcagatgcaatcaagttgcaaacttatcgtgcagataccatcactattgactgtgacactgaagattttcagattcatggcggattatgggatggacaaactctgttcaatttgtacaaaggtgcccagatgccatgggaatggcacaaacctttattcgaaaaagcaaaagaactgggaatcactatttttagtagtccgtttgatcatacggctgttgacttactggaggagttgggcgctcctgcatataagatagcttcatttgaagcaatcgacctgccattgattaaatatgtagccaaaacaggtaagccgatgattatctcaaccggcatggctgacgaaaaagaaattcaggaagccattaatgctgccagagaaggcggctgtaaagaactcgtcgtattacattgcgtaagtggctacccggcacctgctgaagactataatctggcaactattccagatatggcagagcgatttggtgttattacaggattgtctgatcatactattgataataccacggctattgcttctgttgtccttggtgcaaatgttattgaaaaacatgttacgttagatcgtaacggtggtgggccggatgacagtttctcgcttgaacctgatgagctgggggcatggcaagcgttgggccatatcaactacgagcgtaaagagagtgaaaaaggtaatgtgaaatttcgccgttctctctatatagtgaaggatattaaaaaaggtgaaaaactaaccagtgagaatgtaaagagcatcagaccgggttacgggttggctccaaaatattatgatgaggttatggggaaaactgcaacgcaaaatcttattaaaggtactccactcttggaggatcattttaactaa

SEQ ID NO: 83655 - DNA, 234 bp, Citrobacter koseri
atgctcggcgacttcttcagccagggggtggcacaactcaacctttttgatgataacgcgccgcggcgcaatagcgacaaactgatgaaggtgctggatcatctcaacaccaaagacggcgtaggtacgctctacttcgccggacagggcatacaacagcagtggcagatgaagcgggagatgctctcaccgcgatacaccactcgatatgaagaccttttgcgtgtgaagtga

SEQ ID NO: 83656 - DNA, 153 bp, Citrobacter koseri
atgcagtgtgtccgggtggttcgtcttatgcatcgcaatggcgttttcgtcgtggttgatcgcaatatccacgctgcgcccgatcgccagttcgatcccggtactcgcgccgccgccaccagcaaagttatcaacgataatttcacgcattga

SEQ ID NO: 83657 - DNA, 228 bp, Citrobacter koseri
gtgctgtcgccgcgcgtggaagcgctgttccgggtggtgccgcccgcactgtatctggcgctggcaatgaccgagaagcatgagaaggcggaaaggatgcggattatgaaggagaccggatgtagtgaagtggaggcggctttacaggttgccttcactctttgttctctcaatcaaaatatcaaatataaaacattatctcaattcatgggataccaagggaaataa

SEQ ID NO: 83658 - DNA, 240 bp, Citrobacter koseri
atggatcagacatgttctctggagtcgtttctaaaccatgttcaacagcgtgaccccaatcagaccgagttcgcgcaggccgttcgtgaagtaatgaccacgctgtggcctttccttgagcaaaatcctcgttatcgtcagatgtcattgctggaacgtttggttgagccagaacgcgtgatccagttccgcgtggtgtgggtggacgatcgtaaccaggtgcaggttaaccgtgcctga

SEQ ID NO: 83659 - DNA, 894 bp, Citrobacter koseri
atgaatgtactgatgattcatggtatcggtcaggaagcatcaacaaaagatgaacttcttaataagtggataatgtccctccatgcggttcagccaggcttgcttgagagagcctcagtcgacatggcatattacggtacaacccttgccgattggacgaataacaagactaagaacgcagttggcatggggggagaatctactgctactgctattgatataggcaatataaatgaattgaaattcctcagcgtggcattgaatgagttcgctactgaatatggtatcgacgaagccgaaattgcggctgcaatggcgtcggaagcaggcaatgttgtaccgatggataacactatcgcaaggcgtattgttggtctggtgcgtctgattgagaaggtttctccagccaaaggtgctctcctgcttcggctcgtaagacaggggcatacgtatctttcttcaccaagggctgcgaaagcagtcgatgacattgtgaaaccccttttacaacagagtccccaagtcctcattactcactcgcttggaaccgttatagccttcaaactgctgagagaaatggaagcagaggggacgagcgttcaggttccacttctaataaccatgggatcgccacttggcttggatgcgttcaaagcaaaacttggtgcaccacgtcgtaaaccaaattttgtagataagtgggaaaacttttttgacccatctgactttgttgcacttggtaaatcgttggatgagcggaattttgcgagcgacatttttaacgatggtgctgttgataatactacttttaactctcacggaatcatcggctatctctcgcatcatggggttgtcgaggcattgagacgagttctatcattgccttcatcttag

SEQ ID NO: 83660 - DNA, 1740 bp, Citrobacter koseri
atgaagttatgtttgactatcggggtttcagatgcaccaccgctttctatgttaccgggagcgattacggcagctcacgaaatgagtacttgggcaagagaatctggctttatcacagaagtgattacggatgaaaacaatacaccagttacgatcaaacgtattcgcacaacattgctcaacatgcttccttccaatgatgaagtggaactctttattttacattttgcggggcatgggtttcgaactggggcagagcaaaatgtctggcttcccagtgactggcaccaggacatgcgagctatttcggtggaggcgttgaaaaaacaactttatatgcgtggcataaaaagcttgacgattttcgcagatgcctgtcgctcacttcctgtggatatagaaactgcggatatttgccctgacaacgtactcccacgaggtccttacgaggcgaagcccccttttatcgatcgtttcaatgcggtgatggatggtcagcaggcatatatgctgaaaggggacaaaacggccccagatcggtgcattttttctacggtactgctcgaaggtttgggcggtctaaagaatgaagcatttgattggcaccgtacggattgtgtgattcctgaatcgcttgcattgtttactacggtcaggctaaaggaaattggtgagacatacgatctaaaatgttcccctgagaatgccacggcacttcccagagaccatgcgatttatttccaacgaagtggacgctcaactaatctgcctttgccaaaatggcctgcgccgtcttcgcgagatcaaaatccagataaagctaacgatattccaaagacagatacccctcgtatgagttcacgaattttcaagcggcatgttgaagatagtttatggcttaaatttgattctggccaaccaacttttaatttggctgtacaaggtgcggttcctaaaaaagtatggagtacatcctccgttgaaatacgttcgaacgattattacggaggaacatatctggttcacgttagagcgggtaatgctattcaaatcctcgttgaatttggcgacggtatgtttgcatcggcggtagtgtacgcagatttgactacggtgatcagtcgcgatggaaatggtgatgtcagttggatttgcacatcggaaaatgcactatacagagatagctttcgttcgtctgttgcaactattaagcattttcaaaatagcaatcttacggcgaatcaggtagacagcatcaccgtgaaactatggtcacagaagcatgctgatcctactttgggcgctatagcgagttatttatacgattacacgggagatgtggatagcatacgccgtatggccttcttttattgcaaatatcaccaacccattccatttgatgtggcctttatgggactcctttcattcaataacataacttcttaccagcttgtggcagaagtaccaccagtagaagcacgacctcagtctgaggtgaataataatttgccgcaatgggttactagggcgacccataagcgggtagggaaagttgctgggttatggccttggcttcgtcaaggatgggcatttgtagatgaaccagagattcaagaaaaagcagtagtggaaggaataggtgaaatcactaaatttttactaccctcgcagttctcttctttttgggaaccggggggacgattgttgattgagaaattccatatggaggcaagcgaatga

SEQ ID NO: 83661 - DNA, 300 bp, Citrobacter koseri
atggacgtggaacatggcagcaaaatcacctcgtgctatctgagcaacgtaagcaaactttattcgcagtgggataaaacacctgaggtcaatgaagtgaccagtcgcgtttttaaacgtaacctatctgtggtcgctgaggttttgctacgggcgaatgggaagtgccaaagttgcaaacgtgatgctctattcaaacgtgaagatggttcaccttatcttgacgtccatcatgtcgaattgctatcccatggcggagaggacacagtggagcttgatctaacagcagtggcgcactga

SEQ ID NO: 83662 - DNA, 1317 bp, Citrobacter koseri
atgaccaacaaatctttcccgaacgaaccggaaaaaaccatctcagaacgggaagaagaagcccgcgaacgcgcccgcgcggcaatggcatatcaggagccgcagcagaaaacgccgcccggccaaccggaagtgacccgtttccgtaagacgtccggtcaccgtacgctgatcgtcagcctgctgagtctggtcctggtcatcgcgctggcatccggtggcgatcgtcttctcagcgccctgaaaaggggtgatgagaaagaatctgacaccgcaccgccgccctcctccggggcggtgcagcaggagcgtaaggatctgggcatggacagtaacccgtttggcctgttcgggacagggaggcacgaaagcgcaggccctgccagtcagagcgccccggtcactccagctctgccgccagggccgcccgccctgaacaaggcggcagcactggcaaacgggctgaacagcggcggtacaacggctggcggcaatgcccacacgtcccgtcgtgaaccgcgtaacagcgcaggaacgtcagacagcccgccagcctccacggcgtacacatcctgtcagtccgtactggtcagaggggtggatggccgcctgcgctgcccggatcccgccataccggaaaccgcatcggatacggccaacagcgataatccgggcgtagcccgtgtcaccggcgtcaggcggctgggccttgatcccgatctctatatcccggtggatcgctatattccctgttcgatgatgcggcgctttgtgtccgatgtcggcggccatatctcctgcctgattggggaagatgtctggagcgccagcaaccatgtgaagctgatcccggcgggaacagtcgcccgtggcgtctaccgcaccggggcactgcaacacgggcgcagccggatgtttgtgctgtggacggagttgcgcacgccggagcccggcagcctgcaaatcccgctcaccgatacgcaggccaccggcccgctcggtgaggcggggatcgcgggctggatcgacagccatttctgggcgcgtttcggcaacgccctgatgctgagtaccgtgcaggacgtggcggcaacggcatcagatgccgcgccggggaaagaccgcaataccgactataccgaaaacacccgcgccgccacggcggaaatggcgaaaacgacgctggaaaacagcatcagtatcccgcccacgatgtacctgaaccagggcgatgtgatcggcatcatgaccggcacggatattgatttttcctctgtttatcaactacggctgaaaaagaaatggtatgagcgctga

SEQ ID NO: 83663 - DNA, 1086 bp, Citrobacter koseri
atgcacgtcatttacggagaaactattaacgatgtaataatgaaactcctagaaaaagtgcttaatgaaggagttcgtatttcgacaaggaatggggatgctataactatttatgatgttagtatgatcttacgaaaccctagatcaaggcatttaagtttagcgggtcgaaaaaataatatattttccacatttgctgaagctatatgggtttttgctggcgacaacagaattaaaccatatctaaatttttttttaccaagagcgcctaaatactcagatgatggtgtcatttggcgagcagcttatggggaaagactatacgctcacgggcaacttgaaaatgtcgtgcaacaattcaaaaaagaaggaatatttacaagaagagcagtcattagcttatacatgcctgacagagatacgaatgaaagcctcataaaagtatacaacatagaacatagtgtcgatattccttgtaataacttaattcatttctttatcactcctgacaaaaatttaaacattaaaatagttcaaagaagcggcgatctaatatttggagtgagcaatataaatcttttcgagtttagtttacttcaagagatagtactttcaatattacagagggaagttgatagcgagattaaactgggatacttacatcagtcagtaacaaatcttcatatatatgatgatagagtaggacaagccaatgaaatatacgaaagaaaagaagaacaaatgacagatttgataaacgatgatgaaatatcattccctccatcgttacaaaatataaaatcattattctgtgatatagtttcattccttgaaagaataataacagaaaatgaacataaaatagacacaatagatatggaaaccgaaaatctaaaaaaaatatttattaaacactttgtagaaactgaaaggaatttactttggggatatgcagaagcagctctatcatatattttccaggaaagattcaaccaaccaatagtgttaaaaactaagttaagcaatgatttcaatctaagcgtaacttctaattattttaataattctaataaggaccgtctatga

SEQ ID NO: 83664 - DNA, 558 bp, Citrobacter koseri
atgaaaattgcattcatgggcatatcgggtagtggaaaagactttcttgccaattatctgatatccaactatggatttattagattatcatttagcgatcaactcaaaaaattggccaattatatttatccttggatggaaaaggattacccccctgaaaataaaatgttaccactcaatataaccttacctaccggcgactttatcagccattcaccaagagatatatggctgagcttagacagcctaagggaaattgaagaaaaaatatttattagaatgctatcagaagagttgaaaattttagaaaaaaatggagggatgaataaaaatataataattactgacataagatcaaatgaagaattcgcatggtgtaagaacaatcagttcactatagtacatatagaacgggaaaataacaattataaaaaatacgaaatcgacaagtatgtcactgagaataaaacaaaatcagaatatcattttgacaacaatgtgaacggaattgatagttttaaacatttcttcgaaaaggtattattaagtgaacagtaa

SEQ ID NO: 83665 - DNA, 852 bp, Citrobacter koseri
gtgaacagtaaaaacgatcaacttttttgtaatgtcagagaaatgaaaattaaaaccgctaaacctatcttgaatgaagctgttattagggaatggttttatcatcaacgagagaggacatccatatattataagaaagagatacttaaccttccgccatattggacagacgacaaaatattgagaaactataaatttgtaaatactaaaagaacatgggacaaagaaaccaaatggttattgaaaaatataacaaacaacaataaattaacttatgaaaataaaatacttaattcatttttgtttagagtaataaataaaagcgatacattaaatgaacttgatgcgccctttgatttcacaaaaatgactattcgcgacatcaatgaaaagatcagagaaaagacaataaatatatcattaaaaaaaccaggctacgtattttttagtgcagcctatattttaggaggtccgaagtttaacttcggaaaatacttaaaaaatatagaaggaataccggaaaatgatatggtaattagaatgataaaatttgtttattataaccaagataaaatcgttaatggtgtaaaatcatcaggaaatcagttcgaagtttttgaacatttaaaatcattctcagggattggggattttctagcatatcaaattttcatagatctgacatacatacccaactttccgtttacagaattgaactttgttatttcaggtcctggttgtgaaagaggaattaattggattttttctaatagagatggaatgaatagcgaagagtgtttattctggttcactataaaccaaaataacatcgctgaaaagtatagtgcgtga

SEQ ID NO: 83666 - DNA, 903 bp, Citrobacter koseri
atgaaaaacaggcgaaatattcttaaatatattattgcaactgttgctgggacatttgcaattactaacaatgtttcggccattagaaagacaccagaagataagcatccgggagagactaaaaagcaactgaccgaaaaatatggcgtatttagtgataaaaccatcgcctattttggtgattccctcactgaattcggcgacattccagagcgtattgcactccgtactggggcgaacgtacttaagttcggcttcggaggttgtcgtatggggtggcatactcatatcggttatgatgctatgagtatgtatcgtattgcgcatgcaataaatgaaaataattattccaggctggagaaatatgcgtcagatgttgtcagggagttcaatgataataatttaccccagattatgagattgaaatcgactgtctggagcaatgttgattatgcagtcattgcttttggaacaaatgattttggcggaagtcgcataaaaaataataaaataggtgatattaatgacttgacacctgacggatcaacgttttgtgggagcattaattatgttattcaacaacttctttcaaaaaacccaagaatgaggctagtattcatttcaccaatctggcgtttaaaaaccccatcagatttaagcggtataaatcctcttggttctgacgaaaccacaaatattaacggcgaccacctcatcggcttcgttgatgcaatgatcgaatgttgcaaaaggaatcatgttgaagtctgggatggatacagacgaagcgggataaatcagtacacagcccatgcttacattgctgacggtgtgcatccgacagatgatggatatgccctccttgctgataaaatatcggccttccttgagtcaacgttctag

SEQ ID NO: 83667 - DNA, 2115 bp, Citrobacter koseri
atggctaattcatatcagaatatccctgttcctaccccaacacagaaccccgtgccgagtgcagacatccgcgaccatgtgtttgccggttctaaacttgatgaggtcgtgacatcacttgcgattcagtatatcgaccgctttggtaaggctcattacacaattgaaggccttaagaaacttgttctacagcagatatataatctcggttttaatccggtaggcacgttccaggatggtgctacgctcgtttccgccggtgacatcatccaggatgagacaactggcgcatggtatcgctgggatgatctcacgaccatgccgaaaaccgttccgcctagctctactccagattcatccggcggcacaggtgtcgaaaaatggctggccgtagatgtcagtgatgtgcttcgcagggacttgctggcggttgatggcgcggagcatgtcatctggagaacccattctgtcggtgacttcattgataacataaccgtcagatctgatgattttccaacgattcaagagtgggcggcttatcctgcaaagaataaagttcttgttggtggcgactatgatctgtcatcaaccctaagcatccagtgtgaaaccttaaaaacagaaggccgggttagaattttacctacagggcccatgaaaggagttttcatagggtctgaagtcagaacagaattggcaactctgtccgctagcctgttatcaggctctcttagctataccgtagcaggcgtatcagtgggggatactttatgtttctggaaccctgttgctgggtcgtggtctgcttttcgcgataactggcgccagggagaattcgtccgagttcaaaggtatgaaggcggggttgcatactgggatggtggcttagttgacacttatccatcaggaaccaaagttttcaaggtagaacacgtcaaacgcaatgtaaccggtgatttctacatcgagtacccaacttatgacgcggcctcgattggaatagaaattgtccaggcttgcgaatccgatctaacgggtctacgggtgcatgtaaaaaatgcaccaatagctctgcatttaaagcgatgcatgaacattagtgggaagtcgctaagtgttattcagacaacggaaaccacaagcactacagactacgcactgataatttccaattcacaatgccttgacctgcaaggatcattctgtgctgcccgtcactcatcaacaatgggaggcgatggagatgaatgctctatcgttaatcgttataaccgtgttgccggagtattcagaacaacaggacagggtggagttgcagcagctgattttcacggtaattgcgaaaaatgccgctatgaggggcacgctcaaggggtggcgatcgctggcgcgcaaaatagcgtggcgggaatgattattgatggagtaacaggagccccagagtggccgtcacttattttctctgagcttaaatcaatggagcacgacctttccaacacaaccattaatggtaatggcgacccaggaacaggcaatcgaggttgtattgatattggagggaacagcaatgttcttacagcaatgacctcgagggcaggagacttaaatctttcaggagcgcaaataaagtcgccagcctcatacgtgatcaacattcgtaacagggggtcaactgcaaagcataacattaacctaaccggagtaactgtaaatggagattctggagacttagcagttcgcgtttctccggtgtcaggaatttcacctgacgcagtaaagctctcaggttttaccaaaagcgcaggtatgaagattgctgtgccgaacgactccgcgaagcctggattatatctctcggggcagactaatgtgaccattgcaaacggtgcagccattggctctaaagtagtgacatttgctgatgaaatgccaacaattcccgcttcaatagtggtaagcagaatgggggtaatatccggcaacccgagttacaaaattggagtttctgcatcgggcccgtcagtaacaggatttacaatcaacgcaaatacaaatgatggtagtaacttaactgcggcctttacgacagttgtgtcgtgggaagcgagatggtaa

SEQ ID NO: 83668 - DNA, 1563 bp, Citrobacter koseri
atgagaaagcgtaaatctgtggcagatattgaagatatccgcctgatgaagctcaagttttatcggttggttaaaagtgacagttcaagtgagtgcatgctgtggtctggcgctttgagctttgatggttatggtcaattttcatttgaagggcgaacttggtctgcacacagaatggcatacgagattgctaatggtccaatcgctcaagatgcgcaaaagtggtgggttctccataaatgcgacaatccagcctgttgcaatccaaatcacctttatcttggcgatgcgaaagacaatgcgaacgacatgatagacagaaaacggcagcgaatgggttttaagcgacatggtagcggggaagatattcgctttgggagggttttctatgaaattggcggtgaaattagaacactgcatgagtgggctgagagattaggcgttaacccaatcactctagatcagcgattatcagcaggttggccggagaaagatctgggtttgtcttcaaagatattcaagcgacatttaaaggctgatgggcaaacacattacaggcgattttctggttcggaagaagtagagagttataagagcgaagccccggtagctgtaactaccaaggcttctgaatcaacaaaccttgacgggaatattgacatgacaagtatagcaattcttgaagcagttaacacctcttacgtaccgttcaacggacaacagattattactgctatggcggcaggtgtggcctatgttgcgatgaagccaatcgttgaaaaccttggtatgagttggtcaacacaggttcgtaaattgacggctgacaagggtaaattcaactgtgttcatatgaacatggttgctactgacagcaaactgcgtgatgttttgtgccttccacttaaaaagctcaatggctggctgttcagcatcaaccctgaaaaggttcgcgccgacattcgcgataagctgatccagtatcaagaagaatgtttcaccgttctgcatgactactggaataagggtggcgcagaaaatcaccgcaaaaagacaactgttgatgaaagaacgccgttacgcgacgctgtgaatatgctggtcagcaaaaaacatcttatgtacccagaagcgtacgcaatgatccatcagcgattcaacgtcgatagtatcgaacatttagcccctgagcagattaatgatgctattgaatacgttcatcgcgtagttctggaaggtgaattcctcggcaagcaggaagaactacccgcgccgaaactggatatcagtttcccgatgtcctggttcgcagaaaacgcgccatatgcaattattcgccagaagagcggagacactgtatctcttgaccgaaacgttcttgtcgattgcagtccggcctatcgcttgcttgatgccctgacaaaagccggttatgacgttgaggcagcaaggacggagataaaagccctgcgcaccattatggcagagcagagttgggcgctgaaagagatcgcctcctacacagggttgagggacaaggcgtgtcatagcgtcaggctgtaa

SEQ ID NO: 83669 - DNA, 225 bp, Citrobacter koseri
atgaagcgagtaaaagttgaattctcatcaagtggcattgttctcaagaatacagagtttcaggtattgcagggggatcgcgtactggttgaggattctttatcaggtaaaatttcggatgtgttcatccgccactatgatgtaagtgctgatggcggccctgtatctattcagtttacgaaaggggatatccccggcttaaatgtgaaggccactctatcctga

SEQ ID NO: 83670 - DNA, 600 bp, Citrobacter koseri
atggaaaaccaaaaagaacagacggtgaccattaaaatcgaattggacactacttttacccatgatgaaatccgtgatgcgctggaatacatcaagcgcgtcagacagacaaaggcattcgaaaaggcgctggctgatttatcaccatttaccgtgaaaaacggtgaggtatttttcaatgatgcggtcataggtaatggacttactaccgataaaatccggctccgtgaatacggactgagtgagcaggatgttaagaacgcttccgcatccaattcgggatatgaacaacacaccgctggtggtgcagcctcagtgtcatacaccgcaagcatcagtatcagtcgagataagccagtacgggataccgtaacctttactgctgatcatttcaaagttcattctggtatcgatgtcaatatcgaagctctgatcgaaaacgctgtgaaaaatcacgttcaaagtgcagcgcgggatatcaaaaaacagttagcagcagaccggatgacactgaaagacctgacctctcatatcaaaaacgtcatgctgcttgagagcttccctgatggcattttgcatcgaaacttcgtccgtcggtga

SEQ ID NO: 83671 - DNA, 546 bp, Citrobacter koseri
gtgatcacccttgctgatattaaagcctcatggcgtctgatgctgctggtggccgtcattgcggtagtcgctgggctgtgtgtattgctggcaaacagccgcgctgatgttgctacgctgaagagtgataacgacgttctgcgaagtgacaataccctgcaagggacggttatcgctgctcaggctttcaacttcaaccggtttaacctggtggccgagaacgccagtcgacttaactcgctgattgatgctagctccgataaaactgttatcgcgtaccgggagattctccgccgtgaaaaaacctgtgatctgcctgttcctgctgatgtcgctggtgggctgctcgaatacgcgcaccgtttacgtaccagcgcaatgcactccgattccgggaacgctgacgcagccggtgatagctcctctacccccagcaccctgacatattgccaggctgttctctggattaagccgctactggccaccatcgagaaggcaaacaatcaactggcaggaatacgccaaatcgaacaggaacggcaatag

SEQ ID NO: 83672 - DNA, 165 bp, Citrobacter koseri
atgagcaatctgaacacctcaaacaccatcaccatgtccagccgcgagattgcagatctgactggcaaagagcacaagaacgttaagcgcgccatgttgccgccagtagcaaagcacagccagcaacagcaaaaaacaaaacagaccgcaggagaagccgcatga

SEQ ID NO: 83673 - DNA, 474 bp, Citrobacter koseri
atggcagagcaaactgttttagatatgtgctgcggctctcgcatgttctggttcgataagcaggatgggcgggcattgttcaccgacattcgcgccgaacagcatgagctttgtgacggcagacaactggtaatcagccctgacatggtggctgattttcgtaaccttcctttcgccgatgcttcgtttggggttgtggtgttcgatcctcctcaccttgagagggtcggtgaaaactcgtggatgggaaaaaaatacggacgccttaacaaagatacctggcgtgatgacattcgtgccggtttcactgaagcattcagggtgttgtggccacacggtgtactcatcttcaaatggaacgaaacgcagattccagttagccagattcttgcgcttacagacgttaagccgctgattggccagcgcaccggcaaaaacgacaaaacccactggattatctttttgaaggactaa

SEQ ID NO: 83674 - DNA, 219 bp, Citrobacter koseri
atgaaagacgaagatttagaccgctgcccgcgatgcaaagaagacatgtgggctggtaatactctctgcaagaactgtcagcgtgaagatgagttagatgagtggcctggtggtgacgggaatccttttcctgatgaaattgaatgtgacatctgcgggcacataagcacagacccagaaggccgccacttttcctgcaaggacaacagcgatgactaa

SEQ ID NO: 83675 - DNA, 558 bp, Citrobacter koseri
atgaaatcaacggtagaaacaaaaatcattgagttagtgaagtcaggacatgagttggcgaaagaactgcattgtgctgagtctgccgcgctggtgagcgatctggcaacgcagcttgaagtgcagtttgcccgtagcaatgcgctggcggcaaagctgagcatgattaacgacctcatggatgctgctgaacaggccaacaaacttgcgcaggaagcaacggaaaagctggtacaggagcgtgacgcgctggctgcggagagagatatcgtcaacgccgataacgcctatcttcgcgatcaggttatttgctgggctagagagtgcgaccgaatcacattcacccataccaacaaaataactgatgcgcatcagacggaagccgagcaggagttggctaacacaaccccagcgacctccgctttcctggctgaagtgcgggcgcagggcgtggagatgtttgctgccagtctgaaggttgttggtgggaatgagcatccatattcagcggtagccaacgagttcgcagcccagcttcgcaaaggagcagcccaatga

SEQ ID NO: 83676 - DNA, 408 bp, Citrobacter koseri
atgatcccagagtcatatcaaggtgaggcgtttgaagtcaggcactgtaacggggctctaaagacccttggagcagctcttaaaagtgttgctcctgttaataaacaaagaactatgttaatcaacctcagattgcagattgaaagattggcatctggcaaaagatcagcggatcttagcgtgagaatggagggcttacttccctcattcaaaggtaagccttctaagaatttctgggctatcaaaaagaagccgctgagggcctactactgggattcggaaagagttcatatgacttactacataagtcattacatattcaaaaattttgataagttggacgatgcagacactcaaaaggtttgcaataactggactcgagttgaggtcaattgcgatgaatgttaa

SEQ ID NO: 83677 - DNA, 315 bp, Citrobacter koseri
atgggatctggcgacataagcttcaaggaaaatcatcgccttagcattaaggttgatgagtttatttccataattcccacgtttcgtaccaaaaaagaagctatcagtgctggctcaaaattcggttggtcctcagctttttgcatcgagcgcagattcgaaaaggtatgggctgtgggaacaaaggattttcagaacgattatgttggaaaggttacgtttgaggtgtttcgtctacctcttttgaaatgggaaaaggtagacggaattatgcgatgcccggtcctttctattcgcagatataaagccgcctaa

SEQ ID NO: 83678 - DNA, 363 bp, Citrobacter koseri
atgagcaccggaatcggaaatcacgagttcagcactaactatcgaaacatctacaaaccagacctagccatctgcccttattgcgggtacgacagctgcgaagctgaccactgcgatgttggtataggcatggttcagtgtgggccttactactgccctcaatgccgtgcatctgaaattagcagcctggatacgcgagagcttaccgacagagaaaaggaaactggttggtttaagcctgatagcccggttagcgatgtcgccaacacagtcagcggccagttggttaaccacaaagaagccaaacgggcgtatgacattggcttacttgatgtgaagaaatcagaccgggaggcctcatga

SEQ ID NO: 83679 - DNA, 165 bp, Citrobacter koseri
atgacagtcacccacaacggaaagcagtacacggtaaaacgccgcgccctgaatgataacgagtggcggttaacatctgttaccaatccgcgcgaacagatcacgcttaaccgctggcagatgcatatcgctggactcctgaaactggttgaggtgaaagcatga

SEQ ID NO: 83680 - DNA, 150 bp, Citrobacter koseri
atgactatcaatcatccactacttcgtaaagcccaagagaaagcacgtacagcccgtcagaaccgcgacggcgccaagtggatggaagccaacgaagagatgaagaaagccgctggcatgccgtggtatcgcggaagaatggttagttga

SEQ ID NO: 83681 - DNA, 219 bp, Citrobacter koseri
atgcagaaatttgagtatttcgtaatggacggtcgggctcaattcgacattaccagggcttctgtgtatgaggcgcttggtcaacgtgagccatcaaagaagagtctccagcgagactggggggatatgggcgcatatctggttcgagcgccggtaactggtgaagatgcctccggcaattcacgctgcggtagcttcgaagtcgttcgcgcaatctaa

SEQ ID NO: 83682 - DNA, 1002 bp, Citrobacter koseri
atgagtgaagtaaccgaattagtcgtcatcgagaaacagaatgcgatggcggtatttaccaccaaagagcagctcgacccaattattgaggcgatcgagaaagaagctcgtagcctggtaccggatctgaccacgaagaaaggtcgcgacgccatcgcatcaatggcccataaggtagcgcgctccaaaacctacatcgacaacgcaggtaaagatctggttgccgagctcaaagccctgccaaagcagattgatgaaagccgccgaattgtgcgtgagcgtctggacgcgctgaaagatgaggtacgccgcccgcttactgaatgggaagccgagcaggaaagaattcgtgtggaagaagaatggaacaagatgcacgaggaagcgctggtgatgaacaggatgttcgatgatcagcgcgccgcacaattcgaagccgaccacgaaatggccctgctgatgaacgacgcgttcgaccgtgaccgcgccgaagcagcccgcctggcggaacaggcgcagcgtgagcgtgacgagcagttgaagcgcgaagcagttgaacaggcgcgacgcgacgcagaagagaaagccgaacgtgagcgtgctgaatcagcgcgccgggaagcggagttaaaactcaaagccgagcaggcagagcgtgaccgtatcgccgcggagcagaaagcggaagccgataagaaagccgccgcagagaaagctgaacgcgataagcaggaagccatcgccgccgagcagcgtaaagcgcaggaagaagccgaccgcgttaagcgtgaggccgagcagaaagaagcggccagactggctgagcagaaacgcatcgccgacgaagaagcacggcgcgcagctgacgttgagcatcgccgcactatcaacctgaaagcagtggctgacctggtcgccagcggtgtgccagaagaatgcgcaaaagcgtgtgtagcagccattgcaaagcgtcaggtatcgaacatcaccattaactactga

SEQ ID NO: 83683 - DNA, 279 bp, Citrobacter koseri
atgaacgcttttcgcgcttacgaccacatcgaggatcgtcggtgggctgaacagcaactcaccgaagaaaaggataagtggattgaagaccgggccaacgagctgatcgccatgttcccaactgacccgctttccatgcgttccctgtttatttcgaaagaagcctgcatggcgctgatcggcagcgaagcgcaggaaatttacaacgactacatctctcgtctttgctacgcgagagctgaagaagaatggcagcgtcaggccccctgcccattctaa

SEQ ID NO: 83684 - DNA, 426 bp, Citrobacter koseri
atggctcgcaacaaattctccaatcgcaaggcgcgcatcgaaaagaagttcagcaaacaggcaatggaattgcttattaagctaaggccgcgaagcattgaccggggcgatttcagcctggaatatgatgacttcaaagggcgtcacggcactgtctatcacgacgaatggcatctatgggattcaccggattactggactggtgagtgcgatagctacgatgcctttttcgttctccataacaatttgattactcagactcacgactttgaaggcgaaatggacgcccgtaataaagccggttgggatgctgaaatagacatgtctccttattactctccatggcgacttggcactgtcaatcgcgctcaaattatcaggcattgccgacagcttgtgtctgccggaatcaactgggacgcataa

SEQ ID NO: 83685 - DNA, 258 bp, Citrobacter koseri
atggctgacattatcgataacgcatcaacgcttgaagatttgcagcgtgacgcggcactgagcatgcacagactcaaccactcagcagtatcagcaacgcactgtggggagtgcggtgacaagttacttgatgcgcgccggaaagcgtatccgggatgcacgatgtgcgttgattgccagggtgaacaggagttgcgtaagaagattgggggggggtgcgatggaaaaggaaactatgacaaatcgcgaactggttga

SEQ ID NO: 83686 - DNA, 210 bp, Citrobacter koseri
atgacaaatcgcgaactggttgatgccgcaattgagcttgccggacagttctacacgatgcagggatatacacatcgtaccgggtttaagtattgggaatcgccacatccgcaggagcaactggttttcgaaatggcctgtcgcgcattcgaagtaattcgcggatctgatgtgatggacgctatcgctgatttggaggatgacgagtga

SEQ ID NO: 83687 - DNA, 834 bp, Citrobacter koseri
atgccaaaccacgtaacaaacgaaatccgcgttatcggcggaaccaataaacagcgccttgcgtttatcagatcaatcaccaataagcgcgggaatattgatttcaataatatttctcgcatgccaaaaagcctaatgattgacgaaagttcctgggtggaaaaacttgccagcgctatcgctggagagcacatgggccgcttcgcattcgaagaaattgaaagcccatcagcagtaatcgaaatgatgcgcaagcgcggaagcacggacaaatacataaaaaatgtgaagcagcacgcattaatgcgcatcgaaaataagcgccgttacgggttttattcctggtatgactggtcgtgcgctaaatggggaacaaagtggaatgcctacagcgtagaaatgcctatctccaggccctatgaaagggtaaagcgaggatatcagcatcggccaactcacgtgcgggcatacgataaacgtgttttcaaaaagaagctggcgcgtcatgcagcgagcggcgccccgctggtgattcgttttgagacagcatggagttgcccagagcctgtttaccatgagctcgccagcagattcccacacctcgagtttcatatccgttatgcggatgaagatatgggtagcaactgcggaaccgtcttactcaagaatggagaatggtctgctgatgatattgctccgcgctggagtgagcagaccgaagaagagcatttcaaatggcgaaagtttgcttttcaggttcgctatccaggcgacacgccgcaacagcacggcatgaatgacctgtacaaatacgacgaagacgaatacgactga

SEQ ID NO: 83688 - DNA, 1164 bp, Citrobacter koseri
atgtcactcttccgcagaggcgaaatatggtacgcctcgtactcgctccctggcgggaagcgaattaaggaatctcttggcacagcggacaaacggcaagcccaggaactgcacgacaagcgaaaagccgaactctggcgagtagaccgtcttggtgatttcccggatgtgacgtttgaagaggcgtgtctgcgatggcttgaagagaaggccgataagaaatcgctcgatacagacaaaggccggatgggattctggcttgagcatttcgaaggtgtgaggctgaaagatatcaccgaggcaaagatttatgccgcagtgagcaggatgcagaacaggaaggcaaaggagatctggcagcagaaggttacgactgctatcagaaaagggaaagagccgccagtatatgaagcaaaaccggttaccacgtcaacgaaggctaaacatctggcattgatgaaggcgattctccgcgccgcagaacgtgactggaagtggctggaaaaggcgcctgtaataaaaataccatcagtgagaaacaaacgcgtcagatggctggagcgtgaagaagccatccgcctgattgatgaatgccctgaacctctgaaatcagtcgttaagtttgcgctggcaacaggactcagaaagtcgaacattatgaatctggaatggcaacagatcgacatgcagcgtcgcgttgcctgggtaaatccagaagacagtaaatcaaacagagctattggcgtagcgctgaatgataccgcttgcagagtgttacgccatcaaattggtaaccataacaagtgggtgttcgttcatacccgcgcgggaaaccgacctgacggaacagttactccggcagtcaggaaaatgcgagtcgatgatcagagggcgtggaattcagcgtgtcgtcgagcaggaatagaagattttcggtttcatgacctgcggcatacctgggcgagttggttaattcagtctggcgttccgttgtctgtattacaggaaatggggggctgggaatcaatagagatggtgcgtagatatgcgcatctggcacctaaccatttaacagaacacgcgaagcaaatagacgttatttttgatgagtgtgtcccaaatatgtcccgcatggaaaataaggaggagattaaagaggcgtaa

SEQ ID NO: 83689 - DNA, 1341 bp, Citrobacter koseri
atgactatgttgcagctctataaacgttcatcgcatcttgtttttatctcaatcattttctttgtgttattgctgtgcggtcagtcgttggcgtttgcccgtgcgcaaacgaatggcgatctgccgtcgaaagcagacgtgcaaagccagctggatgcgctgggtaaacagaaagacctctcggcgctggataaactggtccagcaggatctcatcgatacgctcgccacgcttgataaaatcgatcgggtaaaagaggagaccacgcaattacgtcagaaagttgcgcaggcgccggaaaaaatgcgtcaggcgacggacgcgctgaatgccctcagcgatgtggataatgacgacgaaacgcgaaaaacgttgagcacgctttcgctgcgccagctggaacttcgggttgcgcaggtgctggatgatttgcagaactcgcaaaacgatctggcgacttacaatagtcagctggtttcgctccagacgcagcctgagcgtgtgcaaaacgcgatgtataccgcgtcgcagcaaatgcagcaaatccgtaatcgactggatggcaccagtgtcggggacggcgcattgcgcccgagtcaacaggctctgctacaggcgcaacaggcgttgcttaacgcgcaaatcgatcagcagcgcaaaagtctggaaggcaatacggttttgcaggataccctgcaaaagcagcgcgattacgtcacggcgaacaccaatcgactggaacaccagctccagcttttgcaggaagcggtcaacagcaaacgtctgacgctaaccgagaagacggcgcaggaggcgatctcgccggatgaaacggcgcgtattcaggctaaccctcttgtgaagcaggagctggatgtcaatcatcaactgagccagcgcttgatcacggcaaccgaaaacggcaacgcgctcatgcagcagaacatcaaagtcaaaaactggcttgatcgcgcgctgcaatcagagcgcaatatcaaagagcagattgcggtgctgagaggcagtttgctgttgtcgcgtatcttgtatcagcagcagcaaacgctgccgtcggcagatgaacttgtcgatatgaccaaccggattgcggatttgcgtctggagcagtttgaagttaaccagcagcgtgacgctttgttccagaacgacgcctttgtggccaaactggaagaagggcacactgacgaggttaatgacgaagtgcatgatgcgctgctgcaagtggttgatatgcgcagggaattgctggatcagttgaataagcaactgggcaatcagctgatgatggccattaacctgaaatcaatcaacagcagctga

SEQ ID NO: 83690 - DNA, 195 bp, Citrobacter koseri
gtggtctttgtgcgagtctatcaccagcagcgcgtactggtggcgatcaaccggggcgaggcctgtgaggtcgtattgcctgcctcaccgttgcttaacgtcagcgaatggcgaggcaaagaggggaaaggccaactggctgagggcgttctcagcctgcccgccatttccgctacggtctgggtgaatcactga

SEQ ID NO: 83691 - DNA, 246 bp, Citrobacter koseri
atggctgttcttactcgtccgttgtcggcttccgaagttcagaaagcaaaaaccgcagaaaaggattatgaactttttggcggtcaggggctgaccctgatggtgaaaacctccggcaaaaaaatctggcgctttcgctacaaacgtcccggttcgacttcccgaaccacaattaacgcattgcatccgtcattgacgagacaacctgacgatccactccgtgtttaccagtttgctgccaaatag

SEQ ID NO: 83692 - DNA, 1002 bp, Citrobacter koseri
atgaccactattaccagagagcttatcgccgcatatcttaacggcgaagttaaaacgctcactaacagcgaacagaaagagctggcgcgtatcgcgctggcatcgcttgacgctggcagtgacagcaacgaccacccggcgcaaggccctctctcaaattaccgcctgcaccgcatcagcgacattctcagaaaagccgcagcacaacgcgatggcggtaacatcggttacgcaatgtctgatgctgtgaaagcgattgatgaattgctggaagtgcggaaggcggagcctgtggcgtatattcgatcggctcataaaccagatggattttgttttgctgatggaattcatccgacgcatcgccatcaaagattacctttgtcgacattgcaagatggatgctattggaaggtaactccgctctatgccgccccgccagcgccggtagtgccggagaattgcgtaacagcagaacaccgtcgcgttattgaaatgctgctcaatgtttgcggggccgcattcgaactcgcagatgatagctgtcagcaagatgttgatggcgaagagtgccacgctgttccagacgacgcatttcagaagctaagtgatgcgctggacgaaatcgaaaacactctcccgacagaagatgtcgacaggccagacgtatttcttgcctggtcggcaataccaagggcagcgctgaaatctattctccaggctggcaactctccggtaactccggatggttacgtgctggtcccgaagaaactaaccgctgagaacggcgcaaagagcgtgctgtccggtgagttttcagaaacgaaattcataaactgtccagagtgttttggtgatgatgagtgcgaaacatgcgacggaagcggaagaattgaaatcagcgtgcccgtcacatggacaaccatcaaagctatatgggctaaaggtgtcgaacatttcgcagcagcaccgcagtatgaggtgaatacagcgcaaaaaaagtag

SEQ ID NO: 83693 - DNA, 1065 bp, Citrobacter koseri
atgggtattacgcatgttgtgagcttctctggtggcagaacgtcaggccgactggtcagggaaatggaaaataaacgtaagttggggtgggatgttcgtttcgtgttcatggataccggcgcagagcacccggaaacctataaattcatcagggaggttgtcgctaactggggtattgacctcatttgcctccgagtcctggtaaatcctgagcttggtaaagcaaacagctacaaggtcatttccattgatgaaattggccccgatttgcaaccgtggatcgacgttatggcgaaatacggcactccatatttcggcggcgcgttctgtacgcggacaatgaaaattgaggtgtgcgagcggttttgcaaggataatttcgtcgattaccaatcgtggctcggaatgcgtgtcgacgaacctgcgcgaatctggggtgaggcgcttttccctaaattgcgtcgtatgaatttcgataattacatgatgattgatttataccgtgatttatcacagtcgcaaactcaggagcaaatgcaggaaacgctggaaactcatttcatgattttcggtgacgtggcaaacgagattattaatcgcgttatttctatcgctaaatcaaaacagcgctttatggctgaaatcatggatgacgaaaaacaggatgttctgaactggtggaagctgcaaccgtttgatttgggtatccccgaacacctcggtaactgtgttttttgcatcaagaaaggcatcaacaaagttgcactggctatgcgtgatgaacctgaaatgctggagaaattccgtgaagcggttatgtctcctgatgttcgcgtcgtagaacgccgccaacaggaaaacaaaattatgtacaggaaggggaattcactggacagcattgaggaggcgtattcatcactgacccgcgatgaaattgcggcgactatgcgcggtggtggtggtgaggagccgggttcctgtacggaaagttgcgaggcgtttattgtcggaaatagcgattcagcgcagatggatctatttgcaaatcaggagaaagcagcatga

SEQ ID NO: 83694 - DNA, 423 bp, Citrobacter koseri
atgagcaacatcgacaaacagggccgccaagtgcagcgctatgcaaacttcggtgtcgacatgatggagtgggctgacggtggctacgtcaaacactctgattatctggcgctgctggatgagctggaagccgcaaagcaggattcagccaaatggttcaaggcatttgagaaagctgtttccattggtgcccggtatgaggagcgcatagcagaactgcgagagtggaatgcaggacttgcgcaagagtcatgcatacaacagcagcgcatcgccgagctggaggcgcgcaccgttacgttgccagatgagcctttctaccccgatggcgatattgactgcccattagccgtaaaccttgttgatattaaaactgcatgtgatgaggctggggtgctgttggttgtgaggggtggaaaatga

SEQ ID NO: 83695 - DNA, 453 bp, Citrobacter koseri
atgagcaaaccaacctatgaatatcttgaagcgcaggtaaagcaactggaggcagacaacgaaaaggctatgtctgtcctgaaagaagcgaaagacgcggtactgctggctaaatcaaaatttgacgcgctggctgcggagaatgcggggctgaaggctgtaaaagagattattcggcaccttaatgttaaccgcgaagaagcgaatttttgcggtattgatgattgctacatcgacgatgcagtggcagcgatgattaccccagctaccgacgctttcctggctgaagtgcgggccagtgctatcaaatctgcactagatgattgctctgagtatctcgatagggattgcatcatggagtctaacggtatcagttacgatgatgctgctcttcgggaaattggtgcaatggctcttcaggaagcgttacttcacaaaggagcagcccaatga

SEQ ID NO: 83696 - DNA, 588 bp, Citrobacter koseri
atgcaaataaccaaagaacaagtaaaaaactggcatgcatgtactgatggcttccgctggtttctggataaattcccgcagggcggcgcatacgcagatgtacatggtgcccttgttgcggataagcgtttcgatgatgcacgctggctggtcgataagatgtactccacgttcctggacaatcccgagtttataaaaactgaaacggctgctaccgacaagatggttggtgaacttaccagcatggaattctctggcgaccaggtggatggggaaaacaacagcggtgactccgcccgaatcggtagcagcggtgactccgcccaaatcggtagcagcggtgactacgcccgaatcggtagcagcggttactacgcccaaatcacggcatcaggaaagaattcagtagtggcatgtgctggcagtgtgcgccgcattgttcttggtgagggtggttgcgcagctgttccgtggcatgacggagaacgcactcgctttgcgttggcttatgttggtgaaaatggtattgaggccaatgtcccttattgcctgaatgataaaggacagtttgtcagagctgaggaatga

SEQ ID NO: 83697 - DNA, 360 bp, Citrobacter koseri
atgtcagcatgtatggctgtagttcttaacggtaataccgaaattaaatatttcccgttccacaattgtgctagcgctgaagtagcaaccgatatggcagacgagtggcgttatgccgccattgaggcgataggttgggatgaagcgcatcgcttccatcttcgcgccgtccgtccgatagtcgtcttgcagctaccgtctggcgcagtagtggaatgtgacctggatgacgttgatattgatgcggtgaccggttcggatattgactgccgcctttccgcgttcgggtttgacagagagaaacgctattccggttattgggacctggatggcgctgaaattatcgaatacatcgcataa

SEQ ID NO: 83698 - DNA, 207 bp, Citrobacter koseri
atggaagatgaatgggaaaatgagcgatctgcttttatcgcgggggaggttggcgaggctgcgatctcgttgatactaaaaggcgaggaggttagtcgtgctgcgatgtcagaatatttggagaagaagcggagagaagtagggaatacaattcataaaggcgtattgcgcgatgcagcaaagctggttagagaagggaaattctaa

SEQ ID NO: 83699 - DNA, 711 bp, Citrobacter koseri
atgaaaactgagacccctgacatattcgagctacgacgcctaaaacttcaggagcttgtggctggtttcaaaacccaaagagagtttgctgacaaggcaggccttgatccgaccgtcgtatcaagaatgctttaccctgtgggtaagcaacataagcggaatattggtgagcaatccgcacggcagattgaagatgcattaggcatcgcaagaggctggatggatgggttaggccagacttccgattcaggactggaactccctatgttaaatcgagatatttaccgtgttgaggttcttgatctcactgttagtgcaggtccgggtacatacatgttatcggatatggtggaagtgttatctgctattgaattcacaacagaacatgcaagagtgttgttcggtagcagatcagctaaagacatcaaagtgatgactgtagacggtgacagcatgtatcccacgataaaatcgggagataggcttttctttgacgtatctgttcgggagttcagaacggatggggtttacgcatttgtctacggaaaaacattccatgtaaaacgtttacaaatgcaggggctagagttggctgttctatctgacaaccctatgcttgagaagtggtacatccgcgaagacaatcaagatcagttctacgtaatgggtaaggctctcctacaagaatcaattcaatacagtaagttgtaa

SEQ ID NO: 83700 - DNA, 243 bp, Citrobacter koseri
atggaaactttacgagaatacctaaacgctttaacgcttgataaacaaagagaatttgccaataagtgccaaacctctcttgagtacttgcgaaaagcaataagtaaaaagcaaaagcttggagctgcattatcagtttctattgaaattaactctgatggctccgtaagcaggaaagaccttcacccaggtgactgggaaaagatttggcctgaactgaatagtaaaaaatctgcagcatga

SEQ ID NO: 83701 - DNA, 204 bp, Citrobacter koseri
atgctcctgccacttagccatgacctgatagctgttcgcttcaatctgtgcgcgttcatcacggtcaataacgccgtcagcagtcgcttttcgaaggtattgagaatgtttcccaatccattcaaccgattccatgagcctttgattgatgtcaccgttatcaacctcttcaacatcagcaaggggtacaaaaacaccacctga

SEQ ID NO: 83702 - DNA, 219 bp, Citrobacter koseri
atgtgcaagaaactgttaagcgtatgcctgatgacgatgttgatcgtgagctgcgcgaacaattcacccgccccagtggtggttgatacagggtgtctgtggacgcgaattatctatctgacagaccacgatatcgacgtactggataagcagacgaagcgcggcatcctggcgcataacaaagcgtggcaggcgaactgccagaaggtgagcccatga

SEQ ID NO: 83703 - DNA, 513 bp, Citrobacter koseri
atgttaacagcgcagaagcggaaattcgctgtcgcgctgatgtccggtatgtctcaaaaggatgcggcaataaaggcgggatattctgagaaatccgcacggtcaaagggttcgcaacttgcaaaagacccggaggtcatcgcgtttattggacgtaaaaaaaaggaagtaatcgaaacagacgacgtaccgacgtaccgtcgaaatgtttacaccccagcggtaaacaccaccgaaaaaaataaggctccggtaacaccaccagaggaaccacctgttgccggggcttttgatgatccgctcaaatttcttatggcggtaatgaacgattcaactgaagaaattgacgtcagaaaggatgcggctaaggccatgcttccctatatccaccccaaaaagggggagacagggaaaaaagatgcgcgacatgcggcggcaaaagtggccgctggcgccagcaagttcggatcaatggcaccaccaaaactggttgtgaataataataaggggtga

SEQ ID NO: 83704 - DNA, 1659 bp, Citrobacter koseri
atggcgcagtggtctacagcctgtacggactgggaagcgcgcctggtcgccggtgagtccatcattcctccgcccatttttcccgaccaggcggcgcaggctctgagtatctttcgcgaactgcgggtttctgacctgccgggcaagcctacattcggtgagtgttctgaagaatgggtgttcgatttcgtcaaggtcatcttcggcgggtatgacgcagagacaggaaaccagctgattcgcgaatacggactgctgatatcgaagaagaacactaaatcgacaatcgcggcgggcattatgctgaccgcacttatcctgtgctggcgagaggatgaagaacacctgattctggcaccgaccaaagaggttgctgacaacagctttaagcctgccgccgggatgatacgtgctgacgatgaactcaccgacatgttccagatacaggatcatatccgcactatcacgcaccgggtgacgcgcaacacactgaaagtcgtggccgctgatacggatacagtgtccggtaaaaagtccggccggattcttgtcgacgaactctggctttttggcaagcgcgctaatgccgaagcgatgtttatggaggcgacgggcggacaggtatcccgtaatgaagggtgggttatctacctcaccacccaaagcgatgagccgcctgctggcgtattcaaagaacgccttgattactggcgcgatgtgcgcgacggaaaaatcagcgaccccaaaacactgggaattctctatgaattcccgcaaagcatggttgaaaaaaaggcctatctcgacccggataatttctacattaccaatccgaatatcgggctctcggtcagcgctgaatggatagcagaccagctccgtaagaaccaggcaaaaacagatggcacattgcagcagttcctggctaagcacctcaatattgaaattggactaaacctgcgcaccgatcgctgggcgggcgtcgatttctgggagcaacaggcacagcgtgtcagttttgaagatttactacggcgagcagaggtgatcaccgtcgggatagacggtggtggccttgatgatctgctgggggtatctgcggtcgggcgtgacgcggaaacacgagaatggctctgctggtgtcatgcctgggcacatgagatagctgttcgccggcgtaaaagtgaagagtcccggtttcacgacttcgtgagagccggcgacctgaccatcgtgaagtgcgtcggacaggatacggaagaggtggccgaatacgtcagccgaatccacgcagcggagttgctcgacaagatcggcattgacccttccggagtcggacaaatactcgatgcgcttattgaggcgggaattcctgctgatgcggtggttggtgtcagccagggctggcgccttggcggagcgattaaaaccaccgagagaaagcttgccgagggcgtattgatacatggtggtcagccgatgatggcgtggtgtgtcggtaatgcgagggttgagccgaaaggcaacgccattcttataaccaagcaggccagcggcaagggcaagattgatccgctgatggcgctgttcaacgcagtttctcttatggcccttaaccctgaacctgcgaaaaaagattatcaggtatttttcgtataa

SEQ ID NO: 83705 - DNA, 501 bp, Citrobacter koseri
atgtcagtagtgactcaaggcactcaactttttgtgctcgcgaataatgtcgtgagcgaaatcgaatgtatcacttctttttcacctggtagcagcccggcagatcaaattgaagatacctgcctgagtgagcggaacacacgcagttataaaaaaggtctgcgtaccccaggacaggcaactgcaacgcttaacgcagatcctgcaaatgacagtcatgtaatgctcagtgatcttgctgaaggaaacgaccaggaagatttggtttttgctattggatggtcagatggtgagtcagagccaacctacgatgccagcggtactaatccagatgcagtggatggactggtgcttcctgacgacagaacctggtatgtattcaaaggttatgtctcagatttcccattcgatttccagggcaatactgtagttcaaacgtcagcaacgattcagcgtaacggacaaggccgctggattcgtaaatcccaaccgggcagctaa

SEQ ID NO: 83706 - DNA, 378 bp, Citrobacter koseri
atgaaactgacactcgacacacttaaacaaacgggggcatttaccgggcggcccgtagaaaaagagataacctggaagcagggcgaacaggagatcactgcaacagtttatgttcgacctatgggttatcacaatgccgtttccaccgtactttctgctgccgggaagattgatggcgtggcagggcgaattgcatcgtctatttgtgatgaaaacggaaatccggtgtttaccgttgctgacgtaaccggcgaggctgacccggagcgcggcgccctggatggcaatctgacagttgcgctccttatcgccattcaggaagttaacgatctgggaaagacggactcagcacagaagacgaaatctggtgcgaattag

SEQ ID NO: 83707 - DNA, 1368 bp, Citrobacter koseri
atgtccgcaggaacattaaccctgacgaataattctgccactgtaactggcagcggtactgctttttcaactgaactggcagccggtgactttatcgttgttaccgtcggcggggtcccgtacacgctccctgttaagacggttaacagcaacacatctctgacgctggtcagcaactacaccgggcctacacaatccggcgcagcctggtctgccgtcccgcgcgtggcgttgaatatggttaccgccgcgctggtggctcagagcgctgaagctctgcgcgggctgaactacgacaagcagaactggcagcagttattcagtgtgaacggaaatatcaccgttactcttcctgacggttcgcaattttctggcccgtcatggccgtatatggtcagcacggtagctactaaaacaagtggtgcagttccggttaaccagggcggcactggttcaactaccccagcaggcgctctcacaaacctcggcataaaaaacgcagcaactcgtgatgttgatgatcaattaattacgagttcagtcactccattttcaactgccggagtgatggtgcaatgtcataaagactacagagcgattgaaggttatgctcttattggaaactatccgtttgggctttgctttgggattcagaatggtagttctggctggggcactacaggtcttgttgggatgctgactgcaaggggatggtcaaactccactgcgggaggttatgtatcatttcagctcgcaatgacttcggacggcctaaaatatcgaattgggaatggcactacaagtgatggttctaactccggtttcggagccgcacaaataatttattctacacaaaatacgactaaagcaagcgacggaacgctgaaagctgcatctccggtcgcccgtatcgttaaatcccgggaagagaatcagcgcaaggatattgatgaaaacggctttctgtggtgcggttgcggtacagcaaacgaagaggccgaaggtatcagtatttcacgtctcgataccggagtgtatgcgcttaccgggtcgtctggtctggcatcagaaggctggcaattgctgcccccgatggaccccggaggcatgggggaactgggcattgtcgaagcagaagagacagaaagcggtagtatcacgatccgcctgttcaggcgtagatacatgatgactgatgacggcgagattgtgaaaactaaaggtgagttgatcgacgtcccggccaacagctggatagacattcgtcttgatatgcctgaaaccagtatctggaaccagaaaaatgctgcgccacagaatctttcagaagcgcctgatcaggatagtcagccagacgcacaggattaa

SEQ ID NO: 83708 - DNA, 1281 bp, Citrobacter koseri
atgaacataacggataaaaaaatcggtattattggattaggctacgttggtcttccgttagcagttgagtttggaaagaaattttcaacagttgggtatgatataaattcaaaaagagttgctgaattaataaaagggaatgattttactttagaagtaagcgaggaagaactcaaaaattcatctcgtcttaccttcacaacggatattgaagatgttcgaaagtgtaacgtttatattgttactgtcccgacaccaattgatattcataaaatgccagatttgactccgcttattagtgccagtaatcttattgctaaagttattaaaaaagatgacatagttatttatgaatcgacagtgtatccaggagctactgaagaggactgtattcctgtaatcgaacaggggtcagggctggtttttaatcaggatttttttgctggatatagtccagaacgtattaacccaggcgataaaacacatcgtgtgacgacaattaaaaaagtaacatctggctctacgccgtatattgctgatgttattgatgctatttataatgaagttattgttgctggtacacataaagctgaatcaattcgtgtagctgaggctgcaaagattattgagaatacacaacgtgatctgaatattgctttggttaatgagttggctattatttttaatttgatggggatcgatactgaagcagtattaaaagcggcagcaactaaatggaattttttacatttcaaacccggtttggttggaggtcattgcatcggtgtcgatccttattatctgactcataaagcccagtcaattggatatttaccaaatgttattctttctggtcgtaggattaatgatggtatgggggggtatattgcaaatcaactcataagagctatgattagaaaacgtatccaagttgatgaatcaaatatcctaataatgggcttgacattcaaagagaactgcccggatttgagaaatactcgtattatagatatcattaatgtacttggtgactacaatactaatattgatgtctatgacccttggtgctctccagaagtggcaaaagaagagtatggccttaatgtaattaagtcgttagaacatcttgacagaaaatatgatgcggtattgattggtgttgcacacgatcagtttatcgagttaggtattgatgaaataaataaattatgtaaagaaaataaagttatatatgatattaaaaacatctttcctaaagatgtttgtgatatgagactgtag

SEQ ID NO: 83709 - DNA, 363 bp, Citrobacter koseri
gtggcgctaaccgatgtgaaagtgaaaaccgcgaagccaaaagaaaagccctataagctggctgatggcggcggtatgtatctgctgattaacgctaatggttccaaatactggcgtatgaagtaccgctttgctggtaaagaaaagatgctttctattggcgtataccccgatatttcgctggccgacgcgcgagagaaacgtaatgaagccagaaaaatcctcgctaatggaggcgatccgggtgagacaaagaaaggggaaaaaaatagcgcagcaaatgagtttgaagaacactttcgaggccgttgctcgcgagtggcatcagacgaaagccgatcgttggtcattacgctatcgtga

SEQ ID NO: 83710 - DNA, 606 bp, Citrobacter koseri
atggggtgctggcttgctggcaggctaatgaaagagttggggctggtcagttgtcagcagccggctcatcggtataaacgtggtggttatgagcacttcgctatcccaaatcaccttgagcggcagttctcagtgacagagccaaaccaggtgtggtgcggtgatgtgacctatatctggacaggtaagcgttgggcgtacctcgccgttgttctcgacttattcgcaagaaaaccagtgggctgggcaatgtcgttttcgccggacagcagactaaccatgaaggcgctggaaatagcatgggaaacgcgtggtaagcccgttggagtgatgttccacagtgaccagggcagtcattatacaagcaggcagttccggcagttactgtggcgataccggatcaaacagagtatgagtcgtcgcggaaactgctgggataacagtccaatggaacgcttcttccggagtctgaagaacgaatgggtgccagtgatgggttacgtaagcttcagcgatgcaactcacaccataacgaactatatcgttagatattacagcgcgctcagaccgcatgaatataacggtgggttaccaccaaacgaatag

SEQ ID NO: 83711 - DNA, 303 bp, Citrobacter koseri
atgaaaagaagaaattttagtcctgaattcaaacgcgaatccgctcagctggttgtcgatcaaaactacaccgtctctgatgccgctaaggctatggatgtcggtctttccacgatgacgaaatgggtcaagcaactgcgtgaagagcgtcagggcaaaacaccaaaagcctctccgataacaccggaacaaatcgaaattcgcgagctgaagaaaaagctacaacgtattgaaatggaaaacgaaatattaaaaaaggctaccgagctcttgatgtcagactccctgaacagttctcgataa

SEQ ID NO: 83712 - DNA, 231 bp, Citrobacter koseri
atgagccgtcgtggtaactgtcacgacaacgcagttgcagaaagttttttccagctactgaagcgtgaacggataaagaaaaaaatctacagaacgcgggaagaagcccggagcgatatttttgattacatcgaaatgttttataacagtaagcgtcggcatggttcgagtgatcagatgccaccgacggaatatgaaaatcaatattatcaacggctcagaagtgtctag

SEQ ID NO: 83713 - DNA, 162 bp, Citrobacter koseri
atgagtagtaaacgttatcccgaagagtttaaaattgaagcggtaaaacaggttgttgagcgtggctcattctgtttccagtgtcgcaacacgtctcggtatcactacccacagtctttacgcctggataaagaagtacgggccggactcttccaccaataa

SEQ ID NO: 83714 - DNA, 504 bp, Citrobacter koseri
gtgaaattagctctacgaattgcgttgatggccttcgcctgtattaccctcagccagacggcattggctgcctcttacgggacggaagatcaggaacaattaacactggagtgcctgctaaccaataataaatatgccagtgcctttattgcacaggatgctgcgggatacgccctaggaacaacggccgctccgactgttgagctgaatcttgtcacgaaccaacccggcgtgaccgcctattataattcagagatgatcgctggcggctccctttactggatacgcgtcgtcaaaggcccctatgaatatattgtttacgataaagaacagcacggcgatatgtcaggtgtagttgtcactaaaaaagggaaaaaaatcttccacaaagattgtaaagagcctgtcaaagtcggaacgcaaagcgatggcagcatatttagccgcgtggcgcaggaagatccggaaggcgatcgcattatcgacttgatcaataagggctga

SEQ ID NO: 83715 - DNA, 456 bp, Citrobacter koseri
atgataaaaaggacgctattccgtctgtcagtgctcgccgtttgcgccagcgcgatggggaccgtaatcagtgcggagaatgatcatcgttatattagtatccgtaatacggatagcggttggatacaaggggtgtgctctttggtattccggctggataacggtggtgctggggaatttaacaacctgactgtcggcctgcaattaactgataaatcaggtgcagttctggaaaaaggtactcttcatgtagagccgtttggcgatagcgatgcgactcgttcaaccgtttcggcaaccgaattcagctgtgatgcggttgaaaatacggccgatattgtgattatcgacgttcaggaaacgtcaccggatggtaccgaacatgctctgccgctaacgatattcgagccgcaatattatcaaccattaaaaatgagcgtgcaaaaaagccgctag

SEQ ID NO: 83716 - DNA, 330 bp, Citrobacter koseri
atgaccatgatagcggaccagcaaaaaagctataatgactggacggcagggtccagcacgctcaacgtgagccaggcgttcgcggaaatcgcttccctgccgagctttaccggcgcgcttaaagctagcaccctctgggctgggaaacgcgtagaccgcgataactatgaaattccctggctggacccgaaaattgtggcgctcaacggtaccggcggtggcatttatgacgttcgctgggcgacagcgctcggagtaatttctcttttattggtcgtagcttcgatgatgtcgatgtcattaataacgatgtccagaactatattctga

SEQ ID NO: 83717 - DNA, 336 bp, Citrobacter koseri
ttgctgggtgacactcaatggacggttgatgcagaactgacccctaacatcgtactggcctatgaagcgtcctgtcagtatatggatctggttcctaatggttatctggattatcaaaaggttaacggtaatttttacaaactggcatttgccccaacgttccgtgccgataatatctcgcccttcttcagtcggcctgaaatacgcttgtttgccacctggatggacagggataaagcgctggataactacagcaggcatgataccctgggccagaaaaatttcaccgccggcggcgaatggagcttcgggatacagatggaaaccttcttttaa

SEQ ID NO: 83718 - DNA, 573 bp, Citrobacter koseri
atggagcttcgggatacagatggaaaccttcttttaattaagaatgccccgcaggatgtggtaaccagctgtggtagtcaataccaccagatcattggcagcttctgcggcgtgaagggctttcagttaatcacaagccggtttgccgcacttatgggcgcgattgcgggcgcattgggtgccgcattctcaaccaatgggccgccggtggtgatgtacggaatgctgcgaagcctaggccctgccgcgttcccagacatcctgaatccctttttcactgcgaataacattgccattattggcgggttagccaccagtgggatccttaccgtgtcgacagtcaagttggtgatattctgtattccaaccatgattattggttccattatcggtcaatatgtccttgcagagaaacgaatctccctcagccccaccgcacccgttatcgtcggtcagcgtcaaaaccgatacccgaaccggagccattcgctacgcataaacgccaccaccagacccgtgaccgtcattgcgttcaacatggctttgaagaaagccgctcggggtaacctgtaa

SEQ ID NO: 83719 - DNA, 381 bp, Citrobacter koseri
atgcgaattctgaaatgttatctggcgaacaatacccgtaatcagtttgttaatgccaaagaagccgctaaggccagtgatgatgcagggtactggacgtgtgccaattgcggtagcaagttaatcctgcaaaaagggggaatgggagaggtcccttggtttgagcacattccgcattccgtttcccaccaacagctcatgaaatgtgcatgggtggatcctgaggagaaagcacgggcccgggaaaagaagcttcgtcaggtagtgtactccgtggacagaaatatcaggccacctcaggaatggtactgtgcgatatcgcatatcaggggaataagtactgcagaatctgtaaatcagggctctatagcacggagctga

SEQ ID NO: 83720 - DNA, 507 bp, Citrobacter koseri
atgacgatttacgccaaatcttttatcgcacttgatggcaatcagcgcctcacgggtgcgaccaccgcacagatttccccttacgaccactacacctgccatctctgcggtagtgccctggtgtttcaccctgaatgggcctccaaccgcccgtggtttgagcacacccgggaagacctgactgagaacagacgccaccactgcccgtatgtgcgtcctgagccaaaggaggcgagacggatatacatgctgcgccgttatgtgtcagatatgctgccgatagtacgcaaagctaacgggagctgctctggctgcaacagcgattaccacggtgagcgctactgcctgaattgtcgtaccggtggctacagcatcgaagtcaatgctgaccaaccccttatctttttcaccgctagcagctactggattgcctgccccaatggcttgcagcgggaggagttgtaccatgcgaattctgaaatgttatctggcgaacaatacccgtaa

SEQ ID NO: 83721 - DNA, 333 bp, Citrobacter koseri
atgacttatcgaattaataagagttatacgcttaacgatgaattgtttcatgatctgatggatcatatggaacgtatgcgcgatcgttactctgacatcattcctctacgtatggatttcgcttataagacgaccagtaaacgctatgcttaccgttatcgggatcgctgggatatggatatgtaccggctggcagaaagagttatgagtgcgggtgttgttattggctatgtatgggtgatggagttcacttatcagtatggttgcactttcacgccatgttttatcttgatggacaacgtaagtggaattgttaccgctctgcacgggtga

SEQ ID NO: 83722 - DNA, 516 bp, Citrobacter koseri
atgtcagacccattatataaatcagttcggggttattcgcgacttatcctgatgactattgggcatcagccattttatcttgttaacttctttttcatcaaacatcctgacgcccatgccagcacctgtatttcgtcagatatttataataaatgggcaaacacctgggcgtcagaacggcaggaagaccccagggttgtttgttacaagttttcagatgatccacgattaaaaaacagacgtaacgatccgttacgctttcataatgccacacgggtagtggatgttggaaaagaaataaatatttttgatttaattaatgatgaacacaaaaatgccatcagtcatgatcgaaaaggatacctcacttttttccgccttcaggcccaggtatataacagcattcctggagtgagaacccgaaccagttccaacaacttcacttacctcaacacggaagaacgaaagaaaaggaaaagggaaaaagaaaaaatacagattcgcaagtccgtataa

SEQ ID NO: 83723 - DNA, 342 bp, Citrobacter koseri
atggggggcggtatcgtcacgtccgtctcccatgggcgtctggaacaccactatggcctcacgcttaatgatacgccgttcagtgatgaacaggtgattcagcaacatatcgacgcgggtatctcgctgaccgatgccctgaattttattgttgaaaagtatgaactggtccgcactgaccggccaggcttcagtatcctgacgcagtttccgtttattacggtcattgatattctccgggccagaaaagcaatggggctgatgaaccgttgcacgtataaagaggtgatggctattaccataggacagcatacgcaggaacgcacttcagataagcgatga

SEQ ID NO: 83724 - DNA, 519 bp, Citrobacter koseri
atgcggaagcccgcagtcagtgggcgaagaacctggaggagggcgatctcccagctattagcgatagccaacatcctgagtacctttgaacaactccaccacaataagcaggaggttttcgaacgtggtgttatcaacgtattcaaaggactaagctgggactataaaaccaataatccctgctgttttggcaagaagatcatcatcaagctggtgaagcacgaccgatggggctacagcctgaactggggctggaggcgcgaccagttagccgatctggaacggatgctctgcctgatggatgggaagactattcccgataaccggcatgatatctctatccggtttatggaatttgtgcacgacaatccccatgagcaggttttcgaaaatgatttgttcgctattcgctactttcagaaaggcagcgagcatatcacgtttaagcgtctcgatctggtggagaagatgaatgatatcgtggcgaagcattatcccagcgcattacccgcaagttaa

SEQ ID NO: 83725 - DNA, 369 bp, Citrobacter koseri
atgatatcgtggcgaagcattatcccagcgcattacccgcaagttaaactccgtggcatatggacctctgacataatcagtgagactcagggctttccacaggttattatgcaacctgtaagtctaacttacaggttcagcaggaagaacatcatcagattttggcaaactgaatatacaaaacttcagttgttcgtttttaccgaacaactgcgccgcttaaaagcagccggaagcgagaaggatattaccgctttgctacagtggaaaaagaggccaaaaagtagctctgaatgcctccgctccctacaagcaaaattatttgggggtgcttatgggggttactcatttatcaaacacaaaatataa

SEQ ID NO: 83726 - DNA, 615 bp, Citrobacter koseri
atgttgaatctgaaatctcttcttcgtccggggcgttcacgcccggatgcccctccgatagttgaggcgataaaaccttctttgcctccaggctacttccggcctatgcccgccagagaactgctggcgacaacccgccgccagcaatggctgcaatcgctctgggattattcgtccctgccaaaagacatgtaccaccagtattaccttgctccgctggagcattgtgtggcgttgatgcagcaatttcctcttacggaaagtgggccatatacccgtgccggagggatggctgactatatgctggaaactgtgtcgtatgcggcgcggttgtcgaaaagctacatgctgccagttggcgcactgccagaagagcaggcggcgcagagcgcggcctggaatgcggtacccgaagatgagcggtggctgattgaagagtccgatcttaaccggcgtccccagcagtccctggccgatgaactgggaatcacgcttacggcgtttaaatcccgtttactacgggccagaaagcacctgaaagaagcgatgacagaactttgccagattgaggcagatgacacttctcccgtctgctgccacaaaaaaatgaattaa

SEQ ID NO: 83727 - DNA, 702 bp, Citrobacter koseri
atgcttgaacgtgatgcgccgtatgggaagcacttcttcccgactgccggtgcagtggctgtaccgttgaaagggcgtgttgataaggaggaatatgagtggtgcccatatgccagcaagaataagagtctaacgaaagatgctcggcgagcagagggtagtgaacttgcgctattgataaaacaaaccttaattgagcaatttgaccgggtcatttatttgttagaaaagggcatcgggatgagaatttcggaggccttggcgaaacagatgctggaagattaccggctggctgaaggatggcgttatagaggggcgacaagacagaatatcccttgggtgttcgcttatatgatgcaggctaagtgggtgaaagggcgcatattctacgacaaaaatatgctggaagaactttgtaccaaacgaaccgatttaatttttaacgacaaagggaaacttactactaaagatgaaaaacaattttgcgacttaagttttagtttcatcaaacaccgtcgccatgtagagcagcatactttgtctgaaagtatcgagttcaatatcgcaaactcaaaacaggaaacggtatacaaaaagactattgctttcgaatatggcgatttcctgaggctgataaacagtaaaaatgaggcttacagaaaaatggaccttgttgatcttgccagaagcgtcttggcctga

SEQ ID NO: 83728 - DNA, 225 bp, Citrobacter koseri; identical to SEQ ID NO: 17498

SEQ ID NO: 83729 - DNA, 1272 bp, Citrobacter koseri
atgatgaaagagaaaaagacatcccccaccaataatgagaatgaattcgatataacggttttcccctcaattgtggaaaagagcaaataccaagactcactgctcgccagttccaccgacgccagcaaggctctcgaggcactgacgaagaactctggcgtggatgcactcctcaaaaaccatgattcactgtttgccggtaccacagccgccagcaaggcattcgaggcaatgacacgcaactccgttgcgaacactttcctcaaaaaccatgattcactgtttgccggtaccactgccgccagcaaggcattcgaggcaatgacacgcaactccgttgcgaacactttcctcaaaaaccatgattcactgtttgccagctccactgccgccagcaaggcattcgaggcaatgacacgcaactccgttgcgaacactttcctcaaaaaccatgattcactgtttgccagttccactgccgccagcaaggcattcgaggcaatgacacgcaactccgttgtgaacactttcctcaaaaaccatgattcactgtttgccggtaccactgccgtcagcaaggcattcgaggcaatgacgcggaactctggtgtggccactcttttcgcaaagcaaagagaatcatttgcccgggattattttactacgagtattactcaacacttagataaattaaatccaaccgagattcaaaaattacaggaagctgctattctattttcgcgctcacctcaaggcgcagccgttattgcaaccaatatcaatacagtagaaataacagagcccgacgcattaacaaaattaaaaaaatacatcgaagaaagccctgttacttcacattttaggaaattacctttattagtacagcttatcatcatttatcttgtaatgactatgtcctctgttatttccgataaaaacaaagaattagcaatttatttaattgaagaatcacaacaatattttagcaaagcagtatcaccaaacgcccatgttaagaaattgacaaaacagttacccgatgaaattgatgtaagtacattaaaacatatcagaataattactggcgaaaacgtccgattacggaatagaccatcaatgcatggtgatgtattggtcacgttgcaaaaatacacacctgttatcgttatcgataaaagtgatagaaaatggctatatatacaactatcacttggagaacaaaagatctatggctgggtcaatcgttcctataccaaagcattaaatcactaa

SEQ ID NO: 83730 - DNA, 936 bp, Citrobacter koseri
atgacgaagaaaactaccaaccgcaaatctgccccacggcaggatttgttccagaccgttaccgataagattattacggcgctggagaacggaacgacaccttggcgtaaagcatggcaaacaggaaaagaggggttgcctgctaatgccatcactggccggaactacagcggtattaacgtgatgctgttatggatcgatgccgccgataagggatttcactcgaatcgctggttgacgttcaaacaggcgctggatgccggtggcaatgtccggaaaggtgaaaaatcgacgctggtgacgctgtttaaaccgttccagaaagaggttacggataacagcggccagccggtgtttgatgataacggcgaggtggtcatgcgggatcgctgttttatgaccagcttccacctcttcaatgttgagcagtgtgaaaacctgcccgataagctttacccggaaataccggttttgcccgacgtggaacgtattgcccgagcagaacagatagcagcctgtagcggcgtatctgtgatacatcgtcatcaggatcgtgcctattaccgtccgggtgttgaccacattatgatgccggaagccactcagtttgattcgacagaagaatactacagcacgctgttgcatgaactggtgcattccaccggtcacgcttcgcggctggcgcgtgaaggcattgtttctacctcgcagaagttcggcgatccggtttatggatttgaagagttgatagcggagatgggatcggcctttctgtgtgctgaacttggcattaacggcgacttgcaacatgacagctatattgcgtcgtggctgcaaacgctgaaggaagataatcgcgctgtatttcgtgccgctcgctttgcccgggaagcgtttgaatacctggtgttgcgtgagcaagcgctggcagcataa

SEQ ID NO: 83731 - DNA, 333 bp, Citrobacter koseri
atgaaagaccagacaaattttgttgaaaatttatacgcactggcaaaccttgaaggtgaattgctggttgtagctgcatacgaacgccttggtatcggaacgcaacctgatccagacgatggtgatttcacggctaatcaatggcaggttgcctggatagcccaaattttagtatgggaatgccgtggtgatgtatcccgctatgcccatccttcatgcaaagttttatttgatgaagtgattaagttggccagaagcgtgtgtccagaggcttgggattatttcttcgaattaagcctgatggatcagatggttatggcatcgatggactga

SEQ ID NO: 83732 - DNA, 399 bp, Citrobacter koseri
atggataacataacgacgatcgatatgcagcccgttccctttggcctggttcttctgaaatatctgcatactccacgtcgtgtggctccgttttttgcgtgggctaagcgtctgggtgatgaatatgatgaaaccagccggtgggaaggtcgggcgttgtcaaacaacggattctatcttgtccctaactcccgtctgacttatggcgttagcgtggccgggaatggctatgaaggcaccatgacggcagaggcttttggcatcacgctgtctttgtttgccctcgggcagattgccaatacgacggaagaggacagcgatatcctgctttaccacgctttgcgtgattacgcgttggatcactctgaatcggccgaaattatggccgcgatagactga

SEQ ID NO: 83733 - DNA, 273 bp, Citrobacter koseri
atgacatcgaaatacacttatcttccggttgcggattatcgcaatacgactgagcgattattccgtcaggcgattgttcattacagtgcctgcgtggggaatgatgaacgagcttcctggcgtagtcagtccattatggcgctggaaatcacagcggatatcaactgcaagcgtgcaactgaacgtgaccggcgaaattttctttctgccaggaagcgtttgcaggagcgcgttaacagcgtgctggcttccggggaggtatgtcatggataa

SEQ ID NO: 83734 - DNA, 195 bp, Citrobacter koseri
atgaaaattcagcttgaactgaccgatgacgaagcgctggcattgtcgcatctgactcaaagtctgacatggagcacgatgcgtgattttgtcatgactaacagcgaatgcgatgaaatgcttgatgcggtccagaaattagaaagaacgttgatggaacacggcttcaggcaccagtacggctgtctcgcttaa

SEQ ID NO: 83735 - DNA, 288 bp, Citrobacter koseri
atgactcatcgcttatctctggcatttacgcctgtttctatcacgctcccggcctgggaacacgctattgaagtatttgatttttcccaatgggaacgtcggcaatttgcgctgattaaagctgcgcaggatgcctggaaccatcgctcagatcccgacattcagcaggtgacattttcgctgacgttgtttgtccgtctgggaggcgaaactgccgaacggactcaaaactttgtcgccagatacgttgacgatgcgctggttgtaaccctggagaatgagagatga

SEQ ID NO: 83736 - DNA, 891 bp, Citrobacter koseri
atgtcgaaattaagtaagcagctggttacgctggcaaggcagggaggtggtgggttcaagactatcgcggatcgttcaaagatcgcctctcgtgtagcggagagaatagctaaattaaatattcagattcgggatgtgaagcatataaaaaccaatcatattgagctgtatgtcaagagtcgccaggccgaagggatatctaaaagaacaatgcagaatgagatggccgcaatcagaaatatgctgaccgttgctggtcggacaaaacttgccgaccctggtcatgaaaaattaagtaattcagcgctcggattagcagatgccagtcgtgacggttctaaagtcgcaattaatagcgaacgctatctcgcagcgttcgcttattcagataagcaagacgttggcgtagcagctgcaatgcaggttgcccgttgttttggcctgaggacagaagaagcggtgcaatctgttaaatcattaaaaacctggcaacatgcattatcgcgtggtgatgatcgtgtcaggatcgtatttggcacaaaaggaggacggccaagagatacgacggttatagatcgcgataaaatgctaagtgctgttaatcatgctctgaaagttgctgctgaacagaatggtaagctggttgataaaccgggtctgaaatcagcaattgatcgttatcgaaatattgtcagagatgcgggattagtgggtaaatatgcgcctcatagtctgcgatatgcctgggcaggtgaagcgatggaatatcataaaagcaagggtatgagtgacgatgaggcaaaagcaatggtgtctatggatctggggcacggtgatggtcgcgggcgttatattgaacgtgtctataataaacctgatatcgaggaataa

SEQ ID NO: 83737 - DNA, 798 bp, Citrobacter koseri
atggattgggataaatttttaccaggaataatcgctgttatagtcagtgtaacgttcagtacgataatcagtatttatcgggataaaactaaaaacaacggtgtaagacatatagctattaaatcgcttgagttatttatgtcatatgcaaaatctaacaaaacatttaaaacagcagaaaacgatttcaataataaattttccatcccagaaaagagagccatactggttgcattacataaaataggtgttcctgtaacaacaccttcaactagtctatttaacatttcaacggttgaatttttatcagaaataattgataaagatgaaataaaaagtatgattaaacaaataaagaatggaaactgcgatactttattttatgcagacgttgaaaagtttttcacagaaaacataagaatgaacagaatacggaatatcgctgaaaattacatagaaaatgtaatgtcattatcatcattaagattcgatgataatgacatacctgtagagataataaagccagataactgggtcgatttattcacacctggagagttaaaaacaatacgaacattcactcaaatgcttattgatccttcatattatgattctagaggtaacattaaaacaaatgaaatggagaaaattatttccgaaataaaatctggaatgtgggataactatttgttatgggataatacggcttatcaaaacatgcaattacaaaagaaaagcaatgagacaagcattctattttataatcaattaatgcaaaacaacaccaccacatcttag

SEQ ID NO: 83738 - DNA, 231 bp, Citrobacter koseri
atgaaagataacaacggttcttctcaacactctgatgtatggacaacgatcttcaatgggttagctgaagccattaaaatatttttctcaattattttggcagttttgggcagtaaagcagtcacatcgccaaaagaagaaaaattacacgctggctatagaaatgggcatagtggctatggctactatgatgggaataaccaaagaatttactctgatgatgacaaataa

SEQ ID NO: 83739 - DNA, 693 bp, Citrobacter koseri
atgatgaaggcaaaatcccctggtaactgggaagaaagtctgttgcgctggctggtgagtccacagaacacgcacctgtctggcgggggcgatacttacatgatgggtaatcagcaggggcagggaacgggcatcgataccggcattaagcaggcgctgagcggtcttggtgcgctttctgctcaggtgacgcagctcccggcgtttgatgccctgcggcaggcactgccgatggttcatgccgttttgctgatggctatcgtggtgtgtatcccactggtcatgttgttcggggcttacgatccgaaagtggtggttaccattacttttgcgatgtttgcgctgatatttgtgccgttctggtgggagcttggcggctggctggatgacaagctcattgagctgatgtatgccagctacaaaggatacacgaacagctttaataactggcttgccagtaccggctcggatggctggatcatgaatctggttctgggggcgatgtatgtggtgctgccgatgttctggtttggggctgtgagctggagtggggtgagtctggggcaagcattgtcttcagtgattggcagtgcttcaaatggagcacagcaagctggggcgaaaggtccgggtgtcgctgctgaggttgctaagacagcagtaacaaagggagcttcagcggggaaaaaataa

SEQ ID NO: 83740 - DNA, 867 bp, Citrobacter koseri
gtgttggatttgaaagtttttttgaaatacgttgatgcatcgcgtttacacgataaaatttgtaaattccgagatttagattttaaacgtatgtcatatcaggaggtgcagtcagcaatcattgaggtgatttcttttgaaacaccgcatggtaacatttgcattctgactcctatgaatgcccaatatcctgtagggactcgtttttacagagttcgctctttacctgaagatgatagaaatctgcccttacgagcaatgtcaaaggtgaccgattgctgggaacctcctgaacatattgtgagggccggaagactaaaccgagataatgaatctttgctttacactgcgccctcattgcccgctgtagctgtggaggaaatgaaggttaaggataatcaactattttcgcttatcgtttatgaagcgcttgagccaataaacgttactatgatcggagcgacgccgaatgttgatggtttgagtaatgatgaggcattaaaagttaggatgcttcaggattttttaaagcatgaatttattcgtgatgtaggcgtgggaacggaatatctatatagaatttctgagtctataactaaagattattttgacttgcctccagactttcaggatgcttggtgctatccctctgtagcaaaaaaagggggctttaatgtgtgtttccgtaaggataaacgaaaaaaattgaagcttgtcggtacgcagattgccagtattacgcgaggagatgagaattacttatttcaagtgagattgattgctatagcttctgaggataatattaaccttacttaccatcagattggatctgatatgcaaaaaaaattgttcccagaaatatcataa

SEQ ID NO: 83741 - DNA, 2004 bp, Citrobacter koseri
atgaagctctttctctgtgaaaagcccagtcaggggcgcgatattgccgccgtgctgggcgcaacaaagaaaatgccgggttatcagaccggaaacggcgtgtgtgtcacctggggttttggtcatctgctggagcaggccagcccggatgcctacggtgaacaattcggcgtgccgtggcgtactgacgtgttgccggtattgccgacaacgtggcaaatgcgggttaaaccggatgcagcggcccagttctccgtcatccagaagctgctgaagcaggctgatacggtagtgattgccaccgatgcggatcgggaaggagaggtgattgctcgtgaaatcctcgattattgccactatcagggaaaggttgagcggttgtggctctcggcgctggatgaggccagcgttcgcgccgcgctggcggtgataaagcccggaagcgcgactttaccctactatttagccgggcttggccgcgcccgggcggactggcaaatcggcatgaacatgacgcggctatattcggtcaaggcccgggagaacggctacggcagcgtgttatctgtggggcgggtgcagacgccaacgcttaacctgattgtggtacgcgatcgcgatattgcgcagtttgttccgaagccctactggaatgtcgtggcgcagctggcggcaggagggatcgcatttcaggcgcagtgggtgccagcagcggcatattgtgatgaggaaaaacgctgtattaacccgtcagcagcgcagcaagtggttcagctttgccagaaaaccgggcaggcgacggtggcagaggttgagaccaaaagggaaaccgaatctgctccactggcgtttgatctcggtacgctacaacaagcctgttcccgccgtttcggctatggcgctcagcaggtactggatattgcgcaggctttgtatgaaactcacaaagcgacgacgtacccgcgaaccgactgcggttatctgccgacatccatgcgcggcgagatcgggcaggtgatggcctcaatacagcaaagcgatcctgctttatctgcgatcatctcgcggcttgatatacagcatgtttcgcgcatctggaatgacaaaaagatcaccgcgcaccacggcattatccccacaaagcagccctgtgatctggcaaaaatgagtgagcaggagcgcaacgtttaccagcttatccggctgcattatctggcccagttcctgcctaactatgaagtggatgccacgcgggtttcgctgcattgtggtgggcagctatttaaggctagcggtaaggttgtggtcgttgctggctggaaaagcctgtttggtaaggacgctgaagaggatgcaggcgatgccactgacaaggaccgattacctgcaatggctaaagggagcgtatgccaggtcaccggtgcggaggagaaggcgcagcagacaaaaccaccggagcactatacggaagggacgttgattgcggcgatgaagaatgcggcgcagtttgttaccgatccgcggcttaaaaagatcctcaaagagaacgcggggctgggaacggaagcgacccgggctggcgtaattgagacgttgctgacgcgtggatttgtggtgaagaaaggcaagcatctgctggcgacacctatcgcggctgatttgatggctgtgttaccggcacagcttaaagatccggggatgacggcgctctgggagcagtcgctggatgacattgctgaaggccggatgtcgctggatgactttatggcgaaacagtcagcatggacaatgcaactggtggcaaaggggcggcagcagaccgttaagatcacgttaccgccttctccgccatgcccgatctgcggtgggacaacgcgtcagcgcacgggaaaatcaggtacattctggggatgcgtaaactaccctgactgcaacgggattgtgaatgttggggcgaagaaacccgctcgtcggcggaaaagtccggcaaagaaaagtgtctga

SEQ ID NO: 83742 - DNA, 564 bp, Citrobacter koseri
atgagcagcaataaaacagcttttaccggattgttcatcctgagtacctgcctgagtgggtgtgcgagtgttgacagtgtcaacagtgcgataaaccagattagcggcgggatcttctcaatcggttccgcaccggcagacagtggtccggcggtgttgtcaaaaggcgtaccgcaggccagccacaaaattgcgcaggaataccgtgttccagttgatgttgataccgcagctgcgcgggtaaaacgctactaccgctttatctcggctgaagaagtagcgcagctacgtaacaacggtacgcaaagtggagggtggactgccgcttcagtagccgatggggcatgggtatgggacgggcaacccggtagttactacaaaatggggcgcgactggggaagcgagaataccaacgacagcattcaggtcgagctggagaaaaacggttccggtagccgcatgtatatcacctttcgttccgggctggcctctcatgccacggcggcttataccagcaaactgtttgagaatatgaagagcgtggcggaagggacgatccgatga

SEQ ID NO: 83743 - DNA, 753 bp, Citrobacter koseri
atgtcagacaaaacagaaaagaaagtaggtgcgctgcattctgaattgcgcatcgagctacatacccaatatgctattaacacctggagcgggcgaccagcctcagatggcaagccttcacttatcgggatgccgctgtttttccgactcatttcccggattaaccgcgattcactggccgataatccgtgggcggatgcggccctggttgaagtggaaacattactggagacagccagtcagcagctccagaaatggctgaacgatattgatgccctgatggcgatgctgccagcgaacgcttctgtttccggggtcacctccaaagcgccgctaaatatcggcgttcacagccataccccactgggataccgctgcgtttacctccttgttggatttgatcagcttattctgcgtgtctttcaggcgcatcattacggcctgatgtcgcttaaagagcgcaaagcctggttacatcgtggtagccatcaaattcgtcgtatcttctctgtcgctctgcgttaccgttctcatcccgttacccgccaggatattgcctcagataacgacattgcccgacaggctatcgaacaatttggggaactggacagggcgatcctgctgggaacccgccgttcccgcttttctccgccggtaagcgccgaaagtattaaggcgctgaaagccgccttcaaacgtcagtcacgcaaagagaaagcggcaaagcaggaggtgcaggatgagcagcaataa

SEQ ID NO: 83744 - DNA, 789 bp, Citrobacter koseri
atgaaattgaattttcatgcaatttgtccaaagtgcagtcaaaaacaaagatttatagctttagcaatcagttctgaaaatagtgctttggcgtacgatatttttcatcatgatgagtggaagacattttgttttcatgctttctcagttgcaacctactgtgacaattgtaaaaattacgttaccgcaaatatttcgatcaataatgataagattacccaagaatctacacttgaaagttatgctaacaaaacacttacactatcggaaaatgaagatattattattgactttgatattccccctattgacccaccccaatatttcgaatctcctctagttacgtcaccatatgatcttctgacccaagccaaaagttgctttaaaattagcgcgtgggatgctgttggtatcgtctgtagaaagataattgatattgagactcaaaagatatggagaataaacaacccttataacacggataaaaccgataaagaaaatgaaatgccttcattagcaaaacggcttgaacatctattagtaccagagatcagggataataaaaagaaaaggaaagatatagacagaaacgatgtatataaacatattgatgtagaaaaacttgagcatcatcttttttatatagccgatagtttaagggaggaggggaatagtgctgcgcatgatattctagctatcgggcaggatgctgctgaacatgcaatcatttgtgcagagttatgtcttgacttacttgataaacataaaagaaatccgaataataaatag

SEQ ID NO: 83745 - DNA, 1095 bp, Citrobacter koseri
atggttcaatacaactcattcacgattgattatatctctggaataattaattgtcttgatatagagttagataatgatgggaatgccattatttttcctgatgatgtgtctgttaagaagttgagtgccttgaaagaacatttcagttctatatgggagagggcgaatagtgctatagatatatgtgttcaaaagcatgatgctaagattcaatctggaatgttcgggttggttaatgattttaaaagggcaatgcagattggttttttaatatcggatcgtgtcgtattaattgattacttatatgaaagaatattaaatagaaaagatttggcgaaagttaatattcctcatttatgcactgttgttactgagctggctagcttactacctcttgctcagactggtcgtgtcgttattataccctctccttttcagtggcatgaagaatcgaagagaatgatggtcgaatgcattaaaaatgatgtagagattaatgtaagtattatgtcatttattaacttgtggtcgattactaaaaaatgcaacttacacccttatacgattgctgaatctaaagataactatgatgaattgatgtcagtcaacattacatctagtaaaatactaacaaaaacctcattagattatgcatacaaaggtctgttaggcgctcttctaacagaagatatgctggcgaaggagggttttgtgactattgataatatttccctgtctaatttccaaaatattgttcaatctgaaaaaaaattccattatgagtttcttaatagaattaatgctggtggggaaattaatcttaatgaaatggctattgatctagaaaaagctatttctgatgaaataaaaaacacagataagaataaattaaaaaattttctccctcaagggatagctgcctcatccattggtagttatggattggcttatttttgttctgcatcattaactctgactgcaatggcctcgatactgggcatttcttctacgattctaggattgttaaataaggataatgaaagtaatgatcctgttgttaaggttttttgtgagttgagaaaacatggtttttaa

SEQ ID NO: 83746 - DNA, 543 bp, Citrobacter koseri
gtgagtaattcgaccaaatatcattggactgaggaatatcatgacactttgaaggatatgaatcctaatgatgcaattaaagatgtcgagagtatgagtgatcatgatgtactatatagagttaatatgcgaaagtttcaacaggactatatagcggattatcttgagtatttatgggaactcagccctaagaatttctggcgtcatattgaaattatgttttccgatgaaacagagcttctattatctgataatatgaattttgtttctattttatgcaatgaagttgcccctgtgtcagtaataaatagtgttgtgaaatatactgtggataaatggatttgtgatgggttcgagacgattaatgaatctttatataaggatattttatctgaaataatccaagagcaaaataaactttcaatttcaggtattaaattaatagatatctaccctagtgatcaatcagggatggatgagttagagaaagcattcaatgaaataattggtagggaaatacgaaactcctataaaagctggtga

SEQ ID NO: 83747 - DNA, 1002 bp, Citrobacter koseri
atgccacggttatacgcccagcagaacgagggcgctgtttttcctacctatgacgaattgcagtgccagatggcgcttccccattcggataaagcctcccgggagacggtcagccgggcgctgttaatgctgcgccttaccgggtggctgagtctctgtaagcgcgtcagagataaatccgggcgtattcgcggcaatatctatgcccagcatgatgagccgctggggctgtttgatacggaatacttcgatcccggctggcttgatgccgttgctgatgcctgccgacacaccaataaaacaatacgcctgacggcgctggccgttttgcaggatatcaaatccgatacccgtatgcgccaccggcactcacgcgttgcgctgatagaatcccggttatcagccccacaaactccgcaggaaatggtgtcatcacggcagaagaaaatccccggttctgaaaccgaaccaggtcaaaaatcacagagttcggaatccgaacttggcgttctaaaaggggatattttaccgggttcggattccgaactaagccggaaatcaagggatggcggcttagttcgaaaatcgaaccgttacgtacgtagttttacacagagtgtaaaagatacgtacgtagggggcgagagtcggttgtcgtggccgacggctgtgatcgagcggttgaacacgaccgaccaggatatgctggagcagcaacttagcgcgttacctgacgggctgggacagcggatgctggacgatctggctggccgcatgaaagcgacagaggtcaggaacgtcacggcctacctgctggcgaaccttaaacgggcaagggaagggcagtttaacgttggtgatacgggggcagtacatccgcctgcaaagccaaaatcggttgtagtgccaccatttgctgggaaaaaagaggtcaaacgtgcccgaagagagtttgtatccggtgtgatggctgagatccgggagcattatttcaggtcataa

SEQ ID NO: 83748 - DNA, 1599 bp, Citrobacter koseri
atgaaaagaaatacggataaattacgccataaacaccttccccttgctatagcgatttcggcaatccttgctggtcaggctcatgctgaaaatatttcaggggttgaggactcgacggacaaaacatataataaaactgttcaatggtccccgaatggacagggaaatagtctaacctggaataatgttattgccagtggtggactggaggctaaggctcttgatcaaaataatataagcattactgagtctgttctgaatggtctcaagggtatttatataaagcaagggatggtgaattccgggctgaatatccagggctcagttatcacatcagaaaaagatggactcgttctggagggggtgaccaactcgattgtcaacatcagtaatactgaagtccatgcaggaggtccgggcatatcggttactgccgcgaacaatagtgatattttagtcaatggctcttatatttccagtggtgagaaggattcaggtatttatattaaagatctgaatgactcggcgttaaatatccaggagactgaaatccatgcaggtggaccgggtatattcattcctgcctcaagcaatggttctatcattaccatggataagacgaacatcgattccacggataagggagttcttatcggaaacctgagtgatgattcgacactgaatatccatgactctgtcatcgcctctgccggggatacgattaacctgagtggacagattattaattccacagtcaatatcagtaatactgatattacctcttccggaggaaaaggtattcgtgtaaataggatgacaaattcagagctgaatatcggtgacacagttatcaacaactctggcgatctggcactctatgctaatctcaataacgcaaccgccacgattaataattctgaattttctgggggagtaaagtttaccgggcatgacggcgacatcaatgtttctgatttccgggcaaatggttttgaactggacgccacgaatatgaacgttgatattgaccacgctgatattggaaaattacacattagtggacaatttagctcagaggaagaccataaatcgcttaatgaagttaatatcagcggaagtaaactcacttatattggggtgcggtttggttccgggattggattaggtaacaccatcaatgtatctgattcagaaattattgccactcccgaagaagatggttctgctggcacagctatacacttccaggatacgcaggagaacacaatcaatgtaaaagattcacgcctgacagggaatatacacaacggcgtctattacagcgataatgtgactgaagaagccggtaatactgacaggcataacgttgtcaacctggataacacttacttcgaaggcgccttaacacttaatcttgataaaatagatggcacgaccctccccgggcttggctccaccgtgaatatgaataacagcacctgggtggctaaagatgaatccaccggtgagaacgtgaatatcaccaacagtgttgtcgatattaccgatgccacggttatacgcccagcagaacgagggcgctgtttttcctacctatga

SEQ ID NO: 83749 - DNA, 585 bp, Citrobacter koseri
atgaaacgcacaaaggcatttaatgttgtcatttttgatgacaatgcattttttgccgctggtcttaaaagagcaattgaagaatatgccgaaaaaaacggattaatcattaatgtgactactgatactgcggtgtcacttgccgggtatgataaattcattatatcgctacggaatcttcatttagtctccggaatctgggatgttttatctgcatcaccttctcgtgtggctctggtgactgatacggataacgggataaataaacttctctgtaagggaagagttagccggattctcagattcttttctctgtcagaactccatgcattttttcgggtatttttttcaggaaaacgcactccttcacccgggagataccattgtcctaaagcgggcatgatttctttcagggaaatccagacagccacaatgctggcacagggaatgagtcatgccgatatttccggcctgctaaatattaccgtaaaaacggtcagtaatcataagcaaaatattatgcaaaagctgaatctttcaaataaggcagagtttgccttatggcttttacgcataacccgatag

SEQ ID NO: 83750 - DNA, 234 bp, Citrobacter koseri
atgaactggaaagcgttactcgtcgaagctgtgattatggctttaacaacctttgccacagtcttcttccgggaatggctgctcgctatacccctgacgaatatttcctctaatttcctctcaccaccagccccataccaagaggccacgcctcccaattatagaacctttcaagccgggacagaggttttcagtaacaggagcatgtctgtaataccgacatatacaaactga

SEQ ID NO: 83751 - DNA, 348 bp, Citrobacter koseri
atggccttctactcttttcccctgggggttaccgtgtttctcgcacaagaaattattcgtaaaaaacgtgatggtcatccgttaagcgacgaagagatccgcttctttatcaatggtattcgtgataacaccatctctgaagggcagattgccgctctggcgatgaccattttcttccacgatatgtcgatgcctgagcgtgtgtcgctgaccatggcgatgcgagattcaggaaccgttctggactggaagagtctcaaccttaacggccccattgttgacaaacactccaccggcggcgtgggtgatgtgacttcgctgatgcttggtcctatggtggcggcctga

SEQ ID NO: 83752 - DNA, 255 bp, Citrobacter koseri
atgtttaacgttgatatggatgtatcgtggcagtattacggcaagcgctacgataacaacacctcccagtacaataacacccagcaaatcttgccgagctatagcactgttgatgtttctgcatcgtatccgatcaccgatcgcctgacagttcgtggtaaaatcgccaacctgttcgataaagattacgagacagcttatggctaccaaactgcaggacgagagtactacttgtctggcagctacaccttctga

SEQ ID NO: 83753 - DNA, 774 bp, Citrobacter koseri
atgaataaaatatacaagtatgatagagctttttattatgagggctctgataaaaaacaaatttcagccgcaaaccttaacgacatcaaggtatatgactttgcaagaaagcagatactttttgataaaaatggctatacattattgcgtccaagatattgtaaaaataaaacatctcatttttattcattaaaccaatcaaatgcgagagaagtatcatttttcgagacagataaatcacataacaaccatgtaacctatcttttcaatttattaaatggagaaaaaacctttcagataggtcatccaattttcgaaaataataaaataactggttttgctccccttgcaactttacataaatatcattgggatactgaagtacatagaatatgcaataaagacttaactattaggcacgatttattcgggcaaagtagagatttggcaatgtccattcgtcatccatgggtagctatcgaggttataaatcatcacttcccagaagaaaaggctttcacagcaatgattgagttaagtaaacaaatccccttgctggtcatgtttgatctccttacagtaaaagctaaaaaatacttcataaatattgatgcaatcaaagggcaaataagacctcttttttatatttacgaaggctatgtatggtgtggcgactcgattgacagcagcataacaagttcagcaatacttaaaataaaaatgaaagaacgtgaggaaaatatgaaagacctaagacgtcaggaaaagtcgtaa

SEQ ID NO: 83754 - DNA, 1008 bp, Citrobacter koseri
atgaagttagaagagttgaatacagggatatcacaacatggagaagataaggctggctttgttttacataattttttagtagcatttgatagtacatttaatctatccaatcatattaagatagaaaacttttttcagaaaaacaaacatattgcaaaatggatgattttcagtgattacgtattacatgataaaaacaaacccaatgacgtaatcaccttctctatatttccttatacagaaaacttctttgagttaggaaaaaaaattgatttactgtcttttaaagacacaaaaaagctaaagagaattaataaagaattcattagctttattaatacaagtgaaatattaaacttatctattttgctatcaaaagaaagaaaattagatccactgaatgagcgagaaatgcttaaaacaagatataaaatggctataaatcaaatcaatgtatggatagaaaatcaaggtgaaataaaacattttagacaattgataaataacttaaaactcatacttgacgaattagataaacccggtgctaatctaaaggcaattagagacattgagatagtatcatcgctgaccgcatatattgcatttcaaatatcacaggaaattaaaatcgatattatcggttggttttctgatagagatgcaatgttaagttataagatagcaaagttttccaaaccaatgatatacgatttggcattcaatacttataataaccttatgtataatatcaatgaagaatatcaagaaaaatttgtctttggtctacctgaaacagaaggtagggtatggtatgactcttataatcgagtcccggacttgattgcagcgactttagctgactataactatgaagaagataaatgtagtcatgaaaaatataggcctgtaattaaagggattttagctgataatgaaaaaaacatcatatacaaaatatcatttaatgatcctgacaacccattttccgctggtgtagttccgctgtga

SEQ ID NO: 83755 - DNA, 1440 bp, Citrobacter koseri
atgagcgcgatgcttaacgccatgcgcaccctgaccgatccggctgataccggcgcggtgacgatctgtttaccgcaggatgtgcagggcgaagcctgggattacccgcagagtttctttgcccgtcgcgttcaccatattgaaagacgaccaccggacccacaccggctggcgcaggcgcgggcgctgattgcccgtaaacgccgcccgctggtggtttgcggcggcggggtgcgttattccggcgcgcacgacgcgtttcgtcagtttgtggaaaacctgcacctgccgtttgcggaaacgcaggccgggaaaggcgcgctggtcagcgaccatccgctgaatctgggcggtattggcgttactggcgggctggcggcaaaccagcttgcgccgcaggccgatctggttatcggcgtcggcacgcgtctgaccgatttcactaccggttcgaaagcgctgtttgcacacccggacgtagaatttctcctgctgaatgtcgccgagttcgacgccctcaaactggacgccacggcgctggtggccgatgcccgcgccggtctgacggcgctgacggaagggcttcaggattatcgcagcggctggggagacgaggtggcgcaggcgaaatcggcctgggacgaggagtgccgccggctgtggtctcgccagtggcgcccggatgacgcgccggaaattgccgggcaccttgatgcgcaactggcggaatacagtgaagcgctgaacacgcggctgactcagactcgcgttctggggattatcaaccagcacattgaggatgacgccattgtggtcggcgcggcgggatcgctgccgggcgatttgcagcgtctctggcaggtgaaaacgcccgacagctaccacctggagtacggctattcctgtatggggtatgaaattgcggccgcgcttggggcgaaactcgcgaagccgcagcagccggtctatgcgatggtgggcgacggttcgtacatgatgctgcattccgagctgcaaacggcggtgcaggaggggataaaaatcaccatcctgctgtttgataacggcgggtttggctgcatcaataacctgcaaatggggcatgggatgggcagttttggcaccgagaatcgcgcccgtcaaccacaatccggccagctggacggcccgctggtggcggttgatttcgcccaaaatgcgcaaagctacggctgccggtcgtggcgggtgcatgatgagcagagcctgctgacggcgctggaggcggcgcgcgcgcatccggggccgacgctgctggatattaaagtgctgccaaaaacgatgactcacgattacgcctcatggtggcgcaccggcgatgcgcaggtggccgattcaccgtcggtgcgaaaagccgccgagcagacgttcgatcaggtgaaaaaggcgcgtcagtattga

SEQ ID NO: 83756 - DNA, 300 bp, Citrobacter koseri
atgactatcgaagaatttgtgaatgaagaaaaccatatgtgtaatctgggccaggaacttttctttaaaattttcgagcctgaatcgatttataatttacccaataacgagtttaataaagaaataatatattggctcagtcagtatcttgtcggaaatttgatacaacctttagacgcgatctcagagcttaatgcttccaaacagatatatgtttacgagacttggttttcgctaattaaatgccctgatgaaatgaaactcttggcgaagcggataattgaatatttattggattaa

SEQ ID NO: 83757 - DNA, 1584 bp, Citrobacter koseri
gtgtcaattggatgtatcttttcaggagctgatatacctatagttttggatgccacatctataactaaccttaaagaagaatatttattaaatagtaatggaaagctagaaatatatagagtatttgcaaaaggtaagggatctggcagcgttcaagctaaatgtatggctccctcagcaaaaggcgcgaaatctttacttgctaaaaaaaatgatgaacttaaagtaattgccgaatctattggtgttgatggagctgataaaaggtccaatgttagtttaagacaagaaatttacaggaaaattggagatttaaagcttaaagaaatcttcgttaaattaaatgctgaggagggcaaggttatttgtgaaaaaatatatgacaaactccctcactttgcattattccgcgcagacaggccgagtaccgatgaagaatcagaagtacaggatcctatgaagtcagcggttcaaacagcattgcagaagattgacattcaacttgaatccattaaagaaagcgtaaaagaacatgcagttgaagtggctgaaaacacaattaaacatttacatgatatatctcctaatcttgctgccgggttaatcccaaagtttaaagtggaacctaagtgggaaaatattttcaagctaacattggaagatgatagaggaatagctatcaataaacgtggtagtggtgttagacgtttagtcctgattagtttttttaaagcggaagcagaaagattgcaaaaagaattcccagataaaggagttatttatgcaattgaagaacctgaaacatctcaacacccatctaatcaaagacttcttattgatgcatttcaagaattagcaaatgctgataaatgccaagtattgattaccacccacgtccctgcacttgtggaaaagatacctacagaatctctacgccatataacccgaacactcgatgatggtttagaggttaaaaatggtaatgatgatgtgctaaagaacatagcgaatgatcttggcgtataccctgatagtagggcatctgttcttgtatgcgttgaaggccctaatgatataaactttttaaagaatatcggtaaaatttatctcgaccaaggtgttccaaatgttcctgatatgataaatgatccgcgtatagttttcattccaatgggggggcatactcttaaagattgggttaataataattacttaaaaattctaaataaacctgagattcacatctatgatagagatgttgccatccctcctcagtatgaaaaagaatgtaagtcagtaaatgctagaaatgatggttccatagcattcatgactgaaaaaagggaaatggaaaattatttacatcctgatgctattcaggcggtgtttggtgtaaaaataaccatagatgatacgacagatgtatcaacagaggtatctgctttaacacgttataatgaaagtaaagcgaagaagaagataaataaatttgctacagcaaaaatgagttatcaaatgctcactgcaagtgatgcaaaaggcgagacattaacttggtttaatgctatatatgcgaaattataa

SEQ ID NO: 83758 - DNA, 819 bp, Citrobacter koseri
atgacttatcgtgaaatgcttagtcagcatgttattgcaatatctacatcagatagcccagatatgcctgtattggggttaagtcaacagcatttatatgacgcgatgacagaaattgcgcgtcatttattagccttgggagcccggattgtttatggaggagatttacgtgctaacggttttactgaactgttatttgagttagtagcacgccatagaagggatgcggatgagggggatgaacgttccagtatattgaactatctggcatggccggtgcatatgcaaaaagattccagtgacttggaaaggctcagtgcggacctgaaaggaatggcaaggcttgttttattcaatcgggatggcgagtcgttgccaatggcagaacgagcccattacatagcaactattccttctgatgaagattgggaaaaaggtttgacagcaatgcgacatgctatgttacaagacacacatgcccgtattattcttggcgggcaggtagataagtataagggggcaatgcctggtatagcagaagaggctatattatcacttcgcgctaaacaaccccttttcattatggggggctttggtggatgtgcaaaagatatcaccgagtctctgaatattgtggcatctgacggaatgcagaaacgcaactggagaggtcgggaagaattttctggtttctctttccaggatcttaataacggactcactgaggaagaaaatactgtgctagcacagactccgcatgtggaccaagctatcgccatgattttgagaggacttttccgattagtaaaacgttgctga

SEQ ID NO: 83759 - DNA, 1194 bp, Citrobacter koseri
atgcttgagacgaatttggcaaaaccatttctggttgtttatatcatttggcacccggatttcgccggtggtgctggactggccgaaatattgcgtggacactttcgtcgggaactctatcagaatgttgctggaggaaccggtttaagtgttatttttcgttctgagcctctacctaaaacggggaagccgctgccgatcaatttttcagaatcagagaccaccgcagtcctcatacttgcagaatcatgtatggcaaatgatcctgaatgggggacttatcttcgggagctatccacgcagtcggaaatagctggactaggtacacatcttttccccattgctattgatggagaaggattaaatctgggactggaagagcaggcattacgctgggaccaatggatacaggatgggagcaacgatactgcaaaccttcatatacgattgattagtgagcttacatacgaattttgcatgatgctgcgccattacctggaacatctgaaacaaccagaaaaagatgaagatgagttgcttaattatctcaagaaagttcagatattccttagccattctaaacatgataaagatggagagcggattgctcatttgatacgtgagcaattacatagtggacatgggttaagttcattctttgatgtccatgatatccctgccgggcttcggtttcatcaggtgctattgaaacagctggcgcaaagcgcagttgttgctatacataccgactcttattcttcgcgtgaatggtgtcgccgagagattatagaagctaaacgtaatagtgtacctttagttgttgccaactgtattagcgaattggatgaaaggggatttccttatatgggaaatgtccccatagtgagaatggatccacagcaggctgaacgaattaatatcattattgcacgactgcttgatgaggttctgaaagattttctgtggcgctgtcgtatacaattggttaataccgaacaaagtgcagtgcagtttgttccgcgtgcgccggagttaatctcacttgctggcttaaagttccacggtatcgggcagcctacaattgtatatcccgacccacccttaagttcggaagaggagcgcttatttgaagaagttaaacccggtatcaggcttagaagttttaccgaatggctggcagagggaacatcatga

SEQ ID NO: 83760 - DNA, 513 bp, Citrobacter koseri
atgtataataccaaaataattaaaagaaaagtttttttaagctaccaccatgatggtgaccaatattactatgatgaattctcaagaaaatttcatgatgaatatgaggctgtaacggataattctcttgatcgtcgagttgacagtgacgatattgactatgtcatgcgacgtattcgtgagtattatatcgcagggacttcatgttccattgtcttggtcggtaatgaatcatggggaagaaaatatattgactgggaaattaaatcgacgcttgataaacaacatggacttattggtgtccagttgccaacattgttatcaaattcttatggacaagtgactgtgcccgttcgactcagtgataatattgattctggatatgcgctgtgggtaagttgggctgattttacagctagcatttcatcgtgtagggaatatatcgaacaagccaattgtcgtagtaatactctgataagaaacactcgtgaacgccgcttaaggaatgcataa

SEQ ID NO: 83761 - DNA, 612 bp, Citrobacter koseri
atgcataaaacttttctgagttatcatcatgcaaacgaacaggatttgaagaacggaatcattgaagcatttgctggtgcgtcatttattgacaagtccgtcagtgacggggatatcagcactaatgtcagtgaagattacattatgcggaaaattcgggaggactatcttggtgactctaccgtaacagtagtactcataggtacagaaactgccagcagaccttttgttaactcagaaattcaagcatctttatggggggagaatcctgctggattaatcggggtaattcgagatgaaatatattcgagcgtgtttagctcgggggtgtgtagtgatacctcttgcaattgcgggattggaattagaaccattgattggggttatgaacattatctcccttggttaattaaaaaaaatcatagtttttcaaaactcgtcccccactatgatgatatggatgtttattgctccctggttaagtattcagattttatagggaatagtgaattttatattaaccaggcatttgataaaagaaatattatggaacctgcagcaaagaaaaatcccgctgatgttcctgctataagaactaatttactatggtga

SEQ ID NO: 83762 - DNA, 729 bp, Citrobacter koseri
atggttaggggattgttactattcggaattattttgatggtaattattttgatggggtacttctcttttttaccggcctcacaatggtggtttatcaaaaatatcatatcaaattttgattttgtaaaagcgctcctttcaattctaatattatcattgattactatatttttgtttttcggtattttagagaaaaaatactcattaaagttagaaaaattaactttcggtgggttaaatgttttatttgatagttctgacttgctatataaaagatctgttcgcaatttccttgatactaaaagaagtgtgttcaaaattgatccacattttgattcatttgaagaggtttttaactctttatatgatatctataattttattcgtgttgaaataagagtactggatgttaagcggaaaagagatatggagttgtatggtatatctaataaaatgctaaaaaaactgaatcaactgcttaccaaacatcagaataattacaggcgttggcataagtacatctcaacaaacgatattgtattgacgagggataaagattctaacggtgaaaatgtttctttgatttatcatttaacaccgattggagtaatccagactcattattatcatttcagccagttgatggctgattttgaatgcattaataaattcttctgtgaggaagttagtgttgtatttaacatcgatattgctaagtgggatgagtaa

SEQ ID NO: 83763 - DNA, 1002 bp, Citrobacter koseri
atgtcgtttaccattcgcccttggcttgaactagcgccacaatatgatgggactattttactgggcaatggcgcaagcatcgccgtcagccctcgttttgcatacggctctctgcttgaacatgtcacacaaagagagcgactggcggaagatgtccgcaggttgtttgacttttttagaaccgaagatttcgaacttatcctgcgtatcgtctggcaggcgactaatgtcaataagtctttaggaattgaggacgcgcgtactcgcgaagcctacctccgaattcgggaatgtcttattcaggccgtgcgcgatgtgcatcctgagcacgatgaagtgaatgaacaactgccgtatatttacgaatttctaaaaagatttaacaccgttatttcactcaattatgacctaatcgtttactggacaatggcatatggtctggatatcaacgatcgtcatcgatttaaggactgttttcttgccagaggcctttttgagcaggactggcagcggctgagagggatgtatggaaatgaacggtcgaatacgcttgttttttatccacacggtagccttatattatgccgaaatcgtgtcgaacaggagcgtaaaatccatattcgtggagcggggttgctcgaatccattctgcaacgctggcaaagcgaagaagtggttcctctgttcgtcagtgaaggaacgcatgaacaaaaagttaacgctattcaaagcagtttttatctttcaaccgtttatcgagaagtgctcactgagccgcgagacaatttggtgattttaggttggggaatgggagagcatgacgttcacctgctaaaacgtatggccgggagtgggatacagcgagtcgcagtatctgtattcagaagagatcaggcatattgcaacagagctaaccttttgattaaagagactcttgggcgaaataccctcgtggatttttttgatagcgaaagtccgggttgctggaatcaacatatttaa

SEQ ID NO: 83764 - DNA, 1236 bp, Citrobacter koseri
atgaaaaaagaagccgtcacgagcaaaaatgaagcaaaagaaacgcgcgaggcggaattcagtttttatgagtttttcgccggcggcggcatggccagggctggtctgggaaaacagtggcgatgcctgttcgccaacgatatggatccgataaagacggcaaactatatcgaaaattggggggacgagcatttcgatggccgcgatgtgcgcgcagtcaaccccgacgatctgaccggacgcgcggatttggcctgggcctcctttccctgtcaggacttatcgctggcaggtaatgggctagggatcggcgaaatcgaagacagcggggataaaagcacgcgttccggcgtcgtgtggtcttttctggatttgatagacaaacttggcgatggaaaccgcaagcctctaatgctggttctggaaaatgtccttgggctattaacgctggatcagggacgccattttgccgcgatatgtcatcagttaagtaaaacaggttatcgctacggcgcgatgattattgacgcgaagcattttttgccgcagtcccggccccgcgtatttatcgtcgcgattgaccgtcagttttccgctcccgcaggtttatgttcacaagagccgatggcgttatggcattcctcttcactgcttcgcgcctacgacgcgctttcggagcaggcgcgcggcgactggatttggtggatgcccggtgacgccccgaatacccgaaccagggagcttgccgattttattgagtgcgaagataacaacgcgctatggcattccgccgatgaaacccgccgattgatcgaaatgatggcgccggcgcatctggcgcgtctgacgaaagcgcaggagtccagcgaaacggcaataggcagcctttatctgcgtatgcgtaaggaacaaggcgctaaccgacaacgggccgaaattacattctcgacagttctcggctgtctgagaacgccgaaaggcggcgcttctcgcccccgcattatcgtcgttcgcggcaatcaggtaagaacacgtttattgtcagtcaaagaggctgcggcgctgatgggactgccggaagattttattcttccggcggcgtatcagtcggcttttaaaattatcggcgacgggcttgccgttccgtccgtccgctttctggctgaacgcatccttgaacctctggcggcggcgatacgaaacgacaactatcaggcggaggacatgcaaacatga

SEQ ID NO: 83765 - DNA, 2562 bp, Citrobacter koseri
atgaactggacgcctccggttacgcccgatggctgggaaagtaagttggtcgattattttcttcggttcagcgccgacggcgacgcgcaggatattcgctggtttgaagtgacgccgttgacgcttgcggcagtattcgcaggaagcggcgccaacgctgatgaagtagaaaaagctttccagtcgtacatgtcgagaataccagatctgccgctgcgtcttgaaagcggcatgatggaaaagtctactcgtcaatcgcccggatattttacttatcttgtcatgacgttgcttatcagcagtcaattcgacgctcaggaagaaagcaatgattttcgcctgaagttacaaaactggctgcaaaccgggcatagcttccagaatttatccggcgtcaacgcgatgtgggaagacttagccgaatggcttaaacaacgtattcgcgaaggcgagtcatacagaagactcatcctgccgccgcaggacggttggcgacagataggacacaccctacgtctggcattcccgaataaagccgatctacgcctgatgagcgaatgtcttgagaactatccgcaatccgccgctaacccacgccagttaatcgaatattttcaaatcgttattcagagacaaggcgtttctcatgcgctgaaggcggctttcgccgaattcagggacgcgtggttgttggggcgtcgcgcgctgttcgatatgcctttctggcgcttgcgccaacgagcggtccagatatcgtcctgtgtaacggcgcatcagactatcattgatatatacgtcgacttcgacggttcgcggtgctatttcagcatcgcagacgagagcgacgaaagcgtttttcatcctacgttatacgaagcccttatcgccagcgacgccgggagcagcgaaaatcttgggaaggcgacgcaggtcggcttactctttttttatgagatcggacacggacgctggagagctaaaccgtcccccgacgtagactcgcaacggtttcatatcgctttatccagtaaacactctgtacaaatgagcaagcgcctcaacggatatattgcagaagacgagtggattttaacggagcagccgctggacaggctttcagcggtggatttattccgctcagtaagatcctcttcgggtattcaggatgatgtcgttacgcgtcctcagctatacggtggaatacgcgtccctggcggatggttggggttaccggcatttttgccttctgttgagtcagatacgcgacgctacaaaatatattcatccgagaatgatgaagcaggaaccagcatttctgtaatcgatggtcgtctgatttcttctgtgccgcttaacggtgaatttttcatcgagccagcccttgagacgggcgaacaaacgccgccgtggcggcgtcgcgcgcgttttttcacccgcgccgtaccgcacccgactttaggcgaaagcgcaagataccggtttgagtcgctttgcgactggtcgacgtcttcactaaaagcccccaagtttaatttcgaagaactgtttcagtgggaagatagcgaagcattctgcgatcatcttctggaggcgatttacgccagcggcgccagcggctgggaggaagctgaattagtcgcgcttctcgaacgcgttgccggcaatatcagcgtatggcatctgattcgctgtctacatcatgcgggtctgatcgagccgcgcctgcgccctgggtggaaaggtcgggcatggacgctggttaaaccttcattgcttcatcttcgcagcggggaaaacagtctggttgtcgcagaaggcgctgcctgcgcccgcctgatggaggattttcaaaaggcggtcacaggactgggcggaaaaagtttccgtcgtagcggcgtaagcgtctggtcgccgccggtattcggggccgcgcacgcagatcctgtcgcattatcccaacgcctgggatggccgcttatcgatgcgtcatcgttatccgatgcaacgccgttttcactggcgccgacggagcgcgccgccgaactgcgcaatccagcggcaagctgggactggcgttccggaagattccagacgtatacccccccgagtaaaagcgaggcgtcattatcgctccatgttcatcctggcgggcgggatcatgatatctatcgggtcgtttccgggcggaaaaccgcgtattttctctcccgcaccgcggctattctcgctgctggcgcgaaaaaccagcaaccgatattcgaacgcgtgggcaaaaatcatctgctatgtcttatccatgattgcggcctgcccgacgcgctggcgacgggaatacgccgcagcgcgctcagaaacggaggtccgatggattctggttatgtttatcccattggcgacgcttcttttctctggctgaaatcgctgcttccgggatgcttttgtccactctcgccgggcgatgagagcgacgcaaaccatttagtttccgcctctcgtcattccggcggaaaaaaacgcccgacatggcgaaacgggcggctaacgatgacgcctggatcataa

SEQ ID NO: 83766 - DNA, 2088 bp, Citrobacter koseri
atgagcgaaatcccctggtttcttggtcaatacgatcgcagaaattatcagtcttacctcaaagccgtcgcgcaggagaccccgaatggctggcgtacgatcgataaccccaagaggttgttcccccgaacgggagaagtggagtttaatgaaactgaggctttaccgcttcgcaaaggcgaatgggccgcttttcaagtggggccaggcattcgcaacaagacgcaggcgaaacgctctcgccgtatttacccctattatgatttatcttccgggcagtcgctgctggaagctcgtcgtcgattaagtttcgatggcataacgacagacggcggaccgggactatgggctatccgtttcggacctggcgaacttattctggcgaatctggccgagtcgaaatctggttgcctgatgctgtccagaaaccagagcgttcatgaatatgatttcaacgaaaacggcgtgattactgtatccgacgcatctgaaagcggaaaagtattttacatgcccgatgttgatgcttcacccgcccgcatccatgactggacgccggataagcagtacatcgaaaacgtcattcaacttctttcctgcgcgagttcgacgacggcgatcgcttcatgtcttcgggcgcattcggacgagcaaagcggaaaattaaactccggcgtcgatgatcttctggctgccgctcaatcgctccgttcaggcgaactggcaaagaaactggaagacgaagatggtctggcccgtcagcttgctgaatcactactcagtgacggcaaaatcgctgacttgctcgaatgtcagatacaaagtatcgctgaagaagagcgagcggtgttgcgcgcagagcaaaaaaaagcgctcgaagacgcattttccgccgagcgccagcgacgtcgagatgctcttgatgcggaaatggcggattctctggcaacccaaaagaatgaaatcgaacatcacatcgctaaattacgacaaagcgatgaagaaaaattacaggctgactttgcagagaaacaagcgaatatcgagctgactctaaaacatgagaaagcgcgcctcgaaagcgaaattgatcgcctgaaagacgccatcgcggatttatgcgctcagaacgaacatcaacgtcaaacgctggcttccctgaccagcgaacgtgaagcgtgtttggcttctctcgtagacgtcagagagcatacagctcaggcgcaagccgaacttgaacatataaacgccgcagttgctgaaaaagctcgccgaatggcgtattcagccatcccggaagtgagacttccgcctgaagctaaaaccctgtcctgcgaagagcttggtcgtagcatcagtgaaaacaatttgctaacgcctgacggaaagaaattgatggtgcaatttctggcgttaatgctggctggagaatgcccattgctatctggcccggaaacgcaggacttccttgctattgccgaatcgctgatttcttcaggccgctcaatccggcagatcgccgatccaacgatgattaccggcgaagacctttgggttcgcgcgggaaataaaatggcgacgccgctttatcagggtttattgctgagcgaggcttcctgtccccgaacgatattctccgtcattgagcatgtcgaatgttccgccgcgcgtttctggttgccagcgctgaaagaccgattgcacgctggcgatttacctcgacgctttctgatttgcggcaccattgaaaacgaagattgcgaagaagcggagaaactgaaagaacagcatcttcgtctacggacggaaaacgtcgtcattcgaaatacgatagcgctgtcccccttgcatctttcttcagaaaatcatagcgaactggatcccggcggagcatcgcaaggttcactcccggataaactcgctatcgcggatgaaatgtcagccggacgtctggatttggcaaataccctacgggcgatgagaacggcgcatgaagttgtgccgttcgatgatgaaaacaaaacgcatcagaagcgtttagtcgatttatacgccgatttaaagaataacggcctatgcgcccaataa

SEQ ID NO: 83767 - DNA, 5832 bp, Citrobacter koseri
atgttagatccgattggcggttttcgccgcattcaggacttcttcatttcatatatagaaaccaacttccgaattgccgatcctttcgtcacggactcaagacgcaatcttttgaatagcagcggggaattcgccgcggagccctacattgagcctgttttacggtatgagtcttcggataaaacgcttgaagctctggctgaaatggaaggggggccgctgaatagtttgtctcccaaaggccggaaggcgtttgtcgaactggcgttgtccggtttgttcgattcgaaacctggcgatgaggtttggccgcgtcgttcagcccatgcgccgtatatccaccagactcaaatgctggagcgaggtattcgtcccggtcgccccggcattgtgacatcaggtacgggttcgggaaaaacggaaagttttatgctgcctatactggctgcactatcaaatgaggcagtcaactgggcctctcctggcgacggttatctgcaaaatcagtggtggaatggcgaaaaaataaactgggtttctcgtcgcgaaggagaaaaacgtccggcagcagtaagggcattagtactttatccaatgaacgcgctggttgaagatcaaatggcgcgcttacgtaaaacattggattccgatgacgcgcgagaggttatggagcagcgtttcgccggaaaccgcatcttcttcgggcaatataccagtgccacaccggttaccggttacgccagtcatccccgtctttccggcgatcgttcggagaaaagccgtcgcgtccgtaatcttgaaaaattgcgtaaggcgttgaaccgaattgatagcgaccagcaggcagcgcgagcattcgacgaaaaagaaaattcttcggaaaagacccgatatatattcccctcgacagacggaggggagatggtttctcgctgggatatgcaagctgccccgcccgacgttctcgtcaccaacgcctcaatgctgggagcaatgctttcgcgcgaagttgaagacggtatttttgacgctacgcgtgaatggctgatgaacaataacgacgcgtacttctatctggtgttcgatgaactgcatctaatgcgcggttccgcaggtacggaaaccgcgatgttgattaagtcgctgattatcagactcgggcttgacgaaccgaaacatcgctacaaactgcgtttgctggcgtcttccgcatcgctgccgatggatggcgcggatggagaacaatcacggaaatacctgcgggatctctttgcgccctttggaacttgcagggactctttggatcccggcagcgataagccagatttctggcgtcactgcgtcattcagggaaagccctacataccgccgcaacaaataggaaaaatcgccgcacaaccttttgccgcattgatgagggcggctctcgtcggtcagggcaatattgtccgccatctgaacatgacagacgcgctgaatcaggcattgctggatgtcttccaggttcttgccgtgaaagaacagaatgtcatgcaaggcataaaacaagcggcagaagccgcagccgcgctattgaccaacgcttgtattgaaaaagagggcgaattcccgcgggcaatgccacctggactgattatcaataaaatttttcataaggaagatcctagcgaacctgatgagttggaattggctctacgtggactcatgctggtgcgagcgctgccggagtccgggattgattgtgaaaagcccgtcaacgtcacgccggcttttcgcgtacatacattcgtcagaaatattgaaggtttcttcgcctccgtatcgccgggagagaaaaaggcgaaattcgccgatttttgtctggaacgcggtttgtcgcacgcgccatcagcccctggtgtgaaacgcggccgccgtttattcgaaatgttatattgcgaagcgtgcggcgaattactactcggcggccagaagggacagaatgatagcgctacggtagagttattgccttcagcgaccaatctggagagtcttccagaacgccccggcgctgaatattacgatgatatgacgctggatgagtttgcggttttctggcctgtcgataacacgccggctaccagcgaaaaagattgggatatttggcaaaaggcgacgcttaaccccattaccggaattgttaccgttgggcaaagcgcatcgatgacgaatgccgattcagttcgcggatatctttatttccagaaacccgccgtaagtaaaaaaggcgaatctgctaaaaagccttccgctcaacctttttgttgccctaattgcggtatagattattccggcaggccacccagcaatcgcgccagaacccccattcgcgcgtttcgtaccggcgtgacgaaatcatcccaactagtagcgacggagctatttgaattactacatgcgatcggcgcggaggcgaagagtattgttttctcagacagtcggcaggatgcggcgtcgatggcgttggaaatcgagcgattgcacttgcgcgatctgcgcagggaggtcctggttgctgccgccagagcgatgatccgagaggctgaaagagaatatattccagaagacagtatcaacgagaaaatgtccagggccatgaaggccggagacaatgatgagtatggtaagctatatgaacttaaaaaatgtcaggccgatattgccgaactttgtaagtatcgacgggtaaaaatcgacaaattactagagtctgaaggcgatgccatcggaagaattacgtctgagttggcaaatctgggaatctctccctacaagtaccgttcaaatgccgatgaggataatagcgctgtttggcatactaatttcattaaagaaggcaatatcattaaatacagtgagagacttccctctcctgaaaaaatgaggataaaaacaaaaatattcgatgatcaattcgaactgatagatgacgtaattttcgccaatacttttttcgcgctggaagaaacaggactggcatacccgtgtatttcgggtaaagatgacatgccggaacttgatgcatggctcagagtgttttctggcgtctatcgcgttaaagaaaataaatatttcgatgccagccgcacccgggattggcatgtcggggaaaatgtcgataaagagaaagtcaagcgcgtcgccaaaaccttattcggcgacagttgctataaagaagggttgacacggattttaaatcagtttgccagcctgaaacatacggcaggattaatcaatatcggcaaattatttcttaaagtagccaaacctgatgatccctactggcaatgcggcaattgcggacgaattcacttacattttggatttaagtattgtacccgctgtataaaaccgctcgacgctgaacccagtggggtcgtggaaaagctatgggaagaaaattttcttggcaaacgcatcgtgcgtggtgagcgggatggcgttaaacgcttcaggttgaatgtcgaggaattgacagggcagacggatgatttttccgatcggctacgtaaattcaagggcatcttcgtcgataggatgagcgagcttgaaaaactggatgcggaaatcgatatgcttgccgtcaccacgacaatggaagtcggtattgatatcggttcgcttcagtcggtttatcaggccaacatgccgccccagcgatttaattatcaacaacgggtcggtcgtgccggacggcgcggtcaggcattctcttttgtgatcacattttgtcgcggacgcactcatgatgcttattattttgctcatccgcatgcgatcaccggagatcccccgccgccccccttcctggctgtcgatcacgatgctattcccaaaagacttttgcggaaaatctggctcaggagcgcgtttaatcttttacgcgaacaatgtcgtaaaaacgaaacggttttccctggcgataaactcgttccaccagatgttcatggggaatatgtttcaacacacgattactatcatgatgataaagcgaactgggccaatcgattgtacgatgcgctggaagcaaaccagaacatacgtgagcgctttattgaagccgctacgttcaattccgatcagcgccaacgtctttattccgcaatcaacgcagggaaaataatagcggaaatcgaagaactaagaacttccgcacctgacgacgatacgggacttgctcgttttctggccgagcgcgggatattgccgatgtatggaatgccgactcgggtacgcaacctttatctgggattacgcaaaacaaaagggccaaatgagcaaacagaatacgaatggtcgacaatggatcgcgatcttgatcttgcggttttcgagtatgctccgggctcggtgttgattaaggataaaaaaaagcatgaggtaattggcttcactggtaattatcgagaacctcaggtccacgataaccgagtagcagatctctcaacagtatgttcctggcgagagtcaagtcactatgtcgcaatttgtcaaacatgcggttccgcaaagctggagcaaagtcaacctattaacgatattaattgcgaagattgcagtacgcctatccgctcagacgagttcgaactctatatcacgccagccgctttccgtacggatttcgaaccaaaagacgatatagatagcttcactcgcatgtcgctaaaaactacggcgaccgtgttgcatagaggcaccccagaagattgtggttcctttattgtacggcgcggcggagttactattttgcgccttaacgacgggccgattaacggagagaaagaaggtgaacgattcaccgttgatttagcgactgatcaaaaggtgccgattcctttagatacctaccactcgtcgattaaaggaagtcaggcaattgattcgaactggaccggattgcgcaataattttagatggcggtccactggcgagaaacaaagctttgggcttgtttcgagcaaagagacagaatcgctacatctggagttaatgaaattcgatactcgccttaatctgaatatgattgccagacacggcgagtacatgaacttgcctacgcgagcggcagctatcagcgcaactcaaatattaacgcataaagccgcactctatctggatgtatcgccagacgagttcgagacgctcgaaccaagactacataacggaaaacccatattgcaaatcgccgacgcgttaatcaacggttcagggttatgccgacggcttgccgaaccagcgactgctggcgggttgcctttgatggtcacattattacatgagattctcgaagagaataacaactggccgatggttgattttctgaataaggatcacccgactcaatgtcaaacagcatgttataagtgtatacaacgctacggcaatcgccggtatcacggtttactggactggcgtttaggtatggcctacttacgggcgatggttatgcccgaattcgcatgtggtctgaacgccgccgactggaaccagccagagatgaaaggatggcaagatagagcgtttgagttagcggaagacgtcgaggcgctacgaccagggacaatcaaattgtcaagagagcatttattacctgttcttatcgaaatacaggatgggaaagagctttggcgggcggccgtaacgcatccattatggcaatggagagacgccgaacgtgatgcccttattgactcttttggattggctgaggggggatcgccgctactattcattgatacgtttgaattggaaagacggccattgcgtgcgctggcgaaccttaaacggggttaa

SEQ ID NO: 83768 - DNA, 408 bp, Citrobacter koseri
atggatacagttactccggctaaacgaagctatgttatgtcccgagttaagggaaaagataccagtcctgagcgaatcgtcagacacctcgtttatcatgccgggtttcgttatcgtttatacgacccgcgactgccgggcaagcccgatctggtcttttggggaaagcgtaaagttatctttgtgcatggttgcttttggcatggtcatgaggggtgccgacgaaatcgtataccaaaatcaaatcaagaatattggtctgcaaaactggaaaaaaatagaacgagagattcgctaaacttatcaaaactacatgaaatgggttggcgggtactggttgtatgggaatgcgaacttaaagagactgatattcttctgggaaagctgaaatcatttttagaagaatga

SEQ ID NO: 83769 - DNA, 1161 bp, Citrobacter koseri
atgttttttcattttacttctaaaggattgggttgcgaatggtatacatcaacattcaatcatttcaataaaagacaaagaagccagtcgagttttaaagaaaaaattaatgagcatggagacattatctatatcaaatcaccgggatattcaaaaaatatttctttggctaggttatatgatcatttaacttggggcattaaagtcctgtttaaagtttatcaaaatagaaaggatgttgatgttatcatcacatcaattccaataatatctgcaacattttttcttgtacatttagctaacttactgaatataaaaatagttgttgaagttagagataaatggcctgatattttttggatgtcttctggtggatttaaaagaaaaatgatacagtttctttcaattccactgaaatctatggtgaagtggtcgatagaaaactgctctatatgtaccgtaccatcattaagtttttctgattggttaaagggatttgttcatgaaaaagcgcatgacagaatacaattgtcattccttgggtataataaggagatatatcccacttttgatgaaagcgatgttattcgccaaatgaaagttgatgcaaatagtagaaaaataattgtattcgtaggtactattggtcatatgtttgatcttgagacagttgtccgtgctgcagaacaattggattctaacggagattatttttttgccatgtttggtagtggggatacaatatctttctggagaaagaaaactcaaaatttaactaatataaaattttatggatgggttgataagcatcatattgactacttacttaaaaatgcatatatagggcttgcgccatatataaataatgaaaactttaatggccatgtacctaataaaattatggagtatactgcctacggattacctatactttcggctctgaaagggtatgttgaagattatcttaatactcatcatttcggtgcgacttatgaaaatggtgatcatgtgggttttataaatgcaataaataaaatttcggagtataaaaaacttgatcgtgaaatatccctcaaaatggagatgttttatgaggaattttttaaatctgataaaatttacgatgaacttcttcatgatgtgagtaatactgatgaataa

SEQ ID NO: 83770 - DNA, 414 bp, Citrobacter koseri
atgctgggcgtgtggagcgggcatccggcacaaatgtgcgcgcttagcgaaacctgcggtcacgcgttcgccctggaagcaaacggcgatctctatcagtgcgatcactatgtctacccggcgttccggctgggtaatatccatcaaacgccgctacatatgctgaatgccagcccgcaggcgagtgaatttggacagcagaaaaaatcaacgctgggggcggattgcctggactgcgccttattgcgattctgcaacggtgattgtccaaagcatcgggatttaagcgggaaaagcgtgctgtgcggcgggtataaagcgtttattaaccacacgtcgccgcatatgcgcgtcatgcgggatctgattaaacagcatcgctcaccgatggagctgatggcgatgctgcgttaa

SEQ ID NO: 83771 - DNA, 312 bp, Citrobacter koseri
atggaacaggttgtcattgtcgatgcaattcgcaccccgatgggccgttcaaagggcggcgcatttcgtaacgtgcgggcagaagatctctccgcacacttaatgcgcagtctgctggcgcgtaatcccgcgctggaagcagccgctatcgacgacatttactggggctgcgtgcaacaaacgctggagcagggttttaacatcgcccgcaacgccgcgctactggctgaaatcccccactccgttccggcggtcaccgttaaccgtctgtgtggttcctccatgcaggcgctgcacgatgccgcacgatga

SEQ ID NO: 83772 - DNA, 381 bp, Citrobacter koseri
atggcgccgatcatcgcgattatcgccatcacgaaatccttcctcggccactacctgggcgctcgtgaaggtttcaacggaatggttatcaagtctctgcgcggcaaaggcaaatccatcgaaatcaacaaactgaacaaaatcactgcgctgttcatgctggttacgacctggattgtcgccacgctgaacccaagcatcctgggaatgattgaaaccctgggcggcccaatcatcgcgatgattctgttcctgatgccgatgtatgccatccagaaagtcccggcaatgcgtaagtacagcggccacatcagcaacgtattcgttgttgttatgggtctgatcgctatctccgctattttctactccctgttcagctaa

SEQ ID NO: 83773 - DNA, 1980 bp, Citrobacter koseri
atgaaaattacacaaatggagatcaaaggctttaagagctttgataatgtagggcaaactataaatataaattcatttaccagcttaattggagggaatggaacaggtaaaacggctgttctcctcgcattgacaaggatgtttggtgtcaaaagctccgaaagaattattcaagttgatgatttttatgttcctcctggagatgaaatcgatactcaagatgaaagagagctatcagttcgtgtaaaattcgaatttgcagacctaaaagacggtgaggacgattcggttgcagatttctttaagcatttaatttcaagtgaagcaggagagatcccattctgtatagcaaaattaaaagcaaaatggacaaagactaatcttgctgaaggcgatatagaaagcgagttggtatgggaaataggggagtctgaaaaaaatataacggcatatgaaagatcaaaaattcatgtccactatgtccctgcttaccgagatccggcccaacaactgaagcaaacagccggaaccatcatgcaccgtctgataaatgcagtcgaatggtctgaacaaatgggggcaacagttgatgaggttgctgtttcaatcggaaatcagttccaagaagaagtcggagtccagacaataacatcttcattaggcagaaattggaaatcccttttcactggtggttacttcgaagaactccaaattaagccagtagtaaatggtattgaagatgtattaaaacatatcgacactgtgtttttaccaagtccagatactcaaccattgccaactgaaagattgagtgatggtatgaaatcattattttatttatctttagttaaatctgcatttgatattgaagatgagataataaattctgatggcaaacaattatcgatatcagtagaagcattagaccctccaaatttaacgataatattaatagaagaacccgaaaaccacctttcaccacaatacttaggaagaatagttaagctgtgtgaagagatatcagaaaatgatcgagcacaagttgttttgacaacacatgcaccatctttacttaatcgggtcgaacctgagaatataagatatttccgtcttaatgataataaaaacacagttgtcaaggaaatattattaccaagcgatgatgaagatgatgcagacaatgttgatactttcacatatgttaaggaagctgtaaaagcatatccggaaatttattttgcaaaagttgtcattcttggtgaaggtgacagcgaagagattgttataccgaaaatagcacaagtaaatggaattgaacttgatacttcattaataacatttgcgccattaggtgggcgatatgttaatcatttctggaaacttttaaatgagctttcaattcctcatgtaactcttcttgattacgatttcagaagaggcggcggtggatggggaagaataaaatatatcattaaccaattgcttaaagtcggatgtgatgaagatatagtacttcaaacagaaggaggcaaactcactttaaaagaacttaatggaatgcatgaatggaaagaaaacgagaaagatgaaaagtcatggatagattttttcgaaacctacaatgtttatttttcatatccatatgatttagattggataatgttaaattcattcccaacaagctaccattcttttattcctgataatggtggcccaaaaatcctcccaaaaactgatgctcagtatattgataaaacaaaaaatgctatcgcttcagtattgaagaaagatgctgaagatatagatatcgattcttttgaggatcatgaggaatattattggtatcgatatttattccttggcagaggtaaacctctctctcataactatgttttgaagaaactcgataacgattcattgaaaaataatgcaccagatgtattgaaaaatttgatcgaaaaagtgagggggcttctctaa

SEQ ID NO: 83774 - DNA, 1239 bp, Citrobacter koseri
atgaaccagaaatcacaaaataaaaacacgctgaacctcttcaaaataaaatcgcccgcagaactcaaaaaactattaaaggtaggggtggatataaatatgctcagttcatcgaaccagaatgcattgtttcattgcaaataccctgagcttatgaaagcaatgattagtgccggaataaacattaaccatactgacacgttcaacaggaatgcacttttttatgcaccctgcccagaaactatgaaggtactgactgagaacgggattgatatcagccatacagacacgctgggcagaaatgcgctcttttacaccaatgacgctgaatctgcccggttactggtaaaacatggaatcaacataaaccatactgaacttgaagataaaaatgcgcttttctttgcaaccaacgaaagctcagccagagaactcatcgacagtggtattgatattaaccacactgacagctatggaagaaatgcccttttctacgtctgtgaggctgacgttaagcgtctgctgattaagaaaggtatcaatgttaaccaaagggatatatatggtcataattccattaacattatcggcatagatgctgacttactggatgtttatttcgctgcgggccttgatcctgacatacaggatcgaaatgggaacagcttaatttttcacccttataaaaaaccaattacagacattttaatcaaaaatggctgtgatataaatcaagttaataacaatggggaaaccgtctttgaatacatacagaccatgatattcagcaactctcaacttgatcagtgtctcagcgtgcttacgcctttcattaaccttattaaatccagaccattaacttttaatcgccttacttttggctgccttgagcttattaaaatattgcaaagtcagaatattgattacaaaattaatgagcggtgcgtagtaaaataccccaacaaagacattaaaaaattcattactgaagcacaaaaagtcattgatttccgccatgtcaatctatgttcatggtatgacaccccgcttgtcagtttaaaaaacaaggaaattattaaatggtttataagaaacaatgttaaggtaaacattaatgatattgaagaacaggacatacgtactgaaatccttgcctaccttgcacagagggaaaataaagaactcaaaaccgttattaatccgaatataaaacatgctgccagtaaaaaaagactgtga

SEQ ID NO: 83775 - DNA, 1170 bp, Citrobacter koseri
atgaaaccttctttttatcgtctgagaaacggcattaaaaattatgcctggggtagtcggacggctctaaacacgttgtttggggtacctaatcctgatgaacaaccgcaggctgagatgtggatgggcgcgcatccggcagggtgttcagaaatagaaaccgggtcagattctgtttcgctgcttgaagcgattgcacaatctcctgggactgttttgggtgcccgaacggtggagaaatttggccagctaccgtttttactgaaaatactttcagcagaaacagcgctttccattcaggttcatcctgataaacgtctggcggaagaaggatatgcacagcaagggaatcggaccggagaagattataacgatgcgaatcacaaacctgagctggtttatgccatcacgccttttatggcaatgaatggttttcgcccttttcaggaaaccgtgaatcattttcttcgtcttaatgcgcctgaactgatgcctgcactggctgaattccgtggaaacctgacaggcgaaggatttaaacacttctttgtaagcctgatgcagcttgctcagcttgaaaaagatagcgtcctgaaacagttacaggtgagcctcgacagcggcggttttacgcatttgcagagttttatcactcgtctgatgcgtgactaccctggtgatatcggcattctcgctcccctgttcctacactgcattacgcttgagccaggcgaagccatgtttttacgtgccggaacgttacatgcatacgtgcatggaactgctgtcgaagtgatggcctgctccgataatgtactacgtgcggggttaacacctaagaaaattaatcttcctgaactggtgaaatgtacagtctttagggaaacacaggaacaggaactgagactgtcgtcaaatgataccggaattgaacagcattattctgtaccggtagatgatttttgtttttcagttattggaaattgccagcaaaaacatgttgaagtcgacagcgcacaaattctgcttgtactcagcggcatcacaacgttacgtgatacgagcggtgatgaaatgacgttgttcgcaggtcagtcggtatttataccggcatttactgcttcctattctattacaaaaaacgaactatcttgcttagtacgatgctga

SEQ ID NO: 83776 - DNA, 1419 bp, Citrobacter koseri
atgacccggtatcaatttcccgaagggtttttctggggggctgcggcatctggaccgcaaacggaaggagcagcatgtaaggcacaccgttccatctgggacagctggtttgctgagcagccggagcggttctatcagcaaattggtccgcagagcgtttgcgagacctacagtaaattcaaagatgacgtgaaacggatgaagcaaacagggttcaactcgtttcgtacctccattcaggggtcgcggttgattgatgattttgaaacgggtgcaccgaacgcagaggcagtccagttttatcatagctacttcgatgagatgatcgccaacggtatcgagccgatgattaatctttatcatttcgatatgccggaggcgttacaaaaacagtacgggggttttgagtcgtcatacgtaacagaactcttctcccgctttgctcgaacagcgtttgaactgtttggccataaagtgaaatactggataacctttaatgagccgattgtgccggttgaaggcggttatctctatgacttccattacccgtgcaaaaaagacggtaagcttgcggcacaggttgcgttcaatattatgctggcccacgcgaaagcggtgcaggtgtatcgtgaactggaactgccgggggaaattggcgtcgtcctgaacctgacaccctcgtatacccgaaatgacagcgaggaggataaaaaagctgcgtggtacgctgatctgctttttaatcgcagtttccttgatccgctggttaagcatgagttcccaaaggagttgtgtgaaattctggctatgcacgattgtctgcctgaaataaaaaaagcagatgtagacttgattaccgattcgcaggttgatttcctcggcgttaattattacgttccgcgacgggttaaagcacgggaatgtccgtatgagctcgattactttacgccagaatattatttcgagaactatattgaccctgagggtcgcttcaatccttatcgcgataataacgaaatctatccacaggcgatttatgatattgccagcaacattcgcgataattacggcaatattaagtggtatctggctgaaataggcatcgccatggatgtgcagtcggaaggcccggttcaggccgatggcgttattgatgatatgttccgcatcgagttgatggaagaacaccttgaacaactccatcacgccattagcgacggtgcaaattgttttggtgtacatcagtggacgtttatcgataactggtcatggataaatagctttaaacgtcgatacgggttctggcgcctggatttggaaaccggagaacggcaaataaaacgcaatgccatctggtttgctgaactggctgcaagcaacggatttacccccggtacatttggaaggggcgttaaatga

SEQ ID NO: 83777 - DNA, 2196 bp, Citrobacter koseri
atgcatatcccgatgaaaaaaattcttctgatttctctgctgtcggcgctgggcagcgctggagcaatggcggcggagcaatcccattttgaacattttattacccgcgacggcgctcaactaaaagatggcgatcaggttttccgctttgccgggatccacgcgccagaattgcaccgaattgaagatgacgcgcgcggaacctgtaaagccgatcctcgcggttgggggcaatattttaaatggccaaccgctgaagagcaggagaactggatcaaggcgatggtgaaaactggtgcgaaagcccagcgcgtatatgtactttccgttcagcaggagaatgatgctgactgcgcccgtgaaacgcatattcttgcacccgccacgccagacggtatgccacggctgaatgaaacggcgatgaaagtctacgacaacatgattgccgaagcagacaagcagggactgcgcttgatcctgccatttattgaccactggtggtggtgggggggccgtgaacagctcgccgcattttatggtgaaaagccggaagatttttatcgtaccgacagtaaaacctacaaagcttaccaggatgtgattcgtcaggttattacacgcaccaactccgtaaccgggcgtcattactatgatgaaaaagccattatggcttgggaaaccggtaacgaactggaagataccaacgcggcatttctgacagaaacggcggcatggatccgcaaatgggcaccgcatcagcttattgttgacgggacgtacaagaagattaacgacttctcgttgagcgatccgaacgtcgatatcatcagcaaccactattacaccaatgctgacaacaaccatcccgaacaggtgcgtaaagatctggaagcgattggcggtaaaaaagtgtatctggtcggtgagtttggcctgctggaccataaagatcttaacagcattatgcagtccatcgtgcataccgaggtgaacggtgcgaaggcggcaggcggttttatctggggcttccgcggccatcgtcatgacggcggattctactggcacaaagagtataccggtcattacagctatcacctgccgggcttccctgtcgaagggaaagcaaatcaggaaatggaagttgtgggtctggtacgtaatgcgtctgcgcaaatggcgggccttgaaaaagcgcctgcactgcctgtgccggaagccccgaagctgcgggcatctgattctccgtttgccatcaactggatgggggcgccggtaggccgtacttacgatattgagcgggcatccagtgcgaaaggaccgtgggccgttgtcggccacgacatttctgacggggtgaatgaatgggatccggccaaaatggatctcttccgcgacgactaccgcagtctgcaactcggcaaaacctattactaccgcgtgatcgcgaagaacgaaagtggagactcttctccgtcaaacgtcattagcattaagcattcgcagaaaaatctcgcaccgcaaatcacactgagtgaggcgctgaccaccacagtggataaaggtgtacagcttcacggagcctggacggatgacaatctgccggaccggcaggtgaaaactggctggagtaacgggggaaacaagaacgttcatttctgcgacgcgggcaaagacgatactcgtgcctggttctcggcacctggagattatgtactgacctttaccgccgatgatggattgctggaaagcagtaaaaagctgaacgtttctgttaaagaagcggcgggcaaaatccctgcggattactgcaactttggcggcggggcgatggatgtaaaacagggaaaactgaacatcgtgaaaagcaatgaaaatcagcttgctatcggtgatgacggtttccttggcccattcgcgaatgaaggcgacagtgtgagctggcaagtgaatgcaccgtgggccgggaaatttgccctgcatgtgaagttcaacgccaaatggggcggtaagaaaaactcattcatggtgaacaaaggcacgccgattggcattgaattcccgcaaaccgatgagaaaggacaagacatgattgtgccggtcgttctcaacgctggggagaacaccatcacgttcgggaagttgtccggtgactggggctatatgtttattaaatccattgaagtgactgcagagtag

SEQ ID NO: 83778 - DNA, 1338 bp, Citrobacter koseri
atgagaaagttaattaaatcaatacctctgtccttaatcgcccttgcggtactcagtgactatgccagcgcagacgagaaatatgactttgccctgcacggttatatgcgttccgggatccttgcgaacagtgatggcaaccgcgtgaactccgtaggcctgatgccagatggcaaatggcgactgggtaacgaggaagatacgaaaattgaactgatcccgacggtaacgctgaagtcggattcgggtgctgtggcgcggattcaggccaacctgacgcatcaaactaagtgtacggccgactggaactgtactgacgatgacggtaaagaaacgcagttccgcgagggtttcgccgaactaagcaaccttgattttgcccctggcatgactttctgggctggcaaacgctacagcagttctaacacctcaagccaccagtttgactgggagtacattcagtacaacgggactggcggtggtttcgacaagatggatcttggctttgcacaattcgatgccgggatttatgccttctctccaactgatgaaaccaaagcctatccggttgatcgaggcgatcagggttatccagatgactattctcttaacctgtggttcaagaaaatcggtggaaccgggctggatctggagttgattggccatcgcatgaaccgcaatgaaaaccatcctacagcggcgcagaaaggttacggcgccacggcggtttataacttcgacggtttttacggcctgaccggcggttattcgcgtattgccctgcaatatggcaaagggctggcagccgctgattcactgggtaaaaacggctggggatgggcgaatctggaggatacgcagtcctggcgtatcgtgctggacaacttagccagcatgggcgatctggaagtgtcgactttcgcgttctaccagaaagacaaaaactaccgctggtggaccagcgatgacgacggctggggacgctcaatgtgggttgccgggatccgcccttaccatcagatcaccaaaaacttcgccatgcagtatgagctgggttacgaatatctcgatgataaaaactacatgggagcgaacggtaaaggaaaaggcggtttgacgaaaattaccgtagcgccaacgctgacgtttgattcgggtttctggagccgccctcaactgcgtttcttcgcgacctatgcgaaatgggataaaggcgtttctgatgcactcgatggtagctacgactggggcaccggcacaatcagtgcgggtggctattcccgtagtggtgaaaccgacactctcaattttggtgtacaggctgaagtctggttctaa

SEQ ID NO: 83779 - DNA, 1272 bp, Citrobacter koseri
atgaacattcatttaatgaatgttgttgtggatttaatagagcaacgtttaacacctatcgcgaatataattacgcgaaatcagcatattacggcgatgcgcgatggctttgccctggcaatgccttttgtgatagtgggcagtctgatggtgccgctcctgtttccgccggtaaccatttctagttcatcgttctttggacaactctaccagcaactgcgtccaatgttgttgccaactttcgaactgacgctcggactggtggctctgattgtggcctttggtgccagcgccagtctcgccaaacagtaccaactcccggaaaggctctgcggattgaccggatgcctctcgtttttgttgtttattggttttcgcgataatggggctaccaacatttttctgggaggaatggggctgtttaccgcactgatatcaagtgtttattccattgaaattattcgttttttctataatagaggctggtgtatccgcctgccggaagaagtgcctgtgatgacgcgaaacggcttccagatattaattccgctactggtgatcatgttatccatcagcgtgatgaacgcgctaatgctacaggctacagggcggatcctcccacagctgataagcgaagccctccagccattgattgttgcctcggatactctgaccgcggtacttatctcattgtttatctgtaaccttttgtggttcgttggcatccacggtgcattgattgtcaccggtattatgaacccgttctggttaacctatctgtttgaaaaccagcgggcacttgccatgggcgaagctgtactgccacatatttatctgcaaggcttctgggatttttatctcctgattggcggaattggttccacgctgcctctggtatttatggcgatgcgcagccggtcgcggcagcttaaaagtgtcgggaaaatagggctgttgccgtcgctttttaatatcaacgagccgatattgttcggctttcccatcattatgaacccagtatttttgctgccatttatttttgttcccttgataaatgcctgtattgcctggtatctcacgcaacttggtgtacttgatcgagcggtggctatgctcccgtggtcaatgccttctccactgggggccgcgtggtcggcaaacggtagctggaaaaatatgtgcatgtgtctgtttgccattttcaacgcctggatgctctaccgccccttctttaaagttcacgaacgccagcttatgaccctggaaaaataa

SEQ ID NO: 83780 - DNA, 312 bp, Citrobacter koseri
atgaaaaaaatcatgttgtgttgctctgccgggatgtccaccagtctgctggtaaaaaaaatggttgaggaagcccaaaagcgtggaatggaagcggaaatcaaggcctttggcgtggccgaatttgccgaacaggttggccactaccaggtggtgttactgggcccacaggtcaaatacatgcagagtgatctgcaaaaacaagccgacaaatatgggatccgagtcgagccgatcaacatgatggactacggcatgcaaaaagggggcgccgtgctcgatttcgcactcaccctgatagataacaaataa

SEQ ID NO: 83781 - DNA, 1323 bp, Citrobacter koseri
atgagctctctgtactctaaactcatcagcgtcattgaacaaaaaatcacaccgatggcaggtgctgtcggtcaacaaaagtatgtgacctcaatccgtgatggtttcattactgctctgccctttatgatcgtgggctcgttcatgctggtgtttattttcccaccgttttcgcctgataccacctgggggtttgcacaggcgtggctgaaattctcgctggatcaccgcgatgcgctgatgctaccgtttaacttcagtatgggcattatgacgctctttatttcggttgggatcgccgcaagtctggcaaaacaccatgaactggatccgctgaccgccggaatgctgtcattgatggcctttttactggtcgccgcaccactaaaagacgggcagatctccacagcctatttttccggtcaggggatcttcaccgccattctggtcgccatctactccactgaactgtatgccttcctgaaacggaacaatattacgatccgcctcccgccggaagtaccaacaggcgtggcacgctcgtttgagattctggtaccggttctggccgtcgtcgttaccctgcacccactcaatctttttatcgaatcacaactgggtatgattatcccggaagcgatcatgtcgctggtgaaaccactggttgccgcctctgatactctgcctgcagtacttctctctgtgttggtgtgccaggttctctggttcgccgggatccacggtgcactaatcgtcacgggcatcatgaaccccttctggatggcaaacctgtcagttaaccaggcagcaatggcggcgggctcagcgatccctcacatctacgttcaggggttctgggaccattatctgttgatcggcggcgtcggctccacactgccgctcgccttccttttactgcgcagcaaagccatccatttacgcaccattggccgcatgggcgtggtaccgggactctttaacataaatgaacccattttgttcggcgcaccgatcatcatgaacccgctgtttttcctgccattcgtattagtgccgatggttaatgccacgcttgcctggtttgcgctggatctcgatttagtcagccgcgtggtctcaatgacaccgtggactacaccggctcctattggcgcgtcatgggccgccaactggagtttcagtccggtcattttgtgtcttatgtgcatggtgacatccgctgcgatgtaccttccgttcctgaaagcctacgaaaaacagcttattgagcaagagaatgaaaacgcggttgaacacgcgcaagatgcggcgcagtccgcctga

SEQ ID NO: 83782 - DNA, 315 bp, Citrobacter koseri
atggaattagaagaacaagttatgggcatcatcatcaatgcgggccagtcgcgcagcctgtgttatgaggcgctaggttgcgccaaacgtggtgactttgaagccgcagatgaacgaatgaaagaggcaacgcactatgctcgcgaggcgcatctggtgcaaacgcagctcattgaagccgatgaaggcgaaggaaaaaccaaaatgacgctggtaatggttcacgcccaggatcacctgatgacgtccattctggccaaagagttggtgactgaactcatcgacatctaccgcacccgcccgcaacaggcataa

SEQ ID NO: 83783 - DNA, 906 bp, Citrobacter koseri
atgcaccatctcggactggatattggcggcacaaaaatggaagctgtgctgctctcgccgcaaggggaatgtctctggcgtcaacggcgccctacacagaaggagagctatgatacgtttatgctgcatcttgttagcctgattgaggaatcacgctcaatcagcccagtgccattcagcgtagggatcgggttgccgggtgccattgacccgcaaagcgggctaatcaaaaactgtaattgtctggtgctcaacggccacgatctcaaaaccgatgtagctgctcgtatccagcaaccagtgtggattgccaatgatgccgattgtttcaccctctcagaagcagtggacggtgcgggtgcaaaagcggataccgtttttggtgtgattataggaaccggctgcggcggtggggttgccgtacacaagcgcttattacaaggcccgaatgccattgccggtgaatgggggcacaacccacttccaggatatacaccagcgtatgacggtcctgagcagccttgttattgcggtaatattaactgtattgaaacctttatttccggcactgggtttgcccgtcgtttcccggctgaattgacatcacagaagattatcgaagccgccgaacaaggaaacccgcaggctcgtgcacactggcagcatttcattgacgcgttcgcccggagcctcgcgtcagtcatcaatattctggatcctcaagtaattgtgctgggaggcggactatcaaacatcagcagaatttatcatgagcttccggacgcaatagtaccgtatatcttttccaattcctgccacacgcgcgttgttccggcccgatttggcgatgccagtggcgtacgcggcgcggcctggcttcctggtcttaatgcgcgggaaacatga

SEQ ID NO: 83784 - DNA, 1041 bp, Citrobacter koseri
atgacgttgacgacaggtgatgtggcgattcttcgggagggttatgttaagatgatgaaaactcaccacgcagaaaacactatgccaacgatggatgatgtatcacgattagccaatgtttccagagcaacggtttcccgcgtgctgacaggcacgcgaggcgtacgcgaagaaagccgtgaagcggttttacgggcggtagaagagctgaattaccgtccaagctttgccgcgcaaaacctggcgagtcagtcatcaagctatatcggcgtggtgctttcctcacgtgatgagaacagtggtgcacgtttacttcccgcactggcacgcgccatgaaattgctcaacaaaacactgatcgtccagtatgtcgataacgccatcgaacatgcttcttcggtggatgaactacagcgacaatgcgctgccgttgtggtgtttggccctattccgccgggaagtgccgataacgttatctcgtttgatcggccagtcgtagacgcgaaaagtcagggctacgatttcgcttttgctgctgagagcgcctgccgctatatgatcggtaaaggccaccgcaatatcgcgctggttatcgataatgatacggacgacaccagcaagcggatggtggaaggttatcgaaacgtactgcaaaattactcatttccgtttaatcgccaactggtgttaacagccaatgaggacgttgaacgcgcactgctgacgctgataaacagtctgagtaagttcaccgcaatcgtagtaaaacgcgatgcttacgcagcagaagcaatgcgattgttccgtgaattcaatatatccgtgccgcaggaagtgtcactgctcagccttgaagactctccgctggccacacagttatacccacaactgacatgtatttcctggccgatggagcccctgctgaaccaatgtgtacaacgcattaagagtctggttgaaggccgtccacttcgcgaaacggaactaccaccgatcattggtaagctcactccccgccagtcggtgatggaagtgagttaa

SEQ ID NO: 83785 - DNA, 207 bp, Citrobacter koseri
atgaatgcagtccgaccgttaagtatccttacgctgttcttcattgtttccaaccccgttgtggcccaagaggcgagcctgcctttgaaagaacaagtccatacagatgaaggtacgatttgtgtttatgaacttgcggagcatcgcgaaaagattgtgcttcctaatgggcaagactgtcctcgaactatacaaaatacccactga

SEQ ID NO: 83786 - DNA, 951 bp, Citrobacter koseri
atgacaatgtatacaatagataatttgttttgcagttggaccagagagaacgaccatgattgtatcaaagcaggaatcgacattaattcattaaatgaagatggtcgtaatgctcttttcttttgtaatcatgtggacgctgtaaaagcaatgattgaagcaggcatagaaataaacctcacagaccgttatggtaataacgcattgttctgtaacactaacccaaaaattctggaattgttaatccattcaggcattaatattcagcataagaataataaaggtcaatcctgccttcacccgaagagcaatgatataaagtgcgcggagatcctttttaactcaggagtagatattcacagtatcgataataaaggccagaccgttctgtataatctctactccgaggatacttttgattactggatagaaaaaggctgtaatattaatcacactgaccataatggtaaatcagtactcgatttgtctgtagacaatggaaagtggcattacaaatcaaacgtcagtgctcttatccgtcatatagaaaaaatcgatagcatacctgttttaatcagacatatcacctataactctttagagcttattaaatccctcaaacaaaatggtgttaatttcatgcttgcagagcatagtacagttgaattatatgttaaagacatgagatcaatctttaatgaaataaaacaacatatcgaaatcaagcacacacagttttataattgtcgcaatgagcatattggtatctacaccggcatagagagagtgaaatggtttattcgaaatggtatccgaatggacgacgatatactcagacagcgttttgactccgataagattttttcttatatcgcaggaagagagaaaaaagatctgttaaaagaaatgaagccagagatccctcgtgcgcctgtgcgaaaaagactttaa

SEQ ID NO: 83787 - DNA, 408 bp, Citrobacter koseri
atgaacagtgacatgagtaatgatgatgatataaccagagtatcaaaacgcggtaaattccatactgacaaacttcctgataatgaaatacgaagtcactgcatcagtgtcagattaaatgaggaagagttaattattctcgacagtaagagaggccagtataaaaaaggagaatggcttagaatagcatctctgaataaactcccaccggttctgcctgaaattaatcgtgaagcatgggttaaactcggcaacctttcgcaggatttaaaccacctgctgaaccatctcgacagcaaaagccctgacagcgaactgacccgtacagaactctttgccctgcgcagacaaataaaaactcttcgcgatcaccttattcctacaacctttctggagtcagaacgatga

SEQ ID NO: 83788 - DNA, 1272 bp, Citrobacter koseri
atgaaaggcatgcagaaaataaaaaggggtaaacaattcgctggtgtgattctctacagcctgaaatcaggttctcaccacaaaatctcgccttatgttatcggtggcaacatgacgggcagcactgctgcagagcttataaatgaatttgaaggtatccgactgctgcgtcccgatgtcgccaaacctgtctggcataattcgcttcgcctgccaaaaggtgagagtctgtcaaccaaacagtgggcagcattcgctgacgattatatggcccgaatggggttcactgacactcatcttcgctgctatatcatgcacgatgattcggatgggcagcatatccatataatagctaacagaattaatatggttggtgggaagctgtacctgggaaaaaatgaaaatcttgtcagtacacggattatcagtgagctggagagagtacacggtctcaccgaaactacgggtgtaaccggtagtcgccgccaggataaaagaaagccttcccgtaatgaactgatgatggcagaacgcacagcagctccctgccctaagtcacagttgcaggcccttatcgacaatgcattaaccccccgtcccgatttactaacctttgttcgcttactggaacaggaaggagtgagctgcaaacccaatatcgccacaacgggtaaaatgaatggattttcatttcagtaccagggtattgcctttaaagcctctcaattgggtaaaaaatatggctggtcttccctgcaagcactgattgattttacgccggagcatctgactttactaaaagatgcgcagaagcccacagaacctacaactgcgccagtgccagtgccagtgccagtgccagtgccagtgccagtgccagtgccagtgccagtgccagtgccagtgccagtgccatcatgcgagcctgaagaacaggttgcaaaccgggaaacgattctggagaaaatccttcagcttgaagaaaaaattcgcctggaaagacaacaggaaatagtgagagtcattcaactcaggagcaaactgcacaatacagctcgtcagataccccaccagcgtcggctgtattcgtggcttgcattgcttggccatattgcggcacttctcaggcgcaggggtatgtctctgttacatgccactgcacatcctttccaccaaatcctgcacctgcatcttctgacaccgtgtcattccatgacaacaaatcccattaaagaacaattagttaaaaataactcccatcctgcactataa

SEQ ID NO: 83789 - DNA, 387 bp, Citrobacter koseri
atgaacaaattcattacttctgcgttttttatttccgctttatttatttctggctgttcgacatcaggcaatcaacatctcaaaaacgaaacatcacaaagtctgcagtcaaaaatcatcaaaaataaaacaacgaaatcagaaataattaccgcattaggtgagcccgaaaccagaaccacacttgatagtggcaatgaggaatggatttattcgatggataacaatcagtttgatgccaccacatttattccccttgttgggctgctgacggggggctcacagacgcaggccaaaacgcttgaaatcgaatttaaaggagaaactgtcaacaaatggtcgttctctgaaaataaaagcagaatgaataccggtctgattcaataa

SEQ ID NO: 83790 - DNA, 426 bp, Citrobacter koseri
atgagtgctattaatgtattatctcaggaggaaaaatttatacatgttgttgataaatttataacccataatcacagcagcgttaataacaatgccttttataaaaaactttatgtcctcttcgcagggtatcatctgaagtatttttattcacgggcgcagtaccgcaattcatgttatcacgtcgataatattatgcagatgtttacaggagtcgtttcgaccctgaacacaacgctgctcaggaagcttgcaaatagcgacacattgctgcattgcctgaattcacttgtgaattatatttcaggcaatctggacgaagcagagcatatttatgctgatttactggcccaatatgaaaagaaacgcattacaggctctctggcttatactccaccaagctcagtggtcaggaaaagactgtga

SEQ ID NO: 83791 - DNA, 390 bp, Citrobacter koseri
atgagtaatacaataaccttatcctatacaaatgattttaaaccaatcaacaatcatatccccactgatcaatctttgcgaatacactgtgtcagtgttcgatttaataaagaagaattggatattctcaataaaaacagaggtgacaaaagcaaaggcgaatggcttcgtttaacttcccttgataggcttcctcctgttatcccctccattaacctggaggcctggaaatcactttctgacatagcccaaaagctaaacaaactaataaatcatcttgacgccaaaagcagcaatagtgagttaactaaaacagagatctttgcagtcaagaaacagatcaaagagcttcgtttgtgtctgacagcttctgaattacctaccaggtaa

SEQ ID NO: 83792 - DNA, 558 bp, Citrobacter koseri
atgaaaggaatgcaacggataaagaggcataagaactttatcaatgtcgtgaagtatgtattgaagcctggttctcgccatagaagcaccccaacggttattgggggtaacatgactggtgatcgtgcaaaggaacttatagcagagtttgacacagcaagtaagctcagaactgacattgcaaaaccagcctggcataactcgcttcgcctccctaaaggtgaagagcttacaaacgaacaatggaagctgatagctgacgattacatggatcaaatggggttcagtgacactcatcttcgttgttatgtattacacgacgacagtatgggtcagcacatacacatcattgctaatagagtcgatgccgtgtctggtaaagttcatcttggtcggcatgagagtttagtcagtggccgaataattcaggaacttgaaatcgctcatggccttactcaaaccccagcagtaagaaggttaaaatggaaaaacataaagtgtttatcagttatcatcatgataatgatcagtgggctaaggaaaaattacttacaataa

SEQ ID NO: 83793 - DNA, 594 bp, Citrobacter koseri
gtgtttatcagttatcatcatgataatgatcagtgggctaaggaaaaattacttacaataaacaaaaggttcggattgtttattgatatgtccgttggtacaggagatattgacgaagacttaccttcacaagaaatccgcgaagaaattagagataattaccttaaagatacttctgttttgattctattagttggttctgaaacaaaaaaccgaaagcatatagactgggaaatttattccagcatgtataatggaaaagtcaataaacaatcgggaatattggttattacattacctgagtctggtatgaatcgtacccatgctggacatggaagtgaagagaaagaaaaaattcatactgatatatcttcttgggtaaatgctactgaaagttatggtgaagtttttgcaaacatgccagccagaattctcgctaatctgaggaatcctgaggcttatatctccgttattccgtgggataaaattgttgataacccagcaaaactttatgcactgatagattgtgctttccatgatagagcaaaaaacaaatatgatttatccctaccaatgatgtccaaaaataggtag

SEQ ID NO: 83794 - DNA, 309 bp, Citrobacter koseri
atgaaaatactagatcccattagagataaagagctttacgattttactaatgatcttctaatgataattaacaaattcctaaccaagcaccaaaataattacagaagatggtataaattcatttcagaatccaaaaatcctttacctaatgaagatggtaaatacttttacgatactccaatagggtcagtccagaagttatactatgattatgaagttataattagtggattcaaagaggttaataattttttttcggatcaagtaaaaacaaaattcaatgtgaatattgaaaagtgggactggtag

SEQ ID NO: 83795 - DNA, 492 bp, Citrobacter koseri
atggttaaagaaattaagaaaaatgtttttgttagccatcatcataaagacgacgcgagtgttgatggagtttctcgtttagctgcagcaaaaggttatcatttacgcaatagttctattagaatgaaacctgaaaaccagcgacgagttgaggaaaaaaaacttagtgaccgaacgattgcacgtttacttagaatgaaaatgaggtgggctagtcaagttatagttgttatcgggaaagagacacatactagaccttgggtaaactgggaaattcaagtagctcatcaacttggaaaaccaatcataggtgtatatgaaaatgggttaaaaggcgatgtaaaactaccagagaatctcgaaaagtatgcaacctctatagtggcctggagaagtgatgccattatcaacgcactagaaggtaaaacttcctttgaaaaacctgatggtacggatcgtgataaagttcaaggtggaaatgtcgtatgctaa

SEQ ID NO: 83796 - DNA, 564 bp, Citrobacter koseri
atgtcaatcacaagtgtcgtattaactaaagaacaaaaatccattattgcagaagcattagaggttatgcccgaagatctggaagaaataaaaattaaagcaaccagctataaaaagacgtctttcagggacgatttctcaatgatctttaaaggtaatatggcgacactcgccagaatggatttgacgcccacagcattcagaattgtgctttatctcttctcagccattgattatggcaatattattcctgacttttcacagtctcgtactgccagagagcttggactaaataaatctaacgtctcacgtgcattcagagaattatttgagagaaaaatactgatccgtgacaccatagacaatcaggtttacctgaattctaatttgtgcgtaaaaggtattccccgtcgtttcaatgaagatctgatggataaattcaggaaatccagactggaaaccgaagactttgcaaattcatttaacttttatcgtgcagggagtaaaacaaaatcagttaaaaactccagaagacgatatcctgcagacggcattccattttaa

SEQ ID NO: 83797 - DNA, 192 bp, Citrobacter koseri
atgttgaggcaattacacaaggatgtgtctgtatttgcagtacaggtcaaggtattgacgggttttttgaaagattcaatattattgaaacctgcataccaaccgatacatgctctattaaaaatgccattgttaatgtgcaaaaaaaaagaaattatcctggttctggaaagcttaattcctatattatag

SEQ ID NO: 83798 - DNA, 1269 bp, Citrobacter koseri
atgccaaaactaactgatatgcagatccgcgcatggataaaggccggggagcgattcgagggacgggctgacgggaacgggttatatctacgctaccgtgaaactgataaaacccccacatggagattccgttataagcttgccgggaagtcacgcgctatgctgattggttcgtatgctgaactgtcattagccaaagccagagaaacagccaaagagctatccgcccgcgtatcgttaggctatgacgttgccggggagaaacaggaacgtaaagccaaagcactggcaaaaattgaagatgacaaaaacgccatgcgtgtttctcagcttgccgcacaatatttcgagcgtcagatcctgccacgctggaagcatcctgacattctccgtcgccgcatcgacaaagatataaacccctgcattggtcaaatgagggtggaggacgtgaaaccacgccacattgacgacatgctaaaaggcattgttgaccgtggagcgccaaccatagcgacagacgttctacgctggacgcgccgcatatttgattacggaattaaacgtcacgcgctggagataaatccgtgctcagcctttgaggtttcggacgctggcgggaaagaggttgcccgtgaacgatggcttacccgtgacgagttgatcagactttttcaagccatgcgacaggctaaaggttttagccgccagaatgagcttacattcaagctcctgctaaccttatgcgtacgtaaaatggagctatgtgccgcccgctgggaagaattcgacctggatggggcaatctggcatctgccagaagaacgaagtaaaaacggcgatgccatcgacataccgttgccgcccccagcagtagagtggctgcgagagctgtgcaccttttcgtgcaatagcaaatgggtattacctgccagaaagatgcaaaaccgcatgatcccccatattcaggaaagcaccctgcccgttgcgctggcaaaggttcgcgctgaaatgcccgatgtaccccactacacccttcatgatttccggcgtactgcccgtacccatcttgctgcgctgggcgttgatccagtggtggccgaacgctgccttaaccacagaattaagggtgttgaagggatttataatcgctaccaatattttgaggagcgcaaagccgcacttatgttgtggtgtgatttactggtggcactggagcgcggtgaagattacaacgtgacgcctatcataaaggcgcataagctatcgtaa

SEQ ID NO: 83799 - DNA, 882 bp, Citrobacter koseri
atgagcaaattgttccagttaaaaagttggttgaccatcgaggaaaccgcaaacaggttaaccacaacactcggtgaaaaggtatctgtagccgattgtctacaattggctgtagaaggccacattacaatttcagcaatgctggatgaaggccgttacgctatcgcatcacaggtcatcaaaacatcacaacgaaaggtttgtgaaaaatggatcattgaaaccaatagcgacggcgcagtaattagaaccattgctggtgatgagttctattctaacgagcaactagattatgaatatgaagatatagaaagagtcagtgatgtttttcgtataaatcatggcatatacgatctaccgatggttggggcagaatctttagatgttatgcacgagtttgacctttcacgcgccaaggttccccgtgaatttcacaacatggaaggtgctttcctcttaacagaatttggtctggtgaatattctgaacgcgttcaatgaatatgccatcaagtcagatgaaaatggaaaacctaaactgtacgacaaagaatcacagaggtttgttgactttagcctcgatggttatcatccctttttctatcctgctgatgggctgggtaatgtcgaattcgtattcagaaaagaaaatattgcagaatttgaaaagaaaacactcagtgataacaacagtctcctgaacctcgatgaaagccttttactgcttggcgcggtgctcagcgctttaaaaaaagccgaaccaacctctaaaaggtggacacaagaagctctcaaagcagaaatgctggataggggtttaaaattaagctcccgcttactggatgaatatttctcatcggctaacaaatcttttaaatcataa

SEQ ID NO: 83800 - DNA, 219 bp, Citrobacter koseri
atgacagcacataacgcagcgcaatcagcacttcctactactggatacatccgccgttttcgtatgccggaacttctgggtgtttccatgccaaccattgaccgctgggttaagaacggtactctgccgcgcccggtaaaactcaccgataacgtgactgcctttgatgcggtagagattaataactggctggctgagcgccggggaaaggtggcgtaa

SEQ ID NO: 83801 - DNA, 435 bp, Citrobacter koseri
atgaaaaagaaaaaccgccccgttcagcaggcggctaactcagatattcgcacgtctgatattacgtcgaccaccagcccggtacaagtacctaagcgtaccccaaagaaacaccgcgcccgcgtctatatgctgcgtactggagtagagggatggacagaaaatgacatcctacgctactgccgtctctcatccgggcgtaattatgcgtctgaactggagcgccagcttgatattcaactggagcgtatcgatgagaaaaacccggatggtatcagcgcacacctgcgctaccgtttttccagccgtggcgacgttctcaaggtcatccagcttgtgaaccataacgccgccattaatgaacatcacgggttatctcagcaggatattaccgacattctgaacctctacccggacgcgtttaacgccgcataa

SEQ ID NO: 83802 - DNA, 588 bp, Citrobacter koseri
atgaaaatcgaaaaaagccgattcaattcggaggccgccccacaatcctacgttagccagaaaaaaactcctcaagcagtcgagggggatatttccgttatccggtttgagggcatcaaagttcgcatcgtccatatggatggcgatccgtggtttatcgccaaagatgtttgtgaggcactggaaatagccgatcacaaagtcgcattgaggcgattagatgccgatgaaaagggggagtgtttagcacccacccccggtggattgcaggttatgcgtaccgtctgcgaatcgggcttttacaaattgatcgcccgcagccggaaggccagcaccgccggaacgttcgcacatcgtttcactaactgggtattccgtgaggttatcccgtctattcgtaaaactggctcctatggtgtgccgttcgccttcctgaacgaccacagcaaacgcaaagcagcttacgacaagaaggccagcaagcgcggtaaagacctgcaagcctgcaaaggtgagaagtcccgcctgatcgccgaagaagcggagctatggcgcaaatatcagcctcaattgccggaggttcactga

SEQ ID NO: 83803 - DNA, 249 bp, Citrobacter koseri
atgaccgccatccagaacaaagccttttccctggctggcctgatgtatgccttgcgcgggatcgcgtacgcgcatgagggtaaagctggcataacagtgccagctaatgccagctcctcattttctcgtcgtggtgacgaggagagtttcgagaccagtacgcgcacgcgtgaaggtgagtttctggagtccataaaaaagggcttgctgaacggctggcgatggcgaacaacatcgagggcgcaatga

SEQ ID NO: 83804 - DNA, 342 bp, Citrobacter koseri
atgattaccaaaaacttccgactgaatgcgttggcgaaccagtacacggcggcactttacaaccacatcacggctatcaatggtggcaattacttcatggttgacgcggcaggccagcaaatccgtgtgggactggtgggcggcgtcagtggcacgcgccagcttattgatggttacgcgctcgaagcactcaaagaaacataccctcagtgggaaagcatcgggatcaccatgctggagaaatgcgttaatgctggtggcctgactgataccgggcgcgagatatggcaaagcatggttgatgatatgggcgcgaccgtggcagggggcaatcatgcgtaa

SEQ ID NO: 83805 - DNA, 2760 bp, Citrobacter koseri
atgcgtaatatcgaccttatccgcgaagtcacccacgccgctgccggacaatggccttttgtactggctggcgtgcatatcaacgttcctgattcgccaagaaaacataccacctgccccgcgtgcggcggcacggatcgcttccggttcgacgacaatggtcgcggtagctttatctgtaaccaatgcggcgcgggcgacggcttagacctgattaagaaagtgaacaactgcgacaccacggaggcggcacaccttgccgctgatgtgctgggtattgattaccgggcagcgcaaaccgacccggcggcagcgagccagagaagggagcaactggaagctgaccgccagcagcgtgagcaggagcgccagcaacaggcagcagaggacacagagcagcgaagggctacgtttgcccgtctgtatgccggaatgcgccagaacgtcacacagggcgaatctgattacctgcaatcaaaagggctggctgggtttaattacccggttatgtccgatggtacgttactcctgccgctggtggctgagtccggcgcagtggtggcagcgcagaccatcaccccacagggagataagcgactcctagcaggttcagcaaagcttggggcatatcacgccgtaaacccaccggaacagccgcaggaggtgctcattgccgaaggactggcaacggccttatctgttcacctgatacgccctgacgcgctgacggtgtgcgccattgatgctggcaacctgctccccgtcgcaatacggatgcgccagcagcacccgcaggcgcagatcatcattgccgccgataacgaccgattggacgacaagcccaataccggcacggatgccgcagaaaaggctgcgtttgccgtcacgggctgggttgctgtaccgccaacagactgtaaagccgactggaacgactaccaccagcaaaacgggctggaagtagctacggctgcgtttaacgattcaatgtaccagccgcagggggaatgcgtgaaaccacaactacaggccattgagagtggtaaaactgaccaaccagagaaagacccgctaaaaccacgcattgagagccgcaaagatggcgtttactggatcacgcctaaagtggacaaggaaagcggcgagattatcaacaatgaaagctggctggcctcaccgatggacgttgtcggcaccgggcgggacgataaggatcagttcctgattatccgctggcaggcattcggtagtaatgcgctgacgacagccgcgatccccatggctgacattggcgagcgcgaaggatggcgcattctgaaagcgggcggggttaacgtcaccactaaaagcagcttgcgggcgattctggctgactggctacagcgtagcggctcgcgagaattgtggcgtgttgctcacgctactggctggcagtgcggggcatacatcatgccggacggggagattatcggcgcacctgcgcaacccgttttattcagtggccgcagttctgccgctgccgggtataccgtggcgggaacctctgagagctggcgtaacagtgttgcgggtctgacatacggtaactacgcgatgatgacgggcattgccgccgcactggcagcaccgttaatcgggctggctggcgctgacgggtttggcattcacttctatgaacagtcgagcgcgggtaaaaccaccacggcgaacgtggcgagcagcttatacggcaacccggacttactacgcctgacgtggtacggcacggcgctgggtctggcgaacgaagccgccgcacacaatgacgggctgatgccactggatgaagttggacagggggcagaccccataagcgtgtcacagtctgcttatgcactgtttaacggcgtggggaaattacagggagcaaaggagggtggcaaccgcgatttaaaacgctggcgaaccgtggcgatcagcaccggggaaatggacttggaaaccttcatagccaccgccggacgcaagaccaaagccgggcaactggtgcgcctgctgaatatcccgctgagtaaggcggtgcgcttccatgaccaccagaacggcaaacagcacgccgatgcgctgaaagacgcttaccagcatcatcacggcgctgccgggcgggagtggatcaagtggctggcaggccaccagcagcaggccattgataccgtgcgtgagtgtgaagtccgctggcgcagtctgattcctgtcgactatggcgagcaggttcaccgcgtggccgcacgttttgccattctggaggcggcgttattgctgggtgaagtagtcaccgggtgggatgctcagacgtgccgtgatgccatacagcacagctacaacgcgtggttgcgtgagttcggcacaggcaacaaagagcaccagcagattattgagcagacggaggcgtttcttaatgcgtatgggttcagccgtttcgcgccgttcccctatagttctgccgacatgcccgttaaggatctggcggggtatcgtcagaaggggaaccacgacagcgatcctgtaatcttctacacctttcgcggcgcattcgaaaaggagatcgcgcagaactttaacccgacgcagttcgccgaagttctgaaaaatgccgggatgctgaaaccgccagccagcggacgtggttatcagcgtaaatcaccgcgtatcgacgggcgacagattaacgtttatgtcctgaccttccgacctgaggactacgatgagccagaggaatag

SEQ ID NO: 83806 - DNA, 570 bp, Citrobacter koseri
gtgagagacagaacgcgcagctatacaacggacttaccccgcattggcctgcaattccttgcgcacatccgtaacgagctggtggacgctgtaccgggtacacaactttcctgccagacagagtgcggaaccctgtatatattccgacaggcagacggctacgccatgacaatcaacggcgttacgaggacaatcagaatcactaccacacaggctggctacggccttcggcaatggtacgtttgcccgcattgcgtgaaacgggtagcaaagctgtatatcggctcgaaggatgtaggctgccggaaatgctggaaactccactacaaaagccaaagcggggataagttggatcggatgcgaatgagcatacgccgccaacggcacgccatttggggagacggtgagcagtttcgtaacctgtttaaccacccgaacactttccctaagccaaagggtatgcgatgggagacgttcgagcggaagttagccaagcttataatgtatgaaactgcgtactggcgggcattcagtccggttgtagataagattactgtgcgtgtgcggtag

SEQ ID NO: 83807 - DNA, 975 bp, Citrobacter koseri
atggtcgccataaaacctcatctggattacgcagcgcaaataacaaagctgaaaaaaagaggtatgaattttgatgatctagatgaaaagcaagctatcaaaaaactttcaaatgttgggtattatcgcctttctggatactggtatccttttagaacattaaagattcctgcacctttagataaaaacgaatcccgacgcgaagaaacatttagacctaatacatccttctcattaatctacaagcattatctatttgatctaaagcttagacatattatttttaatggcattgagcgcgttgaaacttatctcaaggccaaatttgcctatgagttaggaaaactatcccctatttgttataaagacaaaaatttaattcaacatcatcatacaaagaaccatgatgcgtggcttgataagctagatagctacattgacaggaacaaagacaaagactgcataagttggcacatgaccaaatatggagagattcctatctgggccatagttgaagtttgggattttggtttattatcaaagttttatggcatgctggaagataagtacaaacatcaaatatgtaagtctatagggttcaataatccaaattctaaagatgtgagagatggattaaagacagccttagagcatcttaatataatcagaaacaaatgcgcccatcattcacgcttatggaatactgacctatccagttcgagaataagcatccatgtattagataacttagatacaaataaattaaagcttcgagctgatagccatgagttagaaagaatagcagggattgtatttcttttgtggagcttaaatctgagaataagtgaccattcaaaatggttagaagatttagccgagcatattgaatcttattctaaaatagtatcgcttagctcaatgggctttgataatggtaagctaaccaagttgaatatactgctgggtaaaaattaa

SEQ ID NO: 83808 - DNA, 396 bp, Citrobacter koseri
atgaatcgaccaaaggcatctcgctcatgctcgctacctatttccagttcgttatccgtgatcaaactacctctatccgttatgaaccagccagagaacaatcctccgtcgcgtttgctggcgctggtggagcgaatggaaaaagccgccgctgttttgattgtcggtaggcaggacattccccctcatccatacaacgaaaacgccgtgctcgctgttgtggttcagaagattagagacggtttcgacaacgggcgcatcatcgccgaacggatcaatgctgccgcgtatcagacaaaagcaggtaaggcgtgggataaggatatttacagcacgtggaagggtaataagagagtgtctttaatttttacccagcagtatattcaacttggttag

SEQ ID NO: 83809 - DNA, 210 bp, Citrobacter koseri
atgtatgccatcagaccaggcgacaattcccccctggatattcccaccagcctgccggtatttattagactggctatagctggcgcctaccgtcgcaaccggcgctcgccacgtcaggtttccacctgcgcttgtttcattattttgccgctgatgcgcaagattcgcgccatagctaaattgatctcgaccacccgcaatgccgcttag

SEQ ID NO: 83810 - DNA, 297 bp, Citrobacter koseri
atgactatgcgcatccatcaggtaaaaattgcacctaagtattttaatgccgtagtcgctggcagcaaaaaggcagaacttcgtaaagatgatcgcggatacaaagttggtgatgtcctttctctctgcgaatggaagcacggttcatatactggtcgggaatgggccgctgttattactcacactttgccgattaatgaagttgtggcagtggaagggcaatgggtaatcctttctattcgctcattaacgccgcttgaggctctcacctatgtcatttcagggggagctatatga

SEQ ID NO: 83811 - DNA, 186 bp, Citrobacter koseri
atgactatgaatcgcataactgatcaaagtttaaatcaacttatagcgattgagtcactggcaagcgacaacgccagtaatgacaaccgttcggctgattatatttatcattcagatgtagtttcagcattagaggaactgcaacagcgtcgcaaagctgatacccagcaaggcggtgcggtatga

SEQ ID NO: 83812 - DNA, 582 bp, Citrobacter koseri
atgaataccgataatatgacaattcgccaacgtgcagagcaatggcttgatgaaggatatttattcatcgataccgaaaccacagggctgggagacgacgcggaaatagttgaaatatgcattattgatagtcatgggtttactatgcttaatacgcttattaagcccactaagcctatccctgatgaagcaatagccattcatggaattactaatgaaatggtcgcttttgcccctgcctggactgatatatgcggggcagtggaggaactatttcggcgatttgggtttgttatctataacgccgattatgatctccggttaattcgtcagacctacgcattgaatggaagaccttctgaaggtgcgccatggatgcttgctgctcattctgtttgcgcgatgaagctttatgcagagtatcgaggcgagccgggacgatttaatggctataaatggcataagctggttgatgctgctgcgcatgaaggagttgtgatcgaggggaaggcacaccgtgctttagccgattgcaaaatgacattaggtgtcatcaaagctttagcgcaaggcggtgcctaa

SEQ ID NO: 83813 - DNA, 255 bp, Citrobacter koseri
atgcggcccggcttcgccgccaccgccgatgagatgaacatgctgatcgataaatcccgggcagacgatatcaccgtgaagatcgacctgctggcaaccggggaagtctttcgcagcgatagtcggcgcaatagcgacaattttgccgttggcaaccagaatgtcctgctggcccagatcgtccggggcatatacgtgtccgcgctgaaaaagcgtcagattaagaatggaacagtccatgatagtcctttttaa

SEQ ID NO: 83814 - DNA, 480 bp, Citrobacter koseri
gtgagaaagacttcaagagccgagaagatttgtacggtctgtgaaaaaattggtgatattggcgactcggtgaaaggctcatcgagtcgcatgaaaaacaaggtgggggcacaaaagggggcatttataaagatgaaacgagaaaatatgtatgtttatcaatggttatgtggggtgtgttatgttcctattatcatccaaattcttcccaggtctaccgaaatcaactcaaagcccgtatactgcgccttctggcccgtatcttatctcctgttatcaactggactcaaccggaatcaagttacagttgggggcacaagtgggggtattctgtgctcggtccagggatatgcccccaatgaagctaaaatgcccgacaggttgatgtcgctaaatccagagagaaagcctgcaagctggcagacggagctggtttgtatcttgaagtcgttccctctggttctcgatactggcggatga

SEQ ID NO: 83815 - DNA, 1122 bp, Citrobacter koseri
atggtaattccatcagaaattataaatgtaatgcatgcacaatccttgaggacattcttgggtgagcattgctctaaaattgtaattattgatccaaaagaaatatggttcagtgaaaccttacaaggcgcggtcattctattagttgaaaagaaaattaatctggattgtgcatcacaaggtgtcggaattaaaggggtcagtggcttcgattttttacaaaaaaatcccgaagatatattcaacgaaacaaatacaatcaatggtgataccgtaaaaggtaagtggacaaaagccgtcctagataaaaatgaagttaaccttcttaatgagattattaaacatccaaacgtacactcttttgatactatagcaaatgttgaagtgggaatggtcacaggtgccaatgagtttttcctcgtaaataaagatgtagttgacgcatttgatttaagtgagttcacccatccaatgtttggaagaagtcaacattgccaaggtgttatatacgatgaggttcaacatttagctaatatagagaataagcttccagtttattttttatatttggataaagaatttcatgaactacctaaaaaaacgcaagaatacattttcaatggtgaattacagggctttcacaagcgatataagtgcagaattcgaaaaccttggtataaggttccctctgtatttagcacaaaattagctatgcttaaacgatctcatgatgctccaagattaatttataatcaatatcaagcttatacaaccgatacagcctatagaattaaacctaaatctaatattaatgaggaaaaattgtcctattgtttcctcaatcctttaactgctatattcgcagaactagaggggcgttcttatggtggtggcgtaatggagcttgtcccttctgagataaggaagctgtttatccctctaccggaaaaaattgagttcgatttatctgagttaaataactctatgatgaacagatccatggagcaaattcttgcagagcaagggaagaaaatattctctcacatgggatatggtgacgaagtagttgaaaagttaatacatatttggaataagttaaaaaatagaaggcagcgaagttag

SEQ ID NO: 83816 - DNA, 1125 bp, Citrobacter koseri
atgactttaaaaaatatactactacagggtttggttttgggagatgaacatattcattcagtaaagaatgtgttatcagatgaaaaaaataataagattataattagcgtggcatttgcaagaaaaaatggagtgcatctgctcaaagatactctctccaagttcaaagataaaattgaactattcgttggtattgctaatggtgtaacctcaaagcaagcggtagaggaaatcattagatgtggtatttctccatatttaataaatatgggaacagtatcgagaatatttcaccctaaaatatatctcgcttttcagaacgaaggcatacatattatcactggcagtgcaaatttaacatattccgggcttagtgaaaatatagaaattagtacgcatgtttttttagaaaagggaacatcaaattatgatattttaactgataagattgattcaagttttgaattattaaaaaacaaccatcctaacaatgtaaaaaaaattaatagcaaggaagaattaaatattttacatgaagatggttttttagaagatgaggatattaaagactcagcattaatactaagtaaaacaaaaactaaaaaccctaaatttattcctgcattcccaaaggttattaaaacaaaacaattaaccagcattgctagccacatatcacataatgaaaatcatgtgggcgaggtctggaaaagtaaacctttaacaagaagagatttaaatataccgacagctacaaaaacaaatccaacaggatcaatgtttttcaaaaaaggattgttcagcaacattgaccaacgacattatttcagaaatgaattatttagcgaactaacatgggttatagataccaatcctaataaaaaacatttggaaagagccgaagccatatttgaaataatagtcaatgggatttcttatggtgattttaaattaaagttaacacatgacagcagaacggatagtaaaacatataaacaaaataatagtgttacacagatccattggggaggagctaaaaattatatttcaagagaagaattactaggaaaaacaatgattttatatcatattggtggtaataaatatcaaatttctgttgagtaa

SEQ ID NO: 83817 - DNA, 426 bp, Citrobacter koseri
atgccattcaacttatgctggagaaagccaaacctcccagagggggatctgcaactgctggttcaaggacatgcttctggcgtgttacgccttacacaggctggctatactgacaatggtaaagttattgatcaaacggaatatttccggtatcaggtattctctggattgctatggtatgaaattgatggaaaggaaatggctgaggcaaccttccatttacaaataaaaggtacatcggtaggtacgtttaagcttaaattaagccataaaccttcatgggaagcaggccagaataattatacaaccggattgcactgggatgacgccaaatatttgattcagcgtcgtgatttagtagggtgtgatctcgaactatacaaggccatcgatgaaaacttcgattttttaatttcaatacattga

SEQ ID NO: 83818 - DNA, 1245 bp, Citrobacter koseri
atggctctcaccgatgtcaaggtaagaaatgccaagcccgccgacaagcctgtaaagctcactgacggcaacggcatgcatcttcttattcatcccaatggctccaaatactggcgtctacaataccgctttgcaggaaaacaaaagctactggctcttggggtctaccctgcagtctctcttgctgatgcccgtaaccgtagagatgatgccagaagattaattgctgctggtatcgacccctccgaaaagaaaaaagcagaaaaggtagagcaaagcggcgctcttgcttttgagtccgttgccagagactggcatgcaagcaacatcaaatggtcagaaactcacgcagagagagtgctgaacagccttaccaaccatgtgttccctgttattggtaaacgaaacattaccgacctcaaaacccgtgacctacttcaaccaattaaggcggctgaaaagtccgggcatcttgagattgctgctcgtctccagcaacgtatcaccgctatcatgcgatatgctgtccataacagtattatcgatagtaatcctgcacaggacttagcaggtgccattgcaacagcaaaacgagtccatcgcccggctcttccatttgaacgcattacagagcttctcagccgtattgagagctatagaggaagacagctaacccgcctcgctgtgcgactcactttactgacttttgttcgttcaagtgagatgcgttttgcccgttggtctgaaattgatttcaaaaatgcgctctggacgatacctgcagaacgtgaagaactacaaggagtgaaacactccagccgtggctctaagatgaaaacccctcactttgttccattaagcaagcaggctttagccatcttgagagaaattcagaagctcagtggagatcaggaaatcatcttcattggtgatcattatgcctataagcctatgagtgaaaacactatcaacaacgcgcttcgtaaaatgggctatgacaccaaaacagaagtttgtggacatggtttccgctctatggcctgtagtgccttaatcgaatccggcttatggtcaaaagatgctgttgaacgtcagatgagccatcaggagcgtaacaacgtccgcgctgcttacatccatcttgctgagcatcttgatgagcggaggctaatgcttcagtggtgggctgattatctagatgctaaccggaaagggatattacggccatacgattttaaaaactga

SEQ ID NO: 83819 - DNA, 378 bp, Citrobacter koseri; identical to SEQ ID NO: 83255

SEQ ID NO: 83820 - DNA, 843 bp, Citrobacter koseri
atgaccaaagcggagatcgccagcgctgttaatgagtggttcaacattgaaaattacagcgtcctgcaaaatttgacagtggaacagcttttccaagagatagagaacaggattgtcgcctatcgtatggaacaaaaccgggctgagttgtctcccgaaaaccttagtaggcatcagagatattacgaagagttgattgaaggtaaagtcgtctttggtgatattttcggtggaccagaaaaaagactatcttccagctatgccatcaagcctgtaacacaccaagggctatgggaagtggcggggtatgttgcggctttcgataaatacgttaacccggaaggaaaacccctacctcatatggaagtctcgcactatctgaaggaagccgaggtaaacaacgaagggctgatgctggttcaaattaatctggcagaaacatcacccgaagaaatcatcaatcacctgaaagtcatggttcctgagtggaaacagcagctacaggctcctgagcctccagccagagattttcgctttggggtcagcaaccttaaaaaaatactagattacaacattatccccatcatggacctgctgtactgggcgcaggatgaagaggtcaggattggtatgccacaactgaccagctttttataccctgatgagtttaaagacggtatccgtgatgttgataaggtgaagtcaacagatcatcctctggcagttaagtatcttacaaaccttgctcactatcagtcttttgtagattttacatatagatacgacgacagaagacactggaaggttcaggatctcatcactgacgaactcggtgaggactga

SEQ ID NO: 83821 - DNA, 219 bp, Citrobacter koseri
atggttcaaatcaaaacagataaacatcccaagcttattcgtttacctgaagtaatgagcagaactggattcgggaaaacatggatatatgagcttattaaagcgggttgctttcccgcacagataaaaacaggtgtgagagcaatcgcctttattgaaagtgaggtggatgcgtggattgaacgagctattcaggcatcacgaaaacaagcagtttaa

SEQ ID NO: 83822 - DNA, 318 bp, Citrobacter koseri
atgagtaaagcaataacagaagtccacgaaatcaaagtttacaatgaatctaccagattattccttgtaaagtcattttattgctatgagctttatatcagtaatatgcaggaatacatgggcgatagatttgttaaaatggttgaagacagaatatatatggatgatgtttttgacaaggtaatagaaaacagtaaggaaggatttaataagtttcttaaggagtgtaaaagctcaggctctctcagagatgttttattcgatgaggtcaaagtgaatctgagacatatgcacaacgttatttttaactcaaactaa

SEQ ID NO: 83823 - DNA, 237 bp, Citrobacter koseri
atgaatgataatattgcaatatcagtaagtctgctatgtgagcaaacgcctgaaatattctgcaccatccaagcaagcgtcagtacgttcattgcgctatgtgggtattcagcagaggaagtaatggatgatgaaaaccttacagacgcactgaacaggtatgttaataacgagcttgtcagtgaaatggatttaagatacggatcagtgatcattaatctggtttataaaaagtag

SEQ ID NO: 83824 - DNA, 297 bp, Citrobacter koseri
atgtctaaagaaactatagtaacaaataagtctacacagctgttccttgatcttgctataagatcgttagaggcaagctggaagctttttcaggaagtgaatggagatggagacgctaatgactatcttgatgatcctgatttcatgagtccatttattatgaacatcattgaccatattcagaataactttgagagatttacaacccaagaaggtgatagcgggagtattaatgaagttaacttcgagcagattgctgctctgttagtgtggcattcagaacgattcaggaaatga

SEQ ID NO: 83825 - DNA, 237 bp, Citrobacter koseri
atgattgatgaatttcatgtgttgtatatgtacaaaaaaatccaagccgaagctcaggcaacagatatgaaaacactggaacgtttattgaagaagttccgcaaagttgttgcggagcgtcgggaagaatactatcaggagattggtgagaagaaggctcaaaagctaagggcagaaagattacaacggttgcttaagaaaatggagcgtgatcgtgtatcaccacatgagttataa

SEQ ID NO: 83826 - DNA, 468 bp, Citrobacter koseri
atgaggaaagtaaaattagacaatgatgatttaattcagtatctgaacaccattaaagcattaaaaaaatatccaacgatgtctgaatacagagaggaatatcgcaggctaagaaccgatggctcacccttgattgaagcaaaaaaatttaaatcggcacataccgaacttctgagattagacaggaagaaaaagtcactactcgaaaaatttattgaagaactcaaccctgtaagtcacgcatcagcccttgcatcaagaaagcttgaaaaagtacaagagtccattatctaccgaaagtcattacttgagaaaagccctgatgaactcgtcgctctggtcataaaacagcgcacagaagctgctattgagttccagcgttctgttgaacagagtcttgagcaactttcagatatatcttctgattttaatgcatcagcaacaaagcgccgaaaattttctatctaa

SEQ ID NO: 83827 - DNA, 447 bp, Citrobacter koseri
atgatccgcttatgtaaactcatgcagcatggaaacctcattgccagtatatctcagtcggcactcgcagaagagcttaatatgagcaaatctaacgtgtgtaaatgctggaacaagctagtaaataaaggcattctggtcaaagaagggaagcataccatgataaacgcaaatctctttctgaaaggccagtacagaacattaaatgccacaaggaaagaatatgttaagaagtcgctgagaacgaccagtgaaggcatagaagacgtattcgtcaccgtttataaagatacggtacttacaaataacgcagaaaaaacaatcgataaagaaaatgataaacctttactttctactcccgacgaagatattgactgggactctgtttcagaagatggcatttttgttgattatcctgaagatattgatcaagaagaaagaatatag

SEQ ID NO: 83828 - DNA, 1023 bp, Citrobacter koseri
atgcagtctaaccgattccttaatttagtggctaaagaacctgtacgtattaatggtgaaccgacatttcgctcgctccacaatattaagttaatgaaattgcaaaacgtaggcttatctcgtgcccgaaaggatctccgatttacgatgcatgtaggtcacgacatcaatcaagtaatcagtgagattgaaaaaggtagtgcaaagaaatccaacgtttttgcaactggtttcgaacaaggtgatagaactacagttggttgctcgcacaaaggtaaaatttgggagatgaactcatcaccaattaattattgggtcgaatggtgtaaaaatatctctaagaaacttaatgataaaacaatagacccaagtgatttattgaagaatgtcatgcgagcagagaaaattgagcaaaaatggcctgatggccttttttactcagactggcctgagtccatagcaatcgagaatgaacaaaaaagatctcttatttttcagggggagaggttcaaccttcttgatattgttctgggcaagccaaattatgatgatgacctaactttaagtattcctgtgtacgtcgcagatacagatggattggaacatctaattacaaagatcaatattaagctattggaagatggttacaaaacacactgccccggtttgaaaatttcattatctcaagaggttccgttagatgaatacttggatagcgaaccactggtgctactaagtgtcgatgggtcaatgcttctaggtaattatcgttatttctcgcccaacagtgtagatataaaattgccaatctctctacttgaggtatgggattgggggacaactaaaattcatcaggaatcaatgcgtgcagaaaaacgctttgatagtgtacagggatttacttacaacaagattgctgatgattacagtatagtattcaatgatgatggtgcaggtgaaatcgccgatctcgttgcaattcgtgaaagtaaaaatgtcattcatatggttatatacgggtga

SEQ ID NO: 83829 - DNA, 567 bp, Citrobacter koseri
  misc_feature (535)..(544): n is a, c, g, or t
ttgagaaaagatatacaagcgggctataaccatctgatgttagtgcgggctaaatcacaaaaacgagctgaagccctcttcgaaatttacaggactcatgcggatcttaacccggtattaatacatagcaaagttccaaaccaagctagaattttcgaagagattgtcctgaaaaaataccgaatcatcgtttgtgtggacatgctaggggaaggttttgatttgcctgaacttaaaatcgccgctattcatgatcagcacagaagccctgcagtcacattacagtttattggccggttaactagggttgataattctcttgggaacgcaaaatttgttgccaacattgcaaaccaaaagaccgatcaccaaatgtcagagctctataaagagagtgctgactggggttctgtgatccgggatgttagtcaagaaaaagttagtaaggaaatagaaaaagagtcattcagtgggcagttttcagatgagaaagacgcagatactatctttgggttgaatccgaatccaaagattnnnnnnnnnntgaagcagatacagtcatcgtag

SEQ ID NO: 83830 - DNA, 183 bp, Citrobacter koseri
atgaatttaagagagatatatatggctatcggaagatctggaaggatcgtgttacaagtagaccctgagttaaaaaaaaagctttactctatcttagctatggagtctataacccttaaagattggtttactttaaaagcgaaagagcaaattgaaaataagaataaagagaatgcgaaatga

SEQ ID NO: 83831 - DNA, 999 bp, Citrobacter koseri
  misc_feature (969)..(978): n is a, c, g, or t
atgagcagtgtctacgatagcctcgatccccgcgtccgtaagtgggtttacaagcaggggtggtcgacattaaggcccttgcaggagagttctatcccggcaattttagcccgtgatcgagacgtgctaatcagtgcaggtacagcagcgggtaaaacagaggctttctttcttcctgcctgttcggcagttgcagatctcacgaatggatttggcatcgtctatatcagtccgttgaaggcattgattaacgatcagtaccgtcgtcttgggagccttggagatgcattggaaatgccagtgactccctggcatggggatgtaccacaaagcaaaaagaagaaggctcggacgaaccctgctggcattttactgattacacctgagtcacttgagtctttgctcataaattcaatgggctggctcaaacaggcgttttcttcagtcgcatacatcgttattgatgagtttcatgcttttattggctcagagcgtggtgtacagctgctttctctgctcaatagaattgaccatgtgctaggacgccaggtaaatccaattccccgcgttgcgttgagtgccacgctgggggaactggagaaagtgcccgaaatgttgcgcccggacaaacgactcccctgcgtaactgttacagatagtaatagcacggccactcttcaggtacaggtcaaagggtacctggagcgagtgatccaaaaagaggaagaacttcagagttcaactgaacatgacgtttgcactgacatttttagactttgccgtggcgattctcatttggtctttgcaaacagccgaaaacgcactgaaagcattgtggcaacgctgagcgacatgtgtgaggaacaaattgttccgaatgaatttttcccccaccatggttcccttgccaaggaattacgtgaggcgcttgaatctcgtcttcagaaaggaaatttgcccacaacagcnnnnnnnnnncaacagctgtttgtacaatga

SEQ ID NO: 83832 - DNA, 249 bp, Citrobacter koseri
gtgctggcgatggtggtgctgggcggtatgggccatatccccggagtgatcctcggtgcggtactcctgaccgccctgccggaactgctccgtagccaggcggcccctgttcaacagatgttgttcggcacggtactgattgacccggaaattttgcgtcagctcttctacggccttgcactggtgctggtgatgctggttcgcccatccggtatctggccggttcgccacaaagaggtgaaagcatga

SEQ ID NO: 83833 - DNA, 159 bp, Citrobacter koseri
atgagcagaggtaaattcaggaaaacggctcgcaaaattgttgcgccgccaggcaatatcgccccctgtaggcccggccagcaaagcgccaccgggcaatttccaccccctgtaggcccggtaagcgaagcgccaccgggcgatacgggtgcttactga

SEQ ID NO: 83834 - DNA, 234 bp, Citrobacter koseri
atgcccattaccccgccgccgttaaggaaccgttcgcgtcaggtaacgcccatcgtttatctcatcgctcccttatacgttgcgcttcaagtgcggctttgccgtgtttttcggagtaatgcgccaaacctgatttgctgcgttttaaacgcgcaaatctttacttatttaaagaacttcggcattatcttgccggttcaaattacggtagtgataccccagaggattagatga

SEQ ID NO: 83835 - DNA, 186 bp, Citrobacter koseri; identical to SEQ ID NO: 25071

SEQ ID NO: 83836 - DNA, 321 bp, Citrobacter koseri; identical to SEQ ID NO: 25070

SEQ ID NO: 83837 - DNA, 642 bp, Citrobacter koseri; identical to SEQ ID NO: 25069

SEQ ID NO: 83838 - DNA, 861 bp, Citrobacter koseri
atgaaaaaggctttaatcaccaccgtggctctggctgtagcagctctatctggctgtgcatccaccagcagttacgaacccacagcgtacaaaaccaatcacagtcgcgcttacaacatcgcggaggccggtggcctggtaacaggcatccaagacgcttctgttccgcgtgacaagctggagcgtctgaccgacaccaaaacgtttggggcagcctacgtgctgtctggctacatgtcccctcagctcggaatgaccgactggcaaggtggcttggtcaaccttgcgaactgggctatcggccccaaacagcatggcgctcgcaatagcttgatcgcttggatgcctgctaacgaagcagtttcaccggcagacgctcaggccaaatttctttcacatgtgaaagtttccattgagtcagcgctgactgatttgggtgccaatttcacgcttctgtatgacaaagatggtcgcctaacctatcagttctacaagaatgaatggggttgcccgacgtgggtgaacggacaaagtaaggtagctgacatgtgttccgttaaggtgaaaatcgtggagcctcgcctagggtcagctcctaattttgtctctggcgttcaaggtacagcgtatgccttcacatcaggccatgagaccgcatacaactttgtgaatgtcggtaatggggcagcaagccatgctcctcagcaagcgatctacgcagctattagcaaacagctaccagcttgggcctacctctaccttgctccaaaatcggttgagctggataatggcgaaaaagttgctttcccttaccttcttgatcagggaaaagcagagttatttgtttacccagaagcgtaa

SEQ ID NO: 83839 - DNA, 2799 bp, Citrobacter koseri
atgcgaagtcataattactttatgaaagctgtggcctcgctgttgacagtaaccatgtctgcgctgccgatacattcctacgctaacggtagccaagaccaggacatcacagcggtgggtaaagaggcccaggctttcggacaaaacctctcaaactcattcaagtcgagctcggggactgtgcaagatggcacaatctctatgccgacgttgaaagacggtcaattccaaatgaacggggggagtcagattaatgtcaatgatctattccccggaacgagcgggaccaacaataaacctgatagttattacttccctgatgccaataaacctgatgtgggcggtctgcaaggcatttacgactctggcgatgacatggacagcgtggggaataatgcaaaagggtcgctgtggagtgatgccaatagtgctaatccatcaatctctggtgcggcatacaaggttcttctcgatgcctctaatcgatcacgccctgatttcagtaatgaccctgtactaaatctaagcaaaaagacctatgaggatatggacctcatcgcaggtggctttggggattgttctgccgaaacaaccatcaatcagaatactatcaacgcccacattccagagtatgaacggtgtcagcgtgttgtagatcaaagcgcggactgtgaggttgtccatgactacgatgcctctgtggtgaagcactatgatggtccatataacctcaaatcttgtggagaaggctgtactgagttgtggattggccgagttggtaacgactactggagtggcaactgttcgatttatgaggaatacacgcgggtccaagtcagtaatccagacgccatagtgtctgcaactcttgagtacgccaagtgggatgactacatgcaagtttgggttggtaaatcaggtcaggaaactaaagtatggtccggccctgacggcaatttccctccagaaacggctggccgatgtgaattgtcaacaagttgggagcgaaaccctaatattgatgtcactccctatttcaagaatgtgaaagatggtgatgttgttacgtttaagatccgcgtttcagtaactggcgcaggtgagggttttggccgcataaagctacgctatgacccatcaaaagccattaccaaggatgagtgggctccacagagctgcatggattcagccaaaggggttgtagatggttttgcggaaggcgagatcacatgtatagatgacccgactgatgctacgggctgcacagtcatcaatgggatcaaagtttgcgaatctcaactcaagccgtcacctttgcctggtattccaaaactatgcaaaaaggttcgagttaaagctgactatgacttttataaggggcaaatggactgctggacagaccctcaaggtgaaacgcactgtccggtaaacacgggcgggaatctcgatagctgtcagaaatatgaagaaaaccctcagtgcggcttcatcagttccaaatgtgttgatggtgctcagggaagttctggtacgtgctacgtccacgaggatacttatgactgtggtacagatgtttctgttccgaccttggaaaaggaaactgagtaccagtgcggtgggcctatacgctgcatgggagatgactgccttgatttgaccaaaacacaaagcactgattttgctcgcgctactgcgttgctcaatgcagcccaattcatgacgcaggatatgagctgcacaggccaagatggggatgacaatcctaccggggatgaaaacgttatttgctctgcttttgcaggggaagctggcgaatgcaagatagctgttgggggagtttctgattgctgtgaaaagccaaccaatatatctcttgccgattatctgaacctaataatggccgttccaaagctcgatggcgcagtgatggggctgactgatggtaatgcgcttaaaggtgcttatcaggtacttagggaacctgcccttcaagggtggacagaagtcacaaaaccgttcacaagttatatagagaacgtttcaggtgctgttgattcgttcttccagcctgtagagcagtttgttgatcaactcattgaccagctcaaagagcaagtcaaagaagtgatgatggatgtcatgaaatcagcaggccaagatgcagcaacagagcaggcggctgccgcagcatctgaacaagctgccgaagcaatgatggagactgcgacaacatggcttagcactgccatgacgatatataccgtctatgtcgttgcgatggtgatgatccagatgatttataagtgcgaggaagaagagttcactatgaacgccaaaagagcgctcaagaattgcacctatgtaggctcttattgtaaatctaaggtgttgggcgcttgtattgaaaaaagagaagcgtattgctgcttcaattctccgctctctcgtattatacaagaacaggttcgccctcaattggggcagaactttggagaccccaaaaatcctcagtgtgaagggattccactagataaaattgccgaaattgattggagcaaaattaatttggatgagtggcttgggatattacagcagaacggtaaattccctgatccggcctcaataaatctcgactcgctgactggagcagggaatgacttcaatattgacgggacgcggaagaatgctcaggaaagggcgttggagcggttggaagggattgatattgacgcgaagcgaaaagaggcgacaaacagcatagaccctcaaacaggcgcgccaactggtggtggtggataa

SEQ ID NO: 83840 - DNA, 1008 bp, Citrobacter koseri
atgatgcaaaaaattctacgggtcattgccgttagcgcggtcttttgggttcgttcggtatcggctgaccctgggtgccagaatgcggaagtaatcggcggaaaactgattactgacatctgctggagctgtatttttcccatcaaagtagcaggggttcctataagtggtggaggcggatcattcccgagtgaagccgtaagcaaccctctgtgtatgtgcgaggataatctaggggtccctcggcctggagtcaccacttctatgtgggagccagcacggcttgttgaatttcagagagtgcctggctgctcatctgtcttgaatggtgtcaggttcccgtttgataggactaaccaagggcatcatggcatgggagacatggatggtggtgatggttcttttatgcactatcactactatgcgtttcctctgttggtgatgctcgatttatttattaagcagacctgtaatgctgatgggtatatggatctcgacatcatgtacatgtcggagctcgacccgacctggaacaatgatgagctcgctttttttaccaatccagaggcggcggcagtagcaaacccaattgcggcggctgcgtgtactgctgatgctgtctcatcaaccgctggaaaacctttaaaacagcttttctggtgtgctggttcatggggcaccctgtatccatttagtggcaaccagaatggtggaaaaggtgttatccgcgatagcagtcttcttagcacaagggttctggctgctttgcatcgccgggggttagcgtggaagacaatgggttctgaggctatgtgtagaggtgttattagcccaacactacccaaaacgcagtacaaattcacgctattgcatccggttccagagacaaactcatctcacgtaattggcgaatccactcttacgtggggtctggcgcgaactataccggcaattgggcaagaccctatttacaccatctggcgatggaatgattgctgtaacaattga

SEQ ID NO: 83841 - DNA, 672 bp, Citrobacter koseri
atgatttttgccccggctttccaaccaattaaagacgtcggcacaggttcgtttgtcgctgctgaggtactggctcgttggtacgacgaaggccgggttcttacaccatcctctctgtcatcacctccttattgggggctggtggatatggagatggcacggttcattcaggacaaccttcattattgcttggatctgtacccagctctttttctgaatgtctctgaacatactttgcaatcagacgtcattttcaaagcgtggtggagggttgtccgcgacattgctaagaatcactcatcacggcttgtcatcgagattaccgagggcattcaggatgcctctctcgcattgagatgggaggctcttaccgaaataggggttgagctggcgctggatgactatggagacaaaaactcttcgctggagcgcctgagtcgttatgactggcactattgcaagtttgacgcgagaagactgcggtcgcttgaagactactcggccatcctccactgccgccgaaaaggcatacagctcattgctgagcaggtggagagcttcccattgggggagagcgccaaattacttggactgtcatggcaacaaggtttctatcacgggaagcctgctgtcatggagaaacacttgaattacgtaaaggccttaccatga

SEQ ID NO: 83842 - DNA, 1266 bp, Citrobacter koseri
atgatcagatcattggccgcgcatatcccctgttctaagagcgttctggtggcgttgatattctctgtggctggcggggcatacgctcaagagtctccgctcacagagcaggataaggcgcttattgagaaaggaaagcaaattgcccaaaaggcccagaagatggaaatgccatctctgttgcaaaaccaacacatggacgaggctcaggccgaagccaaggcatttttcaagcagctccaaactactaacccaacgctcaaggagatgcaccggaaacaggctgaaaagggtatctactctgaccatcggatactggttttcgcctcgttgtctcttggcgaacaggggttagatgacgtcctaacggcggtgtcaggccagcctgattctgtaattgtgttccgtggcatcccggaaggaatgaacttggggcagggagttaaagctattcaggcgctcgcggccaaaaaagacccagtgccgaacatcatcatcaaccctacgttgttcaaaacgtacaacatcacagccgttcccacgattgtgatgctggaggatgagccgctgcctggcgaacaaccaaacgtcgtcgcccaggtctccgggttgtccgacccggtatggttggctcgggaagtggataacggagaaaaaggcgatctcggcgttaaggggccggtggagaaaatcagtgagccagaccttattgatgttgccaagaaacgccttgccaatatcgactgggaagagaagaagaaacaggctatagagcgcttctggaccaagcagaatttcaatgagctgcccagagcgccaaaatctcgaacacgagaaattgaccctagcgtcatgatcaccagtgacatcagcactccggatggcactgtgttcgctcacgcgggtgacgtgatcaacccattgtgcgatccgaaggaagtttgcaagcctggaacgcggccatttacccaagcggtcgtagttttcgacccgctggacaaaaagcaaatggagctgctcgccaagaagctgcctgaaattaagcaggaacctggcgtacaacggattacctatatcgccacagagttcgacaaagacaaaggctgggattcctacaagagtgtcaccgacaactttgacgcgccggtatatctgctgacgccagatctgattacccggttcgagctggagcacacaccgagcgtcattactgccagaggcaagaagtttgttgtccgcgaacttgctgaggagggcggtgaatga

SEQ ID NO: 83843 - DNA, 531 bp, Citrobacter koseri
atgaattttccactcaagaagtatttcgtcaaaaaggaatcctggaagcgcttcggggttaaggccggtgtgacactactggttctttgggctgctggtgcggcctttgccagccgctaccgtattggcattgatccacaacaggagaagtgcctgccgggttacaccttcttcctcattgatctgaacgaccaaactctggagaggggagctgtttacgccttccaagccaagaacatgcagcctttctacaaggacgggactcgcatggtcaaaatcctcaccggtatgccgggggataaagtcgagatcaacgataagtggaagatcaccgtcaatggtgatgtcgtcggagaggggctccagctcgcagggaaactacatctgccagagagccacttttacggcaagaccacgctgaaagagaataactactggtttatgggcaaaagcccattcagcttcgactcacgttactgggggactgtgaaaaatgatcagatcattggccgcgcatatcccctgttctaa

SEQ ID NO: 83844 - DNA, 318 bp, Citrobacter koseri
atggacattaaatcaatcgcaatcgccgccattctcggtgccgctggtggcttcggcggtagctactacgtgatgagcgaacaaacggcaagcatccatcagcgtttgaatcaaaccccgccagtggtcgtggttgacttcgctaaagtggcgtcggcgtatcccgctggtgcctctcaggaggaagttgaaagactgatggtcaagaccaatgacgcaattttgaagttgaaagacgcaggttatttggtccttgacgcaagtgctgtcgtcggtgctccaagtgacgtgtacctccctgatgaggtgctgaaatga

SEQ ID NO: 83845 - DNA, 2448 bp, Citrobacter koseri
atgatcgtaaccatcaaaaagaaactcgaagaaacgttgatcccggagcacttgcgagctgccgggattattcctgtcctggcctatgacgaagacgatcatgtcttccttatggatgaccacagtgcaggctttggtttcatgtgtgagcccctgtgtggtgccgatgaaaaagttcaggagcgaatgaacggtttcctgaatcaggagttcccgtcgaagactacgctccagtttgttctgttccgctccccggacatcaatcaggagatgtaccggatgatggggttgcgtgatggcttccgtcacgagctgctgacatctgtcatcaaggaacggattaacttcctccagcaccacacgacagaacgcatatttgccaagaccaacaaaggtatctacgacaatggcttgatccaagacctcaagctgttcgttacgtgcaaagtccccatcaagaacaataacccgactgaaagcgaactccagcagctcgcacagcttcgcacgaaggtcgaatcatcgcttcaaaccgttggtctgcgtccccgcacaatgacggcggtgaactacatccggatcatgagcaccatcctgaattgggggccggatgcttcatggcgacatgactctgtggattgggagatggataagcccatctgcgagcaaatcttcgattacggcactgatgtggaagtcagcaagaacggcatcaggctgggggactaccacgcgaaagtcatgtcagcgaaaaagctgcctgacgttttctactttggtgatgcgttgacctatgccggggatctcagcggcggcaactccagcatcaaagaaaactacatggttgtgaccaatgtgtttttccctgaggcagaaagcacgaaaaacactctggagcgcaaacgccagttcactgtaaaccaagcctacgggccgatgctcaaattcgtgccggtgctggcggacaaaaaggagagcttcgacactctctatgagtccatgaaagagggggctaagccagtcaagatcacctactcggtggttttatttgctccaaccaaagaacgtgttgaagcggcggcgatggccgcacgaaacatctggcgtgaatctcggttcgagctgatggaggataagttcgttgctctgccgatgttcctcaactgcctgccattctgtacagaccgggatgcagtgcgagacctattccgctacaagaccatgacaaccgagcaggcggctgtggtcctgccggtgtttggggaatggaaggggaccgggacctatcatgcagcgctgatttcccgcaacggccagctcatgagtctgtctcttcacgacagtaataccaacaaaaacctggtgatcgcagccgaatccggctcgggtaaatcgttccttaccaacgaactgattttttcctacttgtccgagggtgctcaggtctgggttattgatgccggtaagtcctaccagaagctgtcggaaatgctcaatggcgacttcgttcactttgaagaaggaacgcacgtctgcctcaacccgttcgagctcatacagaactacgaggacgaagaagacgcgattgtcagcctcgtttgtgcaatggcgtcggccaaaggcttgctggatgaatggcaaatctctgcgctgaaacaggtcctttctcgcctgtgggaagagaaaggtaaagagatgaaggttgacgacatcgctgagcgctgtctggaagaagaaaacgaccagcgcctcaaggatattggtcagcagctctacgcctttacgtcgaaaggtagctacgggaaatacttctctcgcaagaacaacgtcagcttccagaaccagttcactgtactggagctcgatgaactgcaagggcgtaagcacttgcgtcaggttgtactgctccagcttatttaccagatccagcaagaagtattcctgggtgaacgtaaccgcaagaaagtcgtcatcgtggatgaggcctgggacctgctcaaagagggcgaggtctcggtcttcatggaacatgcctaccgcaaattccgtaagtacggtggctccgttgtcattgcaacgcagtccatcaacgacctctatgagaacgcagtgggccgcgccatcgcggagaactcggccagcatgtacttgctcggccaaaccgaagaaaccgtggaatctgttaaacgtagcggtcgtctgaccctttcagagggcgggttccacaccctcaagacggtacacaccatccagggcgtgtactcagaaatctttatcaaatcgaagagcggcatgggcgtcggacgcttgatagtgggcgacttccagaagctgctttattcgaccgatccggtggacgttaacgccatcgaccagtttgtgaaacaaggcatgagcattcctgaggcaatcaaggccgtgatgcgaagccgtcagcaggctgcataa

SEQ ID NO: 83846 - DNA, 708 bp, Citrobacter koseri
atgcggacaaaattactcggggcgctgatggtgttcgggattattaccggcacggctcatgcgtcatcgaaattggaaatcaccgatcccagagcggcgaagatagaggacatcgtagagctacccatcaaaggggttcgagccgtccaaagtgatgggcagatcatgttcctctctgaaaacgggcgatttgttatttcaggacaaatctacgacctgtggagcaagaagcccctcaacacgatgtcccaaatgagggatgtagcggagcgtatccacttcaagagcatgggcatggatgtggacacgctgaacaccgtttcgatggggcgtggtgacaaagaggtggtggtctttgtcgatcctagatgcgcggtttgccatcagctcatgggtgatgccaaatcgctggtggatgattacacctttaaatttatcgtgattcctgctctgggtgctgagtccaaccgcttggcaaagaacttgtactgcgcgaaagacaaaacccacgcgctcgatgcgctgatgaacaacaccttgggttcccttccttcaaaagaaacctgcgaccccggccaatacgatcaaacgctgctgacagctcatttcattgggattgagggcgttccgttcgtggttgctccggatggtcgtgtcagcaaaggacgtccgaagaacctgaaatcatggttggagagtgttgaatga

SEQ ID NO: 83847 - DNA, 5532 bp, Citrobacter koseri
atgatcaatttcaagcctaaaattccggcgatgcttggggctctggcggttcttaccgctggtgctgctcatgcagagctgctggaatacacctttaaggctccagatggtacgcaacggtctctgactccgaatgccaactatgccaacccaacgggcaatatctcgtttgccttgagtgccggtatcgaccgaaaggtaaagatttcggtgattcggtcggatggaacagtggtttcgacagcgaccagccaccttcttggggctactgatcgcatcacagtgggtggaaaatcctactatggtgcggaacttcaactaccggctccttccgagggagtctacaaactaagggccgaaatactggcgtcagacggaagttccgttcagactgatgaatacccgcttcaagtcgatacgacagcgccaagtttggcaaacgtgacagtaaaaggggaatggaaccgggcgctttctgatggaacgctactgcgaggtcctaaccgattttcaggtatagatgtgtctgcatctgatgccggttcttcggtttcctctatacaggcgtatgctgtagatagcaaaggcaagaggagtcctgttgtctcggttaattacgccaacggccaaggccagttgttgaactggagcactgtgttccctaatggggaggatctatatacgcttcatttcgaggccctggataaagcagggaacaaagggtcaatagcctatcctattgcttgggattcagtaggtgcaaagtctggagagaatcctgagccagtagcagtgtatgaccctaagaacccgcaggcctcaacttttaaggttaatggtcaggccctatcaggttttgcgccttatcagaacggaatgaccatttattccgatacctacagggtgctctaccggatacccaaaacaaactcctatccttcttcaccttacggtgctcaaagcggtaactggtgtgattataaaaactgtattgaaggcaatatcattgccgaagacggtacatatgattatcggcagacgcaagctgatgtattccagcaacatgggacaaaaactaagtcgtttattatttacgactgggttatgaactctcttggtaatacatccgtcagtgtgaaagctgatccatcggttagcttggctcccatcggtaagtatgttgaatatcttagggatgatggtcagtgggtccgcggtgaaaccattaatatgagctcagttaaccattataaaaaactgagatttcatgttgagccgagaccttacgctcaggagttatggggatcttggttgcctactactaaaattccggcaaatgcttcttatgcagaagtggatacggatatatcgttcagtgggcgctcatgttcatggcctggatattggtctcgaccggaagggaagcctgaacttccgtctgatcggattggggcaacgttctgctatgaccttaaccctcctgaaattgctgggttagaacgaaatgggcggatttttaaagctcatttccgtgagcctgattcatttgacggttggggtgttaaccagtgggttatttctaacaactcaagtgcgtctgcgataacctcgactggcgaagaacgtccgttgtctcgtactgaagttcttcgtagtagcacaaatgattggtttttcacattttctgctgagaatctgtcagagggcacatataccggcatatctctcgtagctaaagatgctttcggtaatgaggttaagcaggtattcactggctcccaatatgctatgagcatagataattcagcgccgacactaaccgtatcgatcagtgatggagcaccaatccagtctttggatgatgttgtaatcaccttgactgatactgccgacccgagtcctaagctgacctctattgccctcgtcggaggcccagccgatgacaaggtgcagttgtcttggcgtgaggagtcgaaaggtcgattccgccttgagtacccggtaatgttcccgtctttgaaggaaggggaatcttacacgctgactgtttccggtgaggacgcacaaggcaacgcggttcaaaaggcggttggcttcgagtacaaaccgcgtcaggtgatgctggcggatgggatggatggcaaggttatggtccccgctgtcactcatgaatttgttcatgcagatggcaagcggatcatcgagaccaagccgctgacgctcagtgatggtgctgtcgtgacaggttcatacgacgtgtttgcgaccctccgttctgatgcgaaagtgccgctggtggtgaatggggtgcgtatcgagccgggccagacaatggggatcatgagccaacatgatttcggtgcgtcaggtggtcgtttgagcattccggttaaaccggctgttcctgatgtggtcggctcttccagtcttcttgtcatgacctccgcgccgaactcacccatcttggttgtggacatcaatacctggaaagggacggccaagctctcggctgaatcatggacaattcgccaggttattgacccggtgaaaatctatgccctgccagagtcgggtgtgccttgccggttcaccacgaaagaggatgtggctatggccgcagacccaattcgtgacccggtgtgtttgctccaatgggacagaactccggatgaggctgaacaaactacgcaggacaacaacgggatgaaagttgccgggctggtggggcaggctgtgagcattggtgaacaacctgtcgaatacagcctgtacctgttcagtggtgacggttccaaggtaaaagttgggtctggctctcagaacctgacggtaactactgcctatggctctgttggttacaccccgattgatgacattgctcaggtgaatcgcgtcattgaagactttgatgtgaacttcaagcagagcaaaggtcctgattgttcaatcactctcagtgctgaccgtgcgaaaaacgaggccgcgaacaaagctgttggcagtgcaagccgcacctgtctgttcgagtggcagcagatccccgatggactggtccaagacccgttatcggaatctccttcgttgtcaggttccctggccgagaacggtgatcaccctctggggtggcgggtaagtattttcacccgtaacggcactcgggtgacgttgaacgacgagactttcaatgtcgaagcggttgacccaccagctccgaccgttgaactagcctccgactacaacttcaaagacaacatctacttggtgccgatgacaggtaactacctgggtgatgccattatcaactctgaacgagctgatctggatattgccatatcgcgcaactctgatgttcttgagtctgagaccttcactccgggatggggtgccaccaataaggtgtatcgccgcatcaataccgatgagcgagcgttgtgggaggagaccacctacaaggtgaacgcggcctacaacaaggtgcctgatgtgaagactgaggttgtctaccgggctatctctgcaccttctgacagtatccgtcctatcgttgaagttaaaggtgataccgcgattgacacccaggcattgccggttagggttctcatccgtgatcagtacaaacctgatggtgactatgacgctaacacgatgggggtgtggaaagtacgcctgatccagcaaaaggcctacaacgagacggttgcgctcactgattatgcggaagcatcgaacggtgaagctcagttctcagtagacctgtctggtgtggatacttcctccgtccgtatcgctgctgaggctgttctggaaagccctgttgagggttacaaccgcacagagttgtctatcagacctgccttcttgacagtgcttcgtggtggtgccatcggtgctggcgtggaggctcgcaagttgtctggtgaagctccgttcactgctgtgttcaagctatctttggacgaccgtcaggatctccgggctaccggccaggttgtgtgggaaaccagtaaggacgacggtaaaacctgggagcagttcatcccagaagatcgatacaagtatcagcttgtgaagaccttcgacaagggggagtaccaggttcgggccaaggtggtgaacgtcaactcaggtgcggaaaagtacaccgaagcggtcagtgttgtcgcttacgacaaacctgatattgctgttatcggcccgaccacgttgtttgtcggaagtgaaggcaagtacacagcgaacctgacgttgaacgatgagccaatctccggtggcaatgccattgttgagtggtctactgacggtggcaaaacctacgcgcagacaggggatagcatcacgctttcgagcgatgaagaaacccgataccgcctgtgggctcgtgtgcgctctgccactgcaccggctgatgacggctatgcctatgaagttgcgaaaacggcagttgacttccgagcagtgaaggccccccgtccttacgtgacagggccgcgagtcattgagaccggtaagaagtatgtgttcaaagccgaaaccagcctgccttaccgtgggatggacgtgaagctgaacgggttcttcacgctgcctgatggctcaattgtgcagggtgatactgctgagtacgtgccttcggacactgacctcaaccaggctactgtagaaacgaagtacaccacctggatcgaaggataccgagatcagggtgcagaagcctcgcatagcctacgctcccgcgtgtggcagtatgtatggccgagcttcggaatgcaggtcaggaagaacgctgacgtggctcctgcgacgatcaccgcgtcagtgcggccaattgccttcaacggcaagctggaagaaccgacctacgagtgggagttgccggaagacgcagtgattcaggatcagcggcaggatattgtccggtcctttgtgatcaatgagccgggcgattacaacatcaaggtgactgtccgtgatgctcgcggccatgaaaccgtgatcgagcaaccgctcaagatcggccaggcagagccctatgctatcgacctgcaatactctggctcgaacaaatacgagcgtgagcctctggatgtgctgttgcgaccgtacatttctggcggccacccacgcgaccgtatttcgactcgcgtctactcggtagatggtacgccgttggaaagcagcggttactacggcagagcaactctgggcgctggtgagcacagcatcaagctgaaaataacctcagaaatggggcatgaagctgagggcgaggtgaacatcaatgtggcagagaacaagttgcctgcatgtagcctgagctcacgagagaccgttgggtcgtggatcgtttatgcgaactgcgaagataccgatggccgcatgaagtcctacgaatggaccattgccggtgagttgcagagcatcagctctgatcgagtgactatcagcaagggcacctatgaaacgatgccgaccatctctctggttggggtcgatgactctggtggcaaatccgaagctgttaccatgaactaa

SEQ ID NO: 83848 - DNA, 384 bp, Citrobacter koseri
atgaacgcaaatcagttggcgaatgcctcaagtaaaaacaacgcactcttcctcttcctggggttgatggtggtagccttcttgctcgtgccggatcaggcccacgctggtactggtggtacagcgtttgacgacgtatgggtaactctcaaggattggacccaaggtactttgggtcgaatcgttgcgggtgcgatgatcctggtcggtgttgttggtggtatcgctcgccagagcctcatggctttcgctatgggtatcggtggcggtatgggcctgtacaactccccgaccgtagtggaatccatcatgtctgctactctggaacatgcagagaaggtcatcccggctgttgtgcaactcagcaatggcctgggggtgtaa

SEQ ID NO: 83849 - DNA, 579 bp, Citrobacter koseri
atgaaaaatttgaacattttgaccagaaagggcagttccagaggcgaggctcaaaaggaacaggcagtaagatccgcaaagatgttgggggtgggtgcagcgctacttattttgtcgggctgttcgacgttcaacatcggcaaggatgagtatagctgtccgggaatgccgaatggtgttcagtgtatgtcagcgcgagacgtttacgccgcaaccaatgacggaaatgtcccgcgcccaatgaaaccagaggaagtcgaggccaaagcggaagcggatggcgaaggttcctcaaacgtttcagcgaactcatctagctccggagacccggtgattgacaactatgtcgcaccgcgtcttccggatcgcccgattccaattcgtacaccagcacaggttatgcggatttgggtagctccctgggaggacaccaatggtgatctcatcgtgacagggtatgtctataccgaaatcgaaccgcgcaggtgggtgattggggatggcacaccgcaaagtgagccagttttgagaccgctgcaaacggtacaacacgaaccgaagtctgaaacaaccaaatag

SEQ ID NO: 83850 - DNA, 1317 bp, Citrobacter koseri
atgattaagcgattttggacacagttagaccccaacaagaagcgttgggtgtctatcgctggcggcgtcttcgttctttttgcggtcgtgacaatgttctctggtgaacccaagaaagaagagaagcgcggtcgccaagaaaccatcaagcacgttctcacagacaaaaacacccgtgagatcgggatagattcgttgtctgccgatgtgaagatggtgtctcgtgaaaactccgacctgaaaaaggagctggaacgagtcaagaaagagctggaggaaaccaaaaccactgccgggaaatccagtgatgttggccgtgagatgacccgccttcgtcaagatttggaccgcctgacccagaagaacatggaattggctaagaaagtcgaaaccggcgctgctggtggaaaaacatcctcttcatcagaggatgccagagccgatgttaatggtgcatctggtggtgatggtcagttcatggagaaaaagctcgactacaaagatccagcatccttttttcgggacgcaccgcttcctgactcgaagggtggggctcctgcaactggcaagggagacggtcgtgatgcaactaaaccaggcatccaaatagtgagctactcgcagaaagcgccagaagttgaagagaaggacaacaaggatgatgagtctatctacctaccttctggctccatcctgacaggggtgctcatcaacggtatggacgcaccaacatctcaaggtgctcgtcgagatccgttcccttcgaccctcaggattcagaaagaggctattttgcctaaccgcttccgtgcggatgttcgtgagtgcttcctgattgtttcaggctatggagatctcagttcagagcgagcgtacctgcgtggcgagaccttctcgtgcgttcgggatgatgggggggtcatagaagcgaagctggattcctatgcagtgggtgaagacggtaaggccggtgtccgtggtcgcgtcgtatcgaagcaggggcaaatcatcgccaagagcttgatggcaggcttccttggtggcgtttccgaagcctttgacgtcaatcctgtgccggtcgtcagcactaaccctggctcaaatacccagtaccagtctgtgttctccgaccagatgttgcagggagcagcagtgaagggggccagtaaggcgctagatcgcatcgctcagttctatatcgacatggccgaaggcatcttccccgttatcgaggtcgatgctggccgtcaggtagacatcatcgtgaccaaaggaaccaagctacaaattcgttccaccgggggaaccaagaaatga

SEQ ID NO: 83851 - DNA, 918 bp, Citrobacter koseri
atgaagaacaacgctaaactttcgctcctggcgctgtccttggcgcttggaacttcaatggcctatgcctcggatgacattcctgttgtcccggccagtgttatgaaaaaggatgttcctgcccctgtgacgtcaggacaaagctcccatgaggttgtgggcagcatgaatgaaaaccccttactgacgatgaagccgggggttaaccagatcatcccgatagccgttggtcatccgaaccgaatcgtcacgcctttcagcaatcctgagatcgtttcaacatctctgaccggggcgacggataacggccagtgtggtgaggtctgcatcaaagagaatgtggtctatgtcgccacggataagcagtatccggtgactatgttcattactgaaaaaggctcggaagcccaagctctcagcctgacgatggttccccgtcgtattccgcccagagaagtctttctcaagctcgatggtggtgtaggtatcactggtgcttttgccaataccaaggctgagacctgggaacagagccagccttatgtcgaaaccatccggtcagtattccgaaagattgctcttggtgaagtccctcaaggttacacgttgaaccgcatccctgctggtgctgcggtgccgagctgcgctcatcctggggtaaaggtggattttagcaaggggcaatacatgatgggccaccaccttaacgtgttcatcggtgtcgccctgaacgtctctgatcagcctattgagttcaaagaggcgttgtgtgggagctgggatgtggctgcggtgactacgtggccgcttaacgtgcttgagcccggccagaagacggagatctatgtggcgaagaagcagaagcgtggtctcgcaccaacgtctaagcgtccatcgctgctgggaggtgcccaatga

SEQ ID NO: 83852 - DNA, 627 bp, Citrobacter koseri
ttgaacctgaaaaagtatctcaagacctgggaagggacccaaacagaaaataagtggggacgaatcttccagggtggtcttattgctatcgttttcctgctggtggtccaagtattcagcaaggaaaccatcgtcactatccagcctttcacgctcacggaagaagcctgggtgacgaaaaataacgcctctcagtcctataaagaggcttggggtttcgcttttgctcagctccttggcaatgtgacgccaggaaccgttgactttgtgaaagaacggatcaccccgcttctctccccgagcatctatcaggacgtgattgatgccatcgaaattcaagctcaacagatcaagaacgaccgcgtaaccatgcggtttgagccgcgttttgttgagtacgagcccaagagcgacaaggtgtttgtctacggatattcctacgtcaaaggggcttcttctaacgaagagcgtagcgaacgctcctacgagttcgccatcaagatttcaaactacgcgcccgtgctggactacatcgacacctatgtaggaaagccacgcaccaaaactgttttggagcaactccagcgcaaagaagaaaaccggagaaagcatgaagaacaacgctaa

SEQ ID NO: 83853 - DNA, 282 bp, Citrobacter koseri
atgaagcctgtaaagataccgcgccgggtcgatgagcccccgcatctgctgttgtggagcgcagatgagttggccccgatgcttttggggctaacgataggggtcatcatcggtaaggccctgatctgctttctgggggggttacttgtaaccaacctttatcgccgattcagggataaccatccggatggatacctgctccacatgatctactgggccgggttcatcatgaccaaggccaaatctctcaagaatccgtttgtccggaggtatttgccttga

SEQ ID NO: 83854 - DNA, 366 bp, Citrobacter koseri
gtgaaccttaataaacaatttttctggtttttgatgaacgcggtgctgatgtgcatcttcatcgttccagtggccgtcgcgttttggctgtctgcttttgcggcaggttttgactggagtcagtgggttaagttggctgctgatacggccaacagagctgcaagtgacccggccaaggctctgggcacggttcagacctactggggcattctcagcttcttcctgctggcggcgtacagtctgatgttcaagtttaaagccaatgctaacaaggaagtgaaaactctgggggtggcccgaccagccaatgaagttagcgttgcggcttcggaaaaacattcggaagcggttcctcaaaatcaataa

SEQ ID NO: 83855 - DNA, 144 bp, Citrobacter koseri; identical to SEQ ID NO: 25113

SEQ ID NO: 83856 - DNA, 663 bp, Citrobacter koseri
atgcgtaagagagatttcttttttggagaggtgtatgaggggggggcaggagccactctacgactgagtgatatggaaccattggcaagaaaagtgtcggcagagttcttcactgcacaactgaaccgtatgctgaaagagcatgacggtcagttgacgctcagcgatggaacgtcgtaccccagcttttggagcttcatcgacaaggttgttccagagcaggttggtttcgtggagatctacgctcggcaggatgttaacgataatgttgaagcgacactggcgtgtgacatcgttttggtaaatggtgtgatcaccgttaaacctcactggtgtgcttacaaagacatcagggctgacgaagtgatttccaccttactggtgcctttgcatttgaaggctctccagggtaaggcttacattcgctgggatgatggtgaaaccgaacctctgttacaaaacgacgactatcaggctgaacttgaaaatgtgtttagtgtttccaagtacccatcagccatgagctggggcgatacagcagaccagaaggttaagcagtacaagatggaccttgagtgcgccacagatgttggttgtcgaggtgtctcatcagagcaagcatgggatgcttatcgagaactccgttacaatagaacagtgtga

SEQ ID NO: 83857 - DNA, 378 bp, Citrobacter koseri
atgaaagtaaccaataaactcaaactgctggcactggggctgtgtatggccggtactgccatcgcggctcctgatgtgctcaatgacgacgcaaagctcaagaaccttgagaaggtgtgtcccgactgtaagatggtggcaaaagatgtactcaatctgcgggttgaaaactgccagctcaaagacacttccagtgcaatgatgattggcaccatgcaaaatgaccctatgttttcgtttatgctggcagtacacacagcggcaggctcggaggcatacaaaacggtagttggtgccgctggcaaccatgttgactgtgaaaacccgttgaactggatcaagctgacccagcaagcgattaaaggaggcaaagtctaa

SEQ ID NO: 83858 - DNA, 447 bp, Citrobacter koseri
atgagctactccgttataaatcaagatggggtgcatctgtgcgacatcccattgaacgtctaccaggtgatacgtcgccaatccttgtctgcgttgtggctttactgggcgcagagcttgaatttggtgaaggtgctcattgcttgcgtcggaaagatgatctttgtgatgccggtaatgtggttctgggtgctggtggtgtgccgcttggttgaaccagaacgtatctcagacgtgccaggacttatctctccggacgtgatcgggtgggccgctggtgcggccatcaccctcattatctattccgtttttacacgcccagctttgtacggataccacaactttttcaagcagcatatttgctcaagagtaaagcaagtaacgccggaactcagaacagtcactgggccactgttcttttaccgaaacgaaattggaacgatatag

SEQ ID NO: 83859 - DNA, 630 bp, Citrobacter koseri
atgaagaagccgtggttgctggtcgcatggctgctggttattgagttgctggcaatattgctgctgatccctggcgactggacagacagagccatcaaaagggaatccgtgctggtggaacagagtcttggtgtcgaagcaagagactggatacagaacaaagcatctacctggttcaggtcgagcgttattgattcaggcttctatgaggggatgtaccaaacgctgatcccatcagaagaggagcgccagaagtccaaggggatgcaggatatgggcaagggctggtttgtgtgggtcaaaggccgcatggaagcctttgtcaacgtcatttaccagttctacacacggttggcgctgttagccgcgtgggctccctatatgctgatcctgttcgtacctgcggtatatgacgggatgatgacatggcgaattaagcggaccaacttcgattatgcgagtccggttctccatcgttatagcgttcgcggaacgatgtacctgatggccggattgttcatcgcgttcttcatccccatagcgctcgatccggttgtcatcccgatgacaatgatgacgtgctgtgtcctggttggcctgacgttcggcaacctccagaaacgggtatag

SEQ ID NO: 83860 - DNA, 546 bp, Citrobacter koseri; identical to SEQ ID NO: 25118

SEQ ID NO: 83861 - DNA, 1866 bp, Citrobacter koseri
atgacaatgagttatgacccgctcgcctacgagatgccgtggcggcccaactatgaaaaaaatgctgtagcaggctggcttgccgcctccggcgcggctttggccgtagagcaagtcagcacgatgccgccggagccattctattggatgacggggatctgtggcgtgatggcgatggctcgtttgcccaaggctatcaaacttcacctgctccaaaagcatttgaaggggcgtgatctggagtttatttccattgcggagctccaaaagtacatcaaggacacgccggacgatatgtggcttggtagtgggttcctgtgggaaaaccgccatgcccagcgcgtgtttgagatcctgaaacgcgactggacttccatcgtagggagagagtccacggtcaaaaaggttgtccggaagatacagggtaagaaaaaggagctgccaatcggccagccctggattcacggggtagagcccaaagaagagaagctgatgcagccactcaagcacactgaggggcattcgctgatcgttgggaccaccggctcgggcaagacccgtatgttcgacatcctgatttcacaggccattctgcgtggggaagccgtgatcatcatagacccgaaaggggataaggagatgcgggacaatgcccgacgtgcctgtgaagctatggggcagccggaaagattcgtctcatttcatccagcattcccggaagagtcggtgcgtatcgaccctctgcgtaacttcacccgcgtgactgaaatcgcaagtcgtttggcagcgttgatcccgtccgaagcaggggccgacccgttcaaatcatttggatggcaggcactgaacaacatcgctcagggcttggtcatcactcatgatcgtcccaacctgacaaagctccgccgattccttgaaggtggcgctgctggcttggtcatcaaggccgttcaggcttactcagagcgagttatgcccgactgggaggcagaagcagcggcttacttggaaaaagccaaaaacggttcgcgtgagaagatcgctttcgcgttgatgaagttctactacgacatcatccaacctgagcacccgaactctgacctggaaggcttgctgtcgatgttccagcacgaccaaacccacttctccaagatggtggcgaacctcctgccgatcatgaatatgctgacgtccggggagctaggccctctgctgtctccagactcatctgatctgagcgacgaacgccagatcaccgattccgcaaaaatcatcaacaacgctcaagttgcttatctggggctcgactccctgaccgacaacatggttggtagtgctatggggtccatcttcctgtcagacctgacagcggttgccggtgacagatacaactacggcgtcaacaacagacccgtaaatatctttgttgatgaggctgccgaggtgatcaacgacccgttcatccagctcctgaacaaaggtcgcggtgcgaaacttcgtcttttcgttgcaactcagacttttgctgacttcgcagctcgactgggtagcaaagacaaagcgctccaggtgttggggaacatcaacaacacgtttgctctgcgtatcgtcgatggtgaaacccaggagtatatcgcggataacctgccgaagacccggctcaagtacgtcatgcggactcaaggccagaactcggatggcaaggagcccattatgcacggaggcaaccaaggcgagcgtttgatggaggaggaagctgatctgttcccagcccagttattgggaatgcttccgaacctggaatacatagccaaaatttcaggcggaacaatcgtaaaaggccgtctgcccatattgacccagtaa

SEQ ID NO: 83862 - DNA, 2979 bp, Citrobacter koseri
atgctgaaagcccttaacaagttatttggtgggcgaagtggagtgatcgagaccgcgccgagcgccagagtgttgccgcttaaagacgtggaagatgaagaaatccctcgatacccaccttttgccaagggcctgccagtggccccactagacaagatactggcaacccaagctgaactgattgagaaagtgcggaactctctcggtttcactgtggacgacttcaaccggcttgttttgccggtgatccagcggtatgccgcgtttgttcacctgttgccagcttccgaatcacaccaccaccgtggcgctggtggtctgttccgacatgggcttgaagtggccttctgggcagctcaggcatctgagtcagttatcttttccatcgaggggacgcctcgggaacgccgtgacaatgagccgcgttggagactggcgagctgtttctctgggctgctgcatgatgtgggtaaaccgctctcggatgtgtccattacggacaaagacgggtcaatcacatggaacccgtattcggagtcacttcatgactgggcacaccgtcacgaaatcgaccgttactttatccggtggcgcgacaagcgacacaaaagacatgagcaattctcgctgctggcggtggatcgaattattccggctgagactcgggagtttctgtccaagtctggcccgtccatcatggaagcgatgctggaagctatctcaggaaccagcgtcaatcagcctgtgaccaagctgatgcttcgcgctgaccaagagagcgtctcacgggaccttcgccagagtcgtctcgatgtggacgagttctcctatggtgtgcccgtcgagcgttacgtgttcgatgccatccgccgcctggttaaaaccggaaaatggaaggtcaatgagccaggcgcgaaagtctggcacctcaaccaaggtgtattcattgcctggaaacagcttggggacctttatgacttgatcagccacgacaagatccccggtatcccacgagaccctgacacactggccgacattctcatcgaacgtggttttgctgtaccaaacacggtgcaggagaagggtgaacgtgcgtactaccgctactgggaagttttgcctgagatgctccaggaggcggcgggttcggtgaagatcttgatgctccgactcgaatcaaacgacctggtgtttacgactgagcctcctgcggctgttgctgcggaagttgttggtgatgttgaggacgctgagattgagttcgttgatcctgaggaagccgatgacggtgacgaccaagaggaaggtgaagcagctctgaacgatgacatgttggccgcagagcaggaagcagagaaagctctagctggccttggctttggtgatgcgatggagatgctgaaaagcacctccgatgctgtcgaggagaagccagagcaaaaagatgcgggaccaacggaatcatctaagcctgacgctggcaagaagggtaagccgcagagcaaaccgggcaaagcaaaaccgaagagtgatacggagaaacaaccccataaaccagaggcaaaagaggatctgtcccctcaggacattgccaaaaacgcaccacctttggcaaacgacaatccgttacaagcactcaaggatgttgggggtggactgggggacatcgacttcccgtttgacgcattcaacgcatcggcagagacaaccagcactgacgcaacaaactcagaaatcccagatgtggcaatgcccggaaagcaagaggagcagccaaaacaggacttcgttccacaagaacaaaactccctgcagggcgatgactttccaatgttcggtggttctgatgaaccgccatcatgggcgattgagccgctccctatgctgactgacgcaccagaacaaccaacgcacacgccagaaatgccgcatacggacaacgttaatcagcatgagaaggacgcaaagaccttgctcgttgagatgttgtctggatacggggaagcatcggcgttgcttgaacaagcgatcatgcctgttttggaaggtaaaacgacgctgggcgaagtcctatgcctgatgaaggggcaagccgtcattttgtacccggatggcgctcggtcgctgggtgcgccgtcagaggttctctcgaagctgtcccacgccaacgcgattgttccggacccgattatgccaggtcgcaaagttcgtgatttcagcggagtgaaggcaattgtactggcggagcagctttcagatgcagtcgtggcggccattaaggatgccgaggcgtcaatgggtggataccaggatgcctttgagctcgtctctccccctggcttggatgcaagcaaaaataagtctgcaccgaaacaacaaagccgaaaaaaggcgcagcagcagaagcctgaggttaatgccggtaaagcctcgcctgaacaaaaggcgaaaggtaaggactcccagccacagccgaaggagaagaaggtcgatgttacttctccggttgaagagcaacagcgcaagccggtccaagaaaaacagaacgtggctcgccttcctaagcgggaggctcaaccggtggctcctgagcccaaagttgagcgtgagaaggaattgggacacgtcgaggtgcgagaaagggaagatccagaggttagggagtttgagccgcctaaggcgaaaacaaacccgaaagacatcaacgcggaagatttcttgccgtctggtgttacgcctcagaaagcactccagatgctcaaggacatgatccaaaaacgctcgggccgatggctcgtgacacctgtcctggaagaggatggctgcttagtaaccagtgacaaagccttcgacatgattgccggtgaaaacatcggcatcagcaaacacatcctctgcgggatgctgagccgggcacagagacgccctttgctcaagaaacgtcagggaaaattgtatttagaggtaaatgaaacatga

SEQ ID NO: 83863 - DNA, 618 bp, Citrobacter koseri
atgagacaactgatagcaattctgggagtggcaattctggccgggtgtgcctctaacgcccccgagcaaaagcctcagccccagactgcccctgccgaaaatgacaaacctgcccgagttagccgggaactgtcgatggcatgggacaacatggggcgcggtggtgctgcattacgtcaacctggttatatccatgtgctgggcgacggtaatgtcagcgcaacgatgaacaaggtcaaagatgactccgctggttcagataaaactccagcagggatcaagcagcacggggatgtgaacgaagccatcaataccttcaagtccatgaataaaggcaaaggctactcgctgtacgagttgtcacgctgggaacgctattgcgatggcggcaaaggtatggacgagcacgattggcgctttgtggaagccgaggggactacaaacatccccaaggatgttgtaaccggctgcataccacctacccacacctatcaagattatctgaatgcctggacgcacttttgcaccagccaggctgtaactgacgcagatcgccgcattgtgcgcgagtccgtgcgtccctattcagtggtgaacccatgcaaagctctgaaataa

SEQ ID NO: 83864 - DNA, 2193 bp, Citrobacter koseri
atggacctttatatctgcgagaagccttctcaggccaaagatttggctggcgtaatgaaggcctcccaacgaggtgatggatttctccatgatggaggaaaccgcgttattacgtgggcgttcggccacctgctggaattgtatatgccagacgattatgacgaacgctacaagtcatggtcactggagaccctccctattgcaccagagtcatggcggtacaacgttcgcaagagtgcgttcaaacagtacaaaattgttgagggactggtcaaaaaggcgagcaccatctacatctcaacggactacgaccgagaaggtgaggctatcgcccgttcgcttctggatcgattccgctactctggccctattcgccgggtttgtttgacggctctcgatgagtcaagcatcaagaaagcgctgaacaacgtaaaggatggcaaggatacggtctcactctactacgccgcattggcacggcaacgcgctgactggttggtaggcatgaacgtgagccgcctctacacagtgctggcccgagatgtcggcttcaaccacactcttcacgttggcagggttatcaccccaaccgtcgctcttgtttgtcaacgggaccgagagatcgccggtttcaccccctcaccatactggactctgggtgtgaacgtgtccgtacagaatggacagtttgccgcccaatggataccaccagaagagtgcagtgacgagcaaggccggtgcgtcaataaggcctatgccgagcaggtagcctcccaggtcaatggtgccaatgctgttatcagcaaagcagaaaccaaaccaggtaaagagtcagcccccctccccttcgatctaacgtcgctgcaacaatacgcaagcaaacgatggggatacaccgctcagcaggtactggatgcagctcaagctctgtacgagacgcacaaagcgaccacctaccctcgtactgatagtcgttatctacccgagagccaaaaggaagacattccggacattctccaggcgctcattttgtccgatcagaacgtctctgggctggtggctggcgcagatcctcatcgcaaggccagggtattcaatgacgccaaagtgaccgcgcaccacgcgatcattccaacaccggccagaacagacatcagtgccatgtctgagatcgagttcaatctttacgacgccatccgtcgtttctacatcgcgcagttctacagcgagttcgagttcaccaaaacctccatcgaggtgcagtgtgggcgtcacctctttgcggcctctggtaagacacctgccaaacaaggctggaaggttttgtttgcttctgatagtgaaagcagtcccaaggacgagggggaagacaccgacgcgccggttgaacaagagaagctccccagggttagccagggcgaacccgctttgcttaatggtgccgagctggcaaacaaaatgacgcggccagcaccgcacttcaccgaagccacattgcttgccgcgatggagaacattgcccggttcgtgactgaggagaagttcaagcaaattctcaaagacacagccggtttaggcactccagcaacacgcgcaagcatcatccagggcgctgttgataaaggctacttcaaacgtcagaaaaaggtactgcttgcaactgataaggctcatgcgcttatcgcagtgcttccaccagccatcaaatcacccggcatgactgcggcttgggagcaggagcttgagaaagtcgcctccggctccgggaatatgtctgtcttcatgaagcagatttccacctggatctgccaaatggttgagcagctcaaagtgcccgcaccggttctgaccaaagaaggtggcgcgatggctaaagccttcgagggcgctaagccgccttcacacgaatgcttcaactgcggtggagagatgcaccggatcaaagggaagaacggatttttctggggctgccagaacgaggcttgcaagaagacgttcccagacaaccgagggaaacccgagaagcgtatcgcggctgaggattgtccagactgcccagattgcggtagcccgatgcgtctcaggaaaggaaaagcgcccggcaagaagcgagcttctaagttctggggctgcaccgcctatcccgattgcaaaggcactatgcccttcaaaaagtcggactttatggattga

SEQ ID NO: 83865 - DNA, 489 bp, Citrobacter koseri; identical to SEQ ID NO: 34914

SEQ ID NO: 83866 - DNA, 207 bp, Citrobacter koseri
atgggatttggtgtggacaagatagatcggcaaagttggctcgttaaattcaggcgagcgaagtgtcaggacactttagacacgatgagggatgcggccattcgcaactatgaagggaatattcgtgttatcgcggatattgtattggcccatgaggcgagagagacagaaattgaaaaagggatgttttgtcgaatagttagatag

SEQ ID NO: 83867 - DNA, 618 bp, Citrobacter koseri
atgttttttgataacaaagtagaatctcactcgctcgtaatgggagccagcgggaagggtaaatcggtcttgtccgaacaagtgcggaaaaatgcgaggctgcgcggtgatctgctggtggatactgaaatgtaccgtgaaggtcgagggttgaaaccatacgagcatgagtacgctcgtcgcttagttctggggctaagtggaccgttgccgcgtgaactgcgtgggaagccggtgacggttatctctgatgtgtccaggccaaaaaaggtaaagcgtcagccaaagcaatttgttaagaccgtgaatggcgtaacccttgaacgccaattggtggccgatgcaagagatcagttggaaatgcaaacaggcgtctggctcaaacaaccacagctcatcgagctgatggaagagtcgggcatagacgaaactctggccgattttggtgaggctgaaacacagatccgagaaatgctggcggatgcgttggcgatgaaactggtaggacgctcatggcccaagtgtggagccctctataacgcggcagaaaagtccgacgttaacttctcctccgagcttgatgctgcggccaaaaaagctggatacatggttcgctaa

SEQ ID NO: 83868 - DNA, 219 bp, Citrobacter koseri; identical to SEQ ID NO: 34913

SEQ ID NO: 83869 - DNA, 264 bp, Citrobacter koseri; identical to SEQ ID NO: 34912

SEQ ID NO: 83870 - DNA, 657 bp, Citrobacter koseri
atggcagtcatttactacggcgagggaacccatgacgccggtttcgtcgggttccgtgtcgcacgaacagttggggtggcggatgattaccggcaggaatacttctccttgagagagtattcctacgcaacagctcaccggctggcctacagcttggaccgaaagtgggaagctgaggcagaagaggtgaagcgtcagaataagacttgtaagcggcgacgcaactccgggccaaacatcattgctgaggggctgagggcttatatcagcattgagaaccggagccggatgggggtgaagagaacctacttcgcgccttgttttctcgtcacaaagccaggctacggcaatggggatattgctttcaggatttccactcatggctacgcagaagcctacgaaaaggcggtggaaaaatattgtgagatccatgatttgacggatgagcagtatgttgagttgcttgaccgtatgccgagtacagaggtgttcactggatacctgctgaatgctcttttaatgcgcggccatcgcgctacaaaagctgaaatactgagtaagctgggggctgagaagaatgaagaggacattgccaatggcaaagggaaaagcggccagaacagagtgcgttgcccagagtatcggtgggcgcaataa

SEQ ID NO: 83871 - DNA, 1428 bp, Citrobacter koseri
atgttaccgatcgtctccccctccgtagtaaccaaacaacttgcgttcaatcgagtaggcgataaacgcaaggttagggtttcgtccaactttttggatgttatggggttcaagccaggtatgggcatcgccgttgagccaggggaggggatgggcggtttttcggtgatcccagcgaccgatgaactacagacacaccaggtttatcagcgccggtatcaaccaaagagtcgctccaacaacccgctggaaaccgttattgagttttctggacaagggctcatagataagtgcttccctcgctatacagagcgtttccacgtcgaaatgcgaaaaggccgagtagtcttcactcctgtcgcaaacagagcctttgccattgcggatcggttcagaaaaaccagccctttccgtgcctttgtggcattgactggcggggtagacattcatgttatggaagcgcttggctggaaggctgagattgttttggagcatcgtccagttgaagccagagacagagcatccgggcggaacctgagtgaagtacatgcgctcaatacgctggtgaacagctccccgcgtatcctgctgaatgaagacattcatcacctggagctggatcgccttggagccttgctggcggagtgcccaccaattggtttggcccattactcgttggggtgtgatgaccactcaaacgccaaaagtccaagggacaaagagcgttctcttgaggatctctccaccatgctcgacatggtttacccggcactaaaacagatcgaggtcgtgaaccctgccgtcgtgctggtggaaaacgtcccgaacttcaaagcatccggagccggggcgatgatgggaacgacactgcggcggatggggtacttcctcactgagatggtcttgaacggtctggatttcggcgcttaccaggggcgagaacgctattacatggtggcgtcggtcttccctgggttcgttccaccgaaacctgagcagagagctggtggacgattgtggccggtgatcgagaagcacctcggggattgtgctgacgtcacagtgttgaagtcaattcaggccagagagtcaacttctcgcaggatgcctgcgttcttgacgagagaaagcaccagttgcccgaccatcctcaagtctcaggatcgtggggtaaaggatgcagtgtacatccaagacggtggccgcatttacaagccatcggtcgatctggttcaggagttgatgtcgatacctgatagctttgatgtttcgtggatggcaaaagaacaagcgacagaaacgcttgggcagagtgtggattacagattgcattcagcggtcatggccgcagttcgggatcacctgaatgtgaattgcggtcgccataccgtggtgcagcacggtatcagaagtaaggaaggtagataa

SEQ ID NO: 83872 - DNA, 501 bp, Citrobacter koseri
atgaaagcccaggcatacccaccatcagtcattcgtaaaggcgctgtgttgtacgcagccctttattacatctctgatgatgataaagcaaaggtcgaggttacagagtggatagttcgctctattcagaaacgacgcaactcaaccagcgatcaacgctatgtcaatcttgcccaaaagttagatgggattacgtgggggaaaaggtcacggaagaatggggactttggttggttgccatctataccgagctggtgtttgaagcagttccgggaaggtggcgaattgccttttggcgtttatacgacgcgactggccgctctcaagtttgcgaaagtcagcttgcaggaagaggtccaatattgcgaggccgagctgaaaaagcctcagacagaagaggatactcaggaactccaagaggagctggcggagaaccagagacttctgaaagctgctggagcaatggtgaagcgcgagcaaaacaagaagaaaagaggttga

SEQ ID NO: 83873 - DNA, 312 bp, Citrobacter koseri; identical to SEQ ID NO: 49818

SEQ ID NO: 83874 - DNA, 507 bp, Citrobacter koseri
atgattgacatgacatgccgcctctgtgctggttccggtgtttatgacttttccccttccaaagaaacctgcggtatgtgccaagggcatgggaaatttgctgacgccaaagcaatgctggtggctgccatcgagctggcaaagaagcaacgcgagccggtcattgaagtggtaatggggttggtgctccagggtgtggatgttagagggaaggagcctggagagcggttcaaggctgctcaggcctttaacgccccagggcacaacctattacgatacgggtgggatgcttgggagctctatgccctccatgagggtgtaagtccagaacttgcatcgcttggccgaagtgtgatgcgcgagtggcatagccattcatggggccggttcagtggagaggtaggctttaacgccgccgagatcatgatcaaacaggccaaagacaacccagaaaaagcagaagagcgctgggcgttcctgcttagtgaagaatggatggtggagtaa

SEQ ID NO: 83875 - DNA, 675 bp, Citrobacter koseri
atggacgagaacaagctcaacattgaaacggtcgatgggcacaacgagctggtagtcagctttttgtccagaatggtaagcctgagtgacgaggaaaagcagacagtattgtcctgccttccgggcaccggcaaacaaacaatcacccagctctatgaggcgctgcgttctcaagggcaccaggatcttgcagagaaggtcgaaccatacctccagcagggggtgtttgggccgatcttcgataacgccaagtccaaggtgttcgttcgggacgaagcgccttttttcctcatggatgaaaatcctttgaactgggatgacgctaaagcattcaatcgcctacgtatgagtacgacctgtgttcttggccgtggcggctggactatcggtgagcgctttgatgaccgctttgataccgaggtgggcggaacacagcttatcgtcacccagtcactcaacgaaaaaggtgagattgaaggaggacttcctacctcgatgtcgctgaatgactttgctgagttccctaaacagccaaggcctcctcaaatagtcgattaccaggaagacaagcgatacacgcttgaggaagcggaagctatccctgagctcgcaccagtggttcagcgtctgaaagagcgcatcgaagagtatgaggagagaagagcccatgattga

SEQ ID NO: 83876 - DNA, 282 bp, Citrobacter koseri
atgagtaagcgatatgcggtagtgccgcatccgaaactgaaacgagagtacaaaggtcggctggtcagaactactcgggtactaaaaaacggctggggggtgatccctctaggggctgtggcaacggtcacgcatcagtctcccaagggatcagaactgacctttgaaccatgcgactgctgcggcctgaaagccattatcagtcatgtaagcatggactccattgaatttatcgaaccgattactgaggaagaagatggacgagaacaagctcaacattga

SEQ ID NO: 83877 - DNA, 144 bp, Citrobacter koseri; identical to SEQ ID NO: 25134

SEQ ID NO: 83878 - DNA, 636 bp, Citrobacter koseri; identical to SEQ ID NO: 25135

SEQ ID NO: 83879 - DNA, 273 bp, Citrobacter koseri; identical to SEQ ID NO: 25136

SEQ ID NO: 83880 - DNA, 1182 bp, Citrobacter koseri; identical to SEQ ID NO: 25137

SEQ ID NO: 83881 - DNA, 786 bp, Citrobacter koseri; identical to SEQ ID NO: 25138

SEQ ID NO: 83882 - DNA, 312 bp, Citrobacter koseri; identical to SEQ ID NO: 25139

SEQ ID NO: 83883 - DNA, 420 bp, Citrobacter koseri; identical to SEQ ID NO: 51548

SEQ ID NO: 83884 - DNA, 837 bp, Citrobacter koseri; identical to SEQ ID NO: 22759

SEQ ID NO: 83885 - DNA, 1272 bp, Citrobacter koseri; identical to SEQ ID NO: 51516

SEQ ID NO: 83886 - DNA, 912 bp, Citrobacter koseri
atggatatgaataaaaacactaaaataaaaaacaaaaatttcaacattaaagactcacagaattttttgcataatactaaattagtcgaagatttgctttttaaaagcaatataactaaggaggattttgttgttgagattgggcctggaaaaggcataataaccaaggcattaagcaaaatctgcaaagccgttactgctattgagttcgatagtgtattggctgataagttgacccatgaatttaaaagttcaaatgtgtctattattgaagccgattttttaaaatacaatttaccagaccataattataaagttttttcaaacattccatttaacataacggcaagcattttaaataaattgttagatagtgagaacccacccttagatacttttttaattatgcaatatgaaccttttttaaagtatgcgggtgcaccatcttacaaggagtcttataaatctttattatataaaccatttttcaaaactaacatattgcatagctttagcaaatttgattttaagccagctccaaacgcaaacattattttgggccaattttcttataaagactttacagatataaaccttgaagacaggcatgcttggaaagattttttagcctttgtctttttagaaaagggagttacatttaaagaaaaaacaaaacgaatttttagttataagcaacaaaaaataattttaaaagaaagccgaattaatgatgattcaaatataagtaattggagttatgaattttggctaaaaatgtttaaactctataattcgaacatggtaagcaaggataaaaaagttttagttaacaattcgtataaaagaatgttagaacatgagtctagtttagaaaagattcatagaaatagaaagcaaaataacagaaaatag

SEQ ID NO: 83887 - DNA, 705 bp, Citrobacter koseri
atgaacccattcaaaggccggcattttcagcgtgacatcattctgtgggccgtacgctggtactgcaaatacggcatcagttaccgtgagctgcaggagatgcttgctgaacgcggagtgaatgtcgatcactccacgatttaccgctgggttcagcgttatgcgcctgaaatggaaaaacggctgcgctggtactggcgtaacccttccgatctttgcccgtggcacatggatgaaacctacgtgaaggtcaatggccgctgggcgtatctgtaccgggccgtcgacagccggggccgcactgtcgatttttatctctcctcccgtcgtaacagcaaagctgcataccggtttctgggtaaaatcctcaacaacgtgaagaagtggcagatcccgcgattcatcaacacggataaagcgcccgcctatggtcgcgcgcttgctctgctcaaacgcgaaggccggtgcccgtctgacgttgaacaccgacagattaagtaccggaacaacgtgattgaatgcgatcatggcaaactgaaacggataatcggcgccacgctgggatttaaatccatgaagacggcttacgccaccatcaaaggtattgaggtgatgcgtgcactacgcaaaggccaggcctcagcattttattatggtgatcccctgggcgaaatgcgcctggtaagcagagtttttgaaatgtaa

SEQ ID NO: 83888 - DNA, 534 bp, Citrobacter koseri
atgaaaaacttagcaacctggcttctggccgcagcatttacgacagccgccctgcccgcctttgcggtggaaccatccgttcaggttggctactcgcctgaaggaagcgcccgcgttctcgtcctgagcgccattgactccgcaaaaacctcgatacggatgatggcttattcttttaccgccccggatattatgaaggcactggtagcagccaaaaaacggggagttgatgtgaaaatcgtaattgatgaaaggggcaatacggggcgcgccagcattgcggccatgaactacatagcgaacagcggcatccctttgcgtactgacagtgatttccctatccagcatgacaaggtgatcatcgtggataatgtgaccgttgaaactggcagctttaatttcaccaaagcggccgaaacgaaaaactcggagaatgcggtggtgatctggaacatgcctaagctcgctgaatcattcctcgaacactggcaagaccgctggaatcgggggagagactaccgttccagctactga

SEQ ID NO: 83889 - DNA, 996 bp, Citrobacter koseri
atgactgatgcagctttctatcaacttggcccactgcgcgagtatttagaagatcctactgtttttgaaattcgcattaactgctttcaggaagttatctgtgatacgttcagcggccgcagggttgtgcagaacgcggcaattacggcagattttattaggaaccttgctaaatcgttggtgagcagcaacaagctgaccatgcaggccattaatgacgtgatcctgcctggcgggatcaggggcgttatctgtctgccccctgcggtgattgacggtacaacggccgtagcgtttcgtaaggatttggcggccgataaaaatctggagcagctgaccagcgaggggattttcagtgactgccggaagattaccggcagcaagcaaagcctaacggatgatgattttttccttaaagagctgcacagcagcgaaaaatggcccgcattcctgcaaaccgccgttgagaagaaacgcactatcgtgatctgcggtgaaaccgggtcggggaaaacggtactcacgcgcgcgctgttaaaatcgctacataaagacgagcgtgtaattattttagaggacgttcacgaagtcacggtcgatcacgttgtagaagccgtttatatgatgtacggcgatgcaggaaagatcggccgcgtcagcgccactgatgccctgcgagcctgtatgcgtctgacaccgggccgtatcatcatgactgagcttagggatgatgctgcgtgggattatcttaaagcacttaataccggccatccaggcggtgttatgtcaacgcacgctaactctgcgcgcgatgcctttaaccgtattgggctgcttatcaaagcgacccctatcggccgtatgctcgatatgagcgatattatgcgaatgctctactccaccattgacgttgtggtgcatatggaaaagcggaaaatcaaagaaatttattttgaccctgaatataaaatgcagtgtgtgaacgggagcctgtaa

SEQ ID NO: 83890 - DNA, 1161 bp, Citrobacter koseri
atggcccgtaaaagtgtcgatgtagatcaggaactcgatgaaaacaccggagacggtgaattcgaaagcgagcgtggcggatttaaaggcagtaaccgccgttcggctcctggtatgaaagcctttgtcatactgatggcgctgcttgctttggtattcatcgggattacggtcatgggtaaaattcgcaccccggctaaagctgaagctgataaagacggtggtaaagcgcaacaggccaatacactgccaaactacagctttaacagcgatcctgatgttaataaacctgcaactgcgcagaatagcgccactgatgcccgtgctgtgcaggctgccgcacaggcagatgcagatgcgggcagcagcaataccgccgcgcgtacctctaataagcgtaaagaaccttcgcctgaagaactggctatgcagcgtcgtctgggcggcgagctggcccagactaatcaggcggctacaagcaatagtcccggagtgcagccccaggacaacgaaacaagcgaaggtagttcagcactcgctaaaaacctgactcctgcaaggctgaaggctagccgcgctggagtcatggctaatcccagcctgactgttccgaaaggcaaaatgatcccctgtggtaccggcaccgagctggataccactgttccgggtcaggtttcctgccgggtttcacaggacgtttactcagctgatggactcgttaggctgattgataaaggctcatgggttgacgggcagattaccggtggtatcaaagacggccaggcgcgcgtgtttgttctctgggagcgtatccgcaatgaccaggacgggacaatcgttaatattgacagtgccggaacgaactcactcggcagcgcggggattccgggccaggtggatacccatatgtgggagcgtctgcgtggtgcgatcatgatttcgttgttctctgacaccttaacggcgctggttaaccagacgcagagtaataacattcagtacaacagcacagaaaacagcggtgagcagctggcgtctgaagcacttcgctcttacatgtctatcccccctaccctctacgatcagcagggtgatgcggtgagcatttttgttgcccgcgacctcgatttcagcggcgtttatacgctcgcagacaactaa

SEQ ID NO: 83891 - DNA, 885 bp, Citrobacter koseri
atgaaaaaactacttctttcagcagtcgttttgtcagtcctgggaggcgcggccactaacgttatggcgcttgaggttggccgcaattctccttatgactatcgcattaaaagcgttgtttataaccctgttaatgtggtcaaaattgacgctatcgccggtgtggctacccacattgttgtcgcgcctgacgaaacctatatcactcatgcttttggcgattctgaaagctggacgtttgcgcacaaaatgaaccatttttttgtgaagccgaaacaggccatgagtgataccaacctggtgatcgtcaccgataagcgcacctataacatcgtcctccatttcatcggtgaagaaacgaagaaaaatgcagacggtacggtatcaaaatcctttattgaaacgccgtgggctgtgcgccaggccgttcttcagctgacctatgaatatccgtttgagcagcaggaaaaagccaaaagcgcggctgataaaaaacgcattacgcagaagctgaagcagacggcttttgcgggggcgaagaactatcagtacgtaatgagcgaacagcctgaaatgcgcagcatccagccggttcacgtctgggataactaccgctttacccggtttgagtttccggccaatgcggagttaccgcaggtctacatgatttcggccagtggcaaagaaacgctgcctaactctcatgttgtgggtgagaaccgcaacatcatcgaggtggaaaccgtcgctaaagagtggcgtattcgtctgggcgataaagtcgttggcgttcgtaataataatttcgcgccgggcgccggtgcggtagcaaccggcacggcttccccggatgtgcgcagggttcaaattggggaggataactga

SEQ ID NO: 83892 - DNA, 318 bp, Citrobacter koseri
atgtccacgccgaacgtggcagagtcttaccagagcaagttcaagggccgcaacggtcttgataaggttctgggcgacagtgaaacgacccgcgtgaagattaactctgtgatcctcgataaaccgcacggcgtagcaacgatacgctttactacggttcgccgcgtgcgcagcaatcccgttgatgatcagccgcagcgctggattgccattatggggtatgaatataaatcgctggcgatgaatgctgagcagcgttatgtcaacccgctgggtttccgcgtgacgagttatcgcgtcaaccctgaagttaactga

SEQ ID NO: 83893 - DNA, 489 bp, Citrobacter koseri
atgcggtcatttttatacagaatattgcttctttgcttcgtcattatcgtccagatagggctaatcgccattgatgcgagcccgttggttgttgctatgttcctctcgctaacagctttagtcgctggggtctggatggcgtaccttcattcccgatttttgatggcggtgactccagtagttgtctctgtgctaatggcgaccctcgccatgaaaatgtttgagccgagactctttgtttctgccagcgaaaaaggctggttccctttgtcattgttcgtctcgataccgttttacttctacttgagttacttgcttgagatagaggagaagagacgtacattccgggccaatgtaattggttttttgcgtggagtttcggaagagatccgtcgttcaactagagagcataacggccgttggcttaatgtccacgccgaacgtggcagagtcttaccagagcaagttcaagggccgcaacggtcttga

SEQ ID NO: 83894 - DNA, 564 bp, Citrobacter koseri; identical to SEQ ID NO: 56091

SEQ ID NO: 83895 - DNA, 429 bp, Citrobacter koseri
atgatgacacgggcggctatggccgctctgttatccgcgttggtaataggccttgtgtctgatttggccgcacaagagctggtggtaagcccggtggctatagacaagtccactgaggtggagaaagaagctaccttccacaaccgcaagtgggtgttaaggacggggcaggttagtggattcttcatctgccaaggagataacaaagacatttactaccggcatgacagggtgggcgctcactgccagaagacatcgactgggtggcgcaatgtactgggtctcagggacgatgttccggaagttgagctgagcgtgtacctggggaccgttgaaggtgtccccgtgaaagtccttcatcaggaagtgtatggttacgatctgaaagtgcagtacaaggttgcacgtaaagggtcagcaaatgagtga

SEQ ID NO: 83896 - DNA, 348 bp, Citrobacter koseri; identical to SEQ ID NO: 34940

SEQ ID NO: 83897 - DNA, 1185 bp, Citrobacter koseri; identical to SEQ ID NO: 56088

SEQ ID NO: 83898 - DNA, 195 bp, Citrobacter koseri; identical to SEQ ID NO: 34923

SEQ ID NO: 83899 - DNA, 393 bp, Citrobacter koseri; identical to SEQ ID NO: 34922

SEQ ID NO: 83900 - DNA, 330 bp, Citrobacter koseri; identical to SEQ ID NO: 34921

SEQ ID NO: 83901 - DNA, 1464 bp, Citrobacter koseri; identical to SEQ ID NO: 34920

SEQ ID NO: 83902 - DNA, 933 bp, Citrobacter koseri; identical to SEQ ID NO: 34919

SEQ ID NO: 83903 - DNA, 264 bp, Citrobacter koseri; identical to SEQ ID NO: 34918

SEQ ID NO: 83904 - DNA, 498 bp, Citrobacter koseri; identical to SEQ ID NO: 25003

SEQ ID NO: 83905 - DNA, 489 bp, Citrobacter koseri; identical to SEQ ID NO: 25004

SEQ ID NO: 83906 - DNA, 336 bp, Citrobacter koseri; identical to SEQ ID NO: 25005

SEQ ID NO: 83907 - DNA, 471 bp, Citrobacter koseri; identical to SEQ ID NO: 25006

SEQ ID NO: 83908 - DNA, 372 bp, Citrobacter koseri; identical to SEQ ID NO: 25007

SEQ ID NO: 83909 - DNA, 195 bp, Citrobacter koseri; identical to SEQ ID NO: 25008

SEQ ID NO: 83910 - DNA, 549 bp, Citrobacter koseri; identical to SEQ ID NO: 25009

SEQ ID NO: 83911 - DNA, 351 bp, Citrobacter koseri; identical to SEQ ID NO: 25010

SEQ ID NO: 83912 - DNA, 303 bp, Citrobacter koseri; identical to SEQ ID NO: 25011

SEQ ID NO: 83913 - DNA, 294 bp, Citrobacter koseri; identical to SEQ ID NO: 25012

SEQ ID NO: 83914 - DNA, 273 bp, Citrobacter koseri; identical to SEQ ID NO: 25013

SEQ ID NO: 83915 - DNA, 528 bp, Citrobacter koseri; identical to SEQ ID NO: 25014

SEQ ID NO: 83916 - DNA, 189 bp, Citrobacter koseri; identical to SEQ ID NO: 25015

SEQ ID NO: 83917 - DNA, 858 bp, Citrobacter koseri; identical to SEQ ID NO: 25016

SEQ ID NO: 83918 - DNA, 228 bp, Citrobacter koseri; identical to SEQ ID NO: 25017

SEQ ID NO: 83919 - DNA, 519 bp, Citrobacter koseri; identical to SEQ ID NO: 25018

SEQ ID NO: 83920 - DNA, 447 bp, Citrobacter koseri; identical to SEQ ID NO: 25019

SEQ ID NO: 83921 - DNA, 360 bp, Citrobacter koseri; identical to SEQ ID NO: 25020

SEQ ID NO: 83922 - DNA, 429 bp, Citrobacter koseri; identical to SEQ ID NO: 25021

SEQ ID NO: 83923 - DNA, 861 bp, Citrobacter koseri; identical to SEQ ID NO: 25022

SEQ ID NO: 83924 - DNA, 960 bp, Citrobacter koseri; identical to SEQ ID NO: 25023

SEQ ID NO: 83925 - DNA, 855 bp, Citrobacter koseri; identical to SEQ ID NO: 25024

SEQ ID NO: 83926 - DNA, 294 bp, Citrobacter koseri; identical to SEQ ID NO: 25025

SEQ ID NO: 83927 - DNA, 474 bp, Citrobacter koseri; identical to SEQ ID NO: 25026

SEQ ID NO: 83928 - DNA, 522 bp, Citrobacter koseri; identical to SEQ ID NO: 25027

SEQ ID NO: 83929 - DNA, 522 bp, Citrobacter koseri; identical to SEQ ID NO: 25028

SEQ ID NO: 83930 - DNA, 609 bp, Citrobacter koseri; identical to SEQ ID NO: 25029

SEQ ID NO: 83931 - DNA, 1116 bp, Citrobacter koseri
atgttgagacgagaaaaccaaggagatttgttcgatgaccaggtggtgttgccatcactggagtcggttcttaccggcatatcttccagtcagcgttgtgacgatagaacaacgtacttctccgctccggatgtggacctgagtttgtacgatcacatcattgtttgcctgtctggaggcaaagactcgattgctgcgtacttgcggctggtggacatgggtgttgataagtcaaaggtggagttctggcaccatgatgttgatggtcaggaaggcagttcgttgatggattgggccttcatgcgtgattactgtcgtcagctcggggaagaactgggtatcccaatgtacttctcgtggcttgagggcggctttgagggcaaaatgctcaaagacaatgcctatagccacccccatcgtgtagagacgcctgaggggcttctggtgctgcctagagaccataagcgctctaagcctggtacgcgccttcgtttccctcagcaatcgccatcactccaaacaaggtggtgctcatcagccttgaagatcgatgttggccgcagagctcttaataaccaggagcgcttcaaggggaagaagatccttttcatcactggtgagcgccgggaggaaagtgcaaacagatccaagtacaaccagcttgaggctcatgcctgtgacagaagatatgggaagactgcacggttagttgatgcctggaggcccgttcttcattggactgaggaggaggtatgggaagtaatcgagcgtcaccgcatcctggccccagtcccttatcgccttggctggagccggtcgtcgtgtatgacctgcatctacaactcacagcgtatctggtccacgatccgtcactactggcctgaacgagctgggaaaattgctcagtatgaacaaacctttggtgtgacggtatcaagaaaaaaaatcgacgtaatagatttaggttctgctgttgcgccgatacagattagtgatgttgaggcattggagcaggtatccagagaagattacacgctcccgatttttgtgccggaggggcagaagtgggttctccctggtggcgcatttggccgagaggcctgtggttctgattga

SEQ ID NO: 83932 - DNA, 435 bp, Citrobacter koseri; identical to SEQ ID NO: 25031

SEQ ID NO: 83933 - DNA, 1065 bp, Citrobacter koseri; identical to SEQ ID NO: 25033

SEQ ID NO: 83934 - DNA, 288 bp, Citrobacter koseri; identical to SEQ ID NO: 25034

SEQ ID NO: 83935 - DNA, 540 bp, Citrobacter koseri; identical to SEQ ID NO: 25035

SEQ ID NO: 83936 - DNA, 984 bp, Citrobacter koseri
atgagtcaatttgttctgggtttggatattggttactccaacctgaaaatggcaatggggtataaaggtgaggaagctcgcacagtcgtcatgccggtgggggcaggtccattggaactgatgccacaacagttaactggcggtgcagggacctgcattcaggttgtgattgatggagagaaatgggttgcaggcgtcgagcctgaccgattgcaaggatgggagcgtgagcttcacggcgactatccttcgaccaatccatacaaggctcttttctacgctgcactcctgatgtccgagcagaaggagatcgatgtgctggtgactggcctgcctgttagtcagtacatggacgtagagcgcagagaggcgttgaaatctcggcttgagggtgaacaccagatcacgccaaaacgatcggtagcggttaagtctgtcgtggttgtacctcaacctgccggtgcttacatggatgttgtaagttcaaccaaagatgaagacctcctggagattatccagggaggaaaaaccgttgtaattgaccctgggttcttttctgtagactgggtagctcttgaagagggagaggtccgctatcactcatctggcaccagcctcaaggcgatgtcggtgttgctacaggaaacggaccggctaattcaggaagaccacggcggtgcccctggcatcgaaaagatcgagaaagctattcgtgccggtaaggccgaaatcttcctctacggtgaaaaggtatcgatcaaagactacttcaagaaagcctcaaccaaagtcgctcaaaacgccttgatccctatgcggaagtcaatgcgtgaggacgggatggatgctgacgtagttctgctggctggcggcggtgccgaggcttaccaagatgcggccaaggagcttttccctaagagcaggatcgtactgcccaacgaatccgtggcatccaatgccaggggcttctggttctgcggctga

SEQ ID NO: 83937 - DNA, 705 bp, Citrobacter koseri; identical to SEQ ID NO: 8686

SEQ ID NO: 83938 - DNA, 1026 bp, Citrobacter koseri; identical to SEQ ID NO: 16178

SEQ ID NO: 83939 - DNA, 876 bp, Citrobacter koseri
atggtgacaaagagagtgcaacggatgatgttcgcggcggcggcgtgcattccgctgctgctgggcagcgcgccgctttatgcgcagacgagtgcggtgcagcaaaagctggcggcgctggagaaaagcagcggagggcggctgggcgtcgcgctcatcgataccgcagataatacgcaggtgctttatcgcggtgatgaacgctttccaatgtgcagtaccagtaaagttatggcggccgcggcggtgcttaagcagagtgaaacgcaaaagcagctgcttaatcagcctgtcgagatcaagcctgccgatctggttaactacaatccgattgccgaaaaacacgtcaacggcacaatgacgctggcagaactgagcgcggccgcgttgcagtacagcgacaataccgccatgaacaaattgattgcccagctcggtggcccgggaggcgtgacggcttttgcccgcgcgatcggcgatgagacgtttcgtctggatcgcactgaacctacgctgaataccgccattcccggcgacccgagagacaccaccacgccgcgggcgatggcgcagacgttgcgtcagcttacgctgggtcatgcgctgggcgaaacccagcgggcgcagttggtgacgtggctcaaaggcaatacgaccggcgcagccagcattcgggccggcttaccgacgtcgtggactgtgggtgataagaccggcagcggcgactacggcaccaccaatgatattgcggtgatctggccgcagggtcgtgcgccgctggttctggtgacctattttacccagccgcaacagaacgcagagagccgccgcgatgtgctggcttcagcggcgagaatcatcgccgaagggctgtaa

SEQ ID NO: 83940 - DNA, 1032 bp, Citrobacter koseri
atgtcaggaagcttaagctctgttagtgttttggctattctctctcctcttggaagactggttgaaagagccaggaatatttccaataacccattaagtcaatccctctacactgggcgcaccgatgagtttggccaaatagagtttgctttacgaatgatgcaagctgaaacaggcgccatagtaggtcgcataggtgatgcatcaaatcggcttagcgaacacacccgaggcctactaaaggatattgagtcaagcaatgtacttacagttgagcagcaggcagagacagatcaaatagcaacggcagtaaaccaaatggtggcaagcattcaagaggttgcgagcaatgcacagcatgctgcagatgcggccggaagagcagacactgagacggcatctggccagcgtctggtagcccacacaagccagtcaatcactgcccttgaaggtgaaattaggcaagccactcaggttattcatgagcttgaaggtcaaagtaacgagatatcaaaagttcttgacgttatacgagggatcgccgagcaaacgaatttgttggcactcaacgcagcaattgaggccgcgcgtgctggtgagcaggggcgtggttttgctgttgtcgccgatgaggttcgcagtcttgctgctcgcacacagcaatcgacaacggatattcaaagcatgatcagcgctctacaagagcgagcgcaatccgctgttacagtcatggagcaaagtagtcggcaagcgcacacgagtgtagctcacgcagaggaagcagctacagctcttgatggaattggccaacgcgttaacgaaattaccgacatgaacgcgcaaatagcgactgcggtcgagcagcagggagcagtaagtgaagacataaaccgcagtattatcaatatacgcgatgctgctgataccaatgtacagaccgggcagaataatttgcaaagtgcgaaatctgtcgctcagttaactagcgctctgagcgaactggcaaaacagttttgggaaaaacgaggataa

SEQ ID NO: 83941 - DNA, 915 bp, Citrobacter koseri
atggctaaaaacttcatatcagaacaattctcggccatgtgccgcgacttaacgaacctgtcctctcttatcaaacgactaccgccacggtacgcaaaagttgcggccatccctcctaccggaaaaggaatggagaacgagcccgtcaacaagattgtcgtaactgaacaaactgggcgcgaagctcttgagctggcagcgcacagctacagagatcttcacatcaacccagactattcgcagaagtctgccaggcgcaccgtgggggtactctggttctccccttccaggattggtgtagctgacgaaattgcggcgacggttgaacgcatcaacgcggccaaagctggtatcgaggagttcattatctcgacgtaccccaccaggcaagagaggtttgaagcacttcgagcggactgccctggtgtcatgactctccacctttacagacaaattcggtgctataccaatggcgacatcgactctatccgcttcacctggcaacggaaggactccttgaagaagcccgtaaaagaggagcttttgcaacgcatcagagaggagctggagcgatctgggccagactatcaacttcccctggagcagcttatccagaagatcgccagcaccccggagccttatctccgggagcgaagggaagtaaaggttcaaccggtggcaaacgtcatggccgcaggggtactcaaaaccgttaccgcgccaatgcccctgatcgtgctccaggataaggatgttcagctcaaattgcttcgtaactttgacgcctcagaacaacgcaaaactcgatctgataaagcggcatcggaaatccttggcaccttcggtggagtcactatcgaatccttccctggagggggaaccgcagaattcggaaaaaatcgtacgctaagctaa

SEQ ID NO: 83942 - DNA, 492 bp, Citrobacter koseri; identical to SEQ ID NO: 25051

SEQ ID NO: 83943 - DNA, 870 bp, Citrobacter koseri
atgaatgatgaagaactcgaacttgccagagccgaagccatgaaagccgataggtgcttttcaaaaggacggctcagggacgaatttcggatgaagcctaagccaggagtagagccagtttcgttctacaaaaacgggtatggtggccaatttggagtgtaccggatagcagattgccaaccaatgcggagaaggggttgttcaccggcatcacaaaagcaaataagggcgcaatccatcctttcggtcaaggcaagaatgcgtagcaacctggcaaaggcctctgtcatggcacaaaggtgggtcgctctggaacctctggttctcgataccgagacgaccggacttggtgaaagagaccaggtgatcgagctggctgttactgacatcagaggcgcggttctcctctgcaccagattacggccaaccgtggaaatagaccctcaggcaatgggtgttcatggcatcaccgagactgagctgtcgaatgagcctacgtggactcaagttgcgccagctctcgcccggcttttgtcgggccgtcatctggtgatatttaactccagtttcgacagtaggatgttgaggcaaacagccagtgcatttggagaccaactctcttggtggcaagagcagaactgtctgtgcgcgatgaagctggcggctgatgcctttggctcaaccaaccggcacggcacaatctcacttgcggatgccacctgcgaggcaggtgtgagctggaaaggtcgagcccattcagcagcgaccgacgctattgccaccgccgacttggtgacagagatagccaaagtccaacgtgacctcgtggtccagctccaggaacttcaaagcaaaggtaatttggaatga

SEQ ID NO: 83944 - DNA, 1011 bp, Citrobacter koseri; identical to SEQ ID NO: 25053

SEQ ID NO: 83945 - DNA, 537 bp, Citrobacter koseri; identical to SEQ ID NO: 25054

SEQ ID NO: 83946 - DNA, 288 bp, Citrobacter koseri; identical to SEQ ID NO: 25055

SEQ ID NO: 83947 - DNA, 282 bp, Citrobacter koseri; identical to SEQ ID NO: 25056

SEQ ID NO: 83948 - DNA, 603 bp, Citrobacter koseri; identical to SEQ ID NO: 25057

SEQ ID NO: 83949 - DNA, 453 bp, Citrobacter koseri; identical to SEQ ID NO: 34917

SEQ ID NO: 83950 - DNA, 273 bp, Citrobacter koseri; identical to SEQ ID NO: 34916

SEQ ID NO: 83951 - DNA, 4263 bp, Citrobacter koseri
atgagatcgagaccttcccttttactgatgcgaaacctgcggtcattggccgttgtggtgctcgcaactttgccatgcgttgcttttgcacaatggcgggttgtagccgtgagcaccgaagtagacaaaatgcgcttcaacaccatcatagacgcgcattccttcatgaagaattatcgctctggtgaggagcaagggaagggaacgccagttggggatgcgctttatccggttgccagttatggtgatggccgttatgtctccaggatctgttttaagtatctaggtgctactggcgattatgaccccactacctgcactggcgacccagctacggtctactggcgctcaacctatgttctgccgggtgagatggataaaacaccgttcctggacagggatctcggcttaccaacaacgaccatgtgtgtagggaaccctatccatcttggcaccggcaacaagttccaggctgaactggattatcaaagcggaggctccgaccctttcacattcaccagatactacaatagccaccttcctgatgaagagctcggcggctggcggcatacctactcgcggagcgtcgaggtcaacgcctcgaagtacggtgagaacatggttgtcctgcaccggccagaagggcaacaactcgcgttctacaactcgtcctctgtctgggtgccaacatggaaaaccgatgataccttgacgaaggatgctaccggctggcgttacactcaatctgacggggtagtcgaggcctatgatgaaaccggacgactgaccggcatcgagaagcccaacggcaatcacatcaccctgagctatctgaacggagagctatcctcgatcactgacggctttggccgcaacatccagttccagcatcaagatggccgcatggtcagtgtcaccgatcctgctggtggcagtattcagtaccagtacaacagcgctggcaagctggcggaagtgatctaccaggacaatacgagccgcagctatctctacgatgacccgaatgcaccgggtttgctctctgggctggtggacgagaacggcaaccgtttcgccacatggggatatgatgctcaggggatggcagttctaagtgaacacgccgggggcgcagagaagactcaggtaagctacaacgctgacggaagcgtctctgtcaccaacgccctcggccacgttcagcgatatacctacagccgtcacaacgggatgctcaagcctgatgttgttgagggtgcgccgtgtaccggctttgtgggaggcaaggaaacctacgtctacgacagcaaaggcctcgtctccagcattacagatcgtgctggacagaagcgcacgttcacccataacgaccggggattggaaaccacccagatagaccaggatgggggcaaggttacgaccgactggcttccttccaagtcgctccctgcaaaaatcacggaaccaaccaggatcactgagcttacctacgacactcatctccgggtgataagccgcaaggtcacagatcgcagctcgggcgcttcccggacatggacctacacctatgcccctgttggtacaggaaagccgagcctgttggcctcggttgatggtccgcgcaccgacgtcagcgatgttacgacatttgactacgatgaccagggcaacctgatccggacaacaaacgcgctggggcaggtgatgcagtttggtgactacgacgcgaacggtcgcgccgggaccattcagggcgtcaacggtgtaacccaaaccctcacctatgacgccagaggaagacttgtcagctccactggaccagaaggaaccacggcctacaactatgatgctgtgggcctcctgagctcgctgactaagccaaatggtgcaaccgtcagctatgagtacgacgctgcacatcggctggtggcggaaacagatgcacagggcaaccggcgcgagcttgagctcaatgacctcgggaacccagtagaagagcgactgctcgatgcgctgggccagacccgttggatagagcgccggatcttcaacgaaatcggctggctctccagtgtctccgacgcctatagcaatcagtcatcgttttcctacgatgtggtggcaaacctgatacaggagaccagtccctctggtaacacacactcctacaagtacgacggcttccatcaccggacacaaacgaccgatccactcgggaaggtcacgcaggtgctctacaaggataccggcgatgtttaccgtgtctccgaccctcgttcgcgcctgacctactacagctacaacggctttggcgaagtgactcaggtccggagcccggacaccggcaccaccgacattacctatgacgaagccggtaacgtggcaacgcgcaagacggccaagggacaaaccacaagctacagctacgacgcgctgaaccggatcatcgaggcatccagcggtgtcgctggcgaatcgccaattctgtacgggtacgacgaagcaacctcaccatacggcatgggccgcttgacctcagtcgatgatggcaacggtgtccggagatatggctatacacccgaaggatggttggcttacgagacctgggaaacccacgggcagagccttactacccagtaccaatacgatggtgcaggcctcatcacgaagatcacgtatcccagtggtcgtgaggtttcctacacccgtgatttagccggtgacgtcatcgaggtggcaacgacacaagcaggcaccacaacaagcctggcaagccagatcgagcgagcgccctttggccccgtcaccagtatggtcagatggaacggcatttcagaaagtcgctctttggatctcaattaccgagtcaccggcatcgacgctactagagtgcattcgctggtctatcggtacacgccagactcgttgatttcagccatagacgacaatctcagctcatcagtcaatcagtcactcggttatgacgcggttggccgcatcacctctgctgaggggctctatggcgttttgggctatggctatgacgccaccggcaacaggacctcgatcacgaccgatggcctgagccaaagctacaccatcaactacatgaacaactggctggtgaagactgggcaaacctccagaagctatgacgccaatggcaacctgacgaagcagggggcggataccttcacctatgacagccagaaccggctggtggccgcaacggtcgctggagtgacagcagcttacacctacaaccatctggatcagcgtgtaactaagaccctaaacggccagacccgcctactgatttacggcttggcaggaaacctcatcgaggagctggacgcagccactggagacgtgctggcggagtatatctggctcgatggcacccccttgagctttgctcagtcaggacagacctatcaagtccacgtcgatcatctgggcaccccgaaggcgctaaccgacgccagcggccaagtggtttggaaggcgagctacagcccgttcggtaaggccagcatcaccactcaggggccgaccttcaatttgcggttcccaggacagtattacgacgcggagaccgggctccactacaactggcggcgttactacgacccgaataccgggcgttacatcaccagtgacccgattgggctggctggtgggattaacacctatgcctatgcgctgagcaacccgataggcaatgcagatccaacaggggagtttgtgccgcttcttctgggggcttatgttgccatagactttgccttgagcgcttgggacgcctatgacaccttcaagaccatcaccagtgattgtgcgacctcaagagaaaagtggatttccggggggctttttgctgctgggattatcctgcctggcaactataaggcgctagggaatgttgcggaacgcgcttttaaaaatacggctgatgattttgtagacctagccagttcccagagacgtaagcatattcttgatggtgacgccactggtggagggcatcgagcaggaacaggcaagcctggaaaaagtgagtttcctcaaagttggtctgatgaaaaaattatgcacgtcatttccgatatagctaccgatccaaatgtttctcgaaaggctgggcgcggtggtaggactattgcagaggcagttaaagaaggtattaatgttcgtgtaatacaagaatctaatggtgatattgtttcaggttttccaacaaacgtaccaaggaatccaaaatga

SEQ ID NO: 83952 - DNA, 726 bp, Citrobacter koseri; identical to SEQ ID NO: 49886

SEQ ID NO: 83953 - DNA, 240 bp, Citrobacter koseri; identical to SEQ ID NO: 49885

SEQ ID NO: 83954 - DNA, 279 bp, Citrobacter koseri; identical to SEQ ID NO: 49884

SEQ ID NO: 83955 - DNA, 1728 bp, Citrobacter koseri; identical to SEQ ID NO: 49883

SEQ ID NO: 83956 - DNA, 387 bp, Citrobacter koseri; identical to SEQ ID NO: 49882

SEQ ID NO: 83957 - DNA, 147 bp, Citrobacter koseri; identical to SEQ ID NO: 49881

SEQ ID NO: 83958 - DNA, 852 bp, Citrobacter koseri; identical to SEQ ID NO: 49880

SEQ ID NO: 83959 - DNA, 558 bp, Citrobacter koseri
atgtctaactttgaacaagctctggagcgtactgacggtaaaacactgattctcagcaatgggagtaagtgggcaggccaagacccggacagcattcagactttactggatgtcctgggtgacaacgttcttgacccgatgtttgagcagtatcactgttatcgcccatacccgtttgaaccaatggtgaggacggggcgaaatggcgaaatgttccagccttggcttggggcagcctgcttctttgggaacttcctgaccgtctctcatgttttcaacatcatcacgaaagatgacggtgttgttgaggccttaacagaggcgatccggaagaatatggcgactgaacagtaccagcagaatgcctatgagcgttatgccggttggttctacgctgaaaccagcgaagggttaaggctagtctctccaagtgaggctgccgacatccgagctggcgcagtttcaaagctgcgttacccaagaaacttcgaggttatgaaaactgcggttctcaaaggtcctcgatttgatactgaattaaaccgcaaggcttcttaa

SEQ ID NO: 83960 - DNA, 219 bp, Citrobacter koseri; identical to SEQ ID NO: 25099

SEQ ID NO: 83961 - DNA, 270 bp, Citrobacter koseri; identical to SEQ ID NO: 25098

SEQ ID NO: 83962 - DNA, 606 bp, Citrobacter koseri; identical to SEQ ID NO: 25097

SEQ ID NO: 83963 - DNA, 204 bp, Citrobacter koseri; identical to SEQ ID NO: 56217

SEQ ID NO: 83964 - DNA, 2454 bp, Citrobacter koseri; identical to SEQ ID NO: 56216

SEQ ID NO: 83965 - DNA, 387 bp, Citrobacter koseri; identical to SEQ ID NO: 56215

SEQ ID NO: 83966 - DNA, 555 bp, Citrobacter koseri; identical to SEQ ID NO: 56214

SEQ ID NO: 83967 - DNA, 432 bp, Citrobacter koseri; identical to SEQ ID NO: 25092

SEQ ID NO: 83968 - DNA, 1626 bp, Citrobacter koseri
atggctactatcgtaaacaccaagttaggagaacatcgaggcaagaagcgcgtctggctggaaggccaaaagctactgcgtgaaggttactatcctggcatgaagtatgatctggagctgaaagattcccaggttgtgcttcgcgtcaaagaggagggtaagttcaccatcagtaagcgcgagcgcaatggccgggtgtctccaatcatcgatctgaccgtgcaggagcttgctaccgtttttgacggtgtagagatgctccgcgtgttcatccgtaacggcgcaattgtgatctctgctcaccatcaacaagagcgagtgatcgagcgcgtcaaccggcttatcagtaagctggagaatggagaatcgctttcggtatgcagcctctttcatgggggtggtgtgcttgataaagcgattcacgccggttttcacaaggcgggaattgccagtgccatatctgtggccgtggagatggaagggaaatatctcgattcgtctttggcaaataacccggagctttggaacgaagattctattgttatcgaatcgccaatccaggctgtgaatctcagcaaacgcccaccacaggtggatgttttgatggggggcataccgtgtaccggcgcgtcaaagtcaggtcgcagtaagaacaagttggagtttgccgaatcgcatgaggcggcaggtgccatgttcttcaacttcctgcaattcgtagaagcgctaaacccagccgttgtgctgattgagaacgtgcctgagtaccagaacaccgcttcgatggaagtgattcgttcggtgctctcttcgttgggttactccctacaagagcgcattctcgacggcaatgagtttggggttattgagcgccgcaagcgtctttgtgttgttgcgctttcccacgggatcgacgggtttgaacttgagaaggttcagcctgttcgcaccaaggaaagtcgcatacaggacatcctggagccagttccgctcgattctgaacgttggaagtcatttgactatctggctgagaaggagttgagagacaaagctgctggcaaggggttctctcgccagcttctgactggcgacgatgagttttgcggcaccataggtaaggactatgcaaaatgcagaagtaccgaacctttcattgttcatccagaacagccggagttgtctcgcatctttacaccgacagaacattgtcgagtgaaagggataccagaggaactcatccaaggtctgtcggacactattgcccaccagattctcgggcaatcggtagtctttcccgcgttcgaggctttagccctcgcattagggaacagcctgtggagctgggttggaatgatgccaatcatggtcgaagtcgtggatgaatcacagccggtgatcggtggtgaagacttccattgggcaacggcattggttgacgcaaagggcactctcaagctgtcaccggcagcgaaaaaacaggggatgcccttcaacattatggatggtcaattggctgtctattcacctaacggaactaaaaagagctgcggccatgagccttgcgaatatctcccggtaatgatgtccggagacgcaatcatggtcacttcatctttggttcattag

SEQ ID NO: 83969 - DNA, 303 bp, Citrobacter koseri; identical to SEQ ID NO: 25090

SEQ ID NO: 83970 - DNA, 345 bp, Citrobacter koseri; identical to SEQ ID NO: 25089

SEQ ID NO: 83971 - DNA, 354 bp, Citrobacter koseri; identical to SEQ ID NO: 25088

SEQ ID NO: 83972 - DNA, 192 bp, Citrobacter koseri; identical to SEQ ID NO: 25087

SEQ ID NO: 83973 - DNA, 453 bp, Citrobacter koseri
atgcagcttaaccgatacacggccagggagtctgacaaaagtcggatacttcggaccatcggctggtgcaagcgcaatcaccttacacttgccggtcttccatacgaggacaatcttgcaggaagtgacgggatcagcatagagatcatcactcctcctggtatgtcgcgggaaatgttggagcaagccgtcagagaggggtattcagagcgagatgtcgtaaggcatcgcattctggagtgccctgtcggttggttcatggaagctgatggcaaggcatttgatcatgaagtgttccacgattacgtggtggctcatggttatggcgaaccttccagcgaagcctatgagctggcggagcggtggttctggcagggcaacgattatgcgttgatagctgcggaaatagttgctcgtgatctttgtgttcgtgatgacgaagatgaggactga

SEQ ID NO: 83974 - DNA, 390 bp, Citrobacter koseri
atgtctatcaataccaaagttgaacaaatcgcatacggtcatgctaccgctctagtgctcagtgaactgggccaacaagagaattggtgcaaggcttatgagtatttgtctgagtgtgtcgaacggggagacgagcctgaggatctggtcgtttggcaaccgtttgagcactgggaatggaaagacattctggagcaaatcgagagcgaagccgagtctctgctttcgactattaagtccgttttaggcttggcccacaaaggcatcattcagtcagcaattgactgctctctggattcggacatgacccagcttgacctgattggaatggtcgagctcggaagtgaaatcgaagatggggagtgtgctggaggtggctatgcagcttaa

SEQ ID NO: 83975 - DNA, 225 bp, Citrobacter koseri
atgaacgtacaacttcaagccagcaacaatgtgctgttggcgcaaatcgaaagcaaaggcctcactgttgaaacgcattgtcgcagtggcttttgtggcatgtgccgggttcgtctactcgaaggtcaagtggcctatgacgagacgcccatcgcatttgtcaaagaaggggaagtgttggtttgctgcgctaaagcaaaaaccgatgtgaccttggaaatttaa

SEQ ID NO: 83976 - DNA, 885 bp, Citrobacter koseri; identical to SEQ ID NO: 25082

SEQ ID NO: 83977 - DNA, 501 bp, Citrobacter koseri; identical to SEQ ID NO: 25081

SEQ ID NO: 83978 - DNA, 540 bp, Citrobacter koseri
atgtctcatctgaacaatctcaaatccgtaatgatctctctcgccgccgaacataagctgcctgaaatctaccaggatgacatcactaccgatgtggagtctctggatcgattcgatggtttacgtctggtctggctgttgcggtcttgcggcagcgtattggtgccagcggaagttggcgttaatccgatctatatcacccattggttgtggtctaaccacggtcaacaggtggttccattctctgtggatacccgcacggggttgattgaaaaaatcgacttcgagcaagctgaaaagctgatcatgcagatgccttgcaacctctcttcattgcagaacaaggaatacttggttgaccaggtaaaccgagtgttgcaacgaggttgtgaaatgcgtatctggggtatcttcgagtctccaagctcggtggaatccgttggtggttggaaagagtggcagagctatttcagctctactgggaatcgactgatggccgatttcgttggtaaagccattcgattcaccaaccctcgataa

SEQ ID NO: 83979 - DNA, 336 bp, Citrobacter koseri
atgaaccaattccattcatctttggatttgtatcatcggaacaaaggtagaagggctacagtgccggagacgccttttttactgcttgctaagcgcattcctccgatgtactggagactgttccagggtgttactttggatagtcgtatgggatacacaggcaggcggcagttccacagtcttgggcaagcaatcgactgggcaaagtcatcagttggcgattcctggtcaaataagcgctttcacaagccggtaggcctcgatgtattgctggcctgtactgcgagtaaggtgcctgaacatctggtcgaagaactgaaaagacggggcagttga

SEQ ID NO: 83980 - DNA, 1797 bp, Citrobacter koseri
atgtccaaaaaacgcaccatttacagcgctctaccaatcgtggccgcagcctatggtgaaaaactcggtgtcaaagtcgccatcggtaacgatgacgcatacaccgatggtaagaccatcgtggttccgaatatccccgacgactatcctcacatggatgctgtctgggggtatttggcccatgaagcagcccatgtccggtttacggactttggtgttgagcgccgcagaggtcttcatgctgagttgtccaacgttttggaggactgccgcatagaacgggccatgatggaactcttccccggtacgtcgcagaccctgaatgaggttgctcgctatatggctcaagctggtcattacgagcacgtcacagacaaagaggcccctgcctccattctgacagggttttgtttgtactggttgcaaaccaaggctgtagggcaatccgtccttcaaccctatctcgattcggctacccccgtattcgagcgcgtgttccctcagggtgttgttgttcggctgaacgctttactgcgtaaggctgtgaacactaagtcaaccgcagaggtgacatccttggccgaccaaatcatcaagatgatcgaggaggaaaaggagaaagaagagcaaaagcccctgaatggtcaggatggtaacaaccagcagaatgctggtggcaaccaacctcagaacagtcagggcggaagtggtaacgatcaaaaccaagggcctgatgccaatggtggtgatcagcaaggtaaagaccagaagcaagacgatgctaacgggaaatctgatccgaaaggacagggcgaccaaggcaagtcggatactgatggtggcagcaaggcaggacaaagccaggctggtggcaattctgacgcggcgaaacaagacgcggccaaaatgctccagcaggttctgaatgccggtgccggtgatttgcgtggtgacgcgcatgatgcacttaaagccgagctcaaccgggtggctcaagataagggggacagtagctatatgactgttcgctctgctgtgaacacccaggacaaccctgctgttggcaaaagcctggtaggggatgtgaagagcaccacttcaaagataagaacgcagctctacggattggtccaggccagccagcgagttgctcaccgtaaccaacgatcagggaagcgtgtggatgctcggaaactacatcgtgtagtgacgggtgatacccgcgtattcctcaagccggaagccaagaaacgccctaatacggcggttcacatcctggttgatatgagctcctcgatggcctacaaggccgccaatggaaaggagcgtcaagacattgcgcgggaagcgtccttggctatttcgatggctctggaagcaatacccggcgtaaacccggcagtcaccttttttggtggcaaccggaaccagccagtgttcagtgtcgtgaagcatggagatacggttcagaatcgggccggtcggtttgggttcaaagcaactggcggtacgcctatggcggaagctatgtggtatgcagcttttgaactcaccaagacccgtgaagagcgaaaaatgttgatcgtagtgactgacgggcagcctcaaagcgccccggcatgtcgctcagtgattgacctctgtgaacgaagcgatgttgaggtgatcggcataggggtagagactaccgcagtgtcaggactgttccaaaagaacattgtcattgatgatgcggcagctctgcaacgcacactgtttaagttgatggagcggtcattgactgcttttgcagcttaa

SEQ ID NO: 83981 - DNA, 1278 bp, Citrobacter koseri
atgactaaagtgaaccatctacaaagcctctgtgttatccacgtagactttgacatctggagtggacaaacccgtttgtctgcatctgatctcaagctgggcgagggtggtgaaattccacctgagaaagtagctcaactgggaagtaagaagatctgtgatccggctaagctgaaaggctttcatcgcctgaaaacagaaactcgtcgcctcctgctgaaattcggtatgccgttcatgaacggatttgccgtacccgtcagcaagaccgatgaaatctgtaacaagctgaatgacataaactttcagtttaaccaactgaaacaggatttcatcaaaggttacaacaaagccgtggatgaatggtgtcaggagaaccctgagtatgaacgagctatccgtgccggagcccttccaaaggaaacggtcgaggagcggattggctttgagtaccaggtgttcatgatccagcctgtgaacgaagatgaggccaacgccaaacgccttaaccgcaaggttgagcgcttgggtgacgatctcatctccgaagtggttcaggaagcgaataagttctatatggaacgtttggccggtcgagaccaatgtgcggtcactactcggcagacactccgtaacatccgcgacaaggtggatgggcttagcttcctgaacagcgcttttaaccctctggtcaagctgctcgaccaaaccctccggggatacgagcaacatgccgatggccgaaacatcgttgcgcctttcttttatcaggtcgtggccgcagtgctgatcatgagcgagagggaccgcatcgagcagtatgccaatggctcgattactgtagagggcatggctaatgacattggcggttcgggagcccagatgggggaccgttctaaagatgaaaaggccgaacagaaaagcgataaagccggtgagcttatccctgcaacagagggtggcgaaaccaagcagcaacaggtaggtggtactgaatctgttcaatcagaacagactaacagcggtggtaacgctgttgacctggatgaagacatcgacaacttcttcaagagttttgcagaacgaggcgagggtgaatcggaagatgaatccaatgccggtgatgtggttcgagaagagcgcgttgatgttgaggatgagccggttttgcctgaggaaactccggtagagcaagagcctgtccaagaggagccgacagaggagcctctcaaccaggagctgcctaaaactgacgacgatggcgactatttcttctaa

SEQ ID NO: 83982 - DNA, 1011 bp, Citrobacter koseri
atgaaaatagtcaacctatcgcaacgagaggaagattggcttgattggcggcgtcaaggtgtaacagccactgacgccgctatcctgctcaatcggtctccgtacaaaacacgatggagactgtgggccgagaagactgggtatgcgcgtgaagtcgatctgagtcttaatccgctggttcgccgggggatagaaaacgaagatgctgcaagacgcgctttcgaggagaagtatgatgacatgctgctccccgcctgtgtcgaatcggttcaatacccgctcatgagggcctccctggatggcctgagagataacggggagcccgtcgagctgaaaagcccgagtgcgactgtctgggaagatgtttgtgctgagaaagcaaacagcaaggcataccagctttattacccgcaggtgcaacaccagctcctggtaacgggggccaagcaaggctggttagtcttctactttgaaggtcagattcaggagtttccaatactccgagacgaagccatgattcaagaaatcttggccgaggctaaaaagttctggcaacaggtagtagacaagaaggagcccgacaaagatccagagagagacctgtacataccgcaaggtgaagaggtcaaccgttggattgctgctgctgaggaataccgcctctatgatgctgagattcaggagctgaaacagcgactgtctgagcttcaagaaaggcaaaagcctcatctcgacaccatgaagtccctcatgggggaatacttccatgccgactactgcggtgtgatggtaacgagatacaaagcggctggccgggtagactacaaaaagctgttggctgataaggcgtcaggcgtgaagcctgaggatgttgaccagtacagagagaagtcatcagagcggtgccgtgtaacggttactggctctgtgaagccacggtacattgttgatgaggacgtgcttgctcctcttgatgatttgccggaagaagtagagacgttctactggtga

SEQ ID NO: 83983 - DNA, 1032 bp, Citrobacter koseri
atggtgtcctcaaaccgttcattcgtgaattggagaaacaccatgtctgataacaaatctcttgtaacccgtatcgcaagccggtttggcgtggacacccgaaagttctatgaaactttgaaggcgaccgcattcaagcagcgagatggaagtgccccgaccgatgagcagatgatgacgctcctgatcgtggctgaacagtacggtttgaaccctttcactcgggaaatctatgcgtttcctgacaagcaaaatgggatcattccggtagtaggtgttgatggttggagccgcatcatcaacgagcatccccagtatgatggcgtcgagttcgtgtattcggacaagatggtcagaatgcagggggcgaaagttgactgccctgagtggattgaatgcgtgatttaccgtaaggacagatctcgccctatccgcatcaaggagttcattgatgaggtgtaccgtgaaccgtttcagggtcaaggtcgcaatggtgcttacactgttgatggcccctggcaaacgcacaccaagcgtcaactccggcacaagtcgctgatccagtgttctcgtgtcgcatttggtttctctggtatttatgaccaggatgaagctgaacgcatccgtgaaatggagcaggcatcggccattaacccggctattgccaatctcccttcaccatctcaagttcaaagccaagagcctttggctattgagcacaaagagcttgacccgatcctaaccaaactcgcaaatcgcgccattgctgaaaacgcatggtctgcggcgcatgagtatgtgaagggacggtatgaaggttcggaactgcaatatgcgactcaattccttcgtgacaaggagatggatcaaatggagcctccgaaacctgactaccaggaagcgcacgagcaagagtccgccgctggtggttctgcaaatgctgaacctggtgccgaagaaatgccgcctttgagtgacgaggacatgatccctgttacagaagaggagggcgcggaaggcagttactactaa

SEQ ID NO: 83984 - DNA, 528 bp, Citrobacter koseri
atgtctaaaggcgtcaacaaagtaattctggtcggtaatctcggttctgacccggaaattcgctacatgccaagcggaactgccgttgccaacttcaacgttgcaacaacggatacgtggcgcgataagcagtctggcgagcaaagagagcatactgagtggcaccgtattgtgcttaaaggtcgtttggcagaagtcgctggtgagtacctgaaaaagggctcccaagtctatctcgaagggagcaaccgcacccggaagtggactgacagccaacaaatcgagcgctacaccaccgaagtacactgcgttgaaatgcagatgcttggtggtcgtggaaatgcacctcaggacaactctcaacgtgcagcgccccaaaaagggcaacgtacaggagccggtacgcaatctgctcctgtgcagcaatcagcaccgcaaggtggtatgggcggaggctatggtcccgctcctgatggctgggatgatgacatcccgttcatgcggctgcaccacttggctggcgggtaa

SEQ ID NO: 83985 - DNA, 909 bp, Citrobacter koseri; identical to SEQ ID NO: 25073

SEQ ID NO: 83986 - DNA, 969 bp, Citrobacter koseri
atgtctcaatactctcaattctcagtaagcaaggttttcggtatgcccagcattccggagaaggtaacggccatcggctacgctgacggttcaaaccctttcatccctgccactgataccaactacgttttccgcaaagagtttctgcgagaggtcttggcctatctcaaagagcctggcggtgacgcattgttcgtaaccggccctaccgggtctggcaaaacctcaggtatcaccgagatcgctggtcgtctcaactggcctgttcagcaaatcactgcccacgggcggatggagctgacagatctgattggacatcacgctctggtcgcggaaaagcctggtcaaccacctgtcatgaagttcatgtatggacctctggcagtcgctatgcgtgaaggtcatctgctcctcatcaacgaggtggatttggccgaccctgccgagctggctggtctcaacgatgtccttgaagggcgtccccttgtgatcgctcagaatggcggggaaatcatcaagccgcacccgatgtttcgtgtggtcgttactggtaactctacggggtccggtgatgcttctggtttgtaccagggggtgatgatgcagaacctcgcagctatggatcgctatcgtttcaccaaagtagggtatgcggatgaggaagctgaactcagcattcttggccgtgttactccgaaacttccggaaaatgtgcggaagggaatggttcggattgctaatcaggtccgcaaactgtttcttggcgaaaacggtgaagatggtcagatcagcgtcaccatgtccactcggacgttggtgcgttgggcgaaactgtctctagcgttccgtggtgccccaaatgctcttgaatacgccctggatcaagctctgcttatccgtgcggccaaagaggagcgtgaagccatcctgcgtgttgcgaaggatgtgttcggggaccaatggcgctaa

SEQ ID NO: 83987 - DNA, 153 bp, Citrobacter koseri
atgattggttgtcacccgaagttcaacaccccggccaccgctcaatgtaaaagttgcaaggttatcgtcttcactgtcatcgtttcgcacaaccgcctcttttttcttgatgtcagcgagccattcttttggcggtgctttcacggggtctga

SEQ ID NO: 83988 - DNA, 1119 bp, Citrobacter koseri
atggaaaggcagcgtaacaggaatggtaccattttgggcttgcaatatatgcgtggcattgctgcgttgatggttgttctattccacctaaaggaaaggctacctgataatattgcaccgatttttaacaatggtcgtggtggtgttgatatattttttattatcagtggttttataatttatttcatcacaaaaaatagcagcgaattaaacccaaagaaattcattataaagcgggcattcagaatattccctctctattggtttatattcataatatctacatttttattcttcactaaatttgaccttacatcagtcataaggggatttttcctttttcatcacaattatcaagctccagcgcctggctttggttttagcatggtcggcgtggcatggacattaacttatgagatttatttctatgccatttttcttatttgttccctgctatccaatcgatttaggggggagatagcgtccgttgttttgcttacgttgcctgtagctttgcagtaccattttaatggggagttttctctttcttcctccgcttcggttaacgttcatggaaatggattgtattcacaagcattgcacattgttagcagtacaatgatttatgagtttgtattaggaattattctatgcaaggcgtatttatcccttcaaaaatcaacaattccagtgatagcgtggcgagctcttttcgtgatatccacaattttatcagtcactatattctgcaatgacgtaggtctgtggtttgggatttacaaaccatacactggaaatatctctaacgtactaggttacggtggttttattttcatggctatcccattcgctcttatgttccttttctacgaactatcatcattccaaaaaagcattcattctctaatgtttttagggaatatatctttttctctttacctgtgtcactggtttgtgaaccgcttatttacggattacatgccggattttaatggcacaaatagttttttcataatacttatactttcgttattaatggcttatgtgtgtcatttatacatcgaaaaaccaggcgtgaaactgatccgacgcaagcatagtggtcctgctctgagttga

SEQ ID NO: 83989 - DNA, 1230 bp, Citrobacter koseri
atggctaagaacgattttaaaccttttgcaaccggcaacggtgcgaatgtattgactcaggcagaatatgaggcgctcgccgcattagcatctggcttcacctctggtaaggcatcctctgctcaaattaacaaagcgattcggcaggcaacagttattgccagtgtaatcgctcaatttacagcagacaacggcggaagcgatgttttagataatggaaatacggcagctattcttgcaagttttatcacagctcttaatacttccgtaggaaactcactgggttctaacttcctgcgtaagactaataacctgtctgatatttccaatgctacaacatcacgacaaaacttatccgctgctaagtctggggtgaatagtgatatcactgcactaaacggacttacaactccactcaccgtgccgcaaggtggaaccggagcaacaagcgcaattaatgccagggcaaacctctatgccgcacaactgggggccaactctgacattacttcactgtctggacttacaacagctttatcgattccgcaaggggggaccggggcgaaatctgcgactgatgctcgtgctaatcttttcgctgctcagttgggagcaaactccgatattacctctctaaatgggctcactactgctttgtcgattgaccagggcggaacaggagccaaaacagcagcgaacgcacgcagtaatattggtgctgctgcttccggttcaaactcagacatcacagccattaatggcttaacgacggcactatccgttccgcaaggtggaacaggatcttcaagtgctgcaggtgccagagcaaatttgtttgcagcacagctcggtgctaactcagatatcacgtcattgtctggattgacaactgccctttcagttacacagggagggactggggcaaaaacagctaccgctgcacgcgcaaacctgtttgctggtggtattcccaccgcgctgaactcagctcaaggctggtggaagtgtgctgacactggacgtattttccagcatgggaaagttgcaattacctccggctcacagcttaccttcccgatagcattcccccatgcctgctttgcggtgatcatgactgataatgatggctataaggatgcaggcctgctgggtgcgacaactacttacgcatcattcaccagtggttcaggcggcactgtcactgttggttatctggcaattggatattaa

SEQ ID NO: 83990 - DNA, 360 bp, Citrobacter koseri
atgaaaaaaatagctctagcattttctctggtgtttgtatcagcattcgctcaagctaagactgtatctgacttcataaatgagcatcctgaactcgcaaaaagcccaacgataaaagcagccattcagcagggggcgatggggaacgcggggattgatgctctaagtaatgggtcatccaatcaaaccctcggcagtgatactcagaagctgttagctgaaaatggatatgaatatgctcaggcaggtttgagagaccttgccacttccatctgtggagaaaatggcttggctgatgtttatggtctgagaaaaaaggattgcgatacaattataaaagttgactcagaaatagagtaa

SEQ ID NO: 83991 - DNA, 288 bp, Citrobacter koseri
atgaccattgatgactttgccgacatcgttagcaacacctttcaagagtgtgaggatttggatgcctacacaaatcaaaagggtgcgactgatagttgtaagtcctatgtttataagggaattaaagaatgggttaccctttccaaagatagctctgttagcgataccgcttggaagatggggcagagatatgcttacaacagccgaaatccgatagcacacaagaatgtctgggattttaatggaatggctggagggatccgcgttgcaaaatctcaagggtactaa

SEQ ID NO: 83992 - DNA, 537 bp, Citrobacter koseri
gtggcacaattgaaactgagtaagaaaagcggagcgaccgggattgtttgctcagtcgctacgattatcgcaatagtggtcaatgcggggcacgttcgaaccaatgaacgtggtctggagctaatcgggaatgcagaatcttgtcgtcgtgacccttatgtttgccccgctggcgtgctcaccgatggcatgggaaacacccacggcgttaaacccggcacagttaaaaacgaccagcagatcgcggctgaatgggaaaaaaatatcctcgatgctgaatcctgcgttaaccggtacgccaacggcaaaaatctcagcgacaataccttttctgcagtaacgtcaattacctttaatgtcgggtgcccaacgatgaagcagtcgacaatgtttgcattatttcgcgagcagaaatcggcgtggccatcagcctgtgaccagttcccccgctgggtgtatgcagggaagactattctcccgggccttgttaagcggcgcgacgcagagaaacagctctgtctggatgggctgaaatga

SEQ ID NO: 83993 - DNA, 1593 bp, Citrobacter koseri
atggatttattggcattgatttttctcagtaaaacacagcaaataactttatatatgatgaacatcaaaagcattaacactatcaaagctctttccattcacatactggctatcgtatatgcagtacttttggactcatcttttggctatgcccttcgtccaggttatgcattagcaacatacttactattaatcacagtttccccaaggaaaatactctttttgattttagtaacagtgctcagcattatgtcagcaatttacgccccggcctcatttctttttggctcgccaaatgtgaacatagtattatccataatgggttcaaatattgccgaaagttatgagttcctcagtttcataccaataaaatattatttatttagtatatcaatcttaataactggcactcttttaattataaattcgaacgcattgattaccagacatataaaaacagcacttttaatttttctaattatagttttctctcgtcccattgccagcatagctaatagtcaagatattgaaattgggtttacgcccgtaagatttgttaatgaattttacaaagccgtaaaaatagtccgggaggataacgccagacttaaatcccttataaatatgaaaacaacattagcaccgacaaaagcaagcgaggactttgattcttatatactggttatcggtgaaagtgcaagacgggattttatgggagtatatggtttcagaataaacaacacaccattcatgaattcatctaatggcattatttttaataactatatctctgcggccagttcaacccagacatcaatatcaacatcttttatcgcaaatggtgttccacagaacaaccttctcaggcttgcacatgaacaaggattggaaacgtggtggatatccaaccaagggagctatggtgacgatgattcacaagtctctattatcggtaaacaagcagataatattatattcctcaaaaaaggtgagtataaaacaaccaacagtgacgacacagagcttttacctcatataaaagaggcattacaatctcagagtaaacacaagctaatcattgttcatttgatggggtctcatgaggatttttgtgaaagaacaaataataaatatgatgttttttatgttaacaaatcgctgtcatgctatgttcagtcaataaaaaatacagacaaattattatccaccattgcacaacaagcaactaatgccaataaaaagtggactatgatgtatttttcagatcatgggctatcttttattaaaaagaacaagaaaaaatatggtgaggtagtaacattaatacatggcgacaaaactaaagagaattttgatattcccttattcattacttcctataacgccacagatcgtaccatgaaaacatttccatattcagccatgaattttctatcactttatctttactggactggttcaattgaaaaaacgatatcagataaatgcaatcctttatctaagactgactgcaaaatcaataacattagtgtaattgattacaaacataatttaataaattattcaaatcttgcttctgaaccagcccaataa

SEQ ID NO: 83994 - DNA, 174 bp, Citrobacter koseri
atggattcacaaaaacaaagagaccttattgcaagcctgtatgaagagctggtaatcgcaagggggctcattaaagagatttgcacagtgcgaagcattgcggagccaaaggcttctttgcagagaatggataaagccattaaagaagcaaaagatacgcttgaaaatatctaa

SEQ ID NO: 83995 - DNA, 1005 bp, Citrobacter koseri
atggcttcgataaaagaatccactgatgccaatggacaatcaaaatattacgtccactggaaggatgaaaaatccggtcatgggcgccgccgaatctttaagaatattgatgatgcagcacaccttttctggcaaaaacagaatatcgaactggattgtcgaaccgccagatggagtggtatcgatagttcctgggatttaaagaaactgttaatgtttttccttggacatcagttcaataaagttgaaacaaatcagatccggttatccagttataaaaaatgccgacatgatattcttgctatagacggcgaaatattgagtagaaatatattaaatatttctcattatgatatcgctgaatcagttcgtagtggctgtcatcgctgggttcgttcagcttattttcttttgcttgaaaagaagctgattagctttaatccggttaaaaaagccgtgaagcggaagcgtaaacctatcaccattccgtcaaaagcgacggttcgtcaactgctgaatgctgccccgcagcgcgaacgtatcgcatgctggctgggaatttgtgggttgcgaattggtgaggtactcgccgttacctatgctgatgtctctgaggactggattcacatccgccgtcacgtagtggatggtgttatctacgatggtctgaagagaggtgtcgaacgcagggtaagaatgccccgcgagctttttaatttactggataaatcgcttatcggtacaacacacccactgattgcaaaccagtttactggcggaccgttatcgacctgctacggtactcaggggccgctgtataaaacgcttcaggctttcgatatcagatgtttccatcacctcaggcattttgccgtttctcgcctggctgataagggagtggatatcatgaagatttcacgcctgatagggcattcgagtatcaggatcaccattgatgtatacgggcatctttttaacgagtccgtagatatggatctggactga

SEQ ID NO: 83996 - DNA, 570 bp, Citrobacter koseri
atgacaaatatacccgatgactattttctgggggctgatgatgatctcgtcgatttccttgaaagtcagggtgaggcatctatcaaggaaacctgtcaatccaacactatcaatatcgagaacggatataagttactcaatattcaaattgtagggatcggctcatcattcctgctgttgacgcagaagacgaattgggactatttaaccgtaggattaaccgcttttatttttttgtggacgtggtgcgctatttatctggttcatgctggtctttccgctaaagtacgcgctcttattcattcgcctccagaatgtctatatacagaaacatacaaaaacataactgatttaaattatcagtatctgaggaataatggttacactggggtcaacgctgtattaccaattcttcgtcggtatcggcttaaaaacttaacggatactgcggatgaactgcgcacattaaactcagcccttaggaagagccttgacagggcgagaatggtcacaatcctcgccccggtaatcgcattaattgcttcagcgattactttttgtttttcctga

SEQ ID NO: 83997 - DNA, 207 bp, Citrobacter koseri
atggatgtaacgaaggaagacgagcacaccataagcgaataccttcgcgttgctcacggtggttattccgggccggtattcatcgatatcaacaggctgtctcaattgcacatgtcccgtagccgattgattgttgcagagtgtatttaccgccagagtggcagctggacttttttgggtaatgcggattccgagggagaagcctga

SEQ ID NO: 83998 - DNA, 315 bp, Citrobacter koseri
atgagcagcacaagttatatctatccatcagattttgtttttaagtacccgtttgataacccgttacagcgcttgatcatgatgcgcattctgtcgaacggaagctgcgatggtgaaggtgaacgtgttttcgatcatgaagtcctgaggcagttctgttgctgctcgaaacaggcgatgttcaaagagatcaaagcacttgaacgagtggggtatctgaaggtaagaaaaatcggtgctctcgatactgatctccgggttcgtctcgaagctgcacgcggttacacgattactcctccaggaggtaatcagtga

SEQ ID NO: 83999 - DNA, 189 bp, Citrobacter koseri
atgtcttcaccctgcttagaaacaatgacgcttgatgcggagaatctttataacctccttgatctgatgttaatgagttctgaaaaacttcacggcgaacaactcgaacgcttattaggtcttgcgctgaacttatctgatgagattcaacaatggttaagacaggagtatgaaagccgtgaaaaataa

SEQ ID NO: 84000 - DNA, 357 bp, Citrobacter koseri
gtgaaaaataacacaattgaaatttatcgtcgtcgaattgcaatagcggcattaaaccgaatgaaacgcaagacaggaggttattgtctctctgtaaatatgcctgatgacaatattcaggttatcgaaatcaacgaagaatcaatgctgaaacttttgcaacgtttcgaaaagcaggcacggaatgaattcaacgcagaagcagaaacatttcttcgccagacgtatatgaaaagtgtcgatattaatggacacaccgaatatctgaccgaaacaggaaagatgattgttgacgagatttttgcggaattagttaaacacgcgaaagaaaagtacgtatgtggaggaattaattaa

SEQ ID NO: 84001 - DNA, 396 bp, Citrobacter koseri
atgatcgacaacagaaccgccagcgcaatagaccaggcattcagaaaagtaccccagcccgtttacgtggttatccgtcacggggacgtaaagcgctgctttagtcgtgatactgcattgtggaatctggcgaaatttatgacccgcaaagtgttccataaagctggccgcccaatcgaatacgcgccagttcgtgagatgcgacctgaaggcgaagtgtgggtaactcaggggccaaccgcggaattcaagaatgcgcagcgccgctgcgttcggcgtcttcgccgtatccttgcccgcaagcgcgaaatgcagaagtggtgcgcaaagtgggacgccatgcatgaccgctttgtgaaagaggttgatgcgttgcaagccagtaaaccgttttaa

SEQ ID NO: 84002 - DNA, 225 bp, Citrobacter koseri
atgagtaacggcaattctccagtatttccggtagcggcccggtcaggctgtggaatgggcagtaatggcatgacgtatcgccagcatttggttgcagtcctggccccggttctcgccgctcgttttttcgaaagcgacagttggtctgattacgatgacctggcttactcgctcataactgcggtggacgccattattgacgcagaaggggaaacagcaaaatga

SEQ ID NO: 84003 - DNA, 369 bp, Citrobacter koseri
atgaaatttgtaatttccagtatgtgggtggactctttcagtcttactcgcacgacagaaaaaacaagtgacggtaaagaatttactatgagcatagatactgccgtcgattacaatactaaagacaaacgcagttttaggctcgcgctgtcacttaaactcattaaaaatgagaagtttatatttaacgccagccaaatggctgttgtgaaatttgacagagacatgagcgagacggacgcgcacgaagaattggcaacagcaattgttgttaacaccctgtatccgtatgtaagagcgttcactattgcaacaactcgactggcgggatacaacaacataaacttaccagtggttatagcagaataa

SEQ ID NO: 84004 - DNA, 516 bp, Citrobacter koseri
atgaaaaatggagagatttgccccctttgcggcaaaggacatctgactaagaagatggaagaggatcagatcacttataaaggcaggataaaacaagttactgatacttactttatctgtgattcttgtcatgtagagcaagtgggtgcaagcgaactcaaatacaataaacgagttatgaattgcttcaaaaaagaagtggatggattgcttactggcaaagaagtttacgacattcgcatccggcttggactaacacaagatgaggcttcacttgtttttggcggtggaccaaatgccttcaccaaatatgaaaacaacgatgtgatccagtctgagtcgatggacaagttacttcgtgtggctgattcttaccctgctgtttttgcagacctttgtgaaaaggctggtgtttctactagagttcagactacatggttcaaacaagtatctttttcaaattcttgggtgaatgaatttgccgttgaaacaactctcttagaaaagacacattaa

SEQ ID NO: 84005 - DNA, 537 bp, Citrobacter koseri
atgaaacccaacaaaattgcgattgttgcggttctgctggtggtcgtcgtaattatcatctcggtgctctgtgttctgctggcgcgcagcaatgcagcactgaccatatctgaaagtgacagccgggtactgcgcagcgacaacgcgctacaggcgaccgtcatagcgacccaagctttcaacttcaaccggtttaacctggtagcacagaacaccaaccgtcttaactcgctgattgatgccggcaccgagaaaactgttatcgaataccgggagattctccgtcgtgaaaaaaactgtgatctgcctgttcctgctgatgtcgctggtgggctgctcgaatacgcgaaccgtttacgtgccagcgcaatgcacaccgattccggtaacgctgacgcagccggtgatagcgccgctgccgccaaatcaataacgtattgccaggctgttctgtggattaacccgctgctgtcagccattgagaaggcgaataaccagctcgcggggatacgccaaatcgaacaggaacgacaatag

SEQ ID NO: 84006 - DNA, 168 bp, Citrobacter koseri
atgacggatgaagaatttacagccagaatgcgggaaatcgcgaatggggtgtttcagccagaagttcagcgtggcgaggctgatgacttgattatcgaatacctaaaatcaaaggggcttgatgatgctgttgctgcttatgagagcatccatcggctgtttgggtaa

SEQ ID NO: 84007 - DNA, 201 bp, Citrobacter koseri
atggcagaacaacctgacgatctgctcactcctgatgaggtatgcggaaaattggggattactcagaaaacactctgcctgtggaatacaacacacaggcaccgcgctatcctagccccaataaaattcagcgcaaaagtggtgcgttacgaacggcgtaacgtcgaagcctttatccagaaatgccgcagccagtactag

SEQ ID NO: 84008 - DNA, 1041 bp, Citrobacter koseri
atgcaattcaccaaagagcagttaatcaagcgcctggaagagcaagattcggcggcgcgttatgcgttaagttttgtgcaggacagtgaaatcctgcgagatattgaaatggatttgcgcattactgaaatcgcgctggcatcgcttgacgttggcagcaacagcaacccggcgcacggtccgctatcagattaccgcctgcaccgcattcgtgaaatcttgggcaaagcagcagcacaaagtgacggcggcaatcttggttacgcaatgtctgatgctgtacgtgcgtttgatgaattgcttgaggtgcggggcgctaagccgataggaatcaccgacagaagcgagattgaatgtctgaagcgaggcgagatggctaacgttatgcctcccgattacaaaggagttgatgctggtgatgaagtttttgtctacaccgccccgacagcgccggtagcgatagacgagcgcgcggcattcaacgcatggaataacgaagacaatctccccatcgctggggttggtgcgaaaaacgctgcatggttagcatggcaggcccgggccaagttgggtatccagacagctaaagcctcttatacgctgaacatggggatagtgcgaaacggtgtgaaatataacaccggtttcggcatgtctattgagccatctccggtagtccctgcaactcttccgtgctccgttgagttaaagccaggtcttatcattggcaagggctgcaaaacagaaactttgctgactgctcttcaacgtcgcgccgactattacgctgaaattgatgctatgacgccggaagagcgtgcagagcatgacgccaatatcgaagcattcaaagccatgttgccgcagccagtgccggatgagcgtaaagcgtttgaagcgttcatggataagagattcggttacacggtagaccagagccgcgctaaaaatggcgaccagggctatatggcgtgggatatggtcgtcgcgtggatagtatggcaaggccgcgccgccatgctcaacggaggtaaatcgtga

SEQ ID NO: 84009 - DNA, 318 bp, Citrobacter koseri
atgaaaccagctaacttagcaccagtttactgcgctctttaccccgctctggcagaaatagcgcgcaagcacggctatgcgatggcaattcacgggacgatggcgcgcgactttgacctgatttgcgttccatgggtagagactccatcaaaaccagaggaagtcgttgcagaaatcaccgcgacatatgcaactaccgatatcaccaaccctggctacaagcatcacggacgccttgcttactcagtgtgctttgggtttggagagttcttcgctgacctgtcattcatgccgatagttgaggggactaacccatga

SEQ ID NO: 84010 - DNA, 654 bp, Citrobacter koseri
atgatgaatatgagcgaccgtatccgccaaaggcggaaagaacttaagttgacgcaacaggcactagctgagatggctggtgtgaatcgtgtcacggttacgggatgggaaaaggacgactatcagccaaacggcgcaaaccttcagtcattagcgaatgcgcttcaatgcgacccactctggcttgtatcaggcaaaggtgatccaaagcctaagctcaacctgaaacctgaaatatttaatgtaaaagaagttccgctaatttcatgggtacaagctggttcatggacaagaaccgatccaggaattcgagctgacgatgcaaaggaatgggtgtataccaccgcgttagtttctgatggtgcctttgctttaagggtgcgtggagattcaatgacaaacccatcaggtgctccatcaataccagaggattcggtgatcatcgtagagccagagatcatggacattgaagctctgaatggaaaaatagttgtcgcctatctcgatggtggacatgaagcaactttgaaaaaatttgtcgaagactggcctcatagatacctagtaccgctaaacccaaactacaaagctatagaatgtggtgaaaattgcacaatcgtaggtttggttaaacaagtcataatggatttctaa

SEQ ID NO: 84011 - DNA, 198 bp, Citrobacter koseri
atgaggaaatccgaagttattaattatttcggaggtgtctgtaaaaccgcattagctcttgggattaagcatccgtcagtatccgaatggcctgaaataattccagaagttagggcatatcaggttgaaaaaatcaccaacgggcgtttgaagtttgaccagtcgctttatcaaaattctactgattcagccgggtaa

SEQ ID NO: 84012 - DNA, 471 bp, Citrobacter koseri
atggtagagcaaagtctcaaagaagttgtgaaagcgatgtgcaaggcatatccaggcgggcgtgaagctatggctggtgctcttggtatgacggtcactcagttcaataacaacctgtatgagaaaaacggatgcaggttctttgaagtcgctgagcttgaggcaatggaagatatttccggcacagccgaactggctgattactttgcaaagagacgcggcgcattgctggtggatgttcccaaattcgaagaccttgatcgggtcgaactattcaacaaagccatgaaaacagccgctatgcgtggacatgtggatcaggtcatcaatctcgctctggaagacggggttattgatgaagctgaagcggatgaaatcaggcactaccacaggaaacaccttgcagccagagaggaagaagtgaaatccatccttgctgtctttggtcgacgaaagccaaagcgagagtaa

SEQ ID NO: 84013 - DNA, 243 bp, Citrobacter koseri
atgacaagacaatacgttaaaaaaatcacctatccatgcctgacagcggcaatttttcaggatgtcatttacgtcatgcgtcctgccagcgcatctgaattacttgcagaagcagataaggctagtgagttctatttgaattatttcccattcgcgacgctggaggatatcagggaagacattctgtatagcttcggtggactctacctgaacgatttccagcttatcagggaggctgcatga

SEQ ID NO: 84014 - DNA, 750 bp, Citrobacter koseri
atgagtaataaaaccattacgctatctggcgctgctactgacgtgctctacgcgctgttttaccgtggcgcattgctatctggtgacctgccgtctaaatccggtgccgccgaacttcgcgaactgggctttgctgaaaccagacatacagcgacgcaatatcagaaggaaaactattttactttcctgacaaccgaaggacaggcgtttgctgttgagcacctggtaaatacgaactttggtgtgcctgctggtggttacatcggcagccctttagatgcactggatgaaattgcagatcaaggtggctacactccagacgaaatgcgtgatgccgtggaatacattaagcgaaccaggcagacgaaagctttaggaaaagcgctggcagaactatctccgtttgtcatgaaggacggacaggtatttatcaaagatgctttcattcaacctgtcaccaccgctggtacaaaagttgactcgaattccggcggctccgctacgtacaactgcaacatgcgtatcaaagttgatggagcggataaaacaattcgcgagaaagttcatgctgtagtttccagttatctcacccctgaggcaacggagtataccgatgagctggtggatgaggtgatgaacctgtttgataagccagaggtcagccggttgattgatcgttgtgttacggagtcagtcaggctgaactgccgtccgggtgggctcatctggcagacgttacgcagattgtga

SEQ ID NO: 84015 - DNA, 996 bp, Citrobacter koseri
atgtcgattaaaaagctcgatgatggtcgatatgaagtggacgtaagaccgcaaggtgcaaacggaaaacgcatcaggcggaaatttagcactaaaggcgaggcgcaggcgtttgagcgtcacgttctggtgaactatcacaacaaagactggatagagaagccagcagacagaaggaaactcaccgaactactggaattgtggtggctatatcacggcaaatcccacgcaagaggtgagatcgaaaaaggacgactcacagcaatccttcaaaaatttggagaaatgggcgttcacagggcggatcagttaaccaaaaaatccatcacggattatcgcatgaccctgatgaatgaaggactgaagcctgccagtgttaacaggcacattgctattttaagtggcctgttcactaagttaattgacgctggcgagttccatagcgctaaccctatgcgggaagttaaacgcctgaaagaagaacaggcggagatggctttcctgacagaagaggaaattccgcaactcctgtccaggctggacggggatgaactgaatgttgcccttgtctgccttgccaccggtggccgctggggagaggtatcccgtttaaggtctgcacatgtcatcaaaaatatggtgacgttcatgaaaaccaaaaacggaaagcagcgatccgttcccatctctgaggagctggcaacccgtataaaggttaaagccagtgggctgttgttcgatgcgaactaccgaacggtgcgccgggtactgaaggaagtgaaaccagatttgccacgcgggcaagcggtgcatgtaatgcggcatacatttgccacacattttatgatgaatggaggtaatataattacattgcagcgcattctggggcattcaaacatccagcaaactatgatttacgcgcactttgctcctgattttttacaggacgcagtcacccttaacccggtggccagaatgtccagaaagtgtccatga

SEQ ID NO: 84016 - DNA, 300 bp, Citrobacter koseri
atgtcaatagtccagtccgagaaactgaaactcattcgtgagtctgaacgcttaaaagcaaaggaaatgtctgatttaattggattaaattacacaacctatcatggttatgaatcgggaaaatctaagatgcctctcgaagcaggcatgaaactgctgaaacacccacgtttcagaaagtaccgtgactggtttctatttgatgaaacagacccttctaccgggcaaattgccccggctctcgcacactttgggcaagaaacaacaacattaccccactcagacgagaaaactggctaa

SEQ ID NO: 84017 - DNA, 348 bp, Citrobacter koseri
atgagtgtcagatcagaaatcattggcaagaatacgcagcaaatcgcagaggctggaaaaaatgggcgatcagctattaagttggctgaaaaaccatcagaccttctctctaaagaagggtttgcgttgtatatcggtaaaacgccgcgcgcagttgctgagatggcaaaggccggtaaattacccgccttttatatgactgatccccttaagccaggtggaaacgcagaactttggattaatcgccgtgaatgggataaacatgctgctaatttagtcgatgaagccccgacagactggcacgactggaaaaatcgtattagccacagtaaatccagtggtaaataa

SEQ ID NO: 84018 - DNA, 336 bp, Citrobacter koseri
atgaaagctaaatacgctactcttattcgtaacctgttgcagagttaccatgctcaggtaacggctattgataaagaaagttactctgtccatagcgatggaatccagttgatggagttaaaacttcaactggctaaatgccttgagggaatatcttcaacggcgcgttttaataatgatgcagacgatttcgacgagcttcataaaattacccttatggcatttaagggggatattccgaccgaaaataatatccctgcgctgtcttcattggcgtcaggttcgataagaaaaaatagttctaatctgaaaacacttaccgcagttcaacgttaa

SEQ ID NO: 84019 - DNA, 570 bp, Citrobacter koseri
atgaaacatttaatgattgacctcgaaactatggataacaaaccgacttccgcgattgcttctatcggtgctgtattctttgaccctgaaactggcgaaatgggtgagcagttttatcaacgtgtcagcctgggcagttgtgtaggccacggtctcactatggggtcagaaaccgtattatggtggatgcgtcaggatgccgaagcgcgtagcgagctgcttaatgatgattgcctggacttgcctctggctttagcgaatctggaagcctttattactgagcattctgacccatctaaagtgcaggtatgggggaatggtgcggcgttcgacaatgttattttacgtaatgcatcagagaaatgcgggtttgccgatccactttggtactactggaatgaccgtgatgtaagaacggttgttgaactgtcaaaaacgcttgggctgaatgtccgtagtattattaagtttgaaggcgttaaacatcacgccttatatgatgctattcatcaggctaaagttgtctcttatgtctggatgtatctcgttaaaatagccagtgtgaaataa

SEQ ID NO: 84020 - DNA, 2658 bp, Citrobacter koseri
atgaacgcaacgatacaacaggacgttgtgcgacgacttgtccgtgacttcgaatttaaagaacgggataaatatttacagcagggcaaatgccctgcctgtcataagcgcgaattatttaccagcattgaaaagccctggattctcaagtgtggccgcgaaaataattgcggccatcaaactgttgttaaagagctgtatccagacatttttgaagactggtcaaagcgttatcaggatactccagatcatcctcatgctgcggctgaggcgtatctgcgtgaggcgcgagggctggacactgaaccgctgaaagggtgttttacccagggtgcctttgttaaggatggcatggggtctgctacggtcagatttaagctggcctgtggtgcgacgtgggagcgcatcattgaccagccgcagcgcttcggtaagcagaaagcgaacatcagagggagttacgttggccactggtgggttcctccgtccgtgaacctgctggaagtgaacgagatctggattactgagggcattttcaacgcgctgagtttgtgccaggcgggtttacccgcagtggccacactgagcagcaacaactacccgctggcggcgctggattctctggctaaagaactgggagaaaagccccgcccacgtctgatatgggcttttgatggcgacaaagccggcacaaagcacacgctggcctttgccgctcgcagtgaggacgccggctggaaagttcgcgcggcgcaaccggtgaaatcatcttccagtctggactggaacgacctgctgttacgtggacggttcagcaaatcggacatcaaaaactatcgctactatggcgatctcctgctggcgaaaagcccgacagaaaaagcgttgctcatgcatcaacataatgagtggcattcgttctattttgagcataactcccgcatgtactggtttgagctggatctggacaggtacatgcgagcctatgagcgcatcaccaatactggaaccgaagtggtgatggagtgggaggccaaagaacgggcggttaaagagtctggcggagtgactgaaatcgccaactgctggctgacgccgctttactttcagcggtctgaacctacggacgagtcctggtattacgtgaaggtcaatatgccgaaccgaccggctgtgaaagatacttttacggctaatcagctcacaagttccgcagagttcaaaaagcggctgctgcatatcgcgaaaggggcagtgtacaccggcagtaccaagcagctggataaattcatccagatgcgcctcccggaaatcaaagaggtcaggacgcagaatttcatcggctacaacaaggattatgccgcatggctgtttaaccgtgtggccgtttgcgatggccggctgtacgaaatgaatgatgaagactacttcgagatcaacagtgccagcgttaagagtttgagccttacaccgtcgctggatctgaatcctaatctgaaagagtttaccactggttggatagacgatatctggacagcctttggggaaaaagggtatgtggcgctggcgttctggctggggtcattgtttgccgagcaaattcgggagcgtgacaagtctttcccgttccttgaaatcgttggtgagccggggacaggtaaatcaacgttgattgaatttctgtggaagctcgccggccgtgaagaatatgaagggtttgatccgtcgaagtctaccgcagctgcgcgcggccgtaactttgcacaggtcggtaacttgcccgttgtgctcattgaaggggatcggacaacagataacgccaaacaacgcgcatttgactgggatgaactgaaatctctgtataacggccgagcctcccgcgccgtgggtatcaagtcaaataataatgagacttacgaaccgccgttcagaggcagcattgtgatcgcacagaatgccgatactgacggcagcaaggcgtttcttgaacgaatcattcacatctacaccgataagcgcggccagtctatccacacgcgccatgcagcggaacggcttgaacaactcccggttagtcaggtctccgggttcacgctgctggctaccatgcgcgaaaaagaaatcatggaaacgtttggcaggggctacgagcgcgcccgtaatgagctggagtctaacgcaaacattcggcatatccgtatcgcaaaaaatcatgcgcaactggttggtttgcttgaggcactggcgctggtcgtccctgtgccggttgaacgggtcgagaagacccgcaaggcgataacaatgctggctgaagagcgttgtcaggcgctcaaaaaggatcacccgatggttcaggagttctgggagctgtttgattacctggacgaactggcgccatacggtatcaaccattcatctgatgaaaatgaaatcgcggtcaacttcaaccatctggaggaagtcgccgcagctcaccggcagcgcatcccgtttacgctaacggaaatcaaaaaactccttaagaacggtaatgaacgccgttttatcgacacgaaaaccacacgtagcgcggtgagtgagcgtcataaccgtggcaaaggtgatatgcagcgaatgcctgaaacgttccgctgctggatattcagccgtgaaaaatga

SEQ ID NO: 84021 - DNA, 240 bp, Citrobacter koseri
atgacctgtttagtctcccttgttgtatatattttgggctttgttgctatgttttactattcggcgcggcgtgatgtggagtgcgatcttgagcagaacccgagggaagcatttctctttgccttattctggccactgcttatcgtgtttcttgccgtttttattcttgttgaaaaaatagcccatctggtatgcgtagcttatcgttactgttattcaaaggtactgggaaaagactaa

SEQ ID NO: 84022 - DNA, 270 bp, Citrobacter koseri
atgcgggtactgaatgttaaatgccctgaatgcggggcgaaagcagtaataaggaagacaaatcccaaacacccgcatatttcagatatttattgcgcgtgttcggatgttgagtgcggacatacgttcgttctgaatctgacgttttctcatacactcagccccagcgctaaaaccggtaacatgatgctacagaccatcatcaattcattatcgccggaacaaaaacaaatgacgctggatttacttgaagccagcctggccgcatag

SEQ ID NO: 84023 - DNA, 1020 bp, Citrobacter koseri
atgaagaaacgcaaattcagggagcgccgcagcgccccaaaaccgcgtcatatgagccttatcagcctgggtaaaccagaacccatcctgaccaccggtacaaactacacagacgtctggtatgacaatgaggcggaacactggacgctcccgattgaccgtctggcgctggcacaactggttaacctgaacgcgcagcacggcggcgtgctgtatgcccgccgcaacatggtgacggccaactataaggacggcggtctgacgcatgaacagcttggcgcagccgtatttgactggctgaccttcggtgatgtggccattctgaaagtgcgtaacggctggggtgacgtaatcgcgttgtatccgctgccggcactgtacacccgacagcgcaaaacgggagagttcgtcgtactgcaacaggcggaacccatgatttacacgccagaggatattatcttcctgaagcagtacgatccgcagcaggcgatctacggcctgccggactacatcagcggcattcattccgcgctgctgaacggtgaagcgacaatcttccgccgccgctattatcacaacggcgcacataccgggggcattatctattccaatgacccgaacatgaccgacgaagtggaagaagagattatcagcaagctggaacagtctaaggggatcgggaacttcagcaccatgtttgtgaacatccccaaaggcaatccagacggcatcaaatttatcccgattggcgatatcagcgccaaagatgagtttcagaacatcaagagcatcagcgcccaggacgtcctgaccgcgcatcgcttcccggcagggctggcggggattatcccgacgaacggcgcagttatgggagatattgagaaagcggccaaaacctaccgtaaagcggagattttacccattcagcgtatgttcaccgccgcagtagagcaggaaagtgatgtaccgccccacctgtaccttaatttcctgaaagacagtgagctggaaggtgattaa

SEQ ID NO: 84024 - DNA, 1785 bp, Citrobacter koseri
atggcaaaatacagtgaagaattaaaaggcgttgcgagggcgctatatttaaaacgctataccccgcaggaaatagcaagcgaacttaatctgccaaacagacgtattgtctattactgggcggagaaatattgctgggcggaattactaagccacgaatcaacagaagatgccttaaaccgtcgagtacagacgctgactctgcgtgaaggaaaatcggagctggagctgcgcgagctggacagtctcgtggcgcatcttgtgaaactgcgcgcgcagcataataaacaccaggaaaagctggcagaaattaagcacagtgaaaatcatgcgccggcatcccgacagtctggtggcgatgataagccccgtaaacgcggtaagtataaaaagaatgatatcagcgggcttactcaggaagattttgaccggttcgcgctggaaaaccttttcggctatcagaaacaccttcgcgccaaccttcatcagcaaatcaggaatatcctgaaaagccggcagattggcgcgacctggtatttttcgatagaagcctttgaaaatgcggtcatgacaggcgatccgcaaatcttcctgtccgcatcaaaagcccaggcggaagtgttccgcagctacatcgtcaatattgcggagcagtattttggcatcgagctgacgggcaacccaatccgcctgtctaatggtgcggaaatgcgcttcctgtccacaaacaaaaacaccgcccagtcatacagtggccatctgtactgtgatgaatatttctgggtacccaactttgcgaaattaaatgaagtggccagcgcgatggccacacacgacaaatggcgcaccacctacttttccacgcccagcagcaaaacgcaccaggcgtacccgttctggacgggggaagagtggaagcgaggcgacaaaaaacgcgcacgcgtggaatttccctctgagaaggagctgcgtgacggcgggcggttatgccccgatggccagtggcgctacatcatcacgatggaagacgcgatcgcaggcggttttaacctggccagcatcgagaagctacgcaaccgctacaaccgcgacaccttcaacatgctctatatgtgcgtgttcgtggacagcaaagacagcgtgttctcattctcacatgtagagcgctgttgtgtagatcctgccacctgggaagatcacgacgaaaacctgccccggccgttcggtaatcgtgaggtatgggcgggttatgaccccgcccgcagcggcgacacatccacatttgtgattatcgcgccgccgatactggccgtcgaaaagtttcgcgtgctccgagtttttcactggcaggggatgaactggaaatggcaggcggcacagattaagaagctgtttggccagtacaacatgacctacatcggcatagatatcaccgggctgggtagcggtgtctttgaagatgttcagcactttgccatgcgccaggctgtcgcaatccgctacggcgtcgagacaaaaaatcgccttgtgatgaagatgatcgacgttatcgaagacggccgcgtggaatgggataaggagaaaaccgaaattgccgccagctttatgaccatccgtcgcacgtccacggccagcggcaacgctatgacatttgtcgccgatcgtaccgctgaaaccggccacgcagacagtttctgggctatcgcccacgctatcgacaatgaaccactcaattacggaaaccagcgcaaatcccgctggggaaacttagggaaagcagcatga

SEQ ID NO: 84025 - DNA, 837 bp, Citrobacter koseri
atgtcaggttcacaactggcaacaaactggatttgtatcgctactgcgggtgaaacggttgataaacgtaccattgaagaacaatggttactggatgctgctgagttatacgaccccaatttatataccgcgctgttgtggccggagcatacccgtaatttcgggaatatgggggaagtgctggaagtaaaagccgagcgggatgatgaagatattcttcgtttatatgcccgcctttgtcctgctatttcattgctacaggcaaacgcgaaagggcagcttttatttttatcaccggagtttacaccggacgggaatttcagaaataccgggaaaacctatcttgaggggctggctattaccgacagtccggctggtgtaagcacgacacggctacgtttcagccgcacaaagggaaaacgcatcgggccatataagccgctggcgtttgacgaagtaagggaatttaaaaaggaaaagggaatgtcacaggcaaaaaaaggctggcgtcattttttcagcattgaagaaccggagcagacgcccgatcaggataaaacgccatctgatgccatgcaggcgctggcggaggcgctggatgctattgagaagcgtgtttcagctattgaaagccgtctcgatactgctgaagaagcggtgtccgatgtgcaggacgatgtggacaccgtgaaagatgtggtggacaccgaagatttcgcgcgtctggttggcaacctgccggaactggtgaagaacttcagcaagctgaataacaaagttacccagttgccggacaagaaattcagcaagggcaaaaaaggcttcaatttcctgtaa

SEQ ID NO: 84026 - DNA, 1029 bp, Citrobacter koseri
atgcaattgaatgcaaaagcccgtcagtttctgcgtcagtaccacatcgggctgcgtgaatcctacggtgctactgatggcgaccgttggtttgcgctgaccgacccgaaagaaacccagctgcgcaatgcgctgatggagcagtctgactttctgaatctgatcaccgttgctgatgttgaccagttacaggggcaggttgtgccggttggcagttctggcctgtataccgggcgtgtactggatggccgcttccgtaagaaagtgggcgtgagcggtaatgattacaagctggtcgaaacagattcctgtgccgcactgacctggcaactgctttctgtctgggcgaacgccggcgatgaaggtgagttcttccagcgcgtgcaggaatttactaaccagtcatttgcgctggatatgctgcgtatcggctttaacggtaagtctgttgcggaaaccacggacgccgagcagaacccgaacggcgaagatgtgaacaagggttggcaccaaatcgttaaagagtggaaggatggccagcagatcatcactgatgcggttgtgctcgatggcgacggtaaaggcgattatgtgtcactcgatgcgatggcatccgaccttatcaacaccaaaatcccggcacagttccgcaatgacccgcgtctggtggtgcttgtcggtgctgatcttgttgcggctgaatctttccgcctgtaccagaaagcggataagccgaccgagaagatcgccgcgcagctgctgtctgacagtatcgccggccgtacggcttacgtcccgccgtttatgccgggcaaacgtatgatcgtcaccacgctgccgaacctgcacatctacacccagcgcggcacgcgccagcgtaaggcggagtttgtggaagaccgtaaacagtacgaaaacaaatacctgcgtaatgaaggttatgcggttgagtatcctgaactgtatgccgcgtttgatgaaagtgcggtaactatcggggcaccggtcacgcctccggcaggggagtaa

SEQ ID NO: 84027 - DNA, 699 bp, Citrobacter koseri
atgcaactgtcaccggcacagcgccacagcgcacgaattgaagcggagcggttactgcgacagcagcagtctctggacacggaaaccagcctgcatattcagattgttgcgctggagaaggatgtggcagcggccgcagcgattgagagccgcgctgaacgcatggaattcaagcgtgatgtgctgttaccgcgctggatgcctaccgcccagacctggctggacggtgacagtgtgcagcagaatcctgtttttgcctggtgtgtcgtctggctgtttgatacaggccagtttgatcaggcgctggactgggcggatgtggcaatccaacgggggcaggaaaccccggccgcgttcggcagtacgttcccggtgtttgtagcggatacggtgttgtcctgggcggaatcggaagccgtgcaggggcatgatttagatccgtatttcagccgcacgctggaaaacgtgatgcagcactggaatgtgtatgaggtcattaaggccaaatacctgaagtttgccggtctgcacctgctacgcgatgaaaacggagagccacgcgcagcggcaacggaagacagggaagtattgctccgggctaaggaactgctggagcaggcgaagggattcgaccctaaatgtggtgtcggcacgatgttacagcgtatcgctgcacgtctgcgggtactgaacaagtaa

SEQ ID NO: 84028 - DNA, 453 bp, Citrobacter koseri
atgttcagcggaacctctattgattttgatgatgccattctgacgaatgacggcttctggccagacctgagcgtgaaggattttcagtcccagcgcaccattccggccgatatcgatgcggccaccattcgccaggcgctgctgaccgcagccggcgaaatcaatgatgatctgatcaaggtggccgcaaagtatcagggcgatggccatgccagcgccggggcggttccgggggtggaaatcgacggcgaaaacctgctgtgtgctcgttaccgtaaggcggtatatgcccgcgccaaagctgatttgatgggggaatttgcgtccattgggcggcgcgagagccatccggggcaggagagcgacgaaacccgctccagcctgattgccgagtccacgctgacggtaaggcgtatcaagggacttaaacgtattacggtggccatgatatga

SEQ ID NO: 84029 - DNA, 483 bp, Citrobacter koseri
atgagccagcttaagcaactgaccgatttcctcattgcgaacatgccaaagcgggcaatgcagggatttgacagccagatggacgaaatcacgttcattccggcacagcgggataacgggctgggtcagtatcgccttgccatcatccgctacaacgccgtcctgacgtgggagcgttatccgtaccgagagtacgatcccaaaatcctgatggcgctgtttatgtcctggctgacggaggatgagcgggggctgctggaggaaaccggcattgacagcgatctaccggaattcgatatcgaaaccatcgaccaggagacggccatcatggtggtgacgctgccaatggcggaagagctgaatatggttcccgatcccaaaggtgaaatccccttcgatggtcagcgctggcgactggctgagccggatatctggacggcggaggaagtgaccattatcccgctcactgaggggcaaaaatga

SEQ ID NO: 84030 - DNA, 705 bp, Citrobacter koseri
atgattcagggagagctgaatcaggagcagttccggcagcttcaggcggcgctggccagcctggagttaccgccaccgaagcgtcgccgcctgttgtggcgtatggctaaatacggtgtggaagctgcctctaagcgcaatgtgcgtaatcagcagtccccggacggggataagtggccggcaaggcagacacggcgtaagggtaagatgctgcgcaatatgccaaaacttatccgcattcgggagatgccggaaaccgagtcggtcaggctgtatcttgccggcggtcattatcgcaatgctaaaggcaatttgcctgccggcgtcgtgggttatgtccagcaaaacggaatgagtgtcaccgttaaccgtaagcaggtagcaggccgtgagcagggggataaacccgcctcactgcgacaggcgaaacgcctgcgcaaagccgggtacaaagtcaagcgtggcaagcgctggcgtaaacccggatataaggaaatacaggaaaaaatgaccgcccgtcaggctggtctgcttatccgggtactggaggataagccggtcaaaacctcctggcagattgatttacctgccagggcgtttctggggattggtcaggaagattttaacaaagcgctggcgcgacagcttcaggctgtcgggttcggtctggatgttaacgcgcaggatatcagggggagatcatga

SEQ ID NO: 84031 - DNA, 1128 bp, Citrobacter koseri
atgacatggccaactgtaaccgtgaaccaggtaaaccagctgctgggcgaaaccaatgaggtggagcgcacgctgctgtttatcggtaccggttcaacgaatgtagggaagacgctggccgtcaacgcgcagagcgattttgatgcgttgctgggcgagggtgacagcccgttaaagagtgatgtactggccgcgctggctaatgccggccagaactggtggggatttgtccatgtgctggccgcagacagcgagccggatgcctgggtggcagcggttaaagctgcacaggtgtcttgttcggttgaaggggtggtgctgtcggatgatgtatccgctaaagcgaccattaaccaggcggcaacgctgcgatcagaactgacggcgaaatacgggcgctgggtctggttcattcttgctgtgcagggaatgcaggaagatgaggcgcaggccgactatctgacccgtatgtccacgcttcaggatggggttgctgagaagtctgtacagctggttccccgcctctggggtaacgaaccgggcgtacttgccggccgtctgtgtaaccgtgctgtcactattgctgacagcccggcgcgggtgaaaaccggggcgctgttgagtatggggagcgatgagttgccgaaggatggcgtcggcgcggtgctggagctggccacgcttcaggcgctggaagcgcagcgttttagcgtgccgatgtggtacccggactatgacggttactactggtctgatggccgtacgcttgacgttgagggtggcgattatcagtccattgaaacgttgcgtattgtggataaagccgcgcgtcgtgtgcgtttgctggctatcggcaaaattgccgaccgttcgcttaacagcacaccgggcagcattgccgcacaccagacgctgtttgcgcgtccgctgcgtgaaatgtccacggccgcaaacattaacggcgtgtccttcccgggcgaggtgaagccgccgcaggatggcgatatcacgatcgtctggaagaacaaaaaggccgtagatatttacattgtggtgcgtacgtatgaagtaccgctgcaaatcacgatcagtctgttgctggatgccagcctggaggcaaactcatga

SEQ ID NO: 84032 - DNA, 456 bp, Citrobacter koseri
atgaccagacgtatttccggcatgtccttcgacttctatatggatggcgagctggtacatgcggagaagatttcgctcgatatcaccgacaacaccgccgctgcgcagacgcgcggcgtgccggacggctgggtggatggtgacgtgtccgcagaaggtgagctggagctggctaccaaagcgctggtttccattaaagcccgggcgcagtctgccgggtcgtggcgtggcattcctgagctggattttcttttctatgccaaagccggcaacgaagaaaccaaagtggaggcgttcggctgcaagctgcttttgaacaaccttctggatctcgaccccaaaggcggggcgctgtccacgcgaaaaattaagtttctcgtgaccagccccaaatttatcaatattgacggcattccgtatctggaagcggaagccacggaaaatctgatcggataa

SEQ ID NO: 84033 - DNA, 333 bp, Citrobacter koseri
atggacagaacggtggcgggagttctgttgctggtcgcgctggcgtttgccagcggctggacagtggccggatggcagcgggacagtattgatctgaccatccgtgataccgccgccgctactggcaaggagcttgctggtattgccagttcatccagtcgccggctggaagaaaagctggaggcgataaaggaggtgcaaccgcgtgaaattcgtaccgaagtggttaagccggtgtttaccaacgtgtgtatgtctgatgattttgtccgcatgtacaacgaggccgcagccggtaccgaacgtgcgttatcaggaaaatctgctgactaa

SEQ ID NO: 84034 - DNA, 258 bp, Citrobacter koseri
atggaaaagattaatcttactgtttgtggtcaggatattacctttgagcctaatcagacggcttataataagttcattaatgaaatggcgatggataataaagttgtaccagcgcacaattatctgacgcgtattgtggcgacggaaagcaaagaagcactggctgatattttaaaacgtcccggcgctgcgcttcagctggcgagtaaagttaacgagctttacgcgccagaactggaaattgaagtaaaaaactaa

SEQ ID NO: 84035 - DNA, 1965 bp, Citrobacter koseri
atgaaacaattagattttacattaagcctgattgataaactgacccgcccgttaaaacaggcacagggcagcgtcacaggttttgcggaaaaatcaaaagcggcctttatgcgtattggcggcggtgtgctggcgttggcaggtaccggaatggcaatcaaaggcgcgttatcgcctgctctggaaatgtacgatgcgctgaatgatgccgctgccaaagggattgacgatacatcgctgaaaaccgtgcagcgtgacgcactgcgattcagcatgacctacggcgccagcgcggtggagttcgtgaagtcaacggaagacattaacgcctccattgctggcctgagcagtaccgagttaccgaaagtgacgaaggtcgccaatacgctggcttttgccatgaaatccaccgccgccgaaaccacggagtttatggggcagatgtacggcaacttttctgccgaagcggccagactggggaaagtcccctttgccgaacaactggcgggaaagatggtgtacatgcgcaaaaccttcggtaccgagatgggaaccatcaaagacctgatggaaggtgcgcgaggcgtcgggactaactacggcgtcgggatggacgaacaactggcggtgctggggcaactgcaacgcacgctgggaacggaggccagcagcgcctacgagggctttatgaccagcgcgattgatggcgctaaaaagctcggactttcgtttaccgacgtgaacggcaaaatgctgtcaatgccggacatgctgacgaagctccagaacaagtacggcaaaagcctggatggcaacctgaaagcgcaggcggagctggatgccgcctttggtgacagttccgccgtgatcaaacagctgtatggcaacgttgccttactgcaacgcaatatcaccgagctgggcggtgccgatggcctgaagcgtacgcaggagatggccagcaagatggtgaagccgtgggatcgctttgtgcaaatcctgaaagccattcagacggtgattggcctgacgttgatccccgttctgtatccggtactgaaccggctggccgatatggggcagaccttcgcgcgctggatgcagatgtttcccaatatcgcgcgcgttatcggctatgcatccatgacgttgctgggctttgccgccgtgggggcgacagcaaatatcgtaatgggtgtttctgcattcatcataacgggactgactggtatctggcgtttgctggttgcagttgtgaagtcttacaccgtggttgtctggcttgcgcagaaagcggttttagcctggaacattgtgctgaaaaccctgcggggcgctctgctggcggtacgtatggccgcgatactggcaggcatcagtatcaacctgatgagctggccggtgctgctggtcatcggtgcgattgccgcgctggttgtgggctgttacctgctggttaaacactgggatgccatcaaagccgctgtgatggacagcgccgcctttaaggctgcggcggacgtggttaagtggctggccggtgtgtttacttcagcatgggattccgtcatcgccggctggaacagcttcattgcgttgctttccgggttttctccgtcaaaggcgttgggcggcatggccagcggtattgtgacgatgtttgataacgtctggcagaccatcaaaggcgggttcctgaagtcctggaactggattgttgaaaaactcaacaagatacccggcgtcagtatttcaatggctaacgagagccagccggcgctgacagcgaatactctttcaactggcggcgaattaaagggaattgatcggggcggtatcagcagcactatcagcaaaaattcaaaatccgtaacagataacagtaaaaagattggtgaagtgcatttccacaccaaagaggcactttcacctgctcagctaatggaatggcaggagcttaattaa

SEQ ID NO: 84036 - DNA, 330 bp, Citrobacter koseri
atgagtgatttactttatatcgacctgcttattgaagggcgtaacttcgtacttaatacgggtagtgaacctgagctgtgtaataaccgtaaaagtatcgggcaggatgttgttcattcaattatcgaaagtggcctcgctacgcaattaattgccgagcgcagcccgactttacgcgcggatatttttacccaactggaactgctggttgaaagtgacgatcgcatagtgccggggactgtggaaatcagcgaggaaagcgcaaagcgactgtgggtgacagccggcacgtatgactttggcagtattacttatcaggtgaacctatga

SEQ ID NO: 84037 - DNA, 1185 bp, Citrobacter koseri
atgacggaaaagccgcaggtcgattttgaagaggtggtaaaagccagcgggatgccgaccacggaagaagaggtgcgtacccgttttaataccgttgtggccgatgaagggctgattactaatacgtcccgcatgtcgccgttctggaggctgattactgcgattgtaaccgcgccggtgatgtggctgaaggatgcgctggttgcggtagtaatgcctggtatgtttgtggctactgccactggccagatgctgcgcctgctggcctgggcggtgaacgtcacgccaaaaccggccagcgcagccgagggggtgatccgtttcttcaaagaggatgttaagcaggtggtgacggtgaaagccggcacggtagtacagacggagcgtatcaacgggaaagtctacgcattatccaccgttgcggatgtgacgatcccttccggtaccgccagttcattgctggccgtgaaagcgacgggaacggggggcgcatataaccttgcgccgggatactaccgtattttgccggtggcggtggatggtatcagccacgttgccagtgaagaaaactggctgactgttccgggagctgacgaggagagcgacgacgaactgcgcgaacgctgccgcaatcagttcaacctggtcggcaactatcacaccgatgcggtttaccgctcgatgattgccggcgtggccggtctgagcattgacaggattttctttgagcatgacgcaccgcgcggacctggtaccgcgaacgcgtatcttctgctggacagcggggttgcgtccgacccttttattgatgccgtcaacgactatatcaacacgcaggggcatcatggccacggcgatgatatgcagtgtttcgccatgccggaaacccgccacgatctggccgtcacggtctttgtcaaaaacctgagcaatatcgagcaggagcagcgtgacagcctgaaaaaaggggttgaaaaccttgtgcgttgtgcctttcgtgagaatacggactatgacgtgaagaagacgtggccatactcgcgcttttcattttcgcaactggggcgagaaatccacaaaacgttcccggatgcggattcgctggagttttcactgaaagatatcaccagtgaactgagtgtaccgagacttaacgtgctgacggtggaattacaggatgaatga

SEQ ID NO: 84038 - DNA, 597 bp, Citrobacter koseri
atgaatgattttctgaaaaaactggccagcatggtgctgccgtcctggatggacaagggcgagccgcaaaagctcatgaaagcggcgcagaccttctgggcggacgtttacagctggattacatggccgctgcgccagtttgatccgctgacctgcaatgagtcgatactgaatcttattgcctgggacagggatatcagccgttttaacggcgaaccgctgaaactgtttcgccggcgtgttgcttacgcttttgtgaatgcagccgactctggttctgttgaggggtttattaacatttttgaccggctggggattggctacgtcgaactgatggagcgccagccggggattgactgggacgtgatactggttcgcgtcaccgacagtcagatatcggataacaccgagttgatgatccagattatccgacaatacggccgtacatgccggcgctatcagtttgaggtcatcacctccgaaaatttatccatccgggcaggatgggatcagggtgaatatgttgtttatccggcgaggattgccggcaccgaaaccagcagcgcaacattcagcgcgagcttacagggagagtaa

SEQ ID NO: 84039 - DNA, 1935 bp, Citrobacter koseri
atgtcacagacggcgataacgctggcatttgagcagtggaaagcgcagcaggctgcaacgggtgagcctgtcctgctcgacgagtttgttttcgcgctggttccggggcttgacccggatttacctgtcgatcgcagcgaaacattgccaccggccgcgcagattgttcatcgtgaacccgtcacccgtaaaggggtggtaaatgaaaatgctgtggtgcattcggcggtgctgggtgcggatgtgggcgatttctccttcaactggatcgggctgacaaataaggccaccggcacgctggctatgatcgtacatgcccctgaacagcagaagctgaagacgaaagaagggcagcagggcaacgttctgacccgttctttcctcatggagtttactggcgcacagactgaaacggccattaacacgccggcagagacctggcagattgacttcacagctcgtatggcggggattgatgagcgtcagcggctggaaaatatcgacatttacggggctgcggggttcttcggtgatggctggctggtcggtaaaaccggcaatcagttttttgttaccaaaggcgcgggatatgtggcggggctgcgggcggtgctggcagcgaatcagaacatcacagtaacaacaaagcctgtcaaagtctggctggatgtatgctggacgggagcactgaccagtgtctgggctgtgcaaggcaaagttacagtagctgctaacctgtcagactacgagcagaacggcgtgaagcattatgtttttgcgctggccagcattgacgccaacgggaatatcacagatttgcggccaaaaggcaccctgggagaacagcaggcaaatagtgattttgtccgtaaagacaaaaatctttctgatattaacgataaggcaaagtcattatcaaatatcggtggagttccgaaaacaacaaaaattaatggttatccattatctggtgatattgatttatcgtttaatgatgttggtgcaattcccgtcgaagttcacggcattattcgtgatagccagacaatggcatcagcaaataagcctggatggtggcaggttgcggttccgaatccttcaacggtttctgattttccaaaatatccgagtggagcctacttatacggctatggctatgtgtttgttgaaaagacagataactcatggattcagcactattacagtcatcatggcgtaaatgcgaaacgtcaggaatggaatatcgggccaactaccgatgttgcgtgggttattgactacaatacagcaaataaacctacgcccgcagatatcggagctttacctatttcaggcggtcagcttactggcggtcttgggctgcatcgcggaatactttttttccctgagtcagcttataaaaataaagccgagggattaacgggaacgtatgcgaccgatactctggattatcgctgggaactgtacgcgcgtagtaaggcaaacagcagtattcgctctaatatcttcactgttgatattctcgacatttcgaaaggttctactgcttccggtggtggttcgaataatacaacaacaattacagttcatggccgtattgtcacaccctttcagattcaaccaggagactggacaaactttgatgcgcgttaccagactaaaggtaattacacgcccgctggcgaggcttacacaaaagcggaaagcgatggcaggtattatacgaaatcgcagtctgatgcacgctatttgcaggggatacgcgtaagcgcaacgcaagtcagggaattccgtgacggcggcggatattcatcgaatgacgcggcatttgcaacagcaatcgctatggtaggtggaagttcaaacgttggttctttgcttgtcaggtatctccagcggaatattaacggcacctgggtaaatgtagctacgtaa

SEQ ID NO: 84040 - DNA, 534 bp, Citrobacter koseri
atgcagcatcttaaaaatttaaaaaaatacactccagacgacgcatataatttgttcttaatggatgagcatggagcagagttttttatctctgacgatggtcgggactggtacgaatcacaagccgcttttcttccagatacattgaaagtggcatatgatgaggcgggaattattcgttgtatcagcaatgatgtgacagctatttatccgcgagattttagcatcgtggaagttaaagccacggcaaaaaataaaatggcggatatttcaggggaatgggtatttaaagatggaaaaatccagcagcgccagtattcgcaaaatgagctaatcggacaggcagaggcaaagaaagctgaattgcttgctatggctgatgctgcaatagcgccattatcccgggcagtaaaactgggtattgcgacagataaagagatcgccttgcttgaggcatgggagcgatacagtgtgatgacaaatcgagttgacccggcagatccaaaatgggagacgatccccgatgtggcgtga

SEQ ID NO: 84041 - DNA, 726 bp, Citrobacter koseri
atgtggcgtgaagcgcgtctggcatttgatgattcggttgctgcgctgaattgctccattgttccggcgcatccgtgggtatatggactggggcaacagaccgaaaatggcgcatatcttagcccggtcaacgccatttcttatctggctgaaaagttggcgggtacaggcggaaacgctgatgtggtcattatgatggttgccggccagacgcatgacagctttatgaacagccttaaccagctggttgatgtttttccggcgccagcgtttacccaggtaaaacgactggcgctttcagccgcagaactggcgatggaaaagatgcaaatcccggcaaaatacagtaccggactggctgatgcgcttcctctgtcagtaccgaccaacagggcagcgctcgcggcagcggcaatcaaaaaagcgcaggaagaagcggctgcggtagtggatatcggggcgcttcagaaacaactggatgattttgcccacctgcgcgatggcctgctgagtgatatcgccaacggtctggccgagttgcagggaaaaagcgcaagggtgtgggtatttaccgccagtggcgatttatccaccactcttctggatctggtaaaaggcattccgttgcaatcagcgatctacactgctgcgatgatgctgactggtgacaacctcgacggcataaaaggaatgatacatgacctcgaacccgacgctggcgcttaa

SEQ ID NO: 84042 - DNA, 540 bp, Citrobacter koseri
atgacctcgaacccgacgctggcgcttaacggagaggcgatccagctgaaaaacatgcgcgtaacgataacgcagcagtttcaggacaaagaccagtccgggcagaccagctctacaacgaagtccgagcagggcatgaagggtaaagagctgcgcgtatccggcgaggttcctttcaaaaataaagagatattgcgccgcatctttgagctggccagcgccactgatgccagcggccaacgccagaagtatcgcgtcgcacatgagcaggcgcgtgccgtcaattttcgtgaagccaccttcaccggcacgctcgatgctccccagatggacgggaaaatgtcatggctggtgacatttacgctgaccgagcatatcagcgtccaggaaaagcgcgaggcgagggcgagcagtaaatcaacggcgaaaaagcagggaggcgcttccggcagcactggccagtctgctgatgaagatgatgagaaaatgacgtggtttgagcgcaaagtcctgaaacccgtcaacgatgcgctggggtaa

SEQ ID NO: 84043 - DNA, 1701 bp, Citrobacter koseri
atgaaaccgataaaacgcctgtacctgtcaactgatgaggtacatcttgctgatgccagcttggtgctggaactgaacagctgcggccgggggtttattacggccgaaactgaccaggactataccggcaagctggtacgtattgatgtcgggtataccgaccttcttttgcggtggtttacggggtatgtggaacgatcacagccggcagataacggctttcagcggctttttgttcgtgagctggttggcgtgtttgaacgtctgtggccatgttcacttcagcacccgacgctgcgtagcgtcgccggctggctggaagagaacagcggtcttacggtgacggtacccgatgccgattacgcagataaaccgatcccccactttacccacagcggtagcgggtatcagctgctgaataatctgggtaaagcctttggtatcacggattacatctggtaccagttgcctgatggcgggctgtatgtgggaggcgcggaaaagtcactctttgccggcaagccggtggatattccggccgaattcagccagggggctgctggcggcaataccatgacattaccggttgtccagagcctgcggccgggggttgaaatgaacggcgagcgtgtaacaaaggttcacctgactaatgacacgatggccgttacctggacgccgcgtaaccgggcaacaggccagccattgcagaaatcgccagtacagcggcagattgaaagccatttcccggagctggcgtccgggttgcatttgccaaagttcgcccgcgtcattgcaccgacagaagctgttaaaagcgggaatttttcagatccgttccgtccgcgctatgccgtggatgtgcaactgcttgacgcagacggaaacccggacaacaagacgccggtttattctgctgtgccgctgccggttcctatggccggtaatgattcgggcatgttccagttcccgcctgaagggacgctggttgaagttgcgtttaccggaggtcgcccggataagccatttatcagacagacgctgccggatggtaccagcctgccggatgttaaacccggcgagcagctgcaacaacagcgggcggaggtgtcgcagcgtgttacccaggctggcgactgggtgaggcagaccgatcagaccatcagcgaaacatcgatggcgcgtacggtcaaagccgatacggaacggcgcgaactggtcagccgtgaaaccacggtcaaagccaccgataagaccacggtactgggtaccgccactctgatggccggagccatccagcagatcagtgccggcgattttagccaggcggtgaagggcaacaggctggccagtattggggggaatgacgaaaccgatattaccggcaaacaatccacgaaagtggccggtgccgtggatgttgatgtggggggaaccctgactgaaaagattgctgcattacgcaaatctgtggcatcgggcggtcagcagattatggggccaaccgtccatattggcagtgagagcgtcaacacgctgaccatgatgctggacaccattgatttactggccgagctggcgcagcagtgtgccagccattcgcaccccagtgttggtacgccaaccaatgccggcgcattcacacagacggcggagaaggccggacagacccgaagtaagtaccagaaaataatcgcctga

SEQ ID NO: 84044 - DNA, 273 bp, Citrobacter koseri
atgcaagacttggttttcacacacgaaaacgagttgctcgctatggcgccgcttaatgctgatgatgaccacaagctattcaaaaagcagcatgttcaccatactggagctggacatgtgcagtgggatttcatcttgcatgatggcattgactggcatttcaggcaggaatcatttcatattagaacggaatttcagctgagagagtttaagcaatttatccgcgacgagttaaggcaaatcattgatagaagaattgaacaagcccgctaa

SEQ ID NO: 84045 - DNA, 243 bp, Citrobacter koseri
atgtacacatataagatggttcaaataccacctaacatttctgttaaggcaaaggacaacaagaatggaatcgctgccgcatacttggagcaagaggttaacgcttgggcagctgaaggatgggagtttcagcgcgttgatactatcggtatagaagaacaacccggatgcttcggtggaaacaagtcaacattgacgcactactacgtaataaccttcagaaaagaagttgcaaatgcttaa

SEQ ID NO: 84046 - DNA, 294 bp, Citrobacter koseri
atgctcgaacggctggaaaagagagttgagaggctggagtctgaactttctgcggcacgtcttgatattgcgatattgagagaacgttcagaaaactcagccactaaagaagatatccaagctacaaaatcagatatccagtccgccaaagcagacctccaagctggctttgtgggagtctataaagaaatcactggcgtacataaggaactccgttctcaaactgtatggcttgtaggttcaatatttaccagtatggcactcttatttaccgccattaagctcttcacttag

SEQ ID NO: 84047 - DNA, 417 bp, Citrobacter koseri
atgagtaaatcagatcacaaagatgatcctgtacgcagcgcatatcgtcgtttacagctggttacgccacaactcttcgctcagtatctggcagagaaaggtgtcagcaaaggctgcttagcttgcggttacgataagctatcaacaccggaaacgatgagcctggattcatcacgtaatccattcaaagataaaaaaccttctgaatttaccgaagaagaatcccggcaatacgttgatgccgcagcagttcactatgtcaccccatctctgattgatgaatcaaaaacaccattagtttccaatcatcaataccgactcgtctgtcaaaactgcggcttcatcagctatttccgtgcggccaacgtcgttcattgggtagaagaccgtattaatgaacagggggatcagccataa

SEQ ID NO: 84048 - DNA, 378 bp, Citrobacter koseri; identical to SEQ ID NO: 83255

SEQ ID NO: 84049 - DNA, 309 bp, Citrobacter koseri
atgaatacggatgataaaagcagaaagccaagatcagaaaaaaccattaagcaaaaaatagcatcagcgcagatgcgtttgaatcgtctcaagactaaagagaaatctttgtccaagagtgctgagacacgcctgaagatcattctcggggcagaagtggctaaagctgttggctgtaaagtagaagatgttgataaggagtttgtattaggcgtattaattcattttaaaaaccttggtgctgaagataaggcaaggctcaaattgcgaggaaaaaggtttcttgatgaattgattggcaggcaataa

SEQ ID NO: 84050 - DNA, 549 bp, Citrobacter koseri
ttggcacctgtgaccattcccacttcaacatttgctatagtatcaaaagagtgtacgtttggatgtttaataatctcattaagaaggttaacttcatttttatctaggacggcttttgtccacttaccttttacggtatcaccattgattgtatttgtttcgttgaatatatcttcgggatttttttgtaaaaaatcgaagccactgacccctttaattccgacaccttgtgatgcacaatccagattaattttcttttcaactaatagaatgaccgcgccttgtaaggtttcactgaaccatatttcttttggatcaataattacaattttagagcaatgctcacccaagaatgtcctcaaggattgtgcatgcattacatttataatttctgatggaattaccatgccaagacgtcctccgggattgaggagcgaaacgccagacaaaataaaaggcacccatgcatttgtatgtttagtaaattttaagtcaagcaatttgaaaattgcttcagtattttcttggaaatccttttctaagaattga

SEQ ID NO: 84051 - DNA, 1248 bp, Citrobacter koseri
atgcatgtaggtcacgacatcaatcaagtaatcagtgagattgaaaaaggtagtgcaaagaaatccaacgtttttgcaactggtttcgaacaaggtgatagaactacagttggttgctcgcacaaaggtaaaatttgggagatgaactcatcaccaattaattattgggtcgaatggtgtaaaaatatctctaagaaacttaatgataaaacaatagacccaagtgatttattgaagaatgtcatgcgagcagagaaaattgagcaaaaatggcctgatggccttttttactcagactggcctgagtccatagcaatcgagaatgaacaaaaaagatctcttatttttcagggggagaggttcaaccttcttgatattgttctgggcaagccaaattatgatgatgacctaactttaagtattcctgtgtacgtcgcagatacagatggattggaacatctaattacaaagatcaatattaagctattggaagatggttacaaaacacactgccccggtttgaaaatttcattatctcaagaggttccgttagatgaatacttggatagcgaaccactggtgctactaagtgtcgatgggtcaatgcttctaggtaattatcgttatttctcgcccaacagtgtagatataaaattgccaatctctctacttgaggtatgggattgggggacaactaaaattcatcaggaatcaatgcgtgcagaaaaacgctttgatagtgtacagggatttacttacaacaagattgctgatgattacagtatagtattcaatgatgatggtgcaggtgaaatcgccgatctcgttgcaattcgtgaaagtaaaaatgtcattcatattgatttatttcactgcaaatattgttccttgactgatggagtggctataccaggagcccgcgtgaacgatgtttacgaagtgtgtggtcaggcatccagatctgtaaaatggttatatacgggtgagaagttttttgatcgtttgatggagcgttatcaaaagtcgcttccaatcggttttgatagaatcctaaaaggactcccagaacaactcgagatattgcgaaataagtgtcatgatcacgaactggttttcaagtttgctatagtacaacctgctatttcagctacaaaaatttctagcggtcagttagcagtgcttggaacgagttactcatacattaaaagtatttccggatcggatataagagttatcgttagcccttaa

SEQ ID NO: 84052 - DNA, 213 bp, Citrobacter koseri
atgtcagaccgtttcttgattactccacatagcaccacacttacttacagaatcggggaaggagaggaaatcactcaggaaatccctcttcatatcgtgtttgatattgtttctcaggttgttattggggtttatggttctttagaagaagctcagctaaaaaagaccgagcttgaagaaaaattaaaatctacacgaaaacttcgcatgtaa

SEQ ID NO: 84053 - DNA, 129 bp, Citrobacter koseri
atgagactacaagataatggtcagtacgaatatgaaggaacatatgaagaagaattaccagaagatgatgaagatcctaaccagatcagtgaagtcaatattaccaccgaagaaacaaaaaccgagtga

SEQ ID NO: 84054 - DNA, 2286 bp, Citrobacter koseri
  misc_feature (2218)..(2227): n is a, c, g, or t
ttgtttaggatcactgcacgcactgtcttagagttgggttcagagctgattagctctgatatcattgctttctacgaactcatcaaaaacggctttgatgcccagaccaaatctggtgtcgagataagattcgatattccattgtcgcaaaattcatatcagcgattgtaccaactgataactgaagactgtgatattaccaacgttaaatcacatattatttcatcattagacaccagcgccagtgaaaaatctcgcaatggctttcgcagcctaattgagagagcaagtaatttggtggaactcagaaagttattgattgaagcccaaggtcgttataacacaattactgtgtctgacactggtagtggaatgtcgctagatgatctcaaccataactttctcgtcataggcacaccatcacgaaaacatgaagttgaagcggccatgcagcggggagataaggaagcaccttatttaggagaaaaaggaatcggccggttgtcggctatgcgtcttggagaaggcttgcgagttgaaactgctcgagaatctgacccaaaacttaacatacttgagatagattggcgtgcttttgcagatgtcgatgctatgcttgatcaaatactagttaatccgatagctggccctgacaaaccaagcgaaaactggtctggtacatcagtaattattagcaatcttagcgagaattggacaaaaaaacgtgtcgaagatatggcggaatatgagttcgctcgacttactgatccattttcagatgctggactcaggcctcgaatagctattttttggaattcagaaagaaagtccatccccataatgccttcagccctgctttcttccgcacatgctcgtgttgaagctaaatatgaagtcattgatggttccccttcacttacttgtacagtggaagctctagatcttggtttcgaccatccaaaagaacgtgagaagacaactcttacagttgaggacttgcaaagtgcaattattggccgagaagcacatatcgatgacagtgccctcagcaccgtgggctcattttcgttcgaggcgtactggtacaaccgtaggaggttaactcgtgtcgatgctataggtgagcaacgtgcagtacgtgaattacaggaaaaatggtcgggaattatgctattcagagaccgctttcgtgttttcccgtatggtgaagatgaagacgactggcttgagttagatcgaagagcgttacggcgttccggatacactctcaataaaactcaatttatcggtagagtgatgatctcacgtactggaaacccaacgttggtagatcagactaaccgtgaaggtctccgcatcactccagaacaaagagttttcctagaagtaattcgctatgtcgtacaagatcgacttggcacttttatgcaggatgtggaacgtcaatataagaataaaaaagtcgacctttctgatgcacaaacgcaggtctcaaaattagaaagtagggctaagaatgctattcgtcagctaaaacggttaaccccagcagaaggaaacgaggctattgaagatcttcagcaaactttatttgagttctctgaatttgctgcgaatgcccgccaacgcattactgaagttgaacaagaaagcagacagatggtagaaatggctggagttgggctcatggtggaagtagtagcacacgaacttgcacgtgcatccgagaatgcattaaaagaactcgaccgccttcatgctaaagatatgccagaagatttgcgtgcccattttaaaaatcttcaagctgaactaaaaagcgtaagtaaaagagttagagtactagatccaatgagtgtctcaggtcggcaacgaatggaggcattcaaacttgacgaacttattagtgatataattgaagggcatcgagcgcagttctcacggcataatattcatataatagccgaccttcctaaagagtctattcgtataagagcagtaaaaggaatgattgtacagattttagaaaacttgatctcaaactcagtatattggctagatatgaaagctgagcgtgaaagaagcttccgtgctgagataaaaatcacattagaaagtagtccccccaccattacctttgaagataacggtcgtggaattgccccggataaccgagaacaggtgtttaaggctttcttttctctcaaagacacacgtnnnnnnnnnngacacacgtcgccgtcgtggtcttggcctttttatcgcccgcgaagcagctcaatataa

SEQ ID NO: 84055 - DNA, 588 bp, Citrobacter koseri
atgatcccgtcaattaattacgccattatagccaatgcattgcatgcactgaaagaaggcaatattcaccactgcgaatctctgggatttactgtcgacgaaataaatgctctcgctcagttatcccttgaagagttgtttactgtcagccgggcggcggccccctttgtttcgatcactgtccgccatgatgtgctgcatcatttactggcgcaggcccgccaggaataccgtcatcaacagcagattaaccgggctatccgcctgggtggctctatcgcgttgctcaaccactattttggcctgacatcaaatgaagtctgccttcgccgtaggttgctgggtgtcagcgtgccgtatggccggacgcctgaaccggatgaaaagacggatgcggctatctggctgcaatggcaacagtgccgggtggaaaaccttgaatcgcccgccgcactgagcgccatgatgcaggtgacggaatccctgatgccaaagcccgaaggactatcactcaccacggtctggaagagtatcacgctgtgcgaacaggacattatcgccaacaggaggacgccatatgccggatga

SEQ ID NO: 84056 - DNA, 927 bp, Citrobacter koseri
atgtcaaaaaataaaaacggcattactattcaggataaaaaccaaggatggcttactataaaagaagccattttttctgtcaaaaaaacttctggcattgaattgactgaagctgacatttataggtttgcattaagcaaacgtattcgcctctcaatttatttccagtcgttagttatactacgtgaagcaaaaaaaaccgaacaaaaattaaagttgaaaccaatctgcacctctctaatcaaaaaaatttgcatgcttgaaagtgataattttttgagtgaaaactatttgaccattagtacaaaaggaaaatatttcattccctctcaacaggtaattgatactgaactgtcaggctatgaatatgttctgctacaacgattgctcgctttatcattgaatattccactacccataactggtgccagcaatgataattatggcattactgtagcttttgaaggggatacgtttcagatttttgaaaaaacaagttggatgagaaggatacaatatcaactttcacggttacccgagtcggtttctttgaatgttacggataaaataacagatgatgaaaatcagctaagtaatgtcccaggttatttccctttacatagcctacctgctgacgcctgctttgttatccggtattctgagctggaaaaactcatcgaaatatactccgggagcaaagtaaaacctttaacgctgccccgtatttccacgccattatctcgccttttttggctggcctgcaaacataacgaggccattagcccgttaattagaaggccttataaacttctgaccatttttgagaagtgggcctcagatgatggtattactgatcgtctgagtggcgacacactgaaaaatgcgctggaacgaggttctccttcttctacatccttatctaactga

SEQ ID NO: 84057 - DNA, 465 bp, Citrobacter koseri
atgagtaatgtgaatattgttgaatgggatgaagcttacagacaagactttatgtcactttctcttgaatggctggaaaaatatgtttcagtggaaccgatagacctcgaaatgctaaatgatcccgagggctatattctttctcgcggcggagctatttttttcgctcgtgtcggagaggaaactgtgggaactgtttcgatgctccttcattctgaaggagtctatgaactagccaaattagccgtcacggaaaaatataaaggattaaagataggcaacctgcttatggaacattgcatccagtttgctcgtgataataaagcgaaaaaaataatattatttactgctaaaactcttgttgcggcagtgagcctttatcacaggcatggattttccgaagttatgctggccgataacaaataccaggaagctgacatacggatggagctagatataaaataa

SEQ ID NO: 84058 - DNA, 1014 bp, Citrobacter koseri
atgaaatatcagctacttggtaatacaggagtctatgtctctcgcttctgtctcggaacgatgacttttgggggacgtggtattcccccctacgatcagattggtggtcttaatcaggcagaaattcaggatgtggtcaatgcagcactagattcaggcatcaactttattgatactgcggacgtatatgcccagggagaatcggaagaattgcttggtaaggcaatttcatcccggcgcaacgatctggttctggctaccaaatttcatgcaccagtgggacgtgggccaaatcaacgcgggcaatcgcgattgcacatgatgcaggctttggagaatagcctgcgacgtctgcaaaccgatcacatagatctctatcaaatacacaattttgatccgcttacccccttcgaagagacgctgcgtgctcttgatgatgctgtacgccagggtaaaatacgctatatcggatgctctaaccttgctgcatggcaggctatgaaggctctgggaatttcggaacgaaatggtttggaacgtttcgtctctatacaagcttactattcactcgccggacgcgacattgaatatgagctcctgccgttaatcgaagatcaaaaaatgggcctgatggtatggagccctctggcagctggctttctgtccggtaaatacgaccgccacactgaacagggactttcgagacgagataagtttgagtttccccccatcaatcgcgagagggtttttgacatcattgatgtacttcgtctggttgcacaacggcattcggcgacgcctgcgcagattgcactggcgtggttgctggccaagcctacggtcaccagcgtgataaccggtgtcaggcgagttgatcaacttcacgacaatatggcagcgctggaattgaggttatcaccagaagatatcgccgagcttgatgctatcagtgagcccggtttgcattatccgaactggatccaggcaaactgggcgaacaaccgtataccctaa

SEQ ID NO: 84059 - DNA, 900 bp, Citrobacter koseri
atggatccactttcagatgttctttcactcctgcatacaaaagctcacctttctgctcgtttcgaagggggggagaaatgggcggtctgctttccgtctgaatcacatatcaagtttggaactgcactgaaaggtgggttctggcttacactgagtggagcggaacccaggcgtattgaggagggtgatacttaccttcttaccagaatcccgacttatgtgctctctactgatccgacgctgccagccgtggacgggcatgaattatatgctgccgctcgggataaccgggtacattacggtggtaatgatattgtgatattggggggcagtttctcatttgatgatcgtaatgccactcttttgcttgaggggcttccatctctgattatcatcccgggaaacaagccgtatgcggcctcagtcatggggacattgctgctactggacaaagagttacgggaatttcatattggcgcgccactggttagcggtagactgggtgatatcctgcttgtacaagcgctcagggctcatgtggcctccggtgcaacgattggatggctgggagctctcggtcatccaaagctgaatgccgcgctgcggttaatacacggtgaagttgcacgtgactggaccgttggcgaattagctaaaatgacaggtatgtcgcgctcagattttgcccgtaaattcagggagaggattggtatgcctcccatggtctacctgacgcgttggcgtatgcacctcgcaagagaagctctgctaaggaatgacacgaccttagcaataattgctacctcggttggttattcgtcggaaagtgcattcggtcatgcgtttaagcgctggtttggttgttcacctaaacgttactggtcaaacatacagaactaa

SEQ ID NO: 84060 - DNA, 1269 bp, Citrobacter koseri
atgtcccttaacgactcaaaaatccgcaacttaaaaccatccgcaaaacctttcaaagtttccgattctcacggtctgtatcttcttatcaaacccggcggctcacgtcactggtatctcaaatatcgtataaacggcaaagaatcccgcattgcactgggtgcctatcctgccgtctccctgtctgatgcccgccagcagcgcgaaggtatccgtaagatgctggcgctgaacatcaacccggtaaagcagcgggccgcagaacgcggtgccagcccaactgagaaagtgtttaaaaccgtggcgctggcctggcataaaagcaataaaaaatggtcgcagaataccgctgaccgtctgcttgccagcctgaacaatcatgtctttccggttatcggacatctgtcagttaccggacttaaaccccgtcatttcattgatctgctgaaagggattgaagaaaaaggcctgctggaagtcgcgtcccgcacgcggcagcatgtcagtaatatcatgcgccatgcggtccaccagggattaatcgataacaacccggctgcaaaccttgacggcgtgacggcaccacctgccagacggcattatcccgccctgccgctggagcggctgcctgaactgcttgaacgcattgaggcatatcatcagggccgtgaactgacccggcttgccgtcctgctgacgctgcatctgttcattcgctccagtgaattacgtttcgcccgctggtcggagattgatttcagaaacagggtctggacaattcctgccactcgcgaggccattgcaggtgtgcgttattctgggcgcggtgccaaaatgcgcactgctcacatcgtgcccctctcagaacaggtcatcgccattctgaaacagattaaggaaatatccggcgtttatgaactggtcttccccggcgaccataacccgtacaagccgatgtgcgaaaacacagtcaataaagcactgcgcctgatgggatatgacacgaaaaaggatatctgcggtcacggcttccgggcgattgcatgcagtgccctgatggagtctggtttatggtcgcaggatgcagtggaacgccagatgagtcatcaggagcgcaacaccgtgcgtctggcttacattcataaggctgagcatctggaagcccgtaaggcaatgatgcagtggtggtcggattatctggatacgtgccgtgaatcttacattccgccctatattcagagccaggaaaagcgcgacatcgccgtctga

SEQ ID NO: 84061 - DNA, 717 bp, Citrobacter koseri
gtgaatattgatacagaaaaagactgtatgggcgtagattcaaaccatccgatggcaaaacactttgatgttctgacatataaagatgggttattcagtaccctgcctaagggcttctttcaggattggctagggatgccttctaatgttgggactatgtccataggtaaatgttcaggatttggagtcggttcaattgtaaaatacgatgcggggaaacagagtctgcgcgtaggaaggttcgtttccggagggttaagactaaagtttatcctcaatggccaacatgaaactaataccatgtctacctccatgttttcgtattttcatccggaactccgtaatccgcaaccgccacaatatagcgataccatcattaaaaacgatgtctggattggagacgaaatattgatgctaggcggaggtgaaataaataatggttgtatcatcggcgcccgttctgtgctgccccccaatttcaggtccgagccttacggtatctatgcaggtaacccggcacgcttaatccgtttcagattctccgaaaagatcattgaatctcttaacgatctggcctggtgggaccactcagatctcgttaactggttaaggcgcattaatttatactttttgtatgactttaacgaagatgaagcgaagactcttgatctgcttgcagaagtcaaagctatcaagatgaagtggcaggctaattaa

SEQ ID NO: 84062 - DNA, 588 bp, Citrobacter koseri
atgagtcaaaacccgtttgatcctggatattataatgagaatgaacttagacaatttggctttaagtcggtaggtgaaaacgtacaggtcgctaaaaactgtacgattatcggcctggaaaatatcattattggtcatcatgttcgtattgatggctacactacgcttgtagcagttaaccaagggtatttacatatcgggtcatatgttcatattggcggctatagtgcaatcttcgctggagcaggtgttgtgttaagcgattttagcgggctatcgcaaggtgtaaaactttacacaaccagtgataattatgatggttcagtaatgacaaacccaactgttccggcaaaatatactggtgtgatacgggcaccaatcttaatagaaagacataccataataggttctcaatcaatcattatgccaggtgtgacggttgccgaaggctgtgcagtaggcgctaattcattcatcacaaaaaataccgaagcatggtctgtttactttggctctccggccagacgacttaaagcacggaaaagaacactgcttgaaagtgaacaacaatttctgaataacctctga

SEQ ID NO: 84063 - DNA, 1194 bp, Citrobacter koseri
atggcacaagtcatcaatacaaacagcctgtcgctgttgacccagaacaacctgaacaaatctcaggggagcctgagctctgctatcgaacgtctgtcttccggtctgcgcatcaacagcgcgaaagatgacgctgctggtcaggcaattgctaaccgcttcacttcaaacatcaaaggcctgactcaggcttcccgtaacgccaacgatggtatctctgttgctcagactactgaaggttctctgaacgaaatcaacaacaacctgcagcgtatccgtgaactgtccgtacaggctgctaacggttctaactccgattccgatctgtcttctatccaggacgaaattaaacagcgtttaagcgaaatcgatcgcgtatctggtcaaactcagttcaacggtaccaaaattctgagtaaaaatcagactctgaccatccaggttggtgctaacgatggcgaaaccatcgatatcaacctgcaagaaattacctctaaaactttgggtctggatagttttaacgttaacggcccgaaaggtacaatatctgctgcaaccgcttcagatttcaaaggtttctacggcgacaccactcaggtttccagtgctactgttgaagagaaaactggcgatgctctggcaactcgtctgggcgtatctacagctaacgttgcatttgacgatgcaaatgtttacaaagatgaaaaaggcaacttgtttgcgaaagtgactgtatctgctggtagcgcagctgagtctaacaacctgaaagcgaatggtttcgagattgctgatggttctaacgcaagtttctatgtagcgcttgattcgcagtctgcggatacttctacacctacaactgcagctttcactattgatactgattctttaagcttcaagagcatgactactggtgcgacctctggtgcgctggataaaattgaccaggctctggctaaagttgacgaattccgtagctccttgggtgcaattcaaaaccgttttgaatctgccatcaccaacttgggtaacaccgtgaacaacctgtcttctgcacgtagccgtattgaagatgctgactacgcgactgaagtgtccaatatgtctcgtgcacagatcctgcaacaggcgggtacctctgttctggcgcaggccaaccaggttcctcagaacgtgctgtccctgctgcgttaa

SEQ ID NO: 84064 - DNA, 3450 bp, Citrobacter koseri
atgacgactcatgaagtcattgagacctctcactctttgggtattccttttagtttgcatccagaccctatagcaaatcctgagcatatttgtgcgatggcctctctgtatggcttcgaaagcttgccatctcacaaggcgcgagtgcttattttaggctgcggacgcggcgataacctcttaccgtttgcccttgccaatcctgatgcgaaagttatcggtattgatattgatgatgaaagtgttcagcagggcgaagtgttgcgccaggcagcaggggcagacaatgtccagctcggtgcattatcgctgaatcagcttgttgaactggatgtaggaaaacaagattatatttttgtgcagggtgatttaacctatctggaccaccccagccgtcaggtcattatcgcctggtgtcggcagtctctttcttcgcaaggtattattgccattcgttggccgtgccatccaggcgcacgccatgacgagacgttaagagatgcgatgttgctacatagcagcctggctacttcctacgaggagcaagtcaatagtgctcgggcgatagcgacatttttggccctcggttcgacagggttgcaaaatgacaaactacaatctgtactgaaaaccctggatacgctcagcgataccactctggcgttgcgctacttaagtggtatgaatgaggctaactatttggttgattttaatcagatggtggaacaaaacggtctctgctacctcggtgatgctcagccctggacagagatagctgaattctatggcgacaatgtgcaagtcatgctcaatacgatttgtccacaggataacaaggtgttgcgtcagcagtatcttgattttgccaccagccgtagcgaacgttttagcctgttggtagttgcagaacaccagtcctatattacttctgctcctgaacttagcgaacttgagcatctgaactgggctggtaatttccgccgttatttctcccatgaagagggtacaaccggtcatatcaccaatgatggtaagttcctgcaaatcagtcatccgctaacgttaacggtgctcgacctgttaggtgaagtgtggccttacagtctatcctttgatgacattgtgtcgcagaccgccatacccggggatgaacttgccccacatcgtcaggctgttatgcgtgtaatgcgttcgctgtttatgaagggtattcctgcactacatacctgtaagggtatagatgcctggcagcgtaatgctgtgcgaatggtgagtggacataaaagcgttgtcgcgttgatgggttcagagcatgtggagaatatactgtttaacttctggtacgaaactgttgatatcacaccggaagagagggcgctacttagacagtcagagttgaaagttaatgcagagaactaccaacaactggagaacttgcgtcataaaggtctgctaatgggctcacctcaggcatggcaaaggtactatcagcaaatgttgttggcacaagatgctcaggagagtattggttctattggcccgctattgttattcagcagttctctttttgaacaatcaagttcgcgtcgtatagcatttttaccacaggcaggccgtgattatcttgataataaacagatgaagaaagttaacggtttcttcggtcgtcatgagtaccagcaggcattgcactatatgctggaactgcagcaggtggagccgaataatccggggatctggtatcagctttcacaaacgtatctggggatgcaggatcatgctaaagcgctggatgcattcatgcatctctttgctcttgaagcgcgagctttacagtactaccagcaatttgtcatgttacttattaagcttgagaataactggcatgctgaaaaactggcatggcgatgcttacgtcatgacgataaaaattataaaatctggacgtttattgcccgaataacgatggaaaaagggcaactacaacaggcgagtggataccttgaaaaagcgattgcgattgaactgggctatataatggccgcatctttgatggggaatatttatgccgatcagtcgaatcaggacgaggcattgatttggttacgcaaaaccagcgaacttgcgccgtctgacttgaattacatgactaattacctgtttgctttgttgcatcatcaccgcagcagtgctgattatgtgttcaaagaacattgtcgatatggacagcgggtcaccgaatgggcgaagcaacaaaatgtgctgttccagtatccacaaactaacgatcccacgcgtagattgcgtattggctttgtttccggtgacttacgtaatcatccggtgagcaacttcattttgccaatctggttgtcatttgatacccgagaatatgaattgtatgcgtaccatacttacagtaaagaagatggtatatccgatcagctcaaagaaaaaacggcggtctggcgttcagtggcacatttaagtcaggttgaacttgcgcgtcagattaatgatgaccaaatcgatgtgcttatcgatctctcagggcacactaacttcaatcgattgcaaatgtttggcttgcgacctgcaccagtctccatgtcgttccttggctatcctgggacaacaggccttcagcagatcgattattatttggcgcataacaaaatgtcgcagccaggtgaactggatagtcaattcacagaagcactcattcatcttccctttaatgagcaatttacactgtttcaacatgcgcctgatgtgacgccatctccagttctggagaccggcagatttacattcggtagttttaatcgacctaataaaattaatgatgaagtactggtctgctgggctgaagtgctaaaccagcacggcagcgcgcagatgcttattggtaatatggtagatgatgacatgatcgcccgctacgagcagcgatttgcagaacatggtattaatagtaacagattgattttcagaaaaagaacaggcatttctgaatatttacgtatgcatgctgaagttgatatgttacttgatgccttcccttatccgggagggacaactaccaactttgcgctgcaaatgggggtggtgagtctgaccctcgtgggtgggacttttgtttcccgccagggagcgtctaatctgcgtcaattcgatttggatcggtttgtggtgagctcaacccgcgaatacatttcccgtgcattggaggttgctaaagacattgaaggtttgaacgcgattcgactaggaatgcgtgatcgtatacgacgtaaaggcttacacggtggttcaccagcagtgtatctacaacgtgcagtaagagaagcttggggacgatactgtcgcggcgaaatgccttcttcattctgcgtggcagaagaggttgtgcaggaccagcctagccaatttacaataaatagcgcctaa

SEQ ID NO: 84065 - DNA, 1146 bp, Citrobacter koseri
atgaaagaccccgtttttgttaccagcccattgctttcaccactggaagagttcataccctatcttgaagatatatgggcgaataaacaactcaccaatggcggcccgtttcaccaacagcttgaaacggcgcttgcagagtatcttggtgttgaacatctttgccttttttcgaacggtacgctggcattacttaccgcactccaggtattaagaatcacgggtgaagtgattacgacaccttattcatttgtcgcaacttctcatactttactctggaatgggctgacgccagtatttgctgatattgatcccgtcacctgtaatatcgatcccgcgcaaatcgaaaaacttattactccggcaacgactgcaattctgcccgtccattgttatggactgccctgtgatgtagacagaattcaggatattgctgatgcctggggcttaaaagttatttatgatgcggcgcatgcttttggtgtaaagaaaactggccagagcattttaaagtatggagatttatcaatcctgagtttccatgcgactaaagtcttcaatacattcgaaggtggcgcaatcatttgtcctgacgcaagaatgaagcagcgcattgattatctgaaaaattttggttttgctgatgaaacgaccgttgttgcgccaggcattaatgccaaaatgaatgaggtacaagctgcatttggacttgttcaattaaaacacattgatgaggcgctacgaaaacgacgcaaaaaataccatcgttattgtgagttattacaagatgttcctggcgttgatgtgtttttagcagcggaggatattgaatggaatcatgcctatttccctgtcaccgtgaatgaacaatatccattaagtcgtgatgcgctatatgataccctaaaatcagcaggtttccacggaaggcgatatttttatccgctgatcagttcattttctatgtatcgacatcttccttcggcacaaccgcataatctaccgatggcggttaacatgtcagaacagatattgtgtttaccgatgtttcctgaactttcagatgctgatttacatcacattgtggaaattatacgccattacgctctggtagcgtctgacagcaaaatggaaaaaattgcatga

SEQ ID NO: 84066 - DNA, 705 bp, Citrobacter koseri
gtgaaacaaagcgctattgctattgccctgttacctctgctgtttacccccattacacatgccaggacgtccgcgatgacggtgctggataatcgtgccgcacagggagatattaccacgccgggcggggcgcgccgattagcgggcgatcaaacggcggcgctgcgagattcgttgagcgataaaccggccaaaaatattatcctgctgattggcgacggtatgggtgattctgaaatcactgcggcgcgaaattatgcgcaaggggccggcggcttttttaaaggaattgatgccttaccgttgaccgggcaatacacccattacgcgctggataaagaaacgggcaaaccggattacgtcacagattccgccgcgtcggcaacggcgtggtcgacgggagtaaaaacctataacggcgcgttaggcgttgatatccacgaaaaagatcacaccacgatcctggagatggccaaagcggcaggtctggcgacgggcaacgtctcgaccgcagaattacaggatgcgacacccgctgcgttagtctcccatgtaacttcacgcaaatgctacggtcccagccttaccagcactctttgcccgacaaacgcgctggagaagggtggaaaagggttcgatcaccgagcaactgctgaatgcgcgggcggacgtcacgcttggcggcggcgcggccacctttgctga

SEQ ID NO: 84067 - DNA, 210 bp, Citrobacter koseri
atgaaaagaaataaagcatatgagcttgttaccctaatttaccgctgcttttttgtgttttttgtaatttgttttatggcaagtgttttgggcgcgttgctggtttattttaaaattggttattttgaaataaactggaaagaaactatcctgctctcgctgaaaaaaggggagttgtcggctcagttcttggtctggggctatggataa

SEQ ID NO: 84068 - DNA, 666 bp, Citrobacter koseri
atgaccagtacggaacgagctgaactggccgggtatctgcgtatttatgcttctgaaatggaaaacgcctgcgggccagcggtagcacagcaactggttacaggcctgctctctggtcaggattacatgaaacgcgctcctgactccgaagcgatgtctaaggcccagagcatcttgaacacctggggttaccataaatcgaacgcaggtattggtgatgcaccgctgatgttcggaagcaatgtactgggccttactgtcaaaggtatggcggctaatgcggcaatcggggtgggcgttaatacagcatctcagttgtctggaaaagaacctttcagttatgtcgatgcaataatggctggactaacatcagcagcgacaacaggaaaaagtgttggggtatctgctgcaattaatatggcaggagctgctataggcagtggaatcaaaggggaaaatccaactaattcggttattggggctggactaggttccgttgttgggagtaaagcggaaaaatatattacaggagggttatcgacagcagttaaagaggggacggctgaggcagttggagttgttggtggttctactgcaagtgaaatagtcagtgatgctgcaaaaaatgatcttgataaagcggagtataaagatgaaaagaaataa

SEQ ID NO: 84069 - DNA, 225 bp, Citrobacter koseri
atgaaagatagcactaagtcattacttaaccttttatccttatgctgctctatgagcttggcgttgtttgccctgactatgtttggccgcttattaggggcatggttggcttgggatatgaatgatagcttcccattttcattaaaagatttaattgtttgtctcaaactaacttggatgggagtacctgctggatttgttttttggtatttttattatcggtga

SEQ ID NO: 84070 - DNA, 267 bp, Citrobacter koseri
atgaaaacagaaagtgcagagccaacaaccgtgggagagatgatttcagaagagtttttgcaacttctaagtatgtcaccgtataatttagccgatttgatggggattcactataatagaattgaaaacatattaacaaactctgaaaaaattgacagaaacgaaggtttgattctagcgagggttttcaatactgatagtaatttttggaatagcttacaagaaaactatgacaattgggctactaaaaataatcattataagtga

SEQ ID NO: 84071 - DNA, 720 bp, Citrobacter koseri
atggaaaaaaaaacaattctaaacagtactgtcatttcagcatatctcttaatgttgagtaccgcctatctatggggattctggggacattttgatattaacatccttaattacattggtgtgtcagatataataaaatctgctatatggccaatgataatagctattgtgatgtatcttacgcaagttgccttaaatatattcaatggccccaaagctaactctactgaaaatttttcttcaaaaacaaaaggtgagaaaattgatataataattcgttttagctacatattactaatggctgctataactattggtgctattctatacaattttattactggcagtaaaatgcaaaggtacgtttcctttggctgggcgctatccactattttttattttaaaaccagtagaaacagtgccttgatggagtatattccgttcaaaaacaaatccctttcttatagcataatctgtgttcttcctatactttttctttcacgcggtgtattcgaaggagagagaatcaagtcggggaaggacacctttttaatagagtccaactccatatgtagcagcagcgctaataacaattacagatatattgacgcttttgcagacaaagcatttgccctatcattgaaagatcattcaatatgtattttcaaatatgaatatcttaaattaataaaagaaaatcagacaaccaacaataaataa

SEQ ID NO: 84072 - DNA, 582 bp, Citrobacter koseri
atgagcaaattccctttagaacaaatcggacatagcagtgaagttttagaccgggtcattgaggcatatggttttacttcgaaattgatgctcgcagaccattttgatatggcctccagcagtttggcgggaaggtacaaacgcggcggctttcctgcggatatggttgtgagatgtgtcgctgaaaccggtgttaacctggagtggctagcaaccggcaacgggcgcaagtataacgacgaagaattagacatattaaagattccacgccgtaaaatagtggatgggcaactgtacgaatcaggaatactcctgttagacaaggttacttttttaccgggaaaaccattaccgcaaaatcctatctgcgttattgataacgccacgcaattcattgtcgaacaaaatttcactgaaatttatgatgatgattggctggttaatgttgagggcaagcacagcatcagaacccttacgcgtatacctgtacggaaagttagagttagcggcgtaggaatggcttttgattgtggaattgacgatataatcgttattggccgagtggtacttaaaattaaataa

SEQ ID NO: 84073 - DNA, 129 bp, Citrobacter koseri
atgagccctgcgaccatgctcatcgccctggtatctgaccggcagcaagcactgccggtgcttctggtcttaatgtcggccccggcaatgagctgctccatatcgcaaatggaggcggcttatgtctga

SEQ ID NO: 84074 - DNA, 1359 bp, Citrobacter koseri
atgtctgaacttaaaaaagctcttgaaggcctggcttctctcgatgccgagcagtgtgtactcggtggcctgatgctggataacgatcgctgggatgaagtcgccatgcttatctgtgcggaggatttttactcccggccacaccgcgtcatctaccaggagatggttcgtctggttaacgccggacgcccgctggatttgattaccatcagcgaaagtattgaaaatcagggaaagctggagcaactgggtggctttgcctatctggcggaaatctcaaaaaacatccccagtgctgccaatatcatggcgtattgcgaaattgtggcccgctacagccgggcccgacagctggccagaatcggggctgatattactcatgaagtccgtcagcctggcaacgatatcactcacatcatggagaaagctgagagggatattacccgtctggctgagcgcgctgaaccggagcaggccgttacgttgatagaaggtatggaaaagctccttactgagctggagcgccgctgtaacgtacctgatggtattaccgggacccccaccggatttgaagatttcgacgccatgaccagtggtctccaggcgggcgacctggtgcttattgctgcccgcccctctatggggaaaacggctctgcttatcagtctgctactcaatgctttgatgaaaaaagcagactcactttgtcagttttacagtctggaacaaccgacagagcagattttgatgcgcatgtttgcatcacttggaagcgtcgatcttacccatcttaaaagtgggcttatggatgatgaggactgggctcgtgtgtcaggtgcctgcgcattaatgagcggtgagcttaatgaccggcttattattgacgacacgggttctctgactccagcgatgctgcgtgtccgagccagacgtaatgcgcgccgctatggccatccatcgattatcggactggattatctgcagctgatgcgttgcccggatcaggaaaaccggacgcaggaaattgctgagatctcccggtcactgaaagcgctggccaaagagatgaagtgcccggtggtggcgctgtctcagttgaaccgccagctggaaagccgcgcagataaacgccccaacaacggcgatttgcgggattccggtgcgctggagcaggatgctgacgttattgtctttatctatcgtgatgaggtttaccacgaaaacactgacgataagggcgttgctgaaatcattatcagcaaacagcgtcaggggcccacgggcacgatccgcctgcagtatgaaggtcgttacacccgcttttctgatttaacggggcagaccgggaggggcgcatga

SEQ ID NO: 84075 - DNA, 1713 bp, Citrobacter koseri
atgagcaatatcgataacctgaatctcggtgcagccctgttgcagcgtggcaaatcgccggttcaggctgctgaactttctcccgctgttgtccagcctgtcagtgaaatggcaatggtactgacacttgatcagttacgcccgaatcctgataaccctcgcaaagggcgcaatccacgttttgaggaaattaaagcgtcggttcgtgcccgggggctggattccattccaaaagtgacccgcgacccggacggagatgatgtttatatcttcagtgacgggggcaatacccgttatcagatcctctgcgagctgtggcaggaaaccggtgatgaacgtttctaccgcgttcacaccatcttcaagccctggccaggacgactcaaatgtctcgttggtcatctggctgaaaatgaggtgaggggagacttggcctatatagaaaaggcctttggtgttcataaagcacgcgtaatttatgaagaacagttgggccgtggcgttactttacgtgaactttccgagttgctgggtcaggaaggttatcctattgattattccagcgtaagcaggatggaagatactcttaattatttgcatccccacatgccccggctactcgaaagcgggatgagccgtgggcaggtaacaccacttctgagtctacgctcttccgctatgaaggtctggaaatcgttcagtagtgacgttaatccggactgtactctggatgaagtgtttggtgcagtgtgcaggtgctttgatgaatctgaaagctatgcacttgatattttcagggatgagttcattggccaactggtcaaggcgttgccgcaccccagtctgaattatgatcgctggttgattgaacttgatcctcgcgagcaaaaacgtcgcgagcagtttggtgatccaccaccactgccggctctgactcccgcgcctgactcgtcaggtgcacgggagcggacaacatcttcggttacgactctgcccgcagataataccagtcagactcctgttacaggtctgcgtagtggtacgctgatttcttccgcacgcccggagcctgccccagaactgcaggaaaatgtcgtacttcccggcgatatgtctgtcggcagtgagccgcgcagggaagtgcagaacgacctctttggcggcaatccggtgattaccggtcaggctgataacactgaaaacggcggagagtggctgcttaagtcggatgcaaacactatcccactcgtttcagcgcttggcgaacaggatgaatcctccataacgtctgtaagttcagtggcctttgcatctacaggtctggagcctgtgagcgatatctggcatatcccggctttacaggacgacaccgagcatcttcaggatatggcttaccgccttactttcgagattgcggagacgatgggctgcgccgactgtgttcgggaggataaagatccacgctcagcaggtttcgccatttctgaaacagccagtgaatttaaccttttccttgccggtctttcaggttcactgcctaacaaacagttcaacatgtttatgttctgcctgaattttattggttctcaggagccggctgatactgctgttttcgatgatgtcactgtcgttaaaacaatgcgccttatccgcgtgatccgccgcctgcgcgaacatcagcgtcttgctgcgaagggaggtgaaaatgtctga

SEQ ID NO: 84076 - DNA, 720 bp, Citrobacter koseri
atggcagaaaaacaaaaacgggccggcgctctccagtccgaactccatattgaacttcatactaattacgcaattggtttatgggaggggcgtagaggggaaaagcgggaagatggtaaaaaaggtaagcaacctattatggggatgcctcagttcctgcaccgtgcctcgattattaacaaagactcactgcagaatgatccatgggcggatatggctatgctggcactggaagaaaagattaattatgccagccagcaaatgactcttctgattgaaaggcttgagaagcagatgagctttattcctgttggcgtcactatcagtgatgctcaggcaagtgaaacgcttgatctgactgtgttcagcagcacaccactggggtatcgctgcgtattcctgctgatgggattcgatcagtttgccaaaaaagtgctccaggctgcccattatggcgtaattccccgaacgcaacgttatgacttgcttggtgatggtagccggcttctgcgtgaaatttatgggtgtgttctgcgttatcgcagggccggcgcatcgcgttttgatgcgattgagaataatgacgtctggcaaaaagcctgccaggattcgggagaacctgatcgtgctgtattgctgggagagaagcgctctgccttctccccgccagtcaatgaagcgagtgtgaaccttctgcgtctgcgctaccagacgacctga

SEQ ID NO: 84077 - DNA, 2016 bp, Citrobacter koseri
atgcgcctttttatctgtgaaaaaccttcccaggggcgcgaccttgcaggtgtgcttggcgccacccgtcgtggtgatggttttctgtctggccctggcgtcactgttacatgggcggtagggcatttgctggaaactgctccgcctgaggcatacggtcagcagtatggcaaaccctggtcgctctccgctttgccgatcctgcctggttcgtggcaggtcatcgtcaaaaaagagacgcaggatcagttcagggttatccagcggttgcttcgtcaggttgatgacgttgtcattgcgactgatgctgaccgggaaggagaggttattgcccgcgagttgctggattactgtcgttgggaaggtcccgtccagcgactctggctctcggcgcttgatgaactgagtattcgtgctgcccttcaggaccttcgtccgggtcaggcgacgctcggtatgtatcacgcagggttgggacgttcacgggcagactggttaatcggcatgaatctctcccgtctttataccctgcgtgctgcggaggccggttttgatggcgtggtctccgtgggaagggtacagaccccaacgctggctctggttgtccgccgcgatcgggagatcgcatcttttgtgccgaagccttactggcaggttaaagcgctcatttcgtcctgtggcctcacctttccggctcagtgggtgccggcaacggtctacactgacgaggaaaagcgctgtgttcaccagaacatcgcacagcaggttgctcagctctgtcggcaggcaggccatgcagtggtaacagaatgcgacacaaagcgggaaagactcaccgcaccgttggccttctctcttggggctctgcagcaggcctgtggcaggcagtgggatatgtccccgcaacaggtgcttgataccgcacagagcctgtacgaaaagcacaaagctaccagctacccgcgtactgattgtggttatctgcctgaatcgatgcgggaagagatcgccagtgtactcgatgccattgctcgcaccgatcctgaatgcgcaccggtactcgcacgtcttgaccgggcgtttgtatcgcgcatctggaacgacaaaaagatcacggcgcatcatggcattatccccacacggaatgtgtttcagttgtctgcgttgacggaggcagagcgtaatgtctatctgcttatccgtcgtaactatctggcccagttcctgtccttgcatgagtccgacattacccgattacagttcgacattggcgggcagttgttccgtacaagcggacggacggaagtggtaaagggctggaaggtactgtttgagaaagcgggagacgatgatgctcaggaagacgatgaggcaggcgttgctctgcctctgctggcgccgaatgatcgttgcgcggtgagcggcgctgaggtgacacagctgatgatccgtccgccgacacaatatacgtttgccacgctgattggtgccatgatgaacgcttccgcgtttgttaccgatcttgcactgcgtaaggtacttaaagacaatgcgggtttgggtacagaagcgacccgggcgggtatcattgagcagttgctgacccggcgtttcatcgcgcgcaaaggcagtaagcttatggcgactgaacttgggactgatgttattgatgccctcccaccgcaactgacagatcctggtatgaccgcgctctgggagcaggcgctcgatgaggttgctggcggacgtatgtctctggacgattttatgcaccggcaggctggctggacgcataatcttgtctcccaggggctggcgcagcaagtccgaatccgtgtgccgcctgttcctgcctgcccgctgtgcggcggcaaaactcgattacgtaaaggggagaagggcgagttctggagttgtcggcgttatccagattgcaaaggcgtcattaacactggtagtggtaataaaccgaggcgatcccgaaagactaagtcggtaaaaccaaagaataattaa

SEQ ID NO: 84078 - DNA, 411 bp, Citrobacter koseri
atgtttataaaagaaagcactgtatttatgtctattggattgccaatagcaattatatacatacttactattatctccacacttcaaaataagaaaatacatattccgttgcgagatatatgtatttctgttattgctttggatatttataaattagcatctttattggaggagtggggtagtttcaatgaatttataggagtgaaatcaatgttagtaatctgcatttcattgcttattattcacataacacttatcgtctatataaaaagactccccaaaatggcaagtgaagataaaataaataaaaaattcacgtcgattagagatgcatatattggcatttgtttcctaatgacgaatgcagtttcatttgcagcgctgattgaaatggctggaggaatcaattag

SEQ ID NO: 84079 - DNA, 573 bp, Citrobacter koseri
gtgaatttatcatattttattaagacctctgcatgggctattttgcctgctttgttgcttctctttgcacagtggttagccaatacaatgacgcaaaaagatatagcattgaattataaaatcctcactaggacagttagtaatattcatacctcctatatagaaatctctaaccattcagaagttgcgattgataaggtgataatatcatcaaacccacctgacattatccttgcggcatatgaaccagtagcaaatagtggtaacaataatacttgggagggagagatcttagcaggacagagtttgaggatattatatgttttaaataaagaaatgcccatctcagtatcagcattaaactccttgttgacagccgagtataaaaagagaaataaagaaaccggtcgtttagaatggatgaaagttaatttacgtgaagatagcataattacatctggaactgtagcttatttgctctggtttttttctccattccttgtggtgttaattattagtgtgattgttaattatggcttaaaatactttcgttcaaaaacatcaaagccataa

SEQ ID NO: 84080 - DNA, 621 bp, Citrobacter koseri
atgaaaatcccttttaagtctccggcctttgatgaggctgcattcaattgtccacattgcatggcatatgcccggcaggattggtctgggttgagagataagtacggaaataataaagatgtttctctttctcaatgcagcaattgcaaccggattgcatattggtatgacgagcgaatgatcgtcccccaagcgagtggggttgagccacctaatacagatatgcccgctgattgtgttgctgattacatggaagcaagaaacattttcaatctttcacctaaaggttctgctgcaatccttcgtctttgtttacaaaaattgatggtgcatctcggtttagaggggggcaagatcaatgacgatattgctactttagttcaaaaaggtttgccagaagagattcaacaagcattagatatctgtcgtgttgtgggtaataacgcagtgcatcctggtgaaataaatattgatgattctccagagatcgcagcttcactttttggattgataaatttgattgttgaagaaaggatcacccgaccactgaaagtagcgaaaatgtacgcgaatcttcctgcgggagctaaagcagctatcgaaaggagagatgccaaataa

SEQ ID NO: 84081 - DNA, 411 bp, Citrobacter koseri
atgtctgggattttagcaagcactgccgccgctgtaggtatcatcgataaagctgttggtatcgcgaagaagctcgcagatgatagcggtgaacttgataaagcaacgcttaaacttgagcttgctaacctcatgagcgaacttgcaagtgtgaagatggaagtgatcacaacccaagcacttcttttcgacgctgaacagaaaaataagctgcttgaagaccagttgaaagataaatcgacatttatcttcaaggataatgtttattggaaagcaggagatgatattccgttttgccctcattgttatgaaacaagcaatatcaaaagacacatgcagcagtttgcagtcacgaggggtcaaaacgcttggtactgtagtgtctgcaaattgagtgttcgactctcataa

SEQ ID NO: 84082 - DNA, 510 bp, Citrobacter koseri
atggtgtatggcagtttcaaatctacatcccgtcttacatgtgccacatgttcggcgggaaacgtctctaacaagagcctgatagctgacgttacgttaatgatgcaagccgccgtattgcgtgtggggaatgccgttgctttacgcttcgacgaagtgatcaacggtgagatagacattgaagaacagaagacggggaagcgtaaagctctcacccttccgactccagtggtgcagatgatcgcacgtcgccgtgctgagtttccgcatgacgtgcatgtgttcaggagccagcgtaaccgctcgatgaacaggcaagcgccagttcgccgcaaagaagtgagcaagcagatcgcagaagcagctaaagcgatcgggattcatggcactgtatcggcacacagcttccgcaaagctggcgggaatgccatctacaagcgttctgcaaacaacatcgcgttagctatgactgtgctcaatcacagcaacatcaccgacaccaggcgctaa

SEQ ID NO: 84083 - DNA, 375 bp, Citrobacter koseri
gtgaccattaaatcgaagttattagcgctgaccgttctgctggcgctgttcgctggcgcatattacgcaggttatctgaaaggctggtatgcccacagcgagaaggtaaacagcgagtatgcagcgaagaacaaaaaggctgagaaagccgttaccgccggtgagcagaaagcggcgacggccagcgcagaaggaaaggtgatttaccggactatctaccgcgacgtggtgaaatatgttaacgacccgaatcatactaagtgcaattttgacgatcacgctgtgcagctgcgtcagcgcgccctcgacgcggccaactccatcagcggatttgatgcaggagccgtgcaagggggcgagcaaagccggaactga

SEQ ID NO: 84084 - DNA, 342 bp, Citrobacter koseri
atgcatcaggattacaaaacacgccttaccgcgctgagcgataaacttactgacgtggtgctcgaagaagccgatccagacaactggccgggggcggggaagaaaccgagcgaactgacaaaagacgaacgcggcgaccgttactgggataagaagaacgcggccgcatcgctgacgctgctgataaaagtacattcccttattggtatgcagacgcgcggcggtacgccttctgataaccccgggcaggatgatgaagcttttgcgctgggccagcaggtcagtaaagcagagcgtgaagcggccgagattatcaaacgtcttcagaaagccaaaaaatga

SEQ ID NO: 84085 - DNA, 171 bp, Citrobacter koseri
atgagtgacaaacaaaccgcaccagtattaacgcagggtcagcaaggttatttgttcgaggtcaaagctaatttgctggctgagctgatgttacagcagcaaccgacgaagcaagaggcggaagcgctggcagaaacggtcaacgcagcatttgacaagctaactgcgtaa

SEQ ID NO: 84086 - DNA, 423 bp, Citrobacter koseri
atgggtcgacctaaaaaaaatgttgaagtgccaggacaggaaaaatccagccaggcagaagaagcactattgcttaactctgttgctggtaatgccgtaaatgcgccacgcgctgacgagcagacagttcagcgtcgcgtcggtgaactgctcgacgatgcagcgcttaatgaacgcaatgcgttactggcaacactcaacgaacagggcgcagctatcatcgtgcgatttgaagagtacggttttaccgacgctaacgatcacccgctgaccaactgcattgaattcctccagctcgtcaaaaaagccaccacggcgacacccgttgcgccgcacggctatgtgacgaacgaagagggcaaacgccagccggtgacgggtaagcccgttctgactgagcacggctggcacgtaccaggctaa

SEQ ID NO: 84087 - DNA, 165 bp, Citrobacter koseri
atgcagaatttaattccagtcttagaggcagcagaaaaatctaaaaagtatcagggcgcccagcgtacggaaagcacaatattctgtttaactcttttctctactctgccgggcggcgatttttcccctctctatgttcgcgcgcgcgcgcgttttgtggggtga

SEQ ID NO: 84088 - DNA, 597 bp, Citrobacter koseri
atggcgcagtattcatttgtaaaatcggctggtggcgtgcttattccggcaacgcctgacgcacgggaatttattgataaaaaattccgcatgggcgcggttttatatgccgattttaaacaggcacgtaacgcagcattccaccgtaaatttttcgcacttctgaatcttggcttcgattactggcagccaactggcggagcaatatcaccggcagataaaaaactggtccgtggctatgtgcaactggtggctcactacgctggtcacgaagaaacactccaggagcttgccgatcagtatctccgcgaagaggcagaaaaacgcgcaggtaacatcagcgccgtaaaatcctttgaagcgttccgcgcatgggtaacaatccaggctggtttttataccagatacgaaatgcctgacggcacaacccgcaacgaaccaaaatccatatcgtttgcaaaaatggacgatatcgaattttcccagctttataaatccgtccttgatgtgctctggaattatattttgttccgcacattcccaacacagcaggcagcagaaaacgcagcctcgcaattattcagttatgcagcgtga

SEQ ID NO: 84089 - DNA, 192 bp, Citrobacter koseri
gtgtacaaaaagacggaggttggggatcatctccccgataacggacgcgttctcatcacctgcaaaaatggcaaagttacgtctgtcagaaatgtctatgatgatgagcacatcgcgtcacttaagtcattgttagaactggcagaacaggctggttgtatcgttgttcaaaaaggtaaaactaaggtataa

SEQ ID NO: 84090 - DNA, 339 bp, Citrobacter koseri
atggctaaatcaccggcagaacgcaaagccgcgcagcgtgcacgccagtccaccaccggtgagcgcaagattgaactggttctcgatgaacaggaaattgaaatgctgaagcggaactgcgccgcccggcgccctggtcgtgcgccgtatgatgccacggagtatatcgcattactgatacgccaggacgatgcgcgggtgcgtgcacggattaagtcactcagcagccagcgttgcgggaagtgcagtgatgcgcttccggttaagtcttgcccgtgtgccggtgattcgaagtgctgggttaccaccggatggcattcgctaaaattgatgatgtga

SEQ ID NO: 84091 - DNA, 168 bp, Citrobacter koseri
atgacggtgtatcttctcctggttctaacatactcaacaggcaggctggagcatgttccattttatacagagcagtcatgcctggtcgctgctgaaaaattacgctcaggaatgtctcgcaacgttggctttgtagagtgtgtaaaaaatgaggctcctaatggctaa

SEQ ID NO: 84092 - DNA, 360 bp, Citrobacter koseri
atgacagacaaacaggaactgcgcgagcgctactcaccaaaacaagaccctaaatgccacatttgcggcgctgaaatgacaatccagcgcatgtctgccagcagaattacttacggctgcacaggggcgacctacgacgataaggggtgtcactacaccgcaggtcgaagcattgctgatgaccattacgcccagtcccgcgtcaccgtcgtcgatgtcagcgaccctgaagtgctggcgctgctggatgagctggaagccagagataagcaggttgctgagttagttactggccgtctgaacctccagtggctattgaacgtctatgtccacgcatacgaagaggcctcagaacgatga

SEQ ID NO: 84093 - DNA, 213 bp, Citrobacter koseri
atgagcaagccaactgatgaagaaataatccaagtgttgactgatcacggtcgatgcatgacctacgtagttaccaactggctgagagataaatactggccgcttaacaccgcatacgtcttgcgccgattgaaaaagctggaatctgccggaaaagtgcagcgagttaagagtgtctacgcagtccaaatctgctgggaggccgcccaatga

SEQ ID NO: 84094 - DNA, 573 bp, Citrobacter koseri
gtgaataacaaagaattgattaaagcaggtcatgagctggctgctgaactgaaaggctcattcgaagcgatcaacgcatgcagcgtagcgcaaatgattagcgatctggctactcagcttgatgtacaactggtgcgtagcaatgcgctggctgcaaagctgaacatgattaacggcctcatggatgctgctgaacaggccaataaacttgcgcaggaagcaacggaaaaactggtacaggagcgtgacgcgctggctgcggagaatgcggcgctgaaatccgtggttgccgagaactggaacatgcgcgatgtgctgcgtcagttaatcgctgggcgccccggtggagtttatttcaacaaatgggaaccactgatttttaaagttctcaatgcaaccccagccaccgacgctttcctggctgaagtgcgggccgccgcagtagatgaagtttgcctgaaaattagcaatgcaattgttaattgctatcaggacgaacaggtcggccttgatgcagcggaaactatttgcggtgacttcgccgcccagcttcgcaaaggagtgcagtcatga

SEQ ID NO: 84095 - DNA, 249 bp, Citrobacter koseri
atggccgggcaatcggattatctcccgcctggcttaccgctcaatcgtgccaaatggccgcaagagttccagctaaaagagcattacgacatgcgcgccgctgcgctcgtccgccaactctatgagcgaaaagttactcgacaggcggttattcagcacattgatgcgacgccggacaactaccgggattttttcagagaacgtttaaattactggcgccagcagcgcgaaggggaaaaaagtgaataa

SEQ ID NO: 84096 - DNA, 477 bp, Citrobacter koseri
atgaccgatttaatttatccgaaaacatcacacatcgatgatggctgtgactggacgaaagtaattatctggcgcatgaatgccggtgcccgcgcacgcagccgcgcctgctatgttccggcgccgcgcccgattcaggtgaatccgcctaaagccacgctgaaacgcgaaaagagcgctgccactgccggtcgtgttagtaagactgaaaaaactgctggcgagctttcagcgcaaaagctggtgacaatcatgaagggcaaaacgctgtcgtaccaggggatcatgtctgcgattaaaaaatatcacccagacatcaaaattaacctggaacaacttcagaaacgtgtctttgcgctttgcatgtcgaatcttgtcggtatcgagcgccacgatgatatgcccgttacccacttcacgctgaaaagcgttgatccccggttttacgttcattcagaaaaaaacatgagggcttaa

SEQ ID NO: 84097 - DNA, 1389 bp, Citrobacter koseri
gtgacccctcaggaactggaagcctgtgtgcttgccgggctaattaacggcggagcaacgccggacgcttttgatgtaattgcgacgacgccagacgaatcattctcgattggtttttataaacgcatattcagggagattaaaaaacaggcacttgcgagcggaatgatcgacatgcttttcatcagcgaagcgctgggggggtcaagccttgccgatttatccgagatatcacgtatcccggccacgataccgaacctgaaaggctatgccggaaaaatggttaaggcgtggcgtagtcgcgcgatggcggagctgcttcagaaaggcgcggacgacatccgcaaggctgcgaaccaggagcaacgcgatcaggtcattgaggatgctgtctctcagatgctggacatgactgccgacaccggggatgtgcagccggtgcatatcggcgaattactgccgctctacatggatacaatgcaaaaacggatggatggtgacgagtcgacgcgaaacctgcttaccgggctggacgatctcgacgctgcaaccggcggtattaacccgcaggatctgattgtagtggccgggcgtccagggatgggaaaaacagaattcgctctcaaaatcgtagatggtgtaaccagacggggagggggagcgctggttttctctatggaaatggctgcggcgcagatcgtggagcgttcacttgctggcgcaggcaacatgtctgtatctcgcctgcgcaaccctaaggacatgtacgacgaggattgggcgcgcctgacggccgctattgcggaacttacagatcgcgatatctggattgttgacgctacggatttaaccattgagcagattcgtgcggttgcagagacgcacaaacgccgctatccgcatcttgcaatgattatggtcgattacctcggcctgattaaaaaaccaaaggcagagcgtaacgatctcgctgtggcgcatatttcccgcaacttaaaaacaatggcaatgcgtctgcatacgccaacgttcgcgctcagtcagctttcccgcgctgttgattcccgccctgcggcccagcgccgcccggttatgtcagatcttcgtgactcaggctctattgaacaggacgccgacagcatcctgtttctgtaccgtgatgaagtctataacccggaaagcccggcggcaggcatagccgaagttattctcgggaaaagccgattcagcgcggcgggtacagtaatttaccaggagtttaaaaacggccatttcctgccgattgaccagcacgtcgggaaagaaaaaacacgtattcaactggaggcatcaaaacccagaagacagcagcggaaatattcagagaagtacaacaccgatgcattttaa

SEQ ID NO: 84098 - DNA, 1059 bp, Citrobacter koseri
atgagccgcttactcatcaatgagcagcctctgcttgtgctgccatctctggcctgtgaaatagggcttaacgaagctctggtattgcagcaaatccactactggatgaactcctccaagaatttctttgagggtcgctattgggtatacaacagcgtatctgaatggcaaacccagttcccgttctggagcgagtcaaccacaaagcgcgcactggtaagactcgaaaagctggggctggttgatatcggggatttcaatagtgatgcctgggataaaacaaaatggtattcaataaattacgagaatctcgacaagctttctggccccgctaaaacagtgaccaatcgattaggtcaaaatgaccaaatcgaagagagcaaaatgaccaaagcaccaggtcaaaatgaccagtccccacaggtcaaaatgacccgatctcttacagagaatacaacagagaataaagatctagatccccctaacccccagaagggggagggagaggaaattattctcgctgacgctaaaaaagccctggagttttacaacgactgcaccggaacccgttgccgtgatgtaaaaccgtttgtggtgatgttgaccccgacgcagacccgcgaggcgtacacactcgctgatctgcaactggtgatccgctgggtactggcgacgtggcgacgccgtggcaccgggctaccgaaacctgcgaatatctgtcgtgtaaaccgctttgatggttacctggctgacgccgaagcttgggctaccactgaggccagtattgacccggtggcggttgttgatgcttacaacgagattttttccgatgtgcttcctgctgcgacactggacgctgatcgccgccagatgatcacacggcttgcagcccacatgataaataaaaccacaggcgcattcctgggttacctggaaaaattccgcaataccgcaccagatttttatttcggtggtgaacaccgggacggctggcgagccagttttgactacctcatgaagccggaaaccctgcgtaagacaagggaggatgcgctgtga

SEQ ID NO: 84099 - DNA, 363 bp, Citrobacter koseri
atgactaaaaaatactccccgctaaaaaagcgttccgtactcgaaaaaacaaatggccgctgtgcttactgtggcgtggtgctgagtattgataacttcaccatagatcacgttattcccaagcatcatggcggaaacaacggcattgagaatctttttgccagttgccggttatgcaataccaccaaagggaccaaatcgctcgagcaatggcgtagattcttcgccgttaagaaggtgacgggtagagctattttcggacaagagcaggtagattatctgtttacgcaaggtctgttccctgcgctgggtgctaatgagagcttccgtttttattttcagaccatcggagagcaatcatga

SEQ ID NO: 84100 - DNA, 225 bp, Citrobacter koseri
atgctgacttcaatcgaccgcattacatggcggaacggatttcgactaaacggggcgccagccacccaggatgatatcgaagatattttcgaaggccgtcgagcagctgcgttatctatctgggcgcagtatgaaaaacggaaagaagaactccgcgaaattgaactgtcacctgaggaatatcaggcggcatgccgtcaaatcgccgaagcgctggggatctga

SEQ ID NO: 84101 - DNA, 447 bp, Citrobacter koseri
gtggaaaacctcgaagaactgaaaagagagatcttcaactgggcggcggaaagcgggcaggagcttgttgctatcgagataagccgtatgtggtttcgtcttggcggcaataacggcgcgcttaggttgcaccagattgaagatgctgatggaaacgcagactggcgggctatcaacaacaatcgccagcagatttttcgctggctgcgcggagatacaaaagccgcgcgcgcaaaaacgctgactcttgctaaagcgatggaggccgcacttccggcggaacgttacgcaagactgggtatgaccactcagtatttgatctgtgtggcgattcgtgagtttgcggcggcaattatcgcgctgttacttgaggccagagacgggccgcagcaagtcgctaaagcattgcaagctatgcgggaaacacagcgcctgaccagcgtttaa

SEQ ID NO: 84102 - DNA, 234 bp, Citrobacter koseri
atggatctcaaaaactatctaaagacttccggcgttcgccagcaagacttcgctgtattggttggtgaaacgcaggggtatgttagccgtgtagcttccggtaaatgccttctcggtgctgcaactgcacttaaatggtctgctgctactgagtttcaggtaacgcctcacgactttcgtcctgatctttatccaaatccaaccgatggtgttccagacaggaatgcagcttaa

SEQ ID NO: 84103 - DNA, 465 bp, Citrobacter koseri
atgggtgccatgagaaagaaaacccttgatgcagcagaagctgacgcagccaaacggcttcgagacatttggaacgataagaaagttactttacgtcttactcaggaaaaggcggcagatgctctcggcttcaatacgcaggcgactatcagccaatatttaaatggcagcattccattaaacacagacgccacgttaaaattctcagcactacttggggtgaaaccagaagaaatacgaccagatttagcggaactgatgaattacgtccgtaaaacagggacacatgttcaggactattcagcagctggctggcgccttctaaaaccagaagatgcagagttaatcgagttgtatgacaggcttccgcaaagcgaaaaagaaagacatataactgaattaaaagaaaaagttagtgggtttgatcgtctttttgaagaacttctcgcgactagaaaacaataa

SEQ ID NO: 84104 - DNA, 324 bp, Citrobacter koseri
atggaagcgctaaccatccccgtaaagctgtacatccattaccacaccaacaccttttctcaggaaaaaatcattgtcgccacctgtgacatgtcacgtaattttccagaccaatacgttttgctggaaacgcgcgatatcacccttgatgtaaaccagccagaacctttcgacatcattgccctgcaagtcgaccagttgcgtgaccagaaagacaacatcgcagctgtagcacaacatcagatagcccaggtcgacgacaaaatacagcaactgctgtgtattgatcactctcctgttcaggaaagcgacatcccattttga

SEQ ID NO: 84105 - DNA, 285 bp, Citrobacter koseri
atgaatattagaaatttactggaaagaattcgcgaagttaaagatagcctagagcgcgcaaacagaatcatcaacatttgtggtaacgaatgccattcctccgggattttggcggatggaagaaatggcgagtgctatctcaaggtcgattcatcagaaattaaagagctggcggaaagccaaaaggttcatcttgaaagcgaactagagcggcttgaagaagctaaaaataccgcagatcgcgtgatcgctgggctgttacccgaaattaaacaaaacgcctaa

SEQ ID NO: 84106 - DNA, 2139 bp, Citrobacter koseri
gtgacaatttacgactgtctgttcgagccgaagaaatcggctatcaaagatggtgctgttgcactggcaatcagcatcgatgcgccaaataaaaaaatcgcggaaagtatcgttatcggaaagctatgggaacactacccggctaacggcgacaactactttaaacctaagttatgggagcatcttcccgggcatcccagcccacaagttgggtctttcgacgaagaatttcccaaagaacacagttttgatggcgaaaaatgggtgttaaacaccagccctgccgacagtaataacatgctgccaaaagacgatgaaatcgtcgatctgatgaaggtatctccacgagaacgccttgctgccgtgttgttattcagtaatgcgcagattgatggcgcggtctattcgcaggtatgcgactacctcgacaaccttgataatggcgatgccaacgacgacgaagagcaggacagatttaaccgtcatgtgctcagtgcaatggaggctcatgagccggtaaaacatatgcatgtcgacggcctcaataatcttctccaggccatttacgctaactttgaaaaccaaatgcctggtcgttctgctatttatcagtttgtgaaaaaatggacggataacattagtaaacgcgacgaaatgttgccgcaaaagaccagcgacacacaccagaatagtgctgtcgaagcatctgcgcagcgtggctataagcattcgtacgcgacgctggatcaggaaatagcactcgcccttctcccgattccttacggcgaaacggtatccgttcgcgcattacgtgctgctgaacgcgtaatcgaagaagaccgcgaagatttcaaacgctggtcgatggcgttgcgtacaactgagcaaatccttaaatacgaccgccagagtatctttggtgttgttcagaacgttccggcaaaagatacataccacttccctgagtcactccgacgctatattgattcctggctggcgactaacggtcactttgaagacggcgaaactgcaacagtaagccagccagttacagagcagaataccgtctcaaatgatggtgaaaaaacggaagtaactaaacaggaggccgttacagaagaccaggcaatacaggccagagaaacactgaatgacatgggttacggcgtatatgccaccagccaggacgatgccggtcagcaggaagaaaatctgagcaaagttaaaactctcgttcaggatgtggatcaacttgtcgagcgtattaaacgtgaagagcaacttccacaggcttccgaaatggttcagagcatcaatgaaatgcaggttggtgaaagcgacaacctggagttgtggaaagaagttttcaaaacagatgagcgctttacctccgcattctctgtgaatggcggcgggacctccatcaatggtacctacatgaccatgatcgccacccgcgaatttgggccaaaaggtatcggctggggtgtggatattctggaggaacgctttgatgacggtgcaccaataactcgcacggtaaagggatctgacggtaacaatacatgggaacttatccctgacggtatcggcggcatcctgactgagaaaaaccacgttatcaaaatcaggctttggtatgttcggaatggcaaacgcggtgaagagatcgcttacggctgcacaccttacctttacagcaccaaatacggccccttctgtgacggtgaagcgacgaaaaaatcactgactgatgcaaccaaaaaagcgttatctgcactcggtttctgcgcggatattttcatgggcctgtacgacaacccggaatatcgccagaaaaacaaagctgaatttgcgctcaaaaacgccagcgaaaacgcggaggatgcagcccgcgttcgtcaggaactggacgacaaactgacccgggtcgcaaacacccttgcatcagctgtgtcagagaacgagatcaacaaggtttattcttcgattgcccgtgaagcagaggtgcatcgcaaggacgcagaggagaaaggtgacacacagcatgctcgttacttaagtggtcgtctgcgccgactgactgacattaaagacagacgaattgccgaactgaataaaaccggggagaaagcataa

SEQ ID NO: 84107 - DNA, 555 bp, Citrobacter koseri
atgactactgcaatcgcgttagcaaatgactattccagcctgctgaaccttctggaatcctcagatgaactgactccagaaatgatcgccgatactctggaatgtattgaaggagacctggcggataaacttgatgccatcatggtgatagcccggaataatctcggtaatgctaaaacctgcgatgaagaaatgaagcgtctggccgaacgcaaaaagtctttcgagaataaagacaaaacactgcgaaaatatattttgtcatgccttcttgctgccaatctggataagctcaagacgcctaaaaacacatttaccgcccgaaaaggcagcgtcagtgtcgtaatcgataacgaaaaacttttgccggatgagatggttactgtccagacgattattgccccggacaagaaagccattaaggaagcaatcgaagccgctgaagcagctgccgcgcaaatcacggccgatggtgacgaagttcctgccggtctgttaaatccggtcccgggcgcccatcttgagattggcgaacgttcactacaggtacgctaa

SEQ ID NO: 84108 - DNA, 183 bp, Citrobacter koseri
atgctgaaactttcactcaaacgaggcgatgcggttcacgttattttctctgacgggagtaacggaatcattgaggcccgcagtcgctgtgagctgggaatgcaccttccctctaccgtcaaagttactcgcgagaaaggcgcattcatctctgaaaacctgattaagcgtaatcagaaataa

SEQ ID NO: 84109 - DNA, 225 bp, Citrobacter koseri
atgacaagagaaaacgatctgctgacagatgatgaacttattgaactcaccggatatcagttcccgtccaagcaatgcgcagcgctctctcgcgccgggatctctttcgtcaagcgtcgtgacggacgcccacgagtgacctggacccacgttaatgcggccctttccggtattcagcacgttgtggctgaagaggaagaacggcctaactttgatgctatttaa

SEQ ID NO: 84110 - DNA, 1041 bp, Citrobacter koseri
atgctatttaatatgggacgaaaaagattaaacccggaggataacaaacttcctccacgcgtctacgcgaataaatatagctattactacaagcccacaactaaagagtgcattaccatcgggccggttagcatgaagttatcgcaactctgggcaaaatacgaagcgctgctgaatgagcaaagcaacgttatgacgttcagcaagctatgggggctgtttttaaaaagtgcatattatcttgaactcaagcctcgtacccagaaagattatttacagcaccagaaaaagttattagcggtattcggtaaaataacggcagataaaattaaaacggaagatgtaagaaagtttatggatcgccggggaatgcagagtaagacgcaagcgaatcacgaaatgagcagtatgtcgcgtgtataccggtggggatatgaaagaggaatggtgaaaggaaatccttgtcagggggtgagtaaattcaaagctgtggcgcgtggccgttatatcacggatgcagagtacgaagctatttatcaggaagctgatgcggtaacacgtgtcgctatggagatagcctatctgtgcgcggccagacaggcggacgttttggggctactgtggcgccaggttacgccggaggggatcttcatccagcaggggaaaaacagcgtcagccaactcaagcagtggaccgaacgactacgccaaacctttgagctggcgaagacattctctacgccgaataacccaggttcatgcgtgatactgggaacgcacggaagcgggttcagtaaacggggattcagtcatcgctgggaggatgccaggcagagggcatcagtgaaactggggtacgcactggactgcactttccacgacctgaaggcgaaggggatctctgattacgaaggaagcagtcgcgacaaacaactgttcagtgggcacaaaacggagagtcaggtgctgatctatgatcgaaaaacaaaggtctctcccaccctcgacagaccgccgattcaggaaaaatattctaagtga

SEQ ID NO: 84111 - DNA, 591 bp, Citrobacter koseri
atgcaggtatcgcagggcgggctggtgtacaacgggtttggtgggagtgcggggaataatctcagccagacgcagttgctgagtcgtgtgggcgggatcattggcgcggggctttcgagctacgccctgtttccggcttttgataacgtccgacaggcactgccgatggtgcaggctttcctcgaaatggcgctggtgatttgtattccggtgatcctgctgttctcggcatgggatcttaaaacggtcatcacgctaagctttgtgcagttcgccctgttcttcctcaccttctggtgggaactggcacgctggctggataactggctgatgcagatgatgtacgacagcgacacccactcgtacttcaacctctggggcctgcaaaacacctccgacgatctgattgtgaatattattatgggcgtgatgttcctagtgttacccgcattctggctgggcgcgctgacgtgggcaggcgtcaggatcggcacagcagtcgctggggtgatgggcagcgctgtcggtgatatccgcagcgctggcgaacaggtcgggaaaatgatcgtcagtaaaacgcgtttaccgtag

SEQ ID NO: 84112 - DNA, 204 bp, Citrobacter koseri
gtgcagcggcagcgtaacgtagcggcagagaaatcgcgcctcatgctgattgtccagccgaacctgaaagatatcgtgtgtatcctgcgtggctgcatcctcacgccacgccagcagaccccgttggttcatgcggataataatctgatcgggcgtttcgccctgattcaatgcttcgactacctattgcagaggaagcggtag

SEQ ID NO: 84113 - DNA, 282 bp, Citrobacter koseri
atgctcagaatatctgtcatgggggataaaatgaacgtaacttcacccaaaattctggctcaggcagtcaggaatgcccgcaagcaacgtaagctgacccaacgtgaggctgctgaaagtatgggcatgaaacaatcaacggtttcagagtttgagaaccatcccgaggggacccggctagatacactctttaagctgcttgccgctctggagcttaagcttcaggtagtaagccggaggggcgaaaacaaatcgtctgatagctgggaccaggagtggtga

SEQ ID NO: 84114 - DNA, 1473 bp, Citrobacter koseri
atgccaaaactcaagcttaaaatttacttttctgatttctataatgttgatcccgatgaaatcattaattatggtgcttttaatatttcattaattaatgatttacctttgttcattgacccgtttctattattcaatagtgagaatgacaaatataaatcactacatgcagaaataattaaatatgtgtcttttctcaaggatatggctgaaggtggaaaattaaccagcggtttaataaaaagttggtttttgttcccagaggttaaacaaaactggtttggttttagtctagttggtaacggaggacgaggtttaggcccagactttgcgaatgcactgatccagaatttcagtaccacatttaaaaacttcggtaatgagaagttaacacgaggtagtcatctcgaaaaactatgccttataaaagataaagttgggaaagatagcattagtgatttcactactaatctcatcaaaaaattcctccttgaatatacacaagaatttgctatccaccatattgataaatccctcttgtctaagttcatggtcgataaagtagaatttaattataatactcaaacttgggtatcgagagaatatactctcccattttataataatgaatatgtattacttactccaagagacatcctcacaaaagatgaagcatggattaaccagaatgaaatgattgaagatttcagtttcttttgtaatgccattccaaatgatcaacttagggatcagcttggtgattattttgctagaatgatccccgataaacctaagaagaaagattatgaagaggctgccagacaagcaatcaagaaacaccctgaatttattgattattttataaaatacaaggaagatcatagccctgaagcacataagcaaagtgacttaaaagtctctgaggtcgaagatctttttattgaattagttcaagcgttagcggaaaaaatcaatgatgaaactgacttttatcgccataacttcaatacattagatgagagttatgaaagagtaaaatatcttaagcaagtaattgaaaataatgatggatacaagattttctatgttaagggttcaccaatcaaacgtgaagcggacctacaattgttatttagattaacatggtttgcaacaccttcagacgttaacagtgaagttaataatggtagagggcctgtagactataaagtatccagaggaaacaaagataagaccttaattgaatttaaacttgctagcaactctcaattaaaaagaaatcttgccaatcaagttgaaatatatgaaaaagcaaatgaaacacataattcaatcaaggtgattctttattttaccgacaacgagctaacttctttattcaagataatgaaagacttaaaaataaaagaaggtaagaatcttgtgctaattgatgcaagaccgaacaaaccgtccgcatccaaagccggataa

SEQ ID NO: 84115 - DNA, 930 bp, Citrobacter koseri
atgagacctgatgctaatgctgagcgtcttaaaaatgaaattcttgtagatctcactcccgaaaatgttgctcttgtattgacacctgcatgtgatatacagcgcggcgcagcgccaagaatactattactcattggttcgattaaacagctgggggttaaagattggacttatggagatgatgctaaaacatcagcgatacgaattgacaaccaactatgttggataaaatggaatttaaaacatattgatacagtatctcttcaacagctagacaaggctatcaattctcaagatttttatttagcaggccgtttgcgagaaggccatgctttagagctacaacagcgtttactttcagggttgggaagagttgggcaaatggctatattgcctgctacatttccagttgaactagatctattttatgctgatctcgatggaaaactttcgagtttaaatattgaaggattaactgatggggccgtatgcttcgctggcagggaacctaaaggtggtcaaagcttacgtcttgtaatgactgaaatgattgttgatggcgttctctcagcgttagaaaaaatagatgaaaatcaagtttcagaacgtgcccgtcaagcctttaagcatgtcaaatcctcctcagatttacagagaatgatgacacaaggaattgatttaaaaggggtaagtgataaatcatggaaagagatcgactcagaaacaggggcaaacaatagcatacctaaaatgggtttaatcgcttggaatttagctcccacagaagaggccttacctcacaaggtattaagtaaagcaggtatagttttcttgatccgcgatatcgaaaatcaagaagctccaggtcttggtgatgcaatccgctccggtttaattgctccttctcccatatcagagacatcaaattaa

SEQ ID NO: 84116 - DNA, 843 bp, Citrobacter koseri
atggctgaacgacatgttttaggattgtcaggaggtaaggatagcgctgcgctggcagtgtatatgcgtgatgcttatccccatctcgatatagattattttttcactgatacaggtgaagagctacctgaggtgtatgaattcctcgggcgacttgagggctacttaggcaagccaattattcgtctaaatccgcgtcgagattttagattctggctgaagcaatacaaccattttctacctagtccccaaactcggtggtgtactaggcaactaaaactattgccatttgaagaatggatcagaccttggctagtagccggggattatgtgacatcatatgttgcgatacgagcggatgaagattatcgagagggctatacctcaaaatcttctaatctacatataaagctacctttccgtgaagtgggtatagataaaccaggggttattgatatcctggaatcatcaggtcttgggtatcctaaatattatgaatggcgttcacgtagcggctgtactttttgtttttttcagcaaaaaattgaatgggtgagattgaaggaaaggcaccctgaagcatttgaagctgctaaggctcttgaaaaagactctcttgatcatggttcgccttttacatggtctaagggagagtctttagtacagctagaacaacctgaacgaatagagcagattaaaaaggattatcaaattagaaaagataggatgagaagaagtatccctattaatgtattgaggccgacaaaagacaatcctgaagatattgatgacgtgtatgggattgatgaaggaaacggttcatgtaacatttgtcataaataa

SEQ ID NO: 84117 - DNA, 735 bp, Citrobacter koseri
atggtttatgacttacctgattggactagaaaaacgcagaaaattagctctgttgcaaaatctgttcgcgatatgcttttgaaagctaatgatccacacaaggtactttttgttgatttggtaaccttactcaaggtttcggatggaataagttatatagaagttttaaggccaataattaaagaattattctatgcctacgaaaaagaattatcaaaagtaaaagagaaacttttcctggcattagatgttaactctaatgatatccagtctctgaaggttagggctagtgctgtatctggtattttgggggatataagactagatgcctttgctggacgtttagccaattttgagaatgatatagcatctatcgaaggtttggtgagttttgctgttgagactccaccaaaaggatgggttgaccgtcatattgatgctgcgatattagagctaagtaaattagcccgacgttttcgagaggcagaagcatttgcatctgtccaagggagagaatcacatagtgaagcaattgcattggttctgggaaccggctctgaaactgtaactgtttctcgttccttcgcaatttcggaacaccatcaggacactatacaagcaaaatttaaagagattgtttcaatattgcaaaaccagaatctaaacactgaagtagccctggctattattgccaaggtaggtatggagcttgttgtcagtgaaaagggggagtag

SEQ ID NO: 84118 - DNA, 2604 bp, Citrobacter koseri
  misc_feature (2564)..(2573): n is a, c, g, or t
atgatgaataatatatcacaaaaactactatctgatgtggtagacatatccccgcaatatcaaagatcgattcggatcgattcggatatggggctatctgacgccttaaatggctatttttgccataataccgcatcatctgttatagaaaatatatgtaatcagatattgagtacaaatcagcgtagttttaccttaacggggccatttggcggtgggaaatcttctcttgccgttgtcctgggaagtgctgtacattcaaatgaaatagtaagaaataaggcccgcagcgtattaaataccgagtcaattaatggttttgaacaggcatttccagtaaaaaatggttggaatattcttcctctagttgggaggcgtgggagtgttgttttagatctttatgcagcactaaataaatctttaggaaggaaagatagtaaaaaaaattctccttctgaactaatagatgaattacttcatcttgcgtcacaacaggtcgatgatggcgttatcatcttaattgatgaaatgggtaagtatctcgaagcggcagcgctaaatatcggtgatgatgtattctttttccaggagttggcagaagcagctgctcgttccgagggacggttagtcattattggaatactgcatcagtcattttctcagtatgctatgagattgggcgtaaatacaagagatgattggtctaaggtacaaggtcgatatattgacctgccatttattgcagctagtgatgaaattgttgagttacttagtaaggcaatacaagctgaggtgtatccagcatggatatctgatgcagcaaatatcataacagatgttgttaggcataaaagaaaaaatattagagagcaattctctgcttcattagaaaaatgttggccactgcatccgattatggcaacgttgcttggaccaatttcgaaaaggcagtttgggcagaatgaacgaagcatctttggttttatctcttcagtagagccatctggtttttcgcattatctgaaaactactaattttgaaaattattcaaactatgggccgagtaattattgggactacttgcgagcaaatcttgaacctagcattttagcatcctcggatggacaccgctgggcacaagccgttgatgcagttgaaagagcagaatccaaaacttccaatgtgtttttggtaaatctgattaaatcgattgccattatcgacctgtttagaaatggttccggtttagtagcaaatgctaaatctcttggtacattatttccagaaaaaaagaacgatgaattaactagagcattaaatgagttggcttcgtataaggttattttattcaaaagttatttggatacatggtctgtatttgaaggtagtgactttgatattgatagtgctatttctcaagaaatggcaaagtttcctggtattaactatcaaaaattatcaaagctcatggggttacaccctgtggttgctaagagacactatcataaaacaggtactatgagatggatggatgttattctttgcgattttgaacaagttgaaaaatacgctaataactatactccgttaagaggtgaattcggttgttttatccttgcgataccgaatcgtggtgttggagaaaataaggcaagagaaaaagcaaaagagttttctcgcttctctcctttccctgtcattattggaataccagaaaactctaacagcattaactcgttagctgaaaaacttgtagttcttgaaaatattaagaattatacttcattagaaggtgaccgtattgctcgtcgagaagttcatgctttattgtctgcaacaagtgcagatcttgaacatcaacttcagtctgctttgttgcaaacctattggtatgatggattaaatgataaaccacttgaagttaaaaaaattgctatactagcgtctgattttgcagataggctgtattactcttcacctcgtatttatagtgaactagtgaatagagataatctgtctagcagcagtgttaaggctcgacgtttattactgcatgcaatgattcagcatgagaaagaagattacgttggattctctggataccctgcggagagagggctttatgatactctcataggccaaactggcttacaccgtaaaaataaagatggagtgttatcgtttctttctccggagaaaggctcggctagtaatttgaatggtttgtgggatgcaacacaagcattattcaccgatgttgatagcaaaatttcgatagataaaatctatgggttttggtcattaccacctttcggtattaagcaaggattattaccagtcattttaattgcatttgtattagctcataaatctacggttgcaatatataaagatggcatgtttatgccatatcttgaagatgtagatattgacgagtgtttacaagcaccagctcggttctcattgcgatgggttgctctcgataagaacaagaacgagattttagaaggtatatcaaacctattgagcgaggtgtgtaacaataggactagcatcgaccctcnnnnnnnnnncagcaagaggtctggtcggcatggtttatga

SEQ ID NO: 84119 - DNA, 939 bp, Citrobacter koseri
atgcaaagtacttcagagagtaatcgtagagttccagctcatttctccggacatgagaccttccccctgcgtcaaatgtggctaaaaaaggttgtagatcaatcaactaaagatggtttgttacctaaatcggtctttactaacaaagatgctatcgcaacttttggcgtaggtaaaaacatggtgagctcaatccgccactgggctctggcttgtgggatcattgaagatgcaacaacaaaagaatttattttaacaaatcttgcttcatcgatcctgagcgataaaggatttgacccttatgctgaacatccatcaacagcatggttaatccattggcatcttgccggtaaatgtttacgttcaactacttggtattggctcttcaatcatgtgacgatgccagcttttacacgtaaggatttagagggtgttctagctaactatgctcaagagattgttcctgagcaccgtctttctcctgcaacattagagcgggatttggaggtatgtctccgtagctatgccccacgctcttcgggtggttcccctgaagattatgccgagcccttactcggtgaaataggtcttttacaggaaatacataaagggcagtatgcttttcgtcgtgggccaaaagcatcgttacacaaagggatatttgcttttgcattgatggatttttggcaacagacggctgatggtttgagtgccttagcttttgaaaatattatttataccgaaggttctcctggaagagtatttaaactcgatgaagaatcggttgctcaatatttgatagaattatctgagtttacagagggcgtgctggcctggactgactcggcagggttaaggcaaatacacaaaaaagtattgacagaaacagaacaagagaatttcaaagaaaaaatgattaggtgggcatatgatgaataa

SEQ ID NO: 84120 - DNA, 228 bp, Citrobacter koseri
atgatgaaatcaggaaatttgataaggtatttgtggttttttatctgcgttgtcacatgcctggtgatggcgtatttatgcagcatggttaatccatatgatgacagaactttgtcctccgcctttaccagctttctgaggccaatcggggccgggtttggtacggcgattgtccttatcctggtcactcgcattgcgcaggagctgcggtgtttctgcaataaataa

SEQ ID NO: 84121 - DNA, 639 bp, Citrobacter koseri
atgttatacatggctttatgcagttttatgatgatcctggcgctaagtgagatgttccgcacgatgacggcgatcggcaatggcagtttcgccggcaaccgcttcataccgctcgccttagttctgttgacactggcgctggcatcgcctttctttgccacattttatacactgagccggcctgtttcgatggatgcactctccagcctgtccgttggtgcgcagtgggcaggtatcgccgccgccattctgctgtgcattctgtatggctatcgtgcctggaaaaacggccgtttctggtataccggtgcggccattgcctcagtggtgattgccgttatttttgccaacagcctgcttttcgtgtccaggcccgatgccggcatcgtggccacttttgtgctgaacaacgatgacagtaatgacgtgcagtgcgaccgttcggtactgctggtccattacaacaagggaacccctacggagtggcgctgcccgaccggtatcatgttcatgtctgatgcgtcaaaaccctttcttccctggccggattatcacggcgggcggagtcagcatctgacgacagcactggatcagatcacagacagcgccatgcgccttgacctaagccagaaaccataa

SEQ ID NO: 84122 - DNA, 408 bp, Citrobacter koseri; identical to SEQ ID NO: 21603

SEQ ID NO: 84123 - DNA, 549 bp, Citrobacter koseri; identical to SEQ ID NO: 21604

SEQ ID NO: 84124 - DNA, 249 bp, Citrobacter koseri
atgagtggattgaaaggccgccgaatcagcgcggatatgtttgctatgatgttaaaagtacctgtcggggagctggtttttgctgcccgacacaaccagccgctacacggacaggcgctacctccctacgggatcggcggcgggaaaagctggagctcgaccgcttccacccgcagtatgacgtttgatatgcaggaagcggtcgatttcagcgagaaatttcataaaattcagtcgcctgacggctga

SEQ ID NO: 84125 - DNA, 318 bp, Citrobacter koseri; identical to SEQ ID NO: 25804

SEQ ID NO: 84126 - DNA, 426 bp, Citrobacter koseri
atgcttctggccatcgaactctatggggtctttgataatggcaccgcgctcttcaagccacgccgtaaattcatcttcaatggcctgaatatccaggggcggttcttcgatcactttattggggtcaaaaatccactctttcagccggctcaggttggcccccggctgtgcataccacaccttttcttccttcacgtagtccagagcattactgccatcagccagtttgccggccgcacgtattgcacgttggcgatcgtcaaagggaatactcagacgggttctttcagttgcaatttcaggtttcgccatactgtctacccctgtagttatgtgttatcgctgagagcgccggtaccaccacggccgcccggtaagttttttcccgcggataacccggagaatgacctggtacagcaccggtaa

SEQ ID NO: 84127 - DNA, 600 bp, Citrobacter koseri
atgagtgctgtttggaaaggtgtctttcaggcggccagcaacttccaccatgttgccggcattaaccgtcatgatcacaggctgattgatggcttcgctgatactggctgctgtcgcatatccctcggcataaagcaggttgtcaccatccttcagttgaccacccacaacgaaaaaactcccccatgcctggccgtctttttcaaggtgtttactaccgtcggaccagatgcgctcaagggtcctgaactcgccatcagcattaaacagagggatcacaacgttgccccgctcatcagctttaaggccgttagcggcaatgacctgtttgtttttcaggtatgccagatctcccgtggcatccggaagccggttatattcttccatcaaccggttagcggtctgatcaaacttatccgcttgcgctgcagctctttgttcacgccttgccgcagcatcagcacggagcatggccatttgttcagggttaggggctgcgccggtagatacccatttctgaatttcaccaccgttcttatagtccctgtaccaccctgcaggtcggccatccagaaaggcggcatacaccccctttcttga

SEQ ID NO: 84128 - DNA, 597 bp, Citrobacter koseri
atgtctgcaatttcatttgaatatggctatgcatatcattttgattatcctatggagtttataacgttagattctaaatttttatttgtgggtatgtcatatttatttttcaatataatttgtgttatgttgatgttttttactccatggcctgaaagtaaagtaaaagcagttcaggttactgcagttacagtttttattatggttgtttttattgttcagtcttatagacatgattcagaatatggtggctttttcgttttaagtttatcaatagcaacagttacttatattatatacagaattgttaaaaatcataaacgtaattcaagttatttaatttggtcggcgacccttccccttattgccataatgacatttagcttcttaattggtttacaacaagcatcattaaaaaaagaattcagttactttcatgatcaagttaaagactatgtgattattaggttgtatgacggtaaccttgtcgctaaagaagtgaatataaaagagcgtaagctagggagtgagatattatacatacctagctataacccagcccctataacgttgaataaaattaaaatagaaaaatag

SEQ ID NO: 84129 - DNA, 702 bp, Citrobacter koseri
atgtttacccttggcgcacacctttcatccaaacgtaccggatatactcatcatggtatttacattgggagtggtaaagttatccattattcaggtctggcaagtgggttaagcaaaggtaaaatctgtgagacttcgtttgaagacttcaatcagaaccagagcgaagttgccattatcgaacatctggatgctaaatgtgtttactccaatgtagatattgtgaaaagggctaaatccagactgggtgaggatggatataatatattcaacaacaactgtgagcattttgcgacatggtgtgtgactggcgttagtgaaagcgctcaggtcaaaacagtgaagactatggcagtatctgtagggcaggcgggggtcaatgcttacagctattataaaataactcaaacagcccccacggtattaagaactgcggcgtccatggcaagccgtcaggttgctacgcgagctatagcatcaggggcactgacatccggtacttcagcattgaccggtatatcgtctgttgctagtggtgcagggttaactacagcagctttctctggtggagcgagtactattgttggcttaactggagcttcagcagctacagtagctgcggcccccgttgtgcttgccgcgggaggcgtagctttagttgggtatggtgtatataaagtatggtcatggcttagcgactaa

SEQ ID NO: 84130 - DNA, 186 bp, Citrobacter koseri
atgctacgcccgcaaaagctcgctaaagggcctttaaaggcctttaagggtaagggagagaagtgcgggatttggggtggaggaacgtttggtcatctgcattggcaacgtccttacgacggagcctattcaaagaccgctgtactgacgccccaagatgactttaccgccggctccgattgctga

SEQ ID NO: 84131 - DNA, 1152 bp, Citrobacter koseri
atgtccctccctgcaaattttaatgatattcttcgtatttttgaaaaaaattacgataccgccaaagaagataatgccctaagtgcacgcggccaatttctgcaactttacccccttaatcgcctaaaaaaaatgactattgatgactatgtcatcggcaaaggtacagcttcattttgtgcttgtgttgaagtaaaaaccagaacatgggcaaatatgcaaggtgcgacggcgctcaaatttggtatttattatggaaaatcaaaatcagatccaaccgtccgctatcgttttactcagaaatttggcgatgatgatagtactaataaagaagttttcgctaatgttaaagacgctttactagacctaatacagtcagggaaagaattagattttagagcgattgacgagaaccccctatcccaaatgtttaaggctaaaatattgagcctttactttccagaacactttataaacatttgcagcaaagatcatcttaaagatattgctatggatatgggtataaaagagcaacagtttattagtaaatatcaacatttgttattcaagaaaaaactagagcataaaatcacccgaaactggagcaatccaaaatatatgtccttcctttatgcccagttcatacgtaaggatcttagcagcgctcctgctgtgatagttaaaaaaccaaaaaaaagaaatcatcccgaagtcaactttgaagaaataacggacaatcgtgatttaataggcaaaaaaagcgaagaatatgcattaaactgggaaaaaaaccgcctaatcggtctcggctattcaaaactggctgaggaaatagatgatcgccgtaatcgtccaacttatggttatgactttctttcttttaatgccccaggtgatgagcgatacatcgaagttaaatcaattggccgggatggaaaagagggagcattccgttttttcctctcaggaaatgaactcaccgtttctaatttaagtaaccacagtaaaaactattatttttatcttgtacagtatgggaaagatggagagccatgcaatctatatgtaaaacatgctcaagatctttatgctaagagtgaaatgttcccttgtgcttacgttgttaggttcgatctggaagaacctgcttaa

SEQ ID NO: 84132 - DNA, 225 bp, Citrobacter koseri
atgacaggcgtaagcgtctggggctccggtaatggcgataaacagctatggctcatactgctttctttgttatccccgcttgtggcgtgtttttgtgaactgagcggttttcaggacgagcggatgcgtggcaattcagccctgagtatgcgatgctcagcagttgggtttgcagagggtgatagtctgcaatttgtacagataagttatcacatgattttgtga

SEQ ID NO: 84133 - DNA, 417 bp, Citrobacter koseri
atgtctaaaaaagataatcaattttttgatcaagataacaattttcagtttggcactcgccttgccgaagcgatgtcgttatctgaagacacagtcagttctctggtagataaaaccggtattcccaattcaaccattcgaagctatctgaagggagaatccgttcccggaatcatgcaacttcggaagatagctgctggtatgggcatcaaagcgggatggtttttaggtgatgatgaagagtttgcctgtccaaaggacgggatgtcagaaattgaaaaggatcttgagctactcaataacctattcaaatacatggcccctgtacagcgagggcgggtactgaaacgcgttctggcaagtgtggcgcgtcagatcgaccataatgttgacggtgacaataatactgagcaatag

SEQ ID NO: 84134 - DNA, 576 bp, Citrobacter koseri
atggatgaggaaaaaactcgtgccgaagtagcacatattgaatttatttcatacggcacatcgcgaatttttgatagacgcatgagatccttagattggaagcgtaaggtagtgacattccttggagcctttgttccgttgatgataggtggtgctgttttatcatttgggctagatgctccatttttgccgatttgtattgcagtagcgggtggggcgagtattgtgcaattagcattctcattgtggtctctggtttctggatgggaccggtcatacagtgattgcatggcttctgttaaggaaaacacagctatttataatcttgctcgtagtattggcaagaaaatagggaagcttaatgaaggaaaactagatattttaatagatgatttaacggaaaaatatgaaaggcgggagcaggaagatctagctttatgtgtaaatgacaaagaacttcgttatgcaaatcgcgtgtcttgtttctatttcaaaaagaaatgttatgtatgcaatacaattcctttaacactaaaaccaagaaaatgtacttgtgatggttgcgggaaattttaa

SEQ ID NO: 84135 - DNA, 213 bp, Citrobacter koseri
atgagtagtgcaaaaattctcaacgctttctttaacgcatctgaagatgagcgtaaagagtttctaagagtccttagccatttttataaggataaccatagagtacctctgcgggacggaatggaaagttttgctgtgaatgaaagtatccgtaagtcgcagtcaatcaactttgcacccatgcaaggaggttgcccggtctgcggtaaataa

SEQ ID NO: 84136 - DNA, 1731 bp, Citrobacter koseri
atggcagaacaaaaatttataagtgagttatttttagagaataatcaatttatcctcgtggggcttacaggaaggactggttcaggttgtactactacagcaaatattctggagagtaaaaaagtaacttttccagaattaaatagcctgaacaacttttatgatggactagatataagacgctattccatagtgagaaaattcgcggaggaacattgggagaatttttattcaataaaggtaagtgatctgatctcaatttatttgctacttcttccaacttctaagttggataacttcatacatttctgtggaataaatgttacaaaaaaagccagtgcttatttagtaaaaaatggcgtcctatcgaagagcttattaaaaactaaatatatcaatgtaatcaaacaactattggatcacaactctgaaattgattttacatctcaaaagattcaacgttcattcatcagaatacttcaattggtaagaaaattcaccagagatcttaaacaagaattaaatgatttagagtctggtttatatgtctcagtctatcaatcagcaggcaaatcgattagaagaattggcaaagttgatgcggattacgaaagtaaagattttataccaagctctgtatttcatctacctgaaaccataaacagagttattaaattcatacgcaaggtcaaaaatgggcgcgcttatatagtaattgatgctataaggaatccctatgaagccaaattctttaaagaccgctatgcagcatttcatctggtttctatcaatgcaccagatgaacacaggactagatacttgcagaaattacataaattctctgccgaacaaatcaaaaagatagatgatgaagagtcaggaaaaggagagagcgaatataaacacttaacaaatccaaacgttaaaaaatgtattgaaatctctgatattcatttattcaatcctaaaaatgaatatgataacaacaatgttttaaaagcacaaattgcgtggtacatagcattaatgcaacatcctggtttaattactccgacatcaatggaaagggtaatgcaggttgcatatactgttaagttaaactctggatgtatctcaagacaggtaggagccgtcgtcacagatgatgataattcaataaaatctgttggctggaatgatgtagctaaagggcagatcccttgtgctatgagatcaattgatggattaattaatgattttcactctgaaacatatagccattacgaacgaaataatgaaaaattcagggcaaaagctggagagttttacgaaatatttaaacccgtaatacaagaattaaactcatttaaaggaagaaatatttcttattgttttaaagatattcacaatagtattgacaataagagtaatcaagtacatacacgcgctttgcatgcagaagagaatgcttttttacaattagctaaatatggcggcactggtattgttggcggaaaattatatactacagcaagcccgtgcgaactatgtgcaaaaaaagcatatcagctaggaatttcagaagttatatttatagatccttacccaggaatcactcaggatcacattattaatattggtactatgcctcccaagttagttcaattcagaggagctataggaaaagcatatcatcgactttatgaacaggttataccgataaaagatgagttagattatatgttgaaataa

SEQ ID NO: 84137 - DNA, 1248 bp, Citrobacter koseri
atgcctaaggtattgaaatccctaaccaataccgagatcgctgccgccaagccgcagaagaccgagtatatgctgcgcgatggcgacggactggcgttgttgattaagccatccggcagaaagatctggtacttcgaatacactcccccgacgctgaaaaaacggaccaaaatcagcattggcccctatccgatagtcaccctcgccatggcgcgagatttcaggttgcaataccggcgtttacttgtgcagggcatcgacccgcaggcccatctggagcaggttgcagaggagcaacgactccagaatgaatgcacgctggaaaaagttgcggaacagtggctcaaagagaaaaaacggaccagcgatcttagcgaagatcacgccaaagatgtctggcgctcgctggagatgcacgtcttcccttctctgggtaacacgcccgttaccgagatccgcccgaagatgctcaaggaacacctcacaccgctggaagaacagggcatcctcgaaacgctgcggcgggttatctcacggctcaatgaaatcttccgcttcgccatctccgaagagctcatcgagttcaatccggctgacaacctggtcgcccgcttcaagaaaccgcaaaagcagaacatgcccgcccttcaccccagtgaactgggcaggctgatgctggccttacagaacgcttctatccgcaaggaaacccgctgccttatcgaatgggagctattgacctgggttcgccccggcgaagccgttagcgcccgctggtgcgacatcgacatgaaaaaagcggaatggcggatccctgacacctttatgaagatgaaccgttcgcacacggtgccgctcagcaaacaggcgctgcgtgttcttcagattatggagcccgtcagccgccatcgcccgtgggttttccccagcatccgcaaaccactggagcatatgcaccagcagaccgccaacgccgcacttatccgtatggggtttggtggtgagctggtcgcccacggcatgcgcagcatcgccagaacggcgggcgcaggtcatttcccccgtgaagtcctggagtctgcgctggcacaccagaaagaagacgagatcgaagcggcctacaaccgcagtgactatctggaacaaaggcggccgctcatgcaatggtggggaaactacgttgatgccgccagacggcaggcattgctcggtgaagaagaaccgctacggatcgtcgaaggagaataa

SEQ ID NO: 84138 - DNA, 960 bp, Citrobacter koseri
atgcagactgtcataactttcgaagaccttctgactgattactttttaaataagttcctgcgtcctgctacggagtggagttaccgaaaagtggttaatacgtttagcgagtttgcaggcgaggataaattaccgggaagtgttacacggactgatgtacttaaatggaggcgttatgttcttaatgagcaggggtcaagtaaacggacatggaacaataaggttgcacatatgcgtgcgctttttaatcatgcaataaaatatcaatttattactgataaagaaaatccctttcagcttgtagttgtgaaacctgatatcaagaggaaaaagacacttaacggtgatcagattaagaaaatatatctggtaatggaaaggaggataagagaagaagaagcaggtgttgaggatcacagacccaatgcgcttgaacctgcatggttctggatgacggttgtcgatactctcaggtatacaggaatgcggcaaaatcagctgctgcatatacgtctgagagatgtggatttaaaggatggagtgattaatctcaggccggaaggttctaaaaatcatcgtgaacatcgtgttccgattacagatcgccttcgggaaagactgatgtacctgtaccagacgtctgttaaaaagggtgccaaagaggacgaccagctctttaatatcagtcgtttttcactcaagaaaaaggtgcagggaaaaaatatggatcatccgccgatgcgtgcttttttccgtcgcctgtcaaaagaatgtgattgcgttatcagccctcatcgcttccgtcataccattgccacggatctgatgaaactgcccgaaaggagccttaatgatgtgcagatgcttcttggtcactcaagccttgcagtgacacttgagtatgttgaaacgaacatcgaaaacctgcgcagaaatctggagtcagcctttgctttctag

SEQ ID NO: 84139 - DNA, 1560 bp, Citrobacter koseri
atgcgggggctaaagtggttaacaggtctgggccagtcaggcagggcagagcatacagcaaggccttccgtacagctatcacaggcggggaactacaggtgcgtgcggcccggtcaggcgctgctggaaacagtggaacgacagaaactcatcaggatgttgagagaaaattgcccgctgtcacaggcagcttgtgatgagttctggttaaaaccgcttcagcagctggcggggcgtgttcaggaggtaccggcagcatgggccgggccgttctcttctcccgggggctttattgacctcagcctgtctgtggccgcaggttcagtaaggctggttcgtggcatgatgttacctccgggagcaacacctgaagagcagtcagaacaggggccggcctgggtatgtgccgtattctgggcgggactttttcatcacctggactggctttcgcaggtggaagggagtctggcgggcggtaaaccctggtatccgggcatggaaatgccaggggctaactggcgggttcgtccacggcagggggggacgggggcgatgaatggtatgtacattgccagcagattaatcccggacgctgctgcggtctggttgcagcgctggccagggatttctggtgcgctttatttgtacctcagtggtcagaaagcgcaatctggcatcctgaacagcatcatcagtgatgcgcttgccagtgttgcttttactccaggaacagaatctgtccagatactgtcagcggtaagtccggaggctccaggcgaatgtatccagcaaagtgacaaaaccgggggaaacagcctcccagatttaatagacgacgatatgaaacaatcgtctagtcataaagatataacaccagttgcagggccaatcagtattacatcagcgggttacgatataaaccagactcggacaagtaatgatgctgccgggggcgttacagagcaggttacattgttgtcggcatttgataatcgtgacattcagtctcctgacgttacatctgaagaatctgacacgaatgagtcagtatcaactgcagaacttctgagcgtacttgaccagatgtccggctctcaggcttccggtaccgcggtgcccgctgaaacaggctcagctattaaagatgatacaacggcgacggcggaaagcagtaatccagggaaagcttttctggcatggcttaaatcttcgatttctgacggttcggtcagcgtcaatgagagcgacagctttgctcatattctggctcagtttgtattcatcgtatcgccggagtgtttttataaatatttatcgctgaatactaatgagttggtcgataaatcggaactgcaaaaaagctttgaagctcttgatgttcattattcacgaaatggtaaaggcctgtggcattaccataaatatgatacgccggataaaagtggtcgttatgataaaatgtcaggttatatgattaatgctgacattatattcaatagaggaaactgtcctgctgacagtatttggttatcaccgagaaatcaaaataaacaagtttga

SEQ ID NO: 84140 - DNA, 546 bp, Citrobacter koseri
atgaaaaatctaatctttcaatctgtaatgtctttcgtgcttttgacccttgtggggtgtagtcagaaccagctcaaggcgtttcagcaacaactctcagacgtcagcacgatgatgtcatccggagagcaacagacttctgaaaaacaggctgaacgtcatgaggttgttcgttctttcagcctgccagtcggcgttgatacagcagccatgcgcctgaagcagtattatggttttccctccgatgaagacgttgctgctgccagaaacaatggtcagggaaatgcaggctggtccgcatcagcgatttcagaaggtgcgagctggtcagcacagccaggttcttattaccgcatgagccggaactgggctggtagtgaccgtctgacgttagaagtcagaggcgatgctaaacaaagtaacgtaacagcaacctacctctcctccactccggaacatctcaaacccgaatggaccgcacgcctgtggaaagaaattccggaagtcgcacgcggtgcgacagctatccatgggagcacacaatga

SEQ ID NO: 84141 - DNA, 549 bp, Citrobacter koseri
atgagcaagttgacagacaatcgcatcacagagattttggctcgtgcggaggtgtgcgatgactcggtactgacagattacgcagatattgcggctgccatgcgagagcttcagcagcgccgtgcagccgataagaactttttcatgtatgggatcgcagaacctgatggcagcgcttacatggatgaggtgtgcgtatcacacgacaggggattgcttgagagtatcgccggcgaacttaatctgagcgaaggctctgatggttatcgtgttgttgcactctatacggtattacctctgaccagtcatgagcgcaatgaatttcaggccttccggaaagaactggacgcagcgaaaatgcaggttgctgaactcaaggcgcgaaccatttcgttaatcatgccaccacgtaaaagcgaaaacgactacgttggcgggactttcgataacttcgatttggcgggtatttacaatgcatgccgattagagtgcgaagtaaaattcaaaaacgcatgcgcaactgcaggcatccggatcaaaggagactga

SEQ ID NO: 84142 - DNA, 615 bp, Citrobacter koseri
atgtccagtgtaacgatgaaaggacgtatcaacgctattgataagcaaattagcgatgccggtgaagttatttcaaagcgcgagcgttcagtcagacgggcagaacgaaatctggaaatagccgaagaccaccttgctgagctggaaaaccaaagagatgaactcatcatcgcgagctggggagatgcgccaaactggcagggaatatttggaatgagtgaggacgcctcctctgccatgcgtgcataccgggaaaaatggatcagtacgatacccggcatgcgtctgacgtcctacggcaatatatataccgggcagtcagtttacgggatcggttttacgacaaagtctgagacagaactggaacaaacaatcaggatggtagagttcattctgccatacctccttgcggatgagcgaaaagaaaaagcattaatgatttataactatcccgcaatggattgttgccagagcttcgttttcaacatcgaaaccggaaaatatggtattgccacagaccgatttatgtcacgtcaggaaacaatggaattcccctctctggaaggtgcactccgtcatctgcaggaaaattctctgttcgaagaggagccataa

SEQ ID NO: 84143 - DNA, 684 bp, Citrobacter koseri
atgaaaggtgtaattgatcacgaaaaggcttttatttccctctttaaccagacagcccggtaccatcaccggcatcaggttttcgaagactttgtcagctgcagcgtcattgctcttcagaatgccctcagcttttgcgaaaagcgggaacagaaatatctgcgtatcgttgcacgttatgaaaagccggatgtcgtcagcatggcaaagctgctggcccatgtggtaaacggactggaggacaagccgggggattttctgggccggatctttatgcaactggaaatgggcgataagtaccgcgctcagtttttcacaccctggagcgttggtgtgatgatggccagaatgcagcttggcaaagtcgaagaaaatttcagaaacaagccgtttatcacactctccgaacctgcctgtggcgccggctgtatgacactggcatttgcctctgttttgcgtgaagcaggctactctcctcatcgatatttatgggtgtctgcaactgacatcgatccgctggcggcaggaatggcatacattcagctgtcactgtgcggcgtggcgggagaggtggtcataggtaattcgctgaatgatgagcgccggcgggtgttatatacgtttggacattatcagggaaactggtccagccgtttacgatccgtcctgagtcaggccgcctga

SEQ ID NO: 84144 - DNA, 993 bp, Citrobacter koseri
atgaacaaatccattcgcggccgacaggccgcgccgtctcagaaagccgatctttaccagcaggtcaccgataaaataattgccgccatggtaaaaggtgttccaccgtggcgccggccgtggcgttctgcacagaatgtgcatggcaacgctttaccggtgaatgcaacaaccggcaaacattacagtggagtaaatattccgctgttgtggatgtcagctgaagagcggggattttcttccgaccgatggctgacatatcagcaggcgaaggcagtgggcggtcaggttcgtaagggcgaaatgtgctcgatggccatcatctacaagtcttttgagaaacagacgacagatgatgatggcaccagactgttcgatgaggatggcaggcccatgatggagtcgcttgcaatgctgaaaccactacagctcttcaacgttgcccagtgcgacggactgccggacgctgtcgcaggtatgcagcagcaggtgacaacgacagaagatgaccgtggttcaatactcagcgagcatcagcaagcgcagatgctggcaatactgaatgcgacaggtgtagcgtgtacgtcttaccgccagaaccgtgcgtattaccagccatcgaccgatcggattgtgatgccaacaacgtcccagtttgtttctgaggccgattactggtccacattgctgcatgaactggtccatgccaccgggcacagcagccgcctgaaccgtgaagggataaccttgtcgtcacgtaaattcggtgatccggtttacgccttcgaggagcttatcgcggaaaccggcagcgcctttctctgcgcagaactgggtgtttatggtgatgtgcagcatgaaagctatctggcgagctggctgaaggtacttcgtgacgacaaaaaagcatttttccgtgcctgccggtttgcccgggaagcgtcggaatttctactgcagcccctgaaccgtcaaccggaacaggctgcttaa

SEQ ID NO: 84145 - DNA, 318 bp, Citrobacter koseri
atgaatacactggcatttgattctttattactcgttaaacataacagcaacgaatggcaccagatgtggagtaaactggcaaagcataagtccaaccgctcacttcaggacccgactgttgctgataatgatggtgaagtctgggagtacatggagacagtggaaaaacgcgttctatggtttggaaaacgctacatccatcgtttccgtcatcgttatcacccagcctgcggttgcgatatgagaattaacattccagccagccgtacctttaacccggacgatccggataatgctttatatcatcactttggttag

SEQ ID NO: 84146 - DNA, 156 bp, Citrobacter koseri
atgatacgtaaaaatatcatcctgtgctctggtcaatttaaacagagcagtagtggcattcctgttgaagacttcatctcccgggcttacaccgcaatatgggaagatctttgcgttgacactcttgccgaagatgcgggaattgtgtacgcttaa

SEQ ID NO: 84147 - DNA, 216 bp, Citrobacter koseri
atgagtaaaaatctttttgtttttgctgaccatttggttactggacgtgcattttttaaattgaaggacagaattgcacgtattatcgacagagggtactacgaagtgtcctgttcacaggaggctcatgcacattacggcgataaattcacccgtgctgatgcttgtttttatttcatccatggcgcactgtctgaaattatcagtaaaatctga

SEQ ID NO: 84148 - DNA, 351 bp, Citrobacter koseri
atgagacgtttttctggcaactttgtttctttagtaattgccctgactgtaagcttcggatgtgcagctaaagatgtggaaaacgataaagtggttttaacagacttacatttggaatcgcttccgagtggtatttatgcgattacaggtcttggtaggaataagtccgataaagtcatcacaacaaattttgttaaattcaatttattacagaatggtataattacagactcaaccattgacacagcaagtggtattaaacctaatcagcaatggaaaatattcgcgccggttaatatcattaatggcaaaccagatgaattcgaagtaatcgatatattatccagataa

SEQ ID NO: 84149 - DNA, 615 bp, Citrobacter koseri
atgagcaaagactacacagaggcatttttgaaagcttgcagctttacagaacatctggggtgtgtatgtccaaaaataaatgtagtaaatgaattctttctggattctgaagaaaaacagtccagcgttctgaatagtcttcaaaagaaatttaatgagcaacatggcgttccttcagtaactgatttttttgcacaatgtatcagtactggttatttaatgcggcctgtcttatctgaaattataggtagtccatgtgctctgacatttggttatgtaacagaaggggatgaggcttttttcagacaggaagatagttttttccacaacagtctcaggaatggtgttcctgatattgtgaatatccacgcatggctaacattaccttccatggaaatacttgatttgaccttgtgcacaaccaggttgatagccttattaaggcaaagaaacctcgaggttaatgcttttcatgaagcattaataagttcaccagattttggcgggattattgttggtgatggtaataatttaaaagacacagatgtgagattccaccctcaagttattggtgaagattttatgttgaaagctggctttctccgatttaactaa

SEQ ID NO: 84150 - DNA, 429 bp, Citrobacter koseri
atgcttcgctttgtccctgcagcatccagtcccgagtcgtttaccgctccccttttcactgagcgatgccctgccgggttcccgtccccggcgcaagattacatcgaagccgaacttgatctaaacgaatactgcattcagcgacgaggctccacttattttgtaagggccatcggtaattcaatgacagatattggtcttcattcaggcgatttaatgatagtagataaggcagaaccgccacggcatggcgatatcgtcatcgcggaaatcgatggcgaattcaccgtaaaacgactgctgctcacgccacgtccggggctacaaccaatgaatcctgcgtatcccacgctatggccagaaccagaacaattacaaatttttggcgttgtcacagcctttgttcataaaactcgcggagcaaagtaa

SEQ ID NO: 84151 - DNA, 1275 bp, Citrobacter koseri
atgtacgctttggcagatgtgaacagcttttatgcgagctgtgagaaagtctttcgcccggacctgcgcggcagaccggtggtggtgctcagtaataatgacggttgtgtaatcgcccgttcaaaggaggcccgtgccctgggtataaaaatgggcgtaccgtggtttcagctcaaagcaatatcttttccagaacccatagccacgttctcaagtaattacgagctctacgctagcatgagtaatcgtgttatgtctcatcttgaagaactggcgccacgcgtggagcaatacagcatcgatgagatgttcctagacattaatggcatcgatggctgtataaattttgaggattttggccgtcagttgcgcgggcacgtcctgaacggaaccggtctgacaatcggtgtaggaatgggcccaacaaaaaccctggcaaaatccgcacagtgggcatcaaaggaatggcctcagttcggaggggtgctggccctgacttccgtaaacccgaaacggacggaaaagctgctttcgatgcagcccgtcgaggaaatctggggtgttggcagacgcatcagcaaaaaactgaatacttatgggatcaccactgccctgcagctggcccgcatgcacccagcctttgtgcgtaagaatttcacggtagtgctggagcgcacggtgcgcgagctaaacggagaggcatgtatatcgcttgaagaggcacctccggcaaaacagcaaattgtctgcagccgttcgttcggagaaaggatcacaacttacgattcgctgcgccaggctgtttgccagtacgccgaacgggcagcggagaagctgcggggagaacgacaatattgccggcacatcgcggtattcatcaaaacatcaccatttgcagtcaaagagacttactatggtaacgtggcaagcgaaaagttgcttcttcccaccagagatacacgtgacatcattaacgccactataaaggctctggatcgtatctttcttgaggggcatcgttacgcaaaggcaggcgtgatgctgaatgactttaccccttctggcgtttctcagcttaacctgtttgacgaggaacagcctcacctgaacagcgataagctgatgaacgtgatggacgggataaatcattccggtctgggaaaagtatggtttgccggacgagggatagcgcctgaatggcagatgaagcgtgaaatgctctcaccgtcttatacaacaaaatggtcagatcttccccgcgcttccattcgctaa

SEQ ID NO: 84152 - DNA, 1122 bp, Citrobacter koseri
atgtcagtcagacagagaattaagaaaatggagctgggggcggctcttgataagtattacggttgtgcgtctgtacaaaagcgggggtatctccaggagttttatcgaatcaatgtcattaagcgctcaacgctttcccggcggcttatgcatgagatcacctccgttgatatcgccgactaccgcgatcaacgactctctgaggtgagtgataaaacggggagagtttgtagcccggcaactgtccggcttgaacttgcgttgttgtctgctctgtataatctcgcgcgtattgagtggggaacatgtacgcataaccccgttgaacatgtccgcaaacctccggcgtccagggggcgaacccgccggttaacctcacaggaggaaagaaagataggaagggctctgacaaaacggaatctggaattaactgctattttccagctggcactcgaaaccgccatgcgacagggagaaatcctgtcacttcgctgggagcatattgatttgcacattggcattgcccacttaccgctcactaaaaacgggagtgaacgggatgtgccattgtcatttaaagcaaggaaggtactcagagagtatgctggccctgtgtccgggccagttttcaattatacctccaacgggtttaagagcgcatggcgggaggttattcaggatttaggcattgttgatttacattttcatgatctaagacacgaagcgataagccgtctctttgaactcggaacactgaatgttatggagattgcggcaatatcagggcataaaagcctggcgatgctcaaacgctatactcatcttcgcgcgacgcagctggttggaaagcttgatgtacgtaagaggcaggcgcagaaactggcggcgctctttgttccgtatcccgcagaacttgagcgcagtgataatggtattgccttacgcttccccgatcttgaacatccgctacttcatgcgcaaacaaaggaagatgttatccgtaacgcctcttttgaacttctcaggattcaggctctggccgcccgttccggtgagcggctaccccctccgggcaatatcagggcaaatgacccaacccgggtgctcatccatcccctctga

SEQ ID NO: 84153 - DNA, 420 bp, Citrobacter koseri
atgaactattccacatcaaaaaaaccgttttatgcatcgttatcgtttctgatctttttcagattttttcttttctggccagtcattatttccatcgtaatattggggttatttcttctccttttggctcttcttcccgttttctttggaacaacagaaaccgcaaatttattccttaaatttattcacaacatacgcagtattacccccattggggttcactggtatttcctgttagtcagtattggttttgtggccgatttcacgggtgttatatgcaggtcgatgaagaatttgacgaagctggttttctgtaccgaatggtattcgtctttgccagtagcagagaagaatgaatattctgcgaaagggacaacacaaaaaaagtcagggaacattaatgaatgcactgacagataa

SEQ ID NO: 84154 - DNA, 408 bp, Citrobacter koseri
atgaaaattccattttgctgcctggcagcactgttcctttcggtcggcgcccgtgccggcaccgtgatatacaccgactcctctcatgccgtcaccgttaacccggggccgggggttaccgttgttgagctcgatgcacccgatcgcgcgcaggcgacaattttcggtgaactgtctgccgatcccacgcttgcagagcaacgagcccgggcaatgattgcttcccctgatttccgtcagcgtcagcagcaactggccgatgcttatgccggcgtcacccgagcctggtctgtcgggctggaaaaatacccggccgtggtctttgacgaccagtttgttgtctacggcacgacggatgtcaatgaggcaacccggcagctcaccgcctggaaggagaagaaccaatga

SEQ ID NO: 84155 - DNA, 972 bp, Citrobacter koseri
atgaaacccttagctctccgcccgcgccggcttgcgatagccacactgctcgtgtgttccggcaccatggccagcgtcaacacggcgagtctgttgtccagtgcggcaagtcctgactgtatcagctggcgtgtcagtggtatctgttactggctgctgtgtacgccttttggttgctcggtgaaaacgtcagttaaggtcactcattttattcctgaagcggtggtatctgcttatctgaacccaggaaacaatccctggaccgagatggcgtccatcagtgacatggctggcgaagcagaaagcgctttatctggtattgcagcgggcgttccgatgggaggtggtcgtcaggagatgaaagttcccggtgaacgtaagcagaacctgcattattactacggcgatgcttatggccatcctgcgacgaaaatgattggtggtatggttcctggttattcatgcgacagtgctgccacgccattcatgccttatttcaacagttccctcgatgcgctggtctggcgaacaggagtgccggagatgttgtatcccgaagcactcattcccggccagcgggaaatcggaaggaccacatccggtgacatgtggggcaatgtttacccacgcagcggatttgtcacccagacggacagttacaaatctgctgctgtagttgttcagcgtgttgctgacgtcatcacccgctctggccagctccacgtctataacccgcttatggggcagaagtctccgggttactggccacctgagccggtaaaagaaaataccggcacgaaaaaccacaaatggcagcggctttctccacagctctcacagagctgcgccgtctttcccgacgcagacggcaggatcgcccaggacggtaactatgcctgggcgttgtggcaaccctacagctgttgcaaacgtcgcggtcagacctttctctccagcactgatttctcataa

SEQ ID NO: 84156 - DNA, 339 bp, Citrobacter koseri
atgcgactctttaccttcagcgggcatatcggccgcattctccttctggtgttacttatcctgctgatgacggccggcatgtttgccatcgccgcggtttttatggcgtacgatcccgatggccacatcacgcgacgctggttgcatgacagccggtgggggctgtttgcctggcggctgaccctttatggtgccctcattacagcctggatattgaaggttcgcccacgggcagttatccgctggccagatgcacgtccacggttgatgcgtatggagctgctcggggtgtttttcctgctggccacagagtatgtggcgtggacaacggctgtgtaa

SEQ ID NO: 84157 - DNA, 216 bp, Citrobacter koseri
atgggaaacctgaagatgaaaattgcgaatgcattaggttcaaagcttaaagaagcattggccagtgatgcgaaactccttaaaaaatctgttcctttcttgattggcgctgctggtacctggtgcaccatattggaagaacgaaagaaaaaagaagctgaagaacgtttgtataatcaagatttgtaccgccaggatgatgactggagatattaa

SEQ ID NO: 84158 - DNA, 225 bp, Citrobacter koseri
atgtcagtatcaccccatctcagcaaaaaccgggcatcctataccatggaatttaaactcggcctcgttgaaaaatcgtatcgtcccggggcctgcgttgctcatctggcgcgggaacatgggatcaatgacaatctgctttttacctggcggcaacgctatcgccatcttctacccgatgatgttcagcgtaatagtaagcgcaccgtgagggacgtagggtaa

SEQ ID NO: 84159 - DNA, 741 bp, Citrobacter koseri
atgattaaacaaatatggtcaggttcaatcctgagcgcaattctgatgatgacgagcctgtcgggtgctcatgctgatgacgggaaaggcggtatatctcttggcgggacgcgtctggtttttgatggcagcaaagatactgcatccatgactgtaacgaattcatcgtccactgatgtctggcttatgcgtttctgggtctctccttatggagaacaaaatgcagaaaaaaaacaggatgtcccttttgctgttaccccgcctctttatcggctggatgcaaaaagcgcggttcagatccgagtaaaccgcctgtcggacagcctgccgacggatcgggaatcagtgttctacctgaacaatctggctatcccgccgaaaaagggcgagaagacctaccagaaagcggtacagagtggtctgcagtttgctgtgaatacgcgtatcaaactgctctaccgtccggctgcattgaatgatgcgcaggcattgaaaaatgcgccggaaaaattgtcggtagcctcctccgggaaagaactgctggtgaagaacccgacgccgtacttcatcaccctgacacaactgaccgtgaatggtaaagcggtatcaacgggcaaggacacgatgatatcgccgttcggttccctcagtgtgagcacgccggtggcgcacggagccttcagctataccacggtggatgaccacggcatgaccacccggaaactcgataaaacgttctga

SEQ ID NO: 84160 - DNA, 2838 bp, Citrobacter koseri
atgagggtgtggcaaccggaagcgaagaaaacgcatacgttgaggtgccgggtgttgtcgggatgggttctgggggtgattaccgccgtgagcagcatgcaggacggtgttgctgccgacaatggcggaatgccaggtgtaaaagcctccggtgccctgcagggaaagcaggaagaccagtcgctgagctttgacagtgactttctgggaatggggggcggaggtacgggcaaatatgttgacctctcttattttgctcataaggggggaatgctgccggggcggtacgccgtccaggtgaaagtgaacggcaacgtggtagatgacgggcggatggtggaatttcgctcccgtactgacgaacccggaaagttgtatgcctgcgtgaatgtgcaacagctctcggaatggtggggaattatcgcttcacgtcagggagaggctgtgcaggttccgaaaaaagatgtgccagtgccggatggtgacaacggctccagggacagaccggttcagccgatcaccccgcctgatgaaggttccggaggcgatgccacgcggagggcggtagcgttgtcggacgcaagtggaaaaaacgatgccggcatggacagtaacagcgatgatgccacttgcccggtcaatggtgtggaagcgatggtcccttacgcgaaggaagactttgattttaacaaacgaaccctgtcgctgacggttcctcaggcttcactggggccggcctcacggatgcgaacttccccacaactgtgggatgaggggatgactgccattctgatgaactacaactacagcggcagtcagcagaacagcaatggtcaaaagcgtggcagcgattttctgggaatgaacggtcagttgaacctgctgggctggcgtattcgcaacgacctgacctggcacaaaagtcaggggagcggtggcgaatggaatgcctcccaggtttacgctcagcatgatttccagaggcttggtggtggccagatgactgtggggcacaccacatccacgggcggtggtgtggactcagtgccgttcaccggtatccggctcgattctgatgaggggatgcttgaccccagatataccacttaccgtccggctatcacaggcattgccagttcaccggcgacggtgacggtaagacagtacggtaaggtgatttatcaacagaatgtaccacaaggtcccttttccctgacggattttaaccgcagtgggaacggtgatgtggatgtggaaattcgtgaggcggatggccactcgcgccacttcacgatggcccaggccagtaatggtacgctcatgcaacggggggcgacctcatggagtgcctcctcaggaagggccatcggcagcgccggctatgtcgacgataagtttgtgcagacggggatttcgtacggtgcatgggcaaacagtaccctgaatggtggtgtactgctgtcgcgaaactatcaggctctttcggtcggaacgggggtttacgccggtgcctggggggctctggcctataccctgaaaacgtcccgtgccgacctggcagcgatcccgggacgggggggagccgttaccggggtgtcacatgatgtcagctggtcgcgtaattttggtgatacatcggtgagcgcgacatggtcgcatgcacagacacgtgacttttacagctattcagacctgctggccatgaaaccgctggcgcccggggaaaaagaggatgccactgtcggtacccgggacagctacggtctgtcgctgtcgcagtcgctgggaatgtgggggagcatctccctgaacgggacacactcaacgtcctgggggagtagtgcagtacagaataacgtgtcactcagttacaacaccacagttcgtgacgtgggtatcggcgtctctctggggtacagcacgatgaatggcagcagcgaggccggtagtgacaataatggctcaccggtacggatgaacagcagtctgaataaccggacagacagaagcattgcggtgaatatctcgctaccgctggggaaatggctgaatgccaacagtgtgagtggtaactactcgtattcgcgctataacggtatggccagccagcaggcaggcgtgagcggctctgcacttaatggtgctatgtcatggtccacctcgcagtctctgaccggtacaaaaactggcaacgcaagtgcaggatacagcggtcgatttgggtcagtcagtaccggttacagctatggtggtgacagtaaaagcgtgtcgtacggcctgaatggtggcctggccatacatcgccacggggtgactctgggcaggcaggtagcgctcagcggcggcaatgctctggttgaaatacccgatgtgagtggtatcagtgtgaatggtgcggtaactgactggcggggctatgccctggtggggggactgacaccttatgaccgaaaccgtattaatgtggatatgagtaacctgccagggaatgttgagctggatgcttccagcaagaatgtggtgccgacccgaggggctatggtggagataccgttcagagggcacaggggctatcgcctgatggttaccctcaggcgtagcggtgatgaggttccgtttggctccaccgcatcgctgaagcaggacgacgaggaggctatgccggtgaccggtatcgtgggtgacagcgggcaggtctatatgtcaggcatgccggagaaggggcgtatcacggcgacctggggggaggataaggatgcgcagtgtacggcgacctacaccctcccggcgaagacggatatgtcgctgctgaacgagataacggcacgatgtgagtaa

SEQ ID NO: 84161 - DNA, 1077 bp, Citrobacter koseri
atgagacagaatgacggccagaggtcactggtgcacatggtattgatcgccatgacgataatgtcgggaatgatggcggcgggacatgctgaagcgctgaatgcgcaaaaaagtccgccggtaccggtcacctttggtatcagagccctgtcgccggagacgccggtcgacccgcagaccgcttttgtgtcgcagtcaataaggctgccggatgccgtctgcagtgcctgtacggaccaggaccgctggacccggacatggactctctcacaaatgacccttgaccgggataatacgcgacgtgaccagggctggtacctgtttcgcagtgggctgaaggggattggcgtcagtgtgaaggtggatccgaaagtggcgcgccccctgagcggggtgggcaggcaactgaaaagtgatgatgagccagaggtggggctggtgcgaaccgcgcaggataccggggctggtctggcggatttaccggcggcagaattcacccgaatcaccacatttaccggccaggacgggcaggtgaagtatgtgcaggaagatactatccgggtatcagctgacctgcgggtgccgacgtgcaccacttcggcgggaaacctgagcttcgtattaccggatataagccaggcgtggctgcgccgtaacgtgagtgaaggaggattcagtgatacgcaggcttctgacgtccggctcgtggtggcgaactgttcgtcgaacacccgaaatctgcgtgtacgttttattccggatggcaacgtcacggattctgcatatgggccggcaaccattctggtgggacgcgataccgacggacaggatagcggagtgggttatctgatgaaatacgacgctacgggattcgggcgcacgcagcaggggatagtacagtgggaccgcaaccggccactggtcgtgacgaacccgcaaccggaagagagcagcgatgcactgactcaggggattactgtttcgctgcaggcgttttatgcccgaccggagaatggtaaggcaatcgctgccggaaaaattacggcaaagggcctttaccaggtctcttatgactga

SEQ ID NO: 84162 - DNA, 750 bp, Citrobacter koseri
atgtacggtctgagacatatacgtaacacgaatataattaatgaaacgaacagcataaataacggtatcaagagcatgccgggaaaggacagtaacgttcccggtatgttgaaagaaatgctcaagggcaccctgccgtgtctgctgttattcgtggtggtggccgtggggggagagggggagagggctctggccggaagtgagacttttctgccgtcaagggaaatctctctcagcgggacggtgacggccccctcctgccaggtgaaactggaggaagagcaacttaacttttcacgacagaccggggggaatgacatgcaggttcagaccctgcatctgcgactgagtgagtgtgatgcgaacggtataggtatgaccttcaccgccacacactggccggatatgcctgagaggggggttctgcaggaggaaaacagcggcgcttatgccacgcggtggtactacacaatatcacctcaggactctccggaggacgagtggcccctgactctggcgccggactcgccggctccgcggcaggtgacaggcagcaataaaacagatgcacaggcgtacttcagcctggacagggtgaattactggtacgacatgaaggcgcccctgaaaacgggagatatgatggtgatcccgtttgcagtgacggtccggcatgacgacacgcaacgcgctgaactgacagaggatgaccttgaggcaaaattcacggtacagctttcctggcgataa

SEQ ID NO: 84163 - DNA, 813 bp, Citrobacter koseri
atgagttttgttatcaaaaagaaaatgaccaccaccgcactggccatctgtgcaatcctgggcatgggttataatgcaatggcttcggcagcaaccgcggattttacgacgaatattactgtcgtttcgccaaatacgtgtgaaattgagaccactgctcctgcaagcaattcgtgggcgttaacatggacgttagcggatgctgcagataacagtggcacactggattacggcgcatcttccaccacaccgctttttattaaagctgcactgaaagagggctctgccgcaaactgtaaccttaatggtgttgtcgccggggcgaacgctacgggtagtaacgttacggaagtgaatggtcaaaaaggctatttccgtgttgctactggcagcggtttctggcgttatgcaccgacgattgcacaggtgaagatgtatactgatgcggatgcagagacggaggcagccggcgatattaaagtggtggatgccgttggtaaagaagattcccagtctgccacgccactctacgcgcatcatgacgatatcaacgctctggcagggatgaattccaacccggcagtggggcttactgataactattttgtggcaacgggcgactcattactggccggtaatcaggacgtaaaaattacatccacagcgaccgacaccatcaaagcggttaagattggtgtgagttcgctaatcgccaaagacccggagaatgctgcaggcaatgtcgacgtcgcggctgttacggccgatgaaaatatctccatgccatttacggtggaagtgggttaccgttaa

SEQ ID NO: 84164 - DNA, 843 bp, Citrobacter koseri
atggggaggtccctttggtatttcttgcacccggtaacggatatgagattgaaaactatttttgcatcatatatcgcactgggaggcatcgccacatcgtgcgcgtatgcttcaccagtcgaattcagcgcagctatcaccgcgtcaggccccagtcagggaatcacaataatcccggagcagacgcaaatcgatgctacttacacagtcaccggagatgacgtttctggatattccgggtcgttcaccggatttgcacagcccgcgacatttctggtgaaatcgacgacgggaggggtattaccagctttgtccgttacaatacacaccgaagctcacgcaaacggcggacgccccaacgccgtcccggttgtcgagcggacgggcgtgaagtggggtttcacggcggcgtaccagcggatagaggcttacgacgacccagacggcactggggaggtcaaacacatacccggcaagttcgtgaacccagcatacgggacggaatacccagtgcgttataacccaccggatgggaatatgttcgggccgatgttcacagccaccgaacaggttagtttcacgccgttgactggagtcaaaccgttggtgtccatcctggggccagcgacactcaacaataacaacgggcccgcaatcgagctccggaatggggaaaaggagtggagtgtacgcacggtcgtgttccctgacaccctcgactcgcgttcgttgcgggtaggcgtaacagcctacgcttcggtaacgcccataacatctgtcggcgctttggtcaacgggtttgcattatcggttcctggtacgctgacggttactcctatgtaa

SEQ ID NO: 84165 - DNA, 1107 bp, Citrobacter koseri
atgaaacaacgaaaaacaaataaaaaccaacaacacaaaaataacaataacccattcacggcgcagaatatcgaaagcgcatatcagtggttgattcagcaacgaaaaagctatcccgacaacgcggatatatggcacctgcgctttcactggcaacgggagcgtaaatttattttatctgagttaaataaaggtgaataccatttctccccgttgcagataataaaaaaatccacaggcgaaaccatcgcattatggtcatcccgtgatgcactcgtattaaaaatgctgacccagatcctgacgccatccctgcctgtccatcctctgtgtgaacacattaaagggaacggcggtggtcgccagagcgcccagcggatacatcatcacctccgccggcgtgccacaccttttgtgttccgtaccgacataaagggttattacgcaaccattgataaacagcgcctgtacgaccagctcacccgtcacgtcagccatcccgtactgctgaacctgttgtggcagtttctgcactacagcgttgaggacggaggaaactttcacacgccccgccgcggcatcagtcgtggtgccgccctgagcccgctgctggcggcatttcacctgtacgaactggacagcctgttcgcgaaaaacacccgcgtgcgctacgcccgctacatggatgactttattctcctggctccgacccgctggacactgcgtcgtgcagtgcgggacctgaaacaatttttgaacacatttggttttacgctccacccggacaaaacccagctcgggaaaaccgaacggggttttgactggatggggctgtggtttaaagagcacgggatacattccattgctccccgcgccatagaaaaacaccgcctgcagtgtcaccggctttatgagcaaatccgtcatctgaacaaaaacgttcaggctgcacggatggcgttataccgcagacgatggttgacagctttaattccgtcttcggcaagaagttgttacataggagtaaccgtcagcgtaccaggaaccgataatgcaaacccgttgaccaaagcgccgacagatgttatgggcgttaccgaagcgtag

SEQ ID NO: 84166 - DNA, 1722 bp, Citrobacter koseri
atgactgaaacacgtcagcatcccgggcagacgggtattcttgccggtgcactgctctgttttgccctgttatatgtgccctggggatggctcctgcacacgggtatttctgtgcaggagcatgccggctgggcgctggccgcactattgtgtctgctggcggcctgtctgccggatatccgtctgcaccgggactggttcctgtggtgcgcggggggactgctcactcttccactgttatggatgcctgaacaggctgatgtatggggagccctgagccgtaccggtgcactgtggaccggcgggcttttattctgctggatggcagggcgaaccgtgacggaacgacagtcctggctggtttttcgcctgctggctctgactggtgttgtctgcgccctcagtgtgtttctgcgcgtatactggccggccggattttcagtctggcagccccttgtcggcggtggctgggtaccgggcggggcgctgcttcctgatctcatggccacttttctggctgtcgccgttgcggcggccctgcacttctggctgttccatgccaggctgctgaccctggtgttgctggcggtattgatgtatgccctcaccctgtgtcagagcgtgccgggtctggtcggggtgagcgtggtcttcgtggtgatgttgctggcctgtgcccggggactgcgtcgtcgtcttctcctggccggtctggtgctggctgttgccggggtgagtgcctggtatatacagacaggaggaaagaccagtacagtcttcctcagcctgccggcctcatggctgttactggcacccgtcacgcgggcctgtctggccctgttgatggctcatcccctgagcggtaccggatatggacgcttcgaagggatgttgcctgatggcctgaatctgtccggtgagatgatggcttttcatccacatcatgtagtctcacatccgggaaatgaggtgctgtactgggctgttgaggggggcattgttgccgtcgcaggtctgctgctgcttctgttctggggtggacggatgctggttcgtctgatccgccaggctgcacgggtgggtggctatggtcacgcaggcagcgatgccctcagtggtctggtctgtgccctgccggtgattctgtttgctctgtgtggtacgccctggtatcagtctccgctgcatttcctgctaagcgtaatgctgccaggaatggccgttgcccgtctggcaaccagcgtgcgggttgaagtgtgtgaaccgggagtggttaccactgtgtgtatccgtactctgatgcttgtcgccggggctgcactggtgtggtttgctgccaccagcactctggtggcggtgaccctgcagcaggccagacagtcctcaggccatgatatcactgctcttgagcatactgttcggcttaacccctggtatataaaggattcggtacattttgcctggacagtgcatcggttgcaggattatgcgcagacaggaaattcagccatcctggcggatacggagtctttcttcagggactacctgatccgccatcccgatccgaatgtatacagcatgtacattacagtactggataaacaagggaaatccgatgaagctgaacgtgtctgggaagaaggtatgcgccgtgtaccatgggatcgccgctttatccctgacgagccgacaggatctacaacacaatatgaaaaccattaa

SEQ ID NO: 84167 - DNA, 1287 bp, Citrobacter koseri
atgtcccgttttcctgtacaggataccgtgcctcttcggaaacggcccagggcttgtttgcgttatagcattgttgttctggtgttgatcggcgctttatcagggcatattttgccggcagttgccggggaacaaccggacagtctgcctctccagtcagcaaccatttcagagggtggggctgatgctgataacatgaaaaaggcagatgaaatgtccaccatggtggaggctttacagaaacagatagccgctcagcagtctcttctacaatctctgcaggctcgtctggcggagcgctctccctcagatcggagtcatgacgctgacagtaagggcgggccatctcaggtgctggcacagcctgacagttcagcttcgccgggagccgaagctgatgcgaaagcggtaccgcaatcagagccgattgttgactcaacatcaccatcaacggaattaccatcggattcggaggtcactgtaccagcaacagacgatacactggcagagccaaaatcccataatgacagtaggcgtgatattccacctgtttcaccatcagtggccgaaccgcctgtgccagttacgggcttctcctcaacgcaggcagatgactcccgtgcccctgttagtacggaaaaggacagcagtgtggaattaacgctgtcaacagatgagcagcgccgggcatatgccagtggtgtctctgtctggagggaaatcaagggatcaattgccctgcaacgatcactggggatactgctggacgaacgttatgtgatggccggtcttcaggatatggcattacgacgttccctgaaaatgacgcaggatgaaatggaccggacgatggcggagcttaacagcgactatacgcggcgggccagtgatgctcgtgagcatcaggaggctgagggtaaggcataccgaattgcgttcagtaaggaaaagggaacctacagcgatgccggggcatggtaccggattgaagaaaaagggaaagggcgtcacctgcgtacgacggatattgcggagattcaggtgaccgggactctgccggacggtactgtgtttgatggtagcggtctgcgcggagaggttcgtaaggtaaaagttggagccctgctaccttcggttgcaatcggcctccagaaaatatctcccggcgggcgactgacagtggtggttccccccggcaaagggtacggcgatgccgggttaccccccactatcccggggggggccaccctgatatttgatatcacggtaaagagtataaacgattaa

SEQ ID NO: 84168 - DNA, 702 bp, Citrobacter koseri
atgcaaaaaatcagcgtggtgtcgctgctggctgaggggctgggaagtgcctggttgttgctgtgtggtagcggtgtagcggtgctcgcagcagggtttccggttcttggcgtgggttttctgggaattagtctggcctgggggctgggaatgatgactgccgggtgggggctgggaggaaaagcctttgccggatttactccggttatagccgtggggcgctggagtgcgggtgaattgtcattcctgcactgtctgtatggccttctggcgcagatggtcggcagtatcttgggggcaggtatactcttcctgatggtatgccggatcccgtcctttgatgttcatcagggttttgccggtaacggctatgatgttctttcaccgggaggatttaccgctgaaggcgttgcactggctgaatgtgtgatggctttttttctgattatcctggtccagggttccgggcagtctcgtcgttatctggttgccgcaggcgcaatgatgttgacgtcaatgctgaccgtaactgtagataatgccatggtcagcccggcgaaaagtattgctgtggcgatttttgccggaggcgactggttcaggcagcagtgggtgttcctgctggctcccttttctggttctgttgccggcggagtgtgttcccgctttttatttcctgcacagcctgtaactaccggatag

SEQ ID NO: 84169 - DNA, 324 bp, Citrobacter koseri
atgaaaaaaagagataaagtgaatgaagattataatctgtcggttgaagaaattaagcagcaggaaatgcagcagtttctgaaccagacaatgctagaacggtatcgaaaaatcgcagcagcagcggcatatagtgagcgagccgggaattaccatattggagcaaaactctggatggatgccatgcaggttgcaacgggtataaatcgggactggtgtgaaagcaggatggcaaggtgccagctaaattcttaccggatcaaaatgaatgaggaggctgcatcaggtgaggatactatggtgtatgatacaaagtttacgtaa

SEQ ID NO: 84170 - DNA, 915 bp, Citrobacter koseri
atgataaaaaatgacctttccagacgtatatttgctggggtgttgtttctcgccgtttcactgacatggggaacaacatggatggcaatgaaatttgccctgacatcctttacacccgctctggcaaccggtttacgtttccttctggcttcaccattattgattttgatgacaaaattttcagggaaacccttactgtttccgaaagggaaaaggaaattccagatgatgcttgctgtgttttattttgctctccctttctttctgatgatatacagtgaggaaacggtctccccgggaataacggctcttatcttttccgttatgccggtagctgttgttgtgtcatcttttatgctgatggggaaaaaagttacgcgattacagataattgggacattaatagtcatgctctctttgtgcctgataattaccacagagtctggtactgcgaaggttgaaagctggaaaggcgttgcggctatactgattgctgttgcctgccatgctattatgtatgtgcagtgcagaaaatattgttcagatatttcggtgttaacctgtaatgcaatcccgtgttttctggcttcattattacttatcctgtacggcattctggaagagcatccagacagttactctttcagtttcggggctgttgctgccatcagctaccttggtatcgttgcaggtgttgctggcataatggcatattttaaacttcagcagatcatctccccgttccatgcctcactcgtttatttcgtttttcctctggttgctatcagttttgatacggtcctgaccggaaatgcagtttcagggacatctgaggttatgatcgttccttttctggcaggcgcatggatggtacttcacccgtcaagtcaggtggcagcaactactgtaaaatag

SEQ ID NO: 84171 - DNA, 861 bp, Citrobacter koseri
atgatttcatttgcaattaattcatggctatctatgagcaataaaataatagttaacgattctgttgtgtacgataaaatgcaccattgcatatatacacagaacaatccatcagggaaaatcactcttccgattcctgccagtttgtgtctgcaggttctgattgaaaaaccaggagaaataatcccttaccagtacttcctcgagaaagtctggcgggaaagaggtatggttgtagcatcaaatacactgagccagaatattgctcatttaagaaaggccttcgctaatgcaggacttgacgagcaggtcattaaaacccttcataaaagaggggttatttttgttggtgatatcggtgttactgacgaagtggacagtgaactctttaacactacagcagatactctggcggaagagtgtgccacaataaatcagggaggggtttatgatgatgtcagtacaactccggaaaaaaaaggaagagatgcacgacaagaatacggaggagttattctcagtggtgcgagtattgtatctgtaatcgcatttctgttgtgttataacttcatgcaagaaaagggtattcctgtacatcgcccggaagcaatacgtgacatttcactggataaaaaatgtaatatatatcgtaatattacgtttaaaactgatgagtattatcatgattttatcagaataaataatgcagggtgtgatcacaataaaaaatgggtgtatatcgttaacttccctccttcagagcatttttctgtgatgagatgtgtgtctcctttatattctaaaaaacataaagagttaccactgtgtatatcagagtattacgaaggaggacatcaatga

SEQ ID NO: 84172 - DNA, 333 bp, Citrobacter koseri
atggatgtcagttttgaacttactgagggcgaaggtatcattacacttaatggtaaatactttaaacagggaaaagaaatagcaccattctggataactaaattagtatcatatgaaaccaatggaatgaacctgaagttaacaaagagaaagaactctctttcttttagtgaagagactccgatggatgttatgaggaaatatattgctaccttttttactgatgatacaacacaaaactatatgattagagttgaaaagttagaaggtacagaaaaagcatggttgttctcctcctcgagaacaccctattttatttgtacaaatgaatag

SEQ ID NO: 84173 - DNA, 141 bp, Citrobacter koseri
atggtgttatccacccccctcgttataatcactttccatgacttctcgttatgttcagaaggtctggtagtcatgtttattaactttgggcagaggtgttctgttacgccactcagtggaagtttctactattttaattaa

SEQ ID NO: 84174 - DNA, 909 bp, Citrobacter koseri
atgcagtctattaatacagtgaaactaataacgttattagttcaggggcagtggcttaaacataagcgatggactgagacgaagtttcggttgaagtttttttctcgttgtctttgtcatccatttgtgacaataaaatattttcaggggctatgttctctggagaatgcaaagtgtttaattgaaactcatcccttgttacccacgaagttgcaacgcccctatttatataaggggttgagaatttcgaaacgagttgattgtataatcgaacattatatgtttttacaaaatacaaaatcagtacgggcaaaaaaaatattgttatcgggtgagacaacaaggttagccctgcttcgggggaaaaatggcgaattaattgaaattctgtgtggcccctgtgaatttgaccgggagggagagattactttgacttttcttttcaatgggcaaatgcttgctatgctttcttttgctttcattaaatacagaaataaaaatgttgcattcattgctggcttacaaggtccaaaaaaaggaacgggtacaggcccagtacgtgaggcgactagggcttgttatggtatttttccaaagcgaattctgtatgagtcattctgtgttctgatagaaaaatttagtattgaaagtgtatttgctgtaggtgaaaacagccatgtttataaagagtcaagatatttaaaacataaacagaactcgtttgttgcgagctatagtgaattctggaaatcaataaatggtcttgaaattgataatgtgtatatgctgccattaataacagaacgtaaagaaattgaatccattcccagtaagaaaagatctgaatacaggaatagatataaaatgcttgatactcttaatgagatgataagtgaaaagctcaattag

SEQ ID NO: 84175 - DNA, 345 bp, Citrobacter koseri
atgattcgtcatattttgtttattgcgtttaccgattcagtgtcagctgaaaaaatgatttcagtaaagaactcatttttgcaaatccccacttacgttgatggggttctggctgtggagtgggggaagaataatagcccagaagggaaaggtgctggatttacacactgcgttatgatgacgtttcaggatgaagttgcacgtcaacgatacttgcaccatcctgcacacgacgaacttaaaagtttattccttccagtaatacaggatattattgtgtttgattacgaaactggggttgatagcttaaatgcaacactgtaccagatgagcgaaaaaaaataa

SEQ ID NO: 84176 - DNA, 426 bp, Citrobacter koseri
atgttacgtagactctattgtatatcacgatatcgaaacgattgtagtgtaactagcgatcaaggtattcagtacggcagtgacgactggcagcgcttctgccgggcaaataacctggccctgagcataatctggcgtggcaactgctgggatattgcggtagccgaatcgttcttcagttcactgaaaaaagaacggatcagaaaacgcatctataaaacccaggatctggcccgggccgatatcttcgcttacattgaagtgttctataaccgggcccggcaccacaatcacctcggcggcatcagtctggaggccttcgtcgtgaggacagaatttgtctgcggtcgcggggtcagtccagtgtgcctatcactggtatcgaggggatgttggttccgaaggattcggcaacaggacaagtag

SEQ ID NO: 84177 - DNA, 423 bp, Citrobacter koseri
gtgttatccgttgaacgaatttttcatgcagtaccggcaactatagccagatgtcttcagctgatactcaatgcagcgctgttgttgctgggactgatactggttgcattcctcgcaaaggaaacgttgcatctggcggtgatgttgtttcagcctgtcgcggataacagcaaatacagcctggtggtcgggctgatggtgtattttctgtattttgagtttatcgcgcttgtcgtgaagtactttcaggcagggtaccatttccccctgcgttacatcatttatattggcattacggctatcgtcaggctgattattgttgagcatccgtcttcgcgtgatgtgctggtgtatgccggagcgatactggtgatggtcatgatgttatggttgtgcaattcaccgcgactgaaacctgagtga

SEQ ID NO: 84178 - DNA, 363 bp, Citrobacter koseri
atgagtaaaaaaactgcatttaccgcgctgttactggttatcgggagcggcttctctgttctggcgggggcggcagaacacaaaccactgcgttctccgacaaaaggtgtcgtctgcgatgcgtatttttgtgctgatgcgacaggtatgtcaggtgtactgacgacgaaatacctgggcgcgaaaaaagggaagcaactggctgcgcagggagagtttgaccgcacggcgtttacatttgccaatggcgtgtattgtgataccaaagcacacgagtgtcgtcaggaccgctattttggtgctgacggtaaaccttccggtaaaattgacagcaaaacgacgcagtggctgtttgcccaatga

SEQ ID NO: 84179 - DNA, 189 bp, Citrobacter koseri
atgtcaccctccgaaaaggatattccgaacggcaatatactgtttcagaaaacttcatatatatctttatggaatgtattctctgtttttttatcgcatttttacttcccgctggttacccggcctctcagatccgaaaagtcccggttccggatcttcctcagacgcaccgacgcgcagcagcgctga

SEQ ID NO: 84180 - DNA, 1017 bp, Citrobacter koseri
  misc_feature (525)..(534): n is a, c, g, or t
atgtcatttaaaaaactgaaggaagagtaccctgattacagaggagggttgttactgatagacgaagctgatgcaggtttgttcccaacggcacagataaatttattaaaaatgcttgatagagaatgtaaagatctaaacttgcaagtagtcatgacctcccattctccactacttattgaatatgcttacgagcaaagtcaattattcagaaaacgatataaaactatttatttaagtaatacatatggcgatgttcaagtaatgaatgattggtcttggcaaaaaataaactcggatattaatactaaaacaatagacacaagttcaggaatatcactacctcgaattaatgtatattttgaagatcgcgaggctgctgatttatttgcgacattgatgaacaggcaacccataaagaaatttgtcacacctcttcccgacattacgcttggttgctcaaattacctgcaattaattaataaaaaagtcaccgagttttctgaaaaaagtatcatttgtttnnnnnnnnnngatgctgatcaaacatcaaaaatcaatagcagccataaaacagttgttttattaccaggagagttaccacctgatcagttaattttcgaatatctatataatctccctgccgatcattcattctggaagaatgatataaacttttcacgtgatcatttcaccaacgcagcacgtgaggtacttagagaattagcaataaatggtagttctgttgatgttaaagaacgtttagcttcatatcgtggagagaagaccccaagagagtttttcaagcgtttttacaaaaatgttgaaattcaaaaactcataagagctggcgaaaaaccatacaatccttggaagcactggatcgaaaacaaccctgaacagacgaacaaattcctggaaaatttctgtgcagccattcacaatgttatgaaggttggatacgccgtggatagtgcgaaactggatgtactcaaagtcaaagcgaagaaggtataa

SEQ ID NO: 84181 - DNA, 876 bp, Citrobacter koseri
atgttctcaaataagctctacagccctttgcgttaccctggcgggaaagcaccttttgcaccatacatagcaaaaattatggagcgaaatggcgttttgggaggacattatttggaaccttatgccggaggtgctggtgttgcgttaaacttgcttttccacggatatgccgatcatatccatatcaatgatgcagatcctgctgtttatgctttttgggtgtctgtgactaggcattcatctgagcttttggagttacttgaatctacccctattaccatagatgaatggttcaaatggcgctcaatccttcgtgaagaaaacactgctagcctagttgaaaagggttttgcgaccttattcatgaaccgtactaaccgttctggtattctaaaggctggggttattggagggaaaaatcaaaatgggaattataagttagatgctagatttaaaaaggaagtgatttcttcacgcatccttaagattgccaaccatgcagataaaatatctgtatatggtgaagactctctacaacttttaaatcgttgtgcagatttcctcccaaaaaaatcaatgatttatctcgatccgccttattatgttaaaggcagagggctttaccgaaattattatgaacatgatgatcatgaagctattgcaaaggttatacaaaagaaatcctttaaatggccatgggtagtctcatatgacaatacagaagaaatttgtgccatgtaccaattaagcaaatcactaacttatgggcttaattatacagctcaaagacgttatattggaaatgaagttatgtttttcagccacgatctcattgtccccgatgaagccataccgcaaacaaagtcatgcggctag

SEQ ID NO: 84182 - DNA, 567 bp, Citrobacter koseri
atgagtgtactttttttagaatatagtaaagagttcaattgctttagtaaattcgagcggaaattgaacttcctgactaagaaaataagtatatcagagataatttatatttctgatcctaggaagtttattgagaaaatatcggaagataaatcatttcgggttcgagaggttaactcagctgaagaggctgagtatgctattatttttagagataaacgacaagatattggtgatttcaaattacccgagaacgcaaaagtaaaagtagtacttttaaatttgacgctggttgtaaataaagacagaggtgataaatttgatgtttatataggcaggggtacaatatggggaaacccatatcaaataggtgtagacggtgacagagatgaggtaataaggaagtataaatacgattttgataagggatttctaaaaccttttgataacattgataaaaacgcttcacagatcaaagggaaaattattgcttgtcattgtaaaccatatgcatgccatggggatatcattgccgattatataaactcaattgatgatggtgaataa

SEQ ID NO: 84183 - DNA, 453 bp, Citrobacter koseri
atgcaaaaaataagaatacatacaattggttttacaaaaaagacagctgaacatttttttaatgaattaaagaaaaatggtgttatacgcgtaatagatactaggttgaataataattctcagctttcaggttttgcaaaggcaagagatcttgagtttttcttgaaaaagatatgcgacatagattatgtatacaggtcagaactagctccaacaaaaaaaattctagacgattacaaaaacaaaaaaattgactgggaacagtatgcgcaagaatatttaaaccttatggaacagaggctaatatcatctcgactatctagtgatgaggttgatgggtgctgtttactttgtagcgaagacaagcctcatcattgtcatagaagactacttgctgagtatttaaaacaacagtggtcaaaccaaaaaactgacatcaatcatatattatga

SEQ ID NO: 84184 - DNA, 648 bp, Citrobacter koseri
atgagaacagttcatcaactactttgccttgctaaatcttggaaaaatggtggtttttgcattgcagggaaaaatgcgcaaaatcaatgggtaaggacggttactgcaaaccttggcaataatgcaatattccataatggaaataacattaaccccctcgatttttttcaagcaactacacttaaccatgcacctcaaggacaccagacagaaaactacatcattgatgagaatgttatcttcactgctaatgggcattgcactgtcaatgagttaggtaactacgtagatactcctctatctctgtgggagacaggaacaagcggtcactatggtttaaatgataaaattatcattgggcagatagcggtgaacaattctctatatctgattaagcctgacgatacagtgatagtacagatgcagaatgagtacggtactgataaactgagaataagattcaattataactttgatgaatatttattaacgactacagatatgggaatacaaaattattttagagatgaaaacaataggttaaatgatggagaagaagaagaacttgatggtgtctcttatcttactatcagcttagcagaaccgttgaatggaaacttatataaagtagtagcaggagtattttga

SEQ ID NO: 84185 - DNA, 4095 bp, Citrobacter koseri
atgaaaagcaaacctacggacgtctctttgcgtcggtggcgagcgctgacctggataaacatcggtatccaggcctgcttcccgctggcagtgagctttaccccgacgatagcggctgcgagcagcctcctgcagaagtctgcgcctgcgcagacgcaggcctatacgctgacgacgggcgaaacggtggctacggtcgccaaaaaatacaacatcagtcaggcggaactgcgcaagctcaatcagttccgcagttttgcgcacgggtttgaccacctgaaggccggcgacgaactggatgtgccggcggcacccctccaggtcgggaatggcgcggcacccgttcggccgaacggtgacgcacaggcggcgcgagtggccggtgtggcatcgcaggccgggagcttcctggccaacaaccccaacggggaggcggctgcgtcgatggcgcgcggcatggccatgggtgaagccacgaaggaggtgcaggcatggatgagtcagttcggcaccgcgcgcgtgcaactggatgtcgaccagcatttctcgatgaaaaactcgcagttcgacctgcttattccgctctatgagcagcaggactggctggccttcactcaggggagttttcatcgcacggacagtcgcacgcaagccaacgtgggccttggggtgcgctggtataatgacggctggatgctgggcggcaacaccttccttgatcatgacctctctcgcgcgcattcgcggatgggggtgggggtggagtactggcgtgactacctgaagttgggggccaacagctacatgcgcctgaccaactggaaggactcgcctgacctggatgaaggtacgtacgaagagcgaccggccaatggctgggatatccgtgcgcaggcgtggctgccagcactgccgcaattgggtggcaagttggtgtacgagcagtattacggcgacgaagtggggctgtttggcaaagacaagcgccagaaagatccgcacgcctttacgctgggccttgagtatacgcctgttccattggtgtcgctcagcgccgaacagcgccagggcaaggggagcgagaatgatacccgctttggcgtggaaatgcgctatcaactgggcgtaccgtggcagcagcaggtcaacccggatgcggtgcaggcgatgcgcagcctggcaggcagtcggcatgacctggttgagcgtaacaacaacatcatcctggagtaccgcaagaaagaggctatcagcctgcgtacggcaccgctggtcaccggctacgccggggagaaaaaatctctgggtgtgaccgtcaacagcagcaacggcgtggaccgcattgactggtcggcgccagcattgctggcggccggcggtaaaatcgtacaggacggcccgctggcatacagcgtggtgttgccggactaccagttcactcagggggtgaacaactacactgtcagcggtgtggcggtggacagaaagggcaatcgctccggtgcgagcgagacgcaggtcagcgtgcacaccccggatatcgatgagaagaccagtacctttacgccgctcaacagtacgctgtcagcggacggcaagagtacgcaggtactgacactgagcgtcaaggatgcgaaaggtaatgcggtggacctgccgcaggcggacattcacatgaccgtcggcacgctgaagtctgccacggtctcggcggtggataagacagccactggcgtctacacggtgacagtgaccgccgggacggataaagagacggttgtcctgacaccaacggtgggtgatgtgaaacttgacccggcccgggtggttatcagcggcgcggtaccgagctccaccaactcgaccatcggcatcgacaagggcagcatcacggcggatggcgtggacagtgcgaccattacgttcgaggcgaaggacagcaacaacaacccaatcccgggcattgctgccgacatcaccttcaaggtcgtggacaaggatggcaatccagcgccggcggggaccattaccgtctcgcctgcaacggaaatcaccccgccgggcacgtacacggcgacactgaccggtgaaaaggccggggagtacacggtgataccgcagtacgacggcagtgcagtgggcagcctggacgagaagattgagctgaaggcggacgagacgccggacgccggtcagggtaactcgacgatagcggcagcaccgaagagcattgcggcggataacgctgcgacgtcgacgctgacgttcacggcgaaggacaaaaagggcaaccctatcactgacctgactgcggtaacgttcgtggtcaaggacgcgagcggcaatgtgccgaccagcggtatcacggtgagtgcgaccaccaatgcgggcaacggcacctatacggcaaccctgaacgggacgctggcggggacctacaccgttacgccgagcaacaacggtgtcgcggtgggggcattgtctgacacggtcacgctgacggcagggaccaccccgagtggcaccaactcgaccatcggcatcgacaagggcagcatcacggcggatggcgtggacagtgcgaccattacgttcgaggcgaaggacagcaacaacaacccaatcccgggcattgctgccgacatcaccttcaaggtcgtggacaaggatggcaatccagcgccggcggggaccattaccgtctcgcctgcaacggaaatcaccccgccgggcacgtacacggcgacactgaccggtgaaaaggccggggagtacacggtgataccgcagtacgacggcagtgcagtgggcagcctggacgagaagattgagctgaaggcggacgagacgccggacgccggtcagggtaactcgacgatagcggcagcaccgaagagcattgcggcggataacgctgcgacgtcgacgctgacgttcacggcgaaggacaaaaagggcaaccctatcactgacctgactgcggtaacgttcgtggtcaaggacgcgagcggcaatgtgccgaccagcggtatcacggtgagtgcgaccaccaatgcgggcaacggcacctatacggcaaccctgaacgggacgctggcggggacctacaccgttacgccgagcaacaacggtgccgcagtgggggcattgtctgacacggtcacgctgacggcagggaccaccccggacactaccctgtcgacgtttagtgccaacccgggtgccatcatcccggacggccaggacagcaccacgctgaccctgcacctccaggacagttacggcaacgccatcactagtctgactaacgtgacgttcgcagccacgccggcagcgactgcctcgctgagcgcggtgacggaggtgggtaacggcaactacacggccacgatgaccagtacggccgcgggcagctaccaggtggtgccgcgtatcaacggggcgccgataagcggcttgaccgataccgttaccgtggccacggtggctactgacgtacaggacatcctggtgaacaactacaccttcgcgaaggacgcggggttcccgaaaaccggtttcaccggcgcgaagtttacggtgcaactgaacggtggcgagccgaccgattacacctggacctccaccgcggcctgggcatcggttgacgccagcggagtagtgacgttcaccgcaaaaggggatagcaccccagtcaccatcacagccacgtcgaagttgaacccatccaaggccgttgcctacgtcttcacgctgaacgactggtacaccaataacgggtcaacgaccatgacatggtcagcggccaacacgtattgcaccaatcagggcgcggccctaccgacccgcctgcaacttgggggcacccagatgactgaaggacagtacaacgcccgaggcacggttgattcattatggagtgagtggggagatttgaccaagtataccggctcgggcttcccgagtagccactacacctggacgtccgaggtcgtcagcagtggtaaccggtacttcgtctctttgaccacgggctacgtcgccagcggcagcgacagctacagcagctacgtcgcgtgtcgtcagggtctttaa

SEQ ID NO: 84186 - DNA, 660 bp, Citrobacter koseri
atgttagcggctcaattacgcaaagaaggttatgctatcagtgattatcgagctcgaaaattaatgaagcagttagggttagtggttaagcaaagaaaacaatatcgagttacatcgaaaaataaagcgactgcggataatttattaaatcaaaattttaatccggtagccgcgaatgaaatctgggctggcgatatcacttatttaaagacaccggaaggttggctttatttggctattgtgatggatttatattctcggcgtattgtgggttggcatatgtcatccaaaatagataccgccttgataagcaaagcgttaatgatggcctataacttacgttcgccctcaaagggttgtgtgtttcatagtgaccgaggaagccaatacacaagtgggcaatatcaagcgttactgaaaagttatgatatgcgctcaagccaaggtgatataggggcttgctgggataatgcggtagttgaacgattttttggaagtttaaagcatgattggttatttaaaagaccccatgcaaatcggtcagaaatgaaacaagacgtgctggattatctgcgttattacaatttaacgcgattacacacggcaaataattatttatcgcctgtggagtatgaaaactccttcagaaaagtgtcctaa

SEQ ID NO: 84187 - DNA, 288 bp, Citrobacter koseri
atgaaacgaaaatcacctaagcaatatactgaacgttttaaaaaagaagcgattaatttaatactggaacaaggctatacagttcaacaagcagctaatgcgctcggcattaccactaaactactctatgcttggcgaaagcgccatgaagccgaaaataagcctaacgcattaaccccctttgagcgacaagagctactcgctttacgcaaagaagttaagcaactgaaaatggagaaagaaatcctaaaaaaggcgagcgccttctttgcgaaagagttgctataa

SEQ ID NO: 84188 - DNA, 291 bp, Citrobacter koseri
atgtctacagggaaaacgttgctcgcgctggcgctcagcgcacttttaccggcaggggcggcatttgcggccaataccgataccatcatctactgttctgaagcctcacccgaatcgtttaacccgcaaatcgccagttccggcccgtcattcgtggccagttcgcaggtgctgtacaaccgactgatcaatttcgatccggtaaaaaatacgccggtgccgtcgctggcgaccgactggacgatttcccggacgggaaaacatacacgtttacgctgcgtcagggcgtga

SEQ ID NO: 84189 - DNA, 1692 bp, Citrobacter koseri
atgaagttgcttaggtttttattggagatagatggaaaagaaatacgctcgatacagtttttcgagaatttaaatataataacaagtaaaaaggagtctgatgaccctggtaatagtgttggtaaatctacgttgggaagggttctggattatttgtttgatggctcaattaagcctatctatattgatgaagagtttcaaacacctaaaaaagaaattgaacaacttttcactagaaatgaagtgcacgtatcattagaatatttaggtttagacaaccagtatagtattattaagcgtaggctctctactaatgtagacttgcaaagttatattttaaatgggagagaagtaacaagtaaagaatatatccatcatatcatgggtagtgtttttaatgttagctctgcaaagccaacgcttagaaaactcgctccaaaattctttagaacaacgcaacaccgtatgacaaaaacagttaactttgacaatggcaggaacgtttccaagtcagatattagtactgtttttctatatttgtttaactttaatgacactgaaatacttaccaaaatacataaactaaagactgctataaaaggttatgaaagaaacctaaaagcgtttaatagtgttatttctcaagataagattgttagttcgataacccatatgagacgagaaatttctaagttggagaggtctcttttatcgtctgaaaaaggaatcgataagctagaaatagtctctaaaattaatagggtagatgatgagcagaataccttgtctgatgaaatattgtcgttagatttaaagataaaaaacatcttagaaactaatgaaatacttaagagtaatgaacaagttcatttgttagatgaattacaggcaatttatgaatacgcatcagttaagatagaatctacccttcaggattaccagcaagcacttgcgttccacgcacatcttctaagtactaagcgtgaatttgtttctcatgggttggataagcttcaagctgaacatgaaaaagcaacggttaagttcggtcagttaaaaaatcagaagcagagtcttttcgacgagcttaaatctaaaaagaaaatagaagagatttctgatgcaatgaaggaaatcggtaaactagataaagaattagccaagctgacagctataattgacaaaaaagatgatattgattcaaagttggctatagaaaggcaaagcttaactgaattatcagggcagctggaagctgaacttactggcgtaacctctttcgaagataaattcatagataatttcaaagaatacactcgtggtttttatggtgttgagtacaaattcagtctcaatttagatcaagaaaagggcgaatgtaccccacatgtagatgatgtggagtcaaataacgaaggtgggttaaagagacttgaggttgttactttcgatctagcatatatcaagaccgtttgtgatataaaagctttgagacctaactttgtactacacgattctattgatgaaatcgatattcaacacgttcgcaaaatttttgatgagtcgattaaattgtcagggcaacatattgtatctatgctgtctgataaattaataacagaagattaccagaaatatactcgttatattattcttgaattatctcaagataataaattttttaagctttaa

SEQ ID NO: 84190 - DNA, 1158 bp, Citrobacter koseri
atgacaacattaaagcagttaaaagacgaacttaagcaacagatagatgagtctgggaaatccagaaaacttgctgaaattacttcattcactgctcaagcggataatgaaataagacttgcacaaagaaacatcggttataatgttagagagtggacagtcgaagttgttttacagaaatttagcgaaaaccttgatttggataaaaatgaattattcataccagattatcaaagagactataaatgggactctaaaactgcatcaagatttatagaaagtattttattagacttccctatcccatatttatatatagctgatgtagttaacgaggatcctgaattagatgggcgcgtggaaattatagatggttctcaacgaatccgttcaatatattacttttggaatgatgagtttgaacttcaggatttgaaagagctaaaatgtctcgaaggtttcaaattttctgaccttctagcaagcagacagcgtcgttttctaagagcctctttaagatttatagaattaaaaggtgacgtagaagaacaacatcgtcgagatctcttcgaaagaattaactctggagtcaaaagattagaagcaatggaagttaggcatggctcagatgctgctgcctctgtattttataaaaaagtagttactccttgctctgaaaataatttatttgctgagttagctcctctttccgatcgtaagcgttcaaatggggatcacagagaactagtattacgattttttgcatatcttaataatttagagaattataaaggtttcgttgctccatttattgacgactatttaaacaatcaagcaagggatgtaacagatcataacgtaaaatcttatttagatgaatttgaccatatgttgaatttcgttaatactcattttccaatgggattcaaaaaaacacctactagcaaaaccacccctagagcaagatacgaagctattgctgtaggtgcagccttagccttacgtgaaaatccacatcttaccgctccagtataccctgtgagcgagtggttatttgacaaagaatttgaagcaacagtaactgcagatagtgcaaataattcatctcaactcaaaaatagaattttttatgttagagataaattactaggggtttga

SEQ ID NO: 84191 - DNA, 690 bp, Citrobacter koseri
atggctcttgaagatctaagatatgaatacgaagagagagctaatgatatctttgaaatgctatctttagcttctgagttaaatgcaacaattgagaattcaaatgaatcaactacattagataaaataacatcatggcaaaacagaattaacataattaagtcatctgttcacatgatgctctataatcaggttgagagcacggcacgcggctgcattgaatcagtttatgaccatttaagtgataataacgtattgtattcatctctcaaggaaaaatttcaagtaagtatactgcaccgtattgtttcagataatgagagcggacaatcattgtataaaaagattggtaatgacatctcaaaaaaaataataaaagcttcgatgaacattagaaaagaatttaatggaaatattagcaaacctgttatttataagattactcaagcatatggaataacagtagctgattcgcctgagtgtcgaaatggaattgatttggatttacttaaagacatacgtaacgatcttgctcatggtaatacaagcttctctaaaaagggccagcttgatacacttgaggaagtatctcagcgggcccataggattgatacttatttacgacttctgataagttcaaccgaagaatatattgctacaagcgggtacctatccattcaacatgcctga

SEQ ID NO: 84192 - DNA, 1044 bp, Citrobacter koseri
gtgaacattcaagctgtagacatcttttgtggggctggcgggttaactcttggtttgaaaactgccggaattgaagtgactcatggaattgatattgatgagtcatgtcgatatcccattgaggaaaataataaaaatacaaggtttgttcatcagtcagtaacagacacatcgtctgatgaagtatcatcaatgtttaacaaagattgcatcagactgcttgcaggttgtgccccgtgccaacctttttcgaagtatcgtaaccccaatagtcgtaaggatgattccaaatggcgtttgttacgagagtttgaaagacttgttgttgatatatcacctgaacttgtaactatggagaatgtacctcagttacgaacacatgctgtattcctaaattttgtaaaatcattaaaaaagcagggatatcacgtttggtacaatgtggtcaattgttcggattatggtcttccgcaaaataggagacgcttaatcctcattggttctcgtctaggagagatagagttcgatcagccaaaagttgaacgaaaaataacagtgagggatgtcatcgggaatttacccaaagtaagggctggagagaaatttggtgatgatgcattgcactgctctccaaaactacgtgagttgaatctcaaaaggataatgcattctttgcctggtggtacttgggatgattggcctgaagatattcgggctaattgtcataaaaaggattctggaatgacttataaaagtgtttatggccggatggaatggaatgatacaagtccgacgatcacaactcaatgttatggctatggtaatggtcggtttggtcatcctgagcaacatagggctatcacgttgcgagaggcagcgattttgcagtcattcccatcaaattataagtttttggataaaaatagagctttttcgtttcaaaagctgggcacaatgatagggaatgccgttcctcccatcattggccaagctattggtgagacctttatcaggcatgttgaatggataggtacccgcttgtag

SEQ ID NO: 84193 - DNA, 228 bp, Citrobacter koseri
atgacaactaacaaccacccggcacacggccctgtatcactcgatcgcctgcaacagatacgcgaaacactcagcaaagcagtagcacaaagaaaaggcgttgtctcattgcatgtgatagccaagaaacgtaagtgctccgatggtaaaattcgaactcaaccgcagtcggtaatgggattttttgatggaggattaagtattatttattgttattcatatggttag

SEQ ID NO: 84194 - DNA, 237 bp, Citrobacter koseri
atgtttaaacagaacgaaaaggctatttcacagattgcggaatatatcccgcgtgcttgccggggtatgcagctgcaggaagccaaagcgcgccttgagaaaaaaatcgcgctctataccgatgacggctgtgatgctgccgtacttaacgcggcgtttgcatcagctcttaacagtcatacgcgggagtcttttttttcgtgcatcgtagagcagctgcatgagggggacaaatga

SEQ ID NO: 84195 - DNA, 204 bp, Citrobacter koseri
atgacaatcgtaaaaacccataccggcaccgtgatcaccagagacggtccgaaggtaaaaaaactgcaccagacagagcggatgtgggtcgtcggcaaaaacgagttttaccacaaagaaacagggcgccgtcactttgcagaaaatacgcgccgccggctgctgctcgacaccatcaagcccatcgaggtgaagcatgtttaa

SEQ ID NO: 84196 - DNA, 786 bp, Citrobacter koseri
atggctaagaattcaatcgatgtatacggtgccagcggcaaaacaaacgtgctcaatttcgagcctgaaaacctgcacctggtcaccgataagacccacccactttatgatgagcgggtacacctgcctattgaggaagggatggtactgaacattgcggagctgggtgtacttgagccgatcatcgtctggaaagaccctgaaacggggctcacctgcgtagttgttggccgtcagcgcgttaaacataccctggaggcaaataaactccgtctgaaagaaggcaaagacccactgcttgtacctggagtcgttaagcgcggatcagcaaatcagatggctaaatacatggtcagtgaaaacgaaattcgccgacctgatacaccgcttggccgggctaaaaaaatgtcagacgcgctcgaccgcgggctcgatgaggacgacattgcggtgttgtttggctgcagcgttcagaccgttcgtgcaacgctctcccttctcgatgccactcaggccgtccgggaagcggtggaggctggaactgtcaccgttacccaggcacgtcagctaggtgcgctcacacctgaagagcagcgggcaaaagtagcagaaatcgagcgggcaacagctggtactaatggccacgaaaaagctcgtcgacaacgccagattctcggtgaagcaaagccgcgtctcaaatcacgcaaagaaatcacaaaagccctcgaaggtgccagcggtgaatacgcggcggctctgcgctgggtgcttggggaggccgtatga

SEQ ID NO: 84197 - DNA, 336 bp, Citrobacter koseri
atggctagagcattatcagcagttgagcgcagagagtacgtccgcgcagtgattcggatcaccaggcatcaggggcgccttacgaccaccgaggcaatgaaaaaactggggctgagccgcgctactgtccagcggtatttttccgaagcagaagcgactggcgaggttgtccggcatggtcgtttggggcttttccgcgatcagcgggccgtcatcgactttgacatgaagcgttttggcctggtgccgaaagttgctgttgggatgaattacagcctgcttggcagtcctgtttttcagcgagttttagatgttcaggaggctattcatggctaa

SEQ ID NO: 84198 - DNA, 744 bp, Citrobacter koseri
atgaaatctatcgcagaaagcatgcacaacttcgaccgtgaaaacttccagcgagtggctgccgggcttccggaaatgcaggacgagcaggcagtaaagcgccaggcggccaagactgcggagatcttcaacgagctgttccgccagctgcttgccgtattcccggtgttggccaacaaatctctggaagacctcaacgagatgcgtcgccagtggttgttggcgttcaaagaaaacgggatcaccacagttgagcagattaacgcagggatgcgggttgcgcgcaaacaggaaaaaccatttatgccatcaccgggacagttcgtcgcctggtgtcgttctgaggaggcggtaactgtaggcctgccagatgcgagtgagctggttgaaatggtttaccagtattgccggactcgcggccagtatccagacgctgagtcgtacccatggcctgagcacaaaatcgaaccgttaacgctgaaacacaaagcttgctactggatggttactggcttgtacgcagacatgcgcgcaaacggcctcagcgacactgagctgcgacgtaaggcgcaggatgagcttctgcgtatggttcgtcgcttgaatgccggggaagtgattcccgagccggttaaacagatcccaaagcttggcggacgtccgctgagtaacgagcagggcttaaacaaaatcgctgaaatccgcgcgaaattcggtttaggcagagggcggaatcatggctag

SEQ ID NO: 84199 - DNA, 861 bp, Citrobacter koseri
atggccgacctggctaacgggtataccaagatcgcaaacgagatacagaagctcaagccgcgtctgaggatgtcaggtcgtgagtggcagtgtcttgaggctgttatctggcttacctatggatggaacaagaagcaggaccgagtaacaaacacggtgattgctgagctgacagacctcggagagtcgcatatttccgacacaatcaaatctctcgcggagcggaaaattatcttcgctcataagcagggagtgatgaaaattgtcggtataaatactgagctatctgagtggattttagacaaaccgaaaacgggaaaactcttcccggaatcgggaaaagtgttaccgaaaacgggaaaacctttcccggaaacgggagacacccaatacaagaacaagaacaatagtaaaagatcttcttcgtctcggaattctaaagaatcccgaaacaaggaaactttgaagtttctctctcgtcatccagaagcggccgatgggatttatacccctgcaggtaaatcctggggaacagctgacgacctcaaagccgcgcgatggattttcgataaagctctcaccgtgaatgcctccctctcagagccgaactgggttgaatgggcgaatgccatccgcctgatgcgcctgcaggacaagcgcacgcactatgaaatctgcgaactgttcaagtgggcaaatgaggacggtttctggcagggaaacatcctctgcccctcaaaactacgtaagaagtgggaccaactcacaactcaacgcctgcgcagccatggtccatcaaaaaccacatcaggcgccagtgcgctggacaataccgattggatcgacggggtactcgaatga

SEQ ID NO: 84200 - DNA, 351 bp, Citrobacter koseri
atgagctgggaaagttttattgaaaagcatgtccgggaagagttgatccgccagggcttcaccgtagcggtggctcagggggggcataccaggcggtcgatatgtacaagcggatgtcacaggcaagccgcaaagggggaatgtttgacgatgttatgcgatacgcaaagttatgggctgagaagcagaccagcgcagctgaacgccgggaagcaaagcggaaagtgcgaaagggcggcgaccaggctgggttgttctgaaagggtgaagactgttgtgcgccaacacagccagtcttcgggtgaattaattgggtcaattcacgggatgaagtatgtcaaataccgctga

SEQ ID NO: 84201 - DNA, 504 bp, Citrobacter koseri
atgaatcaaattagccgtgaaaaggttcttgagtatctccggtacgaccctgaaacgggagaatttcgctggaaggtaagcactaacggaagaattaaagtcggtcagatcgctggatgtcttgagttatccggttacataaaaatccgtattgaggggaagtcatacgccgctcatcgcctggcgtggattgttgtcaacggcgatataggtgatttgcttattgaccacattaacggagttaaaaccgataacagaatcgccaacctccgcttggcatctaatttggaaaattcaagaaacaggcgaaaccagaaaaataaaagtggggttagaggtgtttattggaatgaaccatatggcaaatggcaggcaagcggctttaaagatggccgacttatcagccttggttacttcgataaaaaatctgatgcagcgaaagttgctgttgaatttcggcggaaagagtacggcgcattttgccccaatctggaggcgttatga

SEQ ID NO: 84202 - DNA, 687 bp, Citrobacter koseri
atggaaagaaaattcatgatttaccagcgccgcgatggattccagatcgcggaggaatcaaccggaacccgccttgaaaacggtatggaattcctggcacgcccgaacaaatcagtaaactggtgtattgcagacttcaacattttcattgatgacgattacgatctggtaggtgaagaagtgattgattgctcccgctatccgtcacgggttctctgctttgttgatggagtaatgaaaaccgtcgatttctgcgagtacgcaattaacgccgaactaacagatgaacaggcgctcgcttatttctcacagcagtcttatgaccacctaagcgcagaagaaaaggctatggctaatacccgtgaccatgccgaagctctgatgatgaatgaagaacgtaactataacgatgccatctctgatttcacttgggagttgcaagaggaagatgtgggcgccttctttgctgcgatggatgaagcactgcgaatgaacgcaactctctacccatgcaaccacaaaatggttaagcaatatcaggatgtgaaagttagcgaccttcaatgtatctacgaaattcagggtgaagaaacagtttgtgacgctgacaaacaacaggcattaatcaactctgcaacttataagtggttaattgcagacgcagcaaaataccgggctgccttatga

SEQ ID NO: 84203 - DNA, 471 bp, Citrobacter koseri
atgtacagtccagtacaagtagccaatagattcgttatgctgggtaaccagcaccagaatcctctgactcatatgcagcttcaaaagttgacatatatagcgcatggttattatctggcgtttaccggtcgcccactgctgaatgagtttgtctcagcatggaagtatggtcccgtaatcccagggatgtatgatgcctttaaaaactatggtaacaaaccagtagcatcccccgctatggcgccacagggtatgactcctatggatccccaagctgatagcgttattggtgctgtctatcaatattatggaaataaagatggtatcgagctttcaactttgacccatatgccaggaactccgtggtcacaagcatatacagggttaagttcgaccatcattcctaatgagataattaaatcttattataatgctcttatcacaaaccaacaggcatgtcagggcttatag

SEQ ID NO: 84204 - DNA, 579 bp, Citrobacter koseri
atggctctgattgatgatatctttaaaataattggtgcggcgtctggtgtagaagatggccgcacagcatcttccataaccgctgatccagcttccacctcagaagaaaagacatccacacagcctcataacgttaaaaacccccaagatttctctcatcctgatcagcagaatgctgaagagtcaccagaaagtaaggcagaacaggaagagcaggcctttgcatctaatacaggggcattgcatgaatttatgcagcaaaatcgaatggacagccttcaggctcagttggatatgcttcagtctcaagttagggacaaggtagctgacgcaaatgggaaagaaatagataatgatctccgcaagcgcatggcatcatttactttccaattcatggtgtggtggtgtttatttgtagcgactatgtttacatcataccttatagctaacaatggaacgccaccagcagaaacaatagtagcattactggggactagtactatcagtatcgtcgggcttgttggcttcgttgttagcggattattcaaatctcgcaaggaaaatgataaagaaaagtga

SEQ ID NO: 84205 - DNA, 216 bp, Citrobacter koseri
atgccgacgacatatcaaacccgtgacggtgatgtgctggatgcagtctgcgctttgcattacggcacggaaaacctgtcttatatcgtgacacaggtgcttgaagcgaatccggggctggctgataccggcgcgatttacccgtcaggtctctttatcaccctgccggatctggcaccgccggttcaggactcagccttcagcctgtgggattaa

SEQ ID NO: 84206 - DNA, 1863 bp, Citrobacter koseri
gtggccggattaagccagaaccttaaggccgtcattacctttggcggcaatatcgacagttcatggagccgttctgcgaacggcctgcaaaagagcctgaaggatgtcggtaagcagtcagaaaagctgacgaaagaccaggcgaagctggcggcggaaatcaagcgggcaaagctcgccgggcaaagtcttggcgatcttaaacggcgttacagtgacgtatcccgtgaaatccgcaaaaccgaagccgagcagcagaaactgaaccagcagatgcagaaggcacagcggctggcggcattcaagggtgccggtaaaggtctgtttcgccgcgggctgggtatcgccggtcagctgggcggcatggtggcgccgggtctggcgatcggcggcggcggggtggtggcttccgcgctgggcaccctgattgccccggcggccaccaacgcggagacggcccggcgtgccggcgtggcgaaaagctatggcgtggacatcccgacgtttgatgcctgggacacgctggcaaaacagtacgacatgaacggggagaacatcggcgatctgttcgaggagtacctgcacaaggcgggggagtacaagcagaacggcaagcagggctcgctgcaggatgcgtttgagacgctgggatttaaggcgggggatttagccgggctcagcgatatggcgcagttcgaaaaaattgttgagcgtgcgctcagcctgcaggatgaatcgaaagcctcgtttgcactggattcgctgtttggcggcgaggccagcaaactgctgatgctgctcaagcagtccggcaaaagctaccgtgacctgatggacgaacagcggcgctataacctcgtcacgaaagagggtgccgaaggggcgatggcgggcaaccgcgccgtcgctaatctgcgcaccgtcttctcctcggctgtggcagaaatctccggccagctgggtaacgagctggcaccggatattcgccgtcttactgatgatctggcggagtggtttaagggcggcgggatcaaacgcatcgtcagtttcctgcgcaatgatctctatccgggcgtgctgacgttcgggcaggggattgtctttgtcgggaaggtggcgtacgcgctggcaaaaaaactgtcctggctgctgccggatgagcgaagcgatcagcgggatgtactgaaaactctggcggtgaatggggtggagatggctcgattcagggcgaaccagaatgggcagggagaatggtttgaacagcagctgaaagataacccgtcaatgcctgaagaggtaaaaaaatcttacgccgcgacaggtacatttatccgcaatagcgatgacgagacgtttaacaaaacactggataaatacctgccgccggagaatagcggtggactgttcgatccagacggttttatgaagccagcactgcagcagcctgtcacgtccggtacaggcccgacggcatgggataattatccccggactctgctggcgccattaccgccagaaacatcccagcaggtggtagcgggcataacggagccggaaacgttccggcagattgcggtaccgagtaccgttccgctttccgctactgctgatgacggcggggagaatgccggcacggatgcggaagggcgctgggatatgttgttgcaaaaactggatgcagcggacgccgcacccgcgccccggcaactgacagacaaccgccggttcgaataccggtttgaaattcacggcgcaccggggcaggacgagcgggggattgctgatgaggtggaggctgtgacgaaaagcaacccggcttttacgggtaacagcagcatgatggacggagggcaaatctggtga

SEQ ID NO: 84207 - DNA, 429 bp, Citrobacter koseri
atgataaaaaaaaccgaaaaaggacaagtaaacaataagaaaaatcatctcagtcaaagtatcaatcaaaaatcatcttcgcatagaatacattgcgtcagtgtaagatttaataataaagaaatgagattcattgatattaaacggggctcgacgaataaaagcgtatggcttcgtaaattagctttgaataaaatcatccctttaataccagagattaatatcgaagcttggaaagttttaactgaaatatcacaaaagctaaatcgaattgcgatacatatagatggtaagagcaaagatagccagcttactcatacagagcttttcgctgtgaagcgacaactggaagatcttcgccagcacctgctaaatgctgacatatggagcaaaccctatgaagggtatgcagaagatcaaaaggggtaa

SEQ ID NO: 84208 - DNA, 501 bp, Citrobacter koseri
atggaaaagcagtcaattgtaaaatatttaaaaataataattgctctaattggagtcatttcatttcttgttttggttatcttaccaattgcatttgatattagagatccttatcagaagatcttgatatcgcttggcacttcgatattcgttgcactgaccgtatcgttagttgtaaacaaactgactgcatcaaaaaccaattatgaagtccgtgaattaattaatgaaaaattcccgaaattactgatgattgaggataatggtctagaaaatgtcgtttataataacaatatggaattgcttgatatagatatagtggaaccatcaaaattatttatcataatgaatgatggacgaaatttctttactaataactcaaggcaactttcagaacgatttaaaaaggaaaataaagaaactttcatcgtcctaatggaccctaatccagaaaagaatatattgaatttcataaaaactcaccttcttcaaataaactag

SEQ ID NO: 84209 - DNA, 219 bp, Citrobacter koseri
atgagcatctactatggaagctggctctttagtcagctccttagtaactgtggtaaccgtagctacccggtttgcgccaagttcttctgtgattttccgaataccagttactgctttgttatgagcttgaaagtcagtaaggatgcgattcttgttatggacagcttcaatcccatcgagcgagaccgagaaggtgatattccgctctttaacccatga

SEQ ID NO: 84210 - DNA, 546 bp, Citrobacter koseri
atgcttttgcataacatgaagatccgctcgaaattatttattgcgtttggtttgtttattgtactgatgatcgtgagttctggcctttcgttgttcagcctggatcgaacgaataccagtatgcagaacatcattactcacgattatcccacgacggtgaaagccaacctgctgatcgataattttcaggatttcgttagcacgcagcagctgatgctgctggatgaagaaggacgctggagccaggagtcgcaaaagcaactggatgcgattagccagcgcattacggtattgctcgatgaactgtccgccagccgtcaggacgaggcttcaaaggccattatcgccggaattcgcgatgtacgtcagcagtatctggcctcccggttccgtattttgcaggaaattcagaaccataatcgtccggcggcgatacaggaaatgatgacgaccaccgtcaacatacagcaggcgtataaagccaaagtacaggagctgatcgctattgaagatacgctgatgcgtaatgcgggcggcgtcggttga

SEQ ID NO: 84211 - DNA, 1425 bp, Citrobacter koseri
gtgggaacattcaaatttactaaaactaagctcgaaagcctcccaccagccgaacgtggacaggttgagtacggcgatacgatcgttaatggcctgcgcatccgtattggcaccagtggtgtgaaaagcttctgtatctctcgtaagagaaatggaaaattcatccgcgccacgctgggccgtttcccggatcttacagttgataatgccagggcaaaggcactcgaaatgttgggcgacgtagcgatcaccgggagaaatcctaatgtggaaaagcgtgtcaatgagaaggcatctgtcacgcttgccgatgcgctggatgcctatattaaaaaccgtggccaccgcctgaaacccacaaccgaaaagcaatatcgcgctatcttgcaaaattactccggcgactggatgaaacagtccctcgctaccatttcgcgtgaacgtgttgaacataggcataaagcggtgactgatggctctgtctggtttggcgctgataaagaaacgctcagagcaggggtaggaaccggtagtaaagcccaggcagacctgtgggctagagcactccgcgccgtttatcgttttgcacatgatcattaccgtgacgaagaagggataacgctgttacctgacccgccaacactggtgctgagcacaaaacgtcagtggcatggaacggtcagaaagacagaacgcatccgcacccatgactttgctcgttggttaaatgccgtcgctgtagttcgtgttaaggccgaagaaggacgggacgatgtagctgcagcaatatgtgacgctgtagaaatgtcgatgttcaccgggctgcgtaaatccgaaatattcgaattaacatgggatcgggtgaatattggcggtcgctatttctggatagataccaccaagaacggcgatccgctggagctaccgataactgaaacgctgctaaatttgtttcgtcgccggctgaaaatgaaaagcggaaatgaggttttagtgtttcctggtgctaaaggaattattaaagaatatcgccatgttattgagcgtatcagtgccgccactgttcctgacccaaatcctgatatgctccagccaattcctttcaaatggcacgatgcccgccgtacattcggtacagttgccgagctggttggcgttggtagttatattctcaaacgactgatgaaccaccgaacgatgcgtagtgcagatgttactcagggctatcttcattttggtgctgatgaactactcgagccagctacccgaattgaacgggccatcctggaacatgctgggtttgtggaaagcaagaaagccattgatgcacaattattgtctgcgttaggcaatttgactgatgaagagaagcgtaagatgctttttgaaatactaagccaaaatcatatgcaggttaagaaatga

SEQ ID NO: 84212 - DNA, 615 bp, Citrobacter koseri
atgagttacttaaaacgagtggatgccgagcatgtggcaagaatgtatgcctttcagcaattggtaaaaagttactcttcggaaaacgctgatgagcatgtgaatcgtattgaaaaagaaatagctgggaaaactattaaagaaaagaaatggatagcgaatagcctcaccgaaatgcacatggtagagaaaaacaggccgttatcggatgatgaaaatgtgttggttaaagctgtgaacgtactaacagttcttggatatacagatctagccaaggagttaggcgctttggcagacagagttgggcgatgtgtgacgttatcagatgtttatatgaatcacattattgacggtgcggtgaaaaaaaatagaagtgacgcagcctcaggacaccgacatcatttgcatgatgaaattgtggcaattatcaaaaccacctgggagaaaaaccctgctttatctaaaaagaaaatgatcgcaaagttgatgaatcgttatgaggggcgagtggatgaaggaacggtggatagctggataaaaaaagaaaagttattaccgcctaagcctaagaaatacattaattctgatttgttttttccaccggagtacgcatag

SEQ ID NO: 84213 - DNA, 207 bp, Citrobacter koseri
atgcatttggttgaatcgaattattctaaaagactcactcgtaatgaggccgcagctcatcttggtgtgaacccccagacgttggcgaactgggcgcatactggcaaggtaaaaattccctttcataaggtcggtcggaaggtcatttacttcaagtctgatctggatgcttatctggattccacccgcagaacgcagacggtttaa

SEQ ID NO: 84214 - DNA, 243 bp, Citrobacter koseri
atggctggaatacagcatatccaaactcaccctaaatttacatggctattcctcggtataccgaaggggcagacctgcacgcctgtagttatccgcattgccgccgataccgaagaagaagcccgcgaatggtattcccgctgggatctaacctttgccgcgaagattcgctctgagtgctctctgtaccagtatgcaagcggcgtttacgaactgaatgtgatgggtgggcatcatggataa

SEQ ID NO: 84215 - DNA, 201 bp, Citrobacter koseri
atggataaccaaatccctatgctgaatgtctcactgcatgtctcccctaatttttccggtcgtattttgctttatgttgaaaatggtttagttaaaggagatacggtattacgtccggatgaaattataggtacgccatcactctttgatcacatccttgaacgcgctggttatcgcgtaacgccagtcaaaaaggactaa

SEQ ID NO: 84216 - DNA, 324 bp, Citrobacter koseri
atgaaaaagaaaattaacagcttaactgctggtggctctgctcgttctgaaatcgaacctcacagccgttggaaagattcttacggtgaaaaaatcactgtcatcggtacaactgaaagcagcattacctatgtgcgtgatggttattcccgtgagtgtgtgtgttcggagtatcgctttcgtaatgattttatttttttgcaggaagaaacagaaaaaagccagcttgtcgccagagaaaacgggcgtaaaaaaattgcggcgttgcgttctgcgttgcctctgagtgttggatctgacggatgggataaggggctgaaatga

SEQ ID NO: 84217 - DNA, 1410 bp, Citrobacter koseri
atgaaacgagcaccgaacttaaaatttctgccaaaggaaaaatttacagaggcgatcatttttgccgggactgatgcttacgctcatgcaaagggatgggaagaggggctgggtaaacaaattgccgaagatacaacgcctcctatctatctggggccaaagcaactggcggaactggataaccttcaaattgttgataaaggtcgccgtagcgcccgtgtatatattgccggagatattgagccgatactgattaacactattggtgagaagctggcgcgggccggagtgcaggacgccaaattgtataagggcattcccgaccatgagccggaggactggaaagaatatctttcccgtattcgggaacaggttgatgccactgtgcttgaggattcaatgctgcacagtctcccccttagcgtaggttctgatgggtatgatcaggaacaggactacaccctcaaaagctacctgccagcaaacagtctgagcagcatctatggccccagcggttcatacaagagttttctggccgtgtcgtgggcgtgccatattgctgccggggtgaaatgggctggaaaatctgtatcaggtggcgctgtgatgtacgtggtgggcgagggtggcattggtgtcccgcggcgtattaaagcctgggagaaaaaacacgggagaaagctggataacctgtatctggtcaaccgtccggttttcccggttcgtcgtgaggaaatgcaggaaatgatcaaagcggcacgtgatgttaaggccagaacggggcagccggtgcgcctgattgttgtcgatacgctggcgcggtgcttcggtggtaatgatgaaaacgatgctcgtgacatgggggcgtttattgagggctgtgacgttatcaagcgtgagacaggcgctactctgctggtggtgcatcattcaggtaaagacgataccaaaggtgcgcgaggttccagtgctttcagggcggcgcttgatgctgagttcaacatccggcgcgagggggacggtggggcgataatcctgacctgtacgaagatgaaagatgcggaggagccgaaacaggccgcattcgatttgcgacctgtagagcttttcacagatcgcgatggcgaactgatttcttcgctggtagtgcaggatctgccacgtgaagcgcgagaacctgatccggagttggctgatatcaagcatctgaccgggaatcacgctgcactctggcagtcaatccgcagccggaaagccaaaggtgaaccgtgtaatgtctctgtcatacgtgacgatattaccgccctgtttggagataacggccgcaaaggtttgaaacgttggctggataaactggttagggaaaatatcatctccatcgatgattcaggagatatcacgatgatttaa

SEQ ID NO: 84218 - DNA, 861 bp, Citrobacter koseri
ttgcgagagataattttctgtattttattattggtgggcagcggttgtttagcttggttttatacggatcctcagtatatatctaaaacaaaactccctaaaaaattaagaggggttaaaaaattagtggttatttatagtcgttacctatatagcggtgggcgttttagacggctgttatttgttctggttgttgtttcattgttttatgttttgtttacagattcctcaaaatataaattcattgagaacatggctttttcagttattgctgcgtttatttttgatacttttcttaactttcagaaagaacagttgcataagaccatggtttctagattttggcaatcttcttacaactcatgctatgaccgtgaaaaggtagtattagcattgtatagtgaaggtcgagcactaccaatgaagttgcagttgcatttacttcatagattgatttttatgtcgatcatttactcccaaaataacgtcacaaaaaaaaccatctcccttccatggagtagtaatggaaatggactgaaaatgatagatttacccaagggctttgtatttggggatcttctattagatttcataagagaagatgctaaatttataaactcattttatttggatgaaaaggttgcaacatcatttccaggtataaatgatttatctcgccggtttaacaattcatgtcttatagccttaagtatgattgagacaaaacttgggttagaaaatggatggaatggaaatgatgagactattaataaacagatgaaattatatttcagcgaacgtaagcaatttatgaagctttatgaaaagctgatttctaattatggagttgtagggtggtag

SEQ ID NO: 84219 - DNA, 204 bp, Citrobacter koseri
gtgacgaaacagaaagcaatgtcggtatacatcgatgatgaaaccactttgatgctcaatcggctacgtgaagaggttcgccagcgctatgagcttgaaggtattcccggtaatgcaccgaccattggctggcttgcccgttctctgctgcgtgaaaaattggggataactcctgcaaaaatcgacgcgcccggtgcgctgtaa

SEQ ID NO: 84220 - DNA, 1821 bp, Citrobacter koseri
atggaaatatcactgtatgaaccgatagaagggataacggcgaaacgcttccgtgatgccctgcaggtggcacaaggcccggtaacagtcgcaatcaatagcggtggcggaaacgttactgacggaatggcgatttttaacgccttacgcggttacaaaggccatacggttgcccgcattgatggtattgccgcatcaatggcgaccatcgttgcacttggagctaaacgcgtcgctatggccgataacggctggtggatggttcacaatccgtggggagtgatggcgggtgaggccggggatatgcaacgtcatgcggaagtgctggaaaaaatcggtaaaacgatgctggccacctatgtagctaaatccggtcttcccgagtcagaagtaaaggccatgatggatgctgaaacctggttaacggcagcggaggcaaaagaaaaaggttttgtggatgaaatctacccggcagaagggcagatgttcgcgatggcgccgggctgtgattcgctggtggcaaaatttacccgaacgccggaacaactgcgtgaagcgatgaagaccaccagccagccagaaaacacagagcagaaagcagacgttctttttgctgcttttgcggggcatgagtgggccgccggtatccgggctgagtttgtgagcggctgcatcaccgaggcgcaggccagacaaaaaattctaaccaatctggctgcgggaacgacaccgtgtgccggaccaggagcatataacgtgtactcaggaaacgggaacattgtaggggactcagttaaggcggcattgctggcgcgtacagggctggaaaaagctgaaaaagataaccgctataacggttatacgctgcgggaactggcgcgagcttcgctggtggatcgtggtgtaagcggtataccgggcaatccgctgggtatggtcggaatggcgtttacacacagcagcagtgattttggtggcatcctggcagacgttgcgaataaatctctgttgaaaggctgggataactcgcctgaaacattccagcagtggacgaaaaaagggacgctgcctgatttcaaagtatcccatcgggctggtctggacggcttcaagtcgctgcgagaggttcgcccgggggctgaatataaatatgccacgacctcagatcgtagcgagccaattgctctcgcgacttacggcgaactattcagtatcgatcgccaggccatcattaacgatgatatgagtgccttaacgagcattcctcaaaaaatgggcgcggccgcaagccgtacggtcggggatctggtctatgccgtgttgttgggcaatcccaaaatgggcgatggcaaagcgattttcgatgcagcacataacaacctgatgaagattgcactggatatcccggggctgagtgccgggcgaaaagtgatgcgtatgcagaagaacggcgctggtgctgttcttaatatcccgccacgcttcctgctggtcccggttgaactggaggataaagccaatcaactgattcgttccacctcgttacctgaagcgcagaacagcggggtattcaacccgtataacgatgcgctgactgtaattactgagccgcggctggatgctgaaagtcttaaggcctggtacatgctggcgggacagggagaagacacaatcgaggtggcttatctggacggtattgaaacgccatacctggagcaacagcagggcttcaccgttgatggtgtaacgttcaaggtacgtatcgatgcgggagttgccccacttgactggcgcggcctggtgaagtcggaaggggcttaa

SEQ ID NO: 84221 - DNA, 147 bp, Citrobacter koseri
atgaattctggtggtaatcctttggcggtcttcgggccgccttttttacgggtcctcctggcgattatgtacaccgagggggcggcgacacgcggaaaacagctgatttttcgcattttatgcgtgcagcagcgacaggttaactaa

SEQ ID NO: 84222 - DNA, 483 bp, Citrobacter koseri
atgaaactgagtaaaacgcaggtaaatgttacgcaactggcggagctggtgggcatgaaccgaaaccttgttgcccggcgtctgcgtgatatggagctggctggcggtaatggtgaaaatctcaagttgtacgaactggggccagcgcttcaggtattactgacaccatcaatgaaagaaaatggtgagatgtcaccgcaggaccgaaaagcctggtatcagtcagaaaatgaaagactgaaatttgaagcagcctcacgggaattgattcctgtagaggaagtggtccgcgaatatgcctcacttgcgaaagcggtcgttatggtgctggaaacactgccagatattctggaacgcgactgtgctcttacaccaacagccgttacacgtgttcaagtcattattgacgatctaagggatgaaatggcgagaaaaatttccgaaagtgattcatgtgatgcttggccatctgcaaagagctaa

SEQ ID NO: 84223 - DNA, 420 bp, Citrobacter koseri
atgggatatgatgatggcttctctttgaaggttgcatgctatccagtctatgaaatgctctgtgggttagcgttagagttaattcttaaagctgttattgttcaaaaaaataaaccagttccaaatagccataatttaaatcacctagctagtattgctgatattaaaatcagcaagaaaatcgtggggttgctgaatttttatacagaagtgattgtctggtcgggtcgctatcctatccctcggaattgtgatgatgagaaactgacaaattattgggaattagtttcgaatacactgacagaacctgtagaaaatgtcgggactttgcaaattcgtcgtggcaatggcgcatccgactgggataattttaatgagatttttactttagttatgaatgattttaagttcgatgtttaa

SEQ ID NO: 84224 - DNA, 150 bp, Citrobacter koseri
atgatcaacttcccgaagggctcagacctgctgtcagtgcgtgtaatggttttttctggcctgttcaccgcattgactaccggtggtattgcaccattggtagctctgctaagttcagtagccctaatgatccttctacgccacttatag

SEQ ID NO: 84225 - DNA, 246 bp, Citrobacter koseri; identical to SEQ ID NO: 72370

SEQ ID NO: 84226 - DNA, 552 bp, Citrobacter koseri
atgacagcacaccacttcacttttcaaatcacagatgaaagtgatgccagtgatatccgggaagtcgaaacccgcgcatttggcttcagcaaagaagccgatttagtggcgtctttacttgaagataaaagcgcgcaccctgcgttatcgctgctggcccgacatgaaggcaaagccgtcgggcatattttatttacccgggcgaccttcaaaggagaaatggattcacctctgatgcatatcctcgctcccctggcggtcataccggaataccaggggatgggcgtgggaggacggttgataagcactggcattgagcacctgaggttgatgggctgccagacggtatttgttctcggccacgccacctattaccccagacatggatttgagccctgtgccggagacaaaggctatccagctccttatcccatcccggaggaactcaaagcctgctggatgatgcaatcactcaccgctcagcccatgaacctgaccggccacatccagtgcgcgcaggccctgatgaaaccggagcactggcgtgaataa

SEQ ID NO: 84227 - DNA, 609 bp, Citrobacter koseri
atgaaagttacatggaccgtcacgcctgtggggtatcagcgcatcgcgaaacgatgcccttcatgcaacattaaacgggacttcacgccgtcaggtgcatttcgggttaattcgcaaaagaaggtgctggacgtgtggagtatctataaatgcacacactgtgattacacctggaatatctccctgttttcgcgtctgcacgttagcaaaattgaccgccagctttatcatcggctaatgacaaacgatgccgccacggtacagcactttgcaagtgatatcgcgatgctgaagcggaacaacgcagagctatcgggtcggcctgattttcacattcaggagcgctggccggtaagcatcactgcccaccagcgggtccgcgttagtgtcaggatttcccgttcatttcaggtcagcttgttgtcgattttgaagcagcagctcatgctgagcgctggtgaaattcagagaagggttgcagcagggcatataagtggcgttacgctgaagttgcttaaatcgagaaagctgaaggccgcggaatataaattccagctgtctgcggaaacgctgttcgcccggcgcaagatcgttctgacgcgtcgttaa

SEQ ID NO: 84228 - DNA, 996 bp, Citrobacter koseri
atggcgtctttaaaagatgtggccagagtggccaacgtatcgctaatgaccgtgtcgcgggtgcttaacgatccgaaacgcgtgaagcctgaaaccctgtccagggtgcaggaggctatcttacagctaaactatgtgccggacctctctgcccggcaggttcgtcgcgtcggctccaggaataaaacgattggcgtgcttgcgctggataccgtcactaccccgttttcggttgagataacgttgtctatcgaggaaacggcccgcgcgtatggctggaatagcttcgtggttaacatgtttaccgatgataatcctgacgatattgtcgacctgctgctcgcgcacaggcccggggggatcattttcaccaccatgggactgcgcgaggtgaacatctcgcccagattactggagcacccctgcgtgctggccaactgcgagaacacgggagaaccggttgccagctatattcctgacgatgaacaagggcagtataccgcagtacaggcgctgttagcggcgggataccgccgccccctttgcctgcatttacctgtcaatcatctggcgacgcttcgccgccgtaaggggctggaccgcgcctgccgggaagccaatatcaatcccgatacgcttgagcactgctatatgcagtatggcgatgagcactaccgtgatattcctgacattttgctggcgtatctggagcgggggcagccgcagtttgattcggtgatctgtggtaatgaccgcattgcgtttatggtctatcagacgctgttgacgcgagggatccgcatcccacaggatattgcggttcttgggtacgacaacctcgtagggatcggtaatttgtttttacctccgctatccacggtccagcttccgcactatgagattgggcgcttaagtacgctgcacattattaacggcgaaagccaccgtgagaaagttttggtcgatagtccccggctgctgcgagaatcattttga

SEQ ID NO: 84229 - DNA, 1239 bp, Citrobacter koseri
atgaaaaaaaggccttcccaaagctatctgctgcttagcgctctgctgttctttttctttgtgacctggtcctcatcaagctcactcctttccatctggctgcatcaggaagtggggctgaaagcgtcggaaaccggcattatcttttccgtgttatccgcatccgcgctcttcgctcaggtttgctatggctttattcaggaccggcttggcctgcgtaaacatttgctctggtgcattacggcgctgctcattctctccggccccgcctacctgctttttagctatttgctgagcgttaatattctgctaggcagcgtattcggcggcttgtttatcgggctgacctttaacggcggcatcggcgttctggagtcctataccgagcgcgttgcgcggcagagtacctttgagtttggtcgggcccgcatgtgggggtcgctgggctgggctgtcgccacgttttttgccgggctgctgtttaatatcaaccctgaccttaactttctggtggcctcttgctcagggggcattttcttctgcctgctggcccgcttaaagatcgcggctccggcaagcatggaaaagcttgagataggcgctaaaaaggtctcccttgatgatgccctgcgtctgctcactctgccgcgcttctgggcgctaatattcttcgtggtcggcacctgtatttacggcgtctacgatcagcaattcccggtctacttctcttcacagttcccgacgctgaaagaaggcaacgagatgttcggctacctgaactccttccaggtctttctggaggccgcgggcatgttttgcgcgccctggctggttaaccgcgttggcgccaaaaatggcctgatattcgcagggatggtaatggcgctgcgcatgatcgcttccgggctggtggaagggccgctgctcatttcgattaccaagctgctccacgccgtcgaactgccgatactgctggtcgccatttttaaatacaacagcctgaacttcgacaagcgcctgtcctccaccatttatctggtgggattcgcctgcaccagctcaattattggcaccgtattatccccgctggcgggctttagctatgagaagtttggcttcgcccagtcctatctgatcatgggcattatggtgttctgcaccacgtttatttccattttcctattgcgctcaaataggtcctcatctgagccaacctttctgcagcaaaaagctgtgtaa

SEQ ID NO: 84230 - DNA, 1437 bp, Citrobacter koseri
atgacatccttattagaactggctgaacggacgcttgaaaaagcacaacccgctattaattcgcgctggtatccgcgctatcaccttgccgctcgcgcaggctggatgaacgatccaaacggcctggtatggtttgacggttggtatcacgcgttttatcaacatcacccttattcccctgaatgggggccgatgcactgggggcatgcccgcagcaaggatctggtgcactgggaacatctgccggtcgcgctggctcccgaaggcccggcggataaagacggctgcttctccggctccgccgtagtggacggcgataccctggcgctgatttataccggacataagtttcacggttcgccagacaccgacgacaatctctaccaggtgcagtgtctggcaaccagccgtgacggcattcattttgaacggcatggactggtgattgataccccgccagggctgcaccattttcgcgatccgaaggtgtggcgcgaaggtgagttctggtacatggttgtcggttcccgcgtggagaataccggccaggtgcgcctgtaccgctccaccgatctccgcgaatggcacgacgaaggcgtgtttgccgaggccgaagacggcaagggttttatgtgggaatgcccggatttctttaccctgggagggacgcgcgtcctgatgttctccccacagggcatggcggcggaagggtatcaccatcgcaacctcttccagagtggctacctgctcggggagtggcagccaggccaaccgtttagccataacggacagtttattgagctggaccacggccacgacttttatgctccgcaaagtttcctgaccccggatggccgccgcatcgtcatcggctggctggatatgtgggaatcgccgatgccagaacggcaggatggctgggccggtatgctctctctgccgcgcgaattaagccttaccgacgatcgtcgtctgaggatgaagcccgccgaggaggtcaccgccctgcgcggcagctattatccgacgccggttcgctgcctgaataatcagcaagtccccgtcgcggcagatgccgaagcggtcgaagtgcagctggtatgggacctgagcgcctctacggccgaacggttcggcatggcattgggcgacgggctgagaatatatgtcgacgatcaggcgaggcgtctggtggtggagcgtcgctatccggagtattcgcttgaaggcacgcgcagcattccgctgccagcggataacctactgtcactgcgcatctttattgaccgctcatcagtggaggtttttgttaacgatggcgaagcttgcttaagcagccgaatttatccgcagccgggccagcgcgatatttcactgtttgccagtcatggcgccgcctcattacatgacgccggatactggtctctgaagagataa

SEQ ID NO: 84231 - DNA, 1278 bp, Citrobacter koseri
atggataaaatattaacgcctcactgtcgcattaaagcaataaataaaaatatgttcgcttctggaaaacaaacattggcattgatgctgtcattatccgcattttctgccatcgctgaagaaaccaacggccagccaggaagctatacgggcagctatcaaagctatttccaggatgagcctgaagttcaggaaaagccttcattgcctgtacaaaagggaaatgcgcaatcgtcccttagtgcttcttcgtcccctgttgctgcgggagctgcggctgaatctatgaagtcgacaacgctacccgaggtaacgcagaataaatcagccggggtaacaaaaaatcgtaaagcggataatcctgaggacgtcagcctactgcgcttaaggcaggaagacccgcccgttcattggaacagtatcggccgtaacatggaggctggcggcctgcacggcaacatcggcacgcaaatagaaattgacgacgtgcgctggagtaataataagaaaaatagcggtaaattcaaactcgctaccattcaggcatttttaagacacgatgagctgcccaactggtattttggcttctggaacgcgagggaagacagctataaaggtcaattcagcaatcaggactacggcggcaccaatacgatcaatgagttttttgttggccatatctttgaaacctggcggggtaatatcgggacggaagttatggtcggctccgaaacggcaactaaacgctggaaaaaccgcttcaaagtctggcaggacatccgcctgaccaacaaatggagcctggccgggtacgcttacggcgaattccagccccaggggaatgagccgggaaatggcgatcttgaacagtacattttcgaaattgagccagccattcaataccgcgtgaatccggatctcggcctgtatttacgaccatattattactataaccgtcaggagcgtcaaagctggggcgatattgttgaagaagaatggaaaatcaccgctgggctctggcgaaactggtatccgctgttaacctctctgtattttggcgtcgggcaggacaaaatagataatgccagcaatgccaaagaagttttttatgacggccgatataaatttattggcggcacccttagctatccgatttatggcgaagtgcgattatatggtgaattcaaagcgcagttcactaaagaaaccggactctggacatctaccgggcactcatggaatccctttaccgtagttggcgtgaattataacttctaa

SEQ ID NO: 84232 - DNA, 1494 bp, Citrobacter koseri
atgaaaaaattaacgctagcggcatcggtcgctctgctggtgctttcgtttgcaaatatgccagcctggtcgcagccgtctaaagaaacattacaaaataaaagcattagccatattaaagattttttcccacgggtcgaaggctcctttgttggcgacccgatgccggtctataacgacggtgaatttgatattttttatctgaacgatatccgcggcggcagcgacctcggggtacacgccatacatctgctgtcgagcagcaacttatatgattatcaaaaccattcggaagtgattccctacgttaacgacgtggacgatcctgaactgctgctgggaaccggttcaatgattaaagtcggcgatacttggcatgcctggtacaccgcacacaatgaaaacgtgttcccggttgaatcgataatgcacgccaccagtaaagatcgccttcactgggtaaaacatccgcagaatactattctaccgggcgctagctaccgggggaatgacttccgggatccccatgtcgtttgggttgaagaaaagaaagaatactggatgttaattaccacccgcagcaacgggcgcggggtgattgcccgctatagctcaaccgatttggaaaactggcaggaccgcggcgtattttttgataacgacaccattaccagcaatgccaacctcgaatgcccgacgctagtcttcttcaacggacgctggtatctcagctttagcgaccaatggccgttgcgcctgacccagtaccgggtcgccgacaatccggaaggaccgtggcaaaaaatggataactatgtggtcgatggatcgggtttttacgcgggaaaactggcgcttaaaaacgatcgcctgtttgtcttcggctggatcccgaccaaagcgggcacccgggacggcggcaatgttgactgggcaggaaatctggttgcccatgagctcaccgcagacagcaacgggcggctcaacagcatccttccccaggagcttcgcacggtgataaataacaaccctggtccggtaacccccttaacgagcagtaaaacactaaacatagcaacgcagttcggcccgctgcagtcatctgtctatccgccattgcccaaaaaaggagagctaagcgcgacgatagacgttccctctgcgggaatggtgatgagctttggtctgaccgacgacagggtggctgacgcaacgctcaacgttgtgttcaacaggagcaaggggaaggtttattttttcaacgctccgctgacgtcgattcaccaggccaacgctgaatcctgggtggatgttccgctcgatgaaaaacttgagctacgcgtcctgatccaggactcgattgccgtcttttatatcaacgataaggcggcattcagcacccggatgtattccatgcagaacaagccatggagcattagcctgcctcaaaacgataattttcacgcgacgctgaaaataaaagaaatgatttaa

SEQ ID NO: 84233 - DNA, 1014 bp, Citrobacter koseri
atgaaaaaccatcatgccctgactgttatttttgctcttctgtttccggcgctggcgaatgcaagtatgagcatcatgaaggatttgtcgggaaaggttgttgccgtggatccgtggtcatatctggatgaggatgtgatgtggacctcagcccgctcctctaatcctaccggtggccgcgttcacggacagctgaaaatgaaatatgccatcgaggataataactggcgtaacagccatttccatagcgggaaggattcactgacttttgtgcagggggttatgcatcacgatgcgttacccggctggtatctggctttctctgagggcagaaccaccaactataacgggacgtgggaagatcagacttacctcagccagaatcagtggacccagttgattatcggccatgaatatttctacaagcggctgcgctacggctgggatgttatgggcggaagctcgtcaattgaggaccgctggcaggggcgcatcaagctgtttaccgatctgcgcgtcacggacagcctttccttctttaactacctgtaccagcaggttgaccaccgccgcagcggcggttcacaaaatgaccgtgacgtgcgttcatttcagattgaacccggtgttcaatacattatcaacaacaccaccggggtctggttccgccagcagttcgcttccgccattttagaccgggcgcagtggggcgatatcgacgaaaaaagctggagcacctcattcggcgtctggcacaactgggggaggctatccacaacgctcagcggcgggtacgggcattataagaaagataatgcccagcccgaggatggcgaagtattccagaatacccgcaatcgctacctgaaggtgtcagcgaattatcctctgacctcccgcttcacggtgtccggggaagttaccggctcgttgataaagcagagcggaagctgggtcactaacggcgatgccatcgctaccgattataaggtgatgctggattataacttttaa

SEQ ID NO: 84234 - DNA, 951 bp, Citrobacter koseri
atgaatatctggacgcttggcgatgcggtggtcgatcttctacccctttcagacatgcagtatcaggcctgtgcaggaggagccccgttcaacgttgcggtcggtaccgcacgcttacgcagccagagcggttttatcggccgggtcggtgacgacgactttggtcattttttaaaaacaacgctgtctgattcaggcgtctcaaccgcaggccttcagatggatagccagtacagaaccagcacggtgctggtctcgctcaacggtgatggagagcgcgggtttacgtttttaaccaatccttccgcggatcagtttttaacgcccgacggacttccagaatttaacgacgatattctgcacttttgctcgctggcgctggtcgccgaagtttgccgcactacgttagccaccgctatcggcaaagttaagcagcgtgggggattgctgagttttgatgtgaatttacgcgagcaaatgtggctcgataagcgtcaaatgctcgatacggtgcgccaattttcctcacaggccgacattcttaaactctcggaggaagaatggtactggatgacgggcacgcacgattttacccgagctcttgacgcccttaaggcattccccgcgcagctaaaggtagtgacctacggcgcgcagggtgccatggtgctctggcgcgacggcgtcatccattttaacggttataccgtcgacagtgttgataccaccggggctggcgacgcttttgtcgccggtttgctggcctggattgcacaaaacgggatgccggagagctttgaacagctccaccaggccgttgctcaggccggtgcctgcggtgcccttgcgacaacccgcaaaggtgcgctgaccgctctgccggataccgacgcgcttgatgcttttattagccaattttctctgcccgactacgaggttaaaaacgtctaa

SEQ ID NO: 84235 - DNA, 312 bp, Citrobacter koseri
atgatagtcagaacaggacacggctgtgttccgctaaaacatgcgcaaggttttgcaaaacaccttgagaactcgggtgtggagcattccagtagcataccgggaaacagaggtgcattcgtgcgcagtgaaacccagggcgactggccgcatttctttctggcaaaatggtggcagggtctgcagtcgatcaaagaatttgccggagaaaactatcacatggcggtgacctacccggacgatgaagagtttgagctactttccgagccttacgtctttcaacatgttgtggagaccgtttcacccctttag

SEQ ID NO: 84236 - DNA, 360 bp, Citrobacter koseri
atgaacgacgcctcttctgacgacatccttctgctgaaacagcgccttgccgaacaggaagcactgaaccgtgccctgctggaaaagctggctgaccgcgaacgcgaaatagaccacctgcaggcgcagctggataaactccgccggatgaacttcggcagtcgttctgaaaaagtctcccgccgtatcgcacagatggaagcggacctgaaccggttgcagaaagaaagcgatacgctgaccggtcgggcggatgacccgaccgtgcaacgcccgttgcgccagacccgtacccgcaaaccgttccccgaatcactcccccgtgacgaaaaacggctgctgccggtacccgagaaataa

SEQ ID NO: 84237 - DNA, 348 bp, Citrobacter koseri
atgatcccgttaccttccgggaccaaaatctggctggtcgccggcatcaccgacatgcgcaacggcttcaacgggctggctgcaaaagtgcagacggcactgaaagacgatccgatgtccggccacgtcttcatcttccggggccgcagcggcagccaggtaaaactgctgtggtctaccggagacgggctgtgccttctgaccaaaagactggaacgtgggcgcttcgcctggccgtcagcccgtgatggaaaagtgttcctgaccccggcgcaactggcaatgttgttggaaggcatcgactggcggcaacccaagcggttgctgacttccctgaccatgctgtag

SEQ ID NO: 84238 - DNA, 156 bp, Citrobacter koseri
atggcacagacttttactcataatttacttcatcctcgccactgtctgatcttacctggtctggtttggggctgctgtggcttctcgttcaacttccttacccggttttacatattctgggctctggccttggaaaaatatccagaccctttctga

SEQ ID NO: 84239 - DNA, 165 bp, Citrobacter koseri
atgtacacaaaatcatttcttgccctcaataacgctggtcgcctggccggtgccagaaccgcactacgctctcttgacgaacaatacatctaccatcattgcgggagtgtcctggtgctgcatgctgaggctgaactcccgtgggttgaatcgccacgggtttaa

SEQ ID NO: 84240 - DNA, 264 bp, Citrobacter koseri
atgccgcgcattcccgatggactgcttcaggtctcaccacatccattttctcagaccggccagactggttgccgctccatttgtgacgacgacctgtgcgccttgtgcccacacattctttatcgtcccggtgaactcagcctgtgcagtttaagtatttctgaggggcactggccctcgtgctctgatgaggatggctacgcacagtcctgtccgtcacttcgtttcaacaacccacctgaaaatacaaaggaaatcaaatga

SEQ ID NO: 84241 - DNA, 228 bp, Citrobacter koseri
atgaaaatcatcagtaagcgccaggcgatggcgatataccgtcagcatccggcctcccgcatttttcgctactgcatcggcagataccagtggcatggctgtgtctgtcattacgtcggtcaggtaattcctgacattcccggcgtgctggcggtatacgccgaacgccgccaggaccgcaacgggccttatgcctgtctgaggagtatcaccctgaactcactataa

SEQ ID NO: 84242 - DNA, 324 bp, Citrobacter koseri
atgaaaactctacctgctacaatttcgcgggcggcgaagccttgtctgtcgcccattgcagtctggcaaatgttacttacacggctactggaaaaacactatggtctgactctgaacgatacacctttctgcgatgaaaccgttatacaggagcatatcaatgctggtatcactctggctaatgccgttaattttctggtggaaaaatacgaactggtccgtatcgatcacctatgggttaactggcacgaacaaacatcatatctcacaattatagatatcatgagggctcgtcgcgatctgggtttactgaattgtaattag

SEQ ID NO: 84243 - DNA, 255 bp, Citrobacter koseri
atggaaaagaataatgaagtcattcagactcatccgcttgtaggatgggacatcagcaccgttgacagctatgatgcgctgatgttgcgtttgcactaccagaccccgaatcgccctgaccttgatgggactgaagttggtcagacgctctggttaaccaccgatgttgccagacaatttatttcgatattagaagcaggcatcgccaaaattgaatctggcgattaccaggaaaatgagtatcgccgtcattaa

SEQ ID NO: 84244 - DNA, 627 bp, Citrobacter koseri
atgaaaaaggcagtgtttttatctctggtgggattgttgtctggcggcgcatttgctgccgaaggcgaacaaactgtttctttgggcttcattcaaatgaagtccgatgggctacgtaatgtttataaagacacagaaagtattgggaaagaatttacttcaccaagcggcgcaatgacttctgatggttatgatgatccgaaaggaatgtttattcgataccgatatgagttcgataatacatggggggttatcggttcattctcttatgcggttaatgatgggaaaattacggcaaattcaaactacggaagcgcgacagtaaaaataactggagaatatgcttctgcgctaggcgggccttctttaagggttaacgattacattagcttattttcattggctggtgtggcatataaacacgttaaacagaatattgatgcttatgcctcttatggcagtgggtcatcatctgtttcagaagataaatttaacttcgcatacagccttggtgcgcagttcaatgtttatgaaggtctggttattgatgccgcatatgaagcatcgccaggtaacagcgactggaaaaccagtggatttaccgtgggtcttggttatagattttaa

SEQ ID NO: 84245 - DNA, 360 bp, Citrobacter koseri
atggagggggcggggaagcccgcccttaattttatggatataaccccggaaatgttggcgcagataaagtctcatctgcgtgttgagggtgatgaagagaataccctgatcatggcttatgcacaggcatctgccgattatgcagaaaaatactgtgacggaaccctggttgaaacgttaactccaccatctgaagataagtttctaccgagagaaatcctgttcacccctggtatctgggctgcgatgctgcttatggttgggcactggtacaacaacagggaagcgtcagggcagaatctatcagaaattccgctgggtgttgacgatattttgtttttacaccggaggtggaactaa

SEQ ID NO: 84246 - DNA, 1161 bp, Citrobacter koseri
atgtcagaactcgctcaaattcagaaagcccttgaagagtcccagagcaaactacagggccttttcgacgaacagaaaaaacagatcgaacagaatggtactgtgtccaagcagttgcaggacgatatggcgaaggtcaacgatgaaatgaccaaaaccggtcagcgactgtttgatctggaacagcgcctctcttccggtccagaaaatccgggtgagaagaaatccttttctgagcgtgccgcggatgaactcaccaagtcgtggaacggcagcaagggtcactttgaagcaaaaacctttaataaatcactgggaagtgatgcaggttcagcaggtgtcctgattcagccgatgcaggtgccaggtatcatcatgcccggtcttcgccgcctgactattcgtgatctgcttgcacaagggcgtatttcaagtaattccctggaatatgttcgcgaagaggtattcaccaataatgcggcaagtgtggcagaaaaagcgctgaaaccggaatcggatatcactttcagcaaacagactgcaaccgtgaaaaccattgcccactgggtccaggcatcccgacaggtaatggatgatgctccaatgttgcagtcctatgtcaacaaccgtcttctgtacggccttgcgctggaggaagagcgtcagttgctgaacggcgatggtactggtgacgatctggaaggtatcaaccatgttgcaacggactacgatatctccctgaacgcgactggtgatacgcgtgccgacattatcgcgcatgccattttccaggtgacagaatccgagttcagcgcttccggtatcattctcaacccgcgtgactggcacaacatcgcgctgctgaaagacaacgaagggcgttatatcttcggtggcccacaggcattcaccagcaacattatgtgggggcttcctgtggttccgacccgcgcgcaggcgcagggtactttcactgtcggcggtttcgatatggcgtctcaggtatgggatcgtatggacgccactatcgaggtgagccgtgaggaccgcgataacttcgtaaaaaacatgctgactatcctgtgcgaagaacgcctggcactggcgcattatcgtcctgctgcgctcatcaaaggtactttcgccgagtccggcagctga

SEQ ID NO: 84247 - DNA, 672 bp, Citrobacter koseri
atgcctgacatcatcaaaacgctgtcattcgacgaaaccgaaatcaaatttgccggtgatggcaagcagggcatttttgagggctacgcctctgttttcggtaatacagactctgacggcgacatcatcctgcagggtgcctataaaagcacgcttgaaaagcagacccgaaaggtggcgatgttttttaaccaccgccagtgggagatcccggtcggtaaatgggactccattgaagaggacagcaaggggcttttcgtccgggggcagcttactcctggaaacagcgccgcgagtgacctgaaagcagccatgctgcatggcaccgttgagggtatgtctgtaggttttttagccacaaaagacgattacaccctcgctgccaatggtggccgcatcttcaaaaatatttcccgactgaaagagatcagtgtctgcactttcccggccaatgagctggcgggcgtggattcaatgaagagcattgacgggatagaaaccattcgtgacgttgaggtctggctgagggattcagttgggttgagcaagtcacaggcagtagggcttattgcccggtttaagtcggcaattcggagcgagtccgaagacggcgataacaaacccgatatcagcgctctgttgaagagcataagtaactttaacctgaattag

SEQ ID NO: 84248 - DNA, 1278 bp, Citrobacter koseri
atggacgagacaaattacagcattgatctgcgcacaaataacggctggtgggcgcggctggcgtcatggtttgtcggtggcaggctggtaacccctgagcagggatcgcaaaccggccccgtctccgccagtggtacgctgggcgactcgcagataacagatgagcgtatcctgcaaatttccacggtctggcgttgcgtatcgctgatttcgacgctcaccgcctgtctgccgctggatgtttttgaaaccgaccaggaggacaatcgaaaaaaagtcggtatcagtaatccgctggcacgcctgctgcgttattcacctaaccagtacatgaccgcgcaggaatttcgtgaagccatgaccatgcaactttgcttctatggcaatgcctacgcactgattgaacggaacagcgttggggatgtgatcagcttactgccgctcttatccgcaaatatggatgttcgcctggaaggtcggcgcattgtttaccgctatcagcgtgataccgaatatgcaaacttcagtcagcgggaaatatttcatctgaaagggtttggttttaacggtctggttggcctgtcacctattgcccacgcctgcaagtcggcaggggtggctgtggcgatggaggatcagcagcgtgatttttacgctaacggtgcaaaatcccccaaaatcctgactaccggcgaccgggtgctgacaaaagagcagcgcggccaactggaggaaaattttaaggagattgctggtggcccggtgaaaaaacgtctctggatcctggaggcgaactttcaggctcacgatattggtgtcagcccgcaggatgccgagacaatggcttcccgtaagtttcaggtcagtgaactggcgcgtttcttcggtgtccccccgcatttggtcggtgatgttgaaaagagtaccagttgggggactggcatcgaacagcagaatctgggtttccttcagtacacccttcagccgtatatctcacgctgggaaaacagcattcaacgctggcttctcagaccggagcaggttggtgtttatcacgctgagcataatcttgatggtctccttcgtggtgactcggcgtcgcgtgcggcgttcatgaaggcgatgggcgaagcgggattgcgaaccattaacgaaatgcgacgacttgataactatcctcctctgcctggtggtgacgtcgcaatgcgccaggcgcaatacgtaccgataaccgatctcggcaataacacagagccccgcagcaatgacggggcttaa

SEQ ID NO: 84249 - DNA, 1737 bp, Citrobacter koseri
atggtggagaaaaagaagaagacccgctcaaccagttcttcggttgaccccgccacacgatacgcgatggatgtggaatccggcagggaaattgccggacctgatatacgcaattcctgcaagcgtcaccttaaagatctggattcttgccatgcgcggggcctgcactgggacgcggcggcggcacagcgtgctatcgacttttttgcaaaagtgctgaagctcaatggtggtgagcatgaaggccagccctttaatttgttgccgtggcaatgcttcatcgtaggttcgatatttggctggaaaaattcagacgactatcgcagatatcgcatggcttatgtcgagtccgggaaaggttccgggaagtcaccgctggcagcgggtatagccctttactgtctggtcgcagacaaagagccgcgcgccgaagtgtatgccgctgcaacgaaaaaggaccaggctatgatcctgtttcgtgatgcggtggcaatggtggatcagtcaccggcgctggcgcagcgaatccacaaatcaggcggagccgggaaagagtggaaccttgcattcctgcaaactggctcattcttcaggcctattagttctgatgacggtcagtcaggtccgcgcccgcactgtgcgctgattgacgaaattcacgagcacaaaaacaaccaggtggttgaaatgatgcgcgccgggacgaaaggccggcggcaggcgctgattttcatgatcaccaacagcggccacgataaaaccagcgtctgttatgactaccacgagtacgggcgcaaggtcgctgaagggtctattgaggatgacagcttcttctcattcatctgctcacttgatgaaggggaagatcctttcaaggatgaatcctgctggaagaaggcgaatccgtcgctggggcacacatttaccgagcgctatctgcgtgagcaggttacacaggcccgtggcatgccatcgaaggagagcattgtccggcgcctgaatttctgccagtgggttgacgctgataacccctggatgagcagcgatgtctggatggggtgcgaagaagatttcgacctacaggaactgctgggggaggaatgttacggtggactggacctctccggtagccgtgaccttaccgcgctggcgctgttcttcccgaaaaagcggaaactgctggtggagttctggacaccaaaagacacgctggcagatcgcgcgaaaacagaccgggtgccgtatgacgcctgggagcgggacggatacatccataccacaccaggtaaagcggttaagtatggatttgttgctgaacgaatagccgacctttcccagatgtttttcatcaaggctgtcgcctttgaccagtaccgcatcaagtatcttgagccagaactggaggaagccgctgtttctgtgccgctgatccctcacggtcagggctattacaaagcgcaggagtcagggttgtggatgccacactctatcgagcttttcgaacagcggctggatgatggcgaaatcatcattaaaacaaatccctgtcttcgctggaacgcggcttctgctgtaactgaagccgatcagaaagaaaaccgcatatttgccaagaagaaaagtaccggccgtattgatggtgtggttgcttccgctatggcaataggcgcatccgaaggtgatgtcactgacgatggtgatattgacgacttcttctcacaaccgttgagcatgtga

SEQ ID NO: 84250 - DNA, 588 bp, Citrobacter koseri
gtggaaacacaagtgaagtttgtggttgtcggacaccattcacgacacaagcaggctttgtgtctggctgagtctatcggtgctgtcttgctaattgataacagtgaccgtggcgctaactggaatcaccgccgcgcgctggaatgggctgcctgccaaccctgtcgggtagtgattctggaagacgacgcgctacctgttgctggtttcactgatctggtgggtgagtggcttaaccgcttccctgattcactggtgagcttttatctgggcaccgggcgaccacctcagtaccagatgcagatagccgaacgactggtagtgtccgataagacgcaggccgactacatcacgctgccacgactgattcacggcgtctgttatagcgtgccgccacatcatattgaacgggttctggcgcgttgggacagctgcaaggctgctgattatgcagtaggtgacgcatatggttgccctgtggtctatccgtgttactcgctggttgatcatgccgacggtgaaccggtagagcgtcatccagacagaacaccgcgcacagaacgccgccgggcgtggaggctggcatga

SEQ ID NO: 84251 - DNA, 582 bp, Citrobacter koseri
atgaaaactaacagccacccggcacacggccctctctcaaattaccgcctgcaccgcatcagcgatattctcagaaaagccgcagcacaaagcgacggcggtaacatcggttacgcaatgtctgatgctgtgaaagcgattgatgaattgctggcttcgcggggcgctaagccgataggaatcaccgacagaagcgagattgaatgtctgaagcgaggcgaaatggctaacgttatgcctcccgattacaaaggagttgatgctggtgatgaggtttttgtctacaccgccccgccagcgccggtagcgatagacgagcgcgcggcattcaacgcatggaataacgaagacaatctccccatcgctggggttggtgcgaaaaacgctgcatggttagcatggcaggcccgggccaagttgggtagcccgccagcgccgatagataatgataatttgcgcgaagcggtaagtgatttacttgcggctctggacgaataccctgaacagctcgtaccgattaacagaaagtcattcctggttagaaccatccgcgccgcaatgcttcagggggataaatcgtga

SEQ ID NO: 84252 - DNA, 495 bp, Citrobacter koseri
atggcagagcacgttgaaggggttaactatctttctctcgaggatattgtttatatcaacaaggcgctgatcgagacgcagactcctaacgagcctatagctgtactgaatcctaataacctcagctcttcgcaatccagaccaagcaccattagatattacgagcagacagacgacatgtttcgcctgtctgctgtgctgatcgaaagtcttatccaaaatcatccgtttgcgaatgctaacaaacgaaccgctatgatggctggttacgtttttctgttgcttaatgggtatgaactcacagcgccaggtgatgagattgtgactatagcagaagggttagcacgtaaagattactcggtagaggatctggaaaattggctctgccactggtctcgcgagtacgattcacgatctttatgcacagcaagagccagccagattcatactctggtggccgcatcgcattacatacgaatcatatctgatgactaa

SEQ ID NO: 84253 - DNA, 180 bp, Citrobacter koseri
atgggtcacgcattgaaaaaggcagatcgcttgtacattccgcctcgtgacaagtccacggtggcgaaacctcgtgcagcgatcagcgaatcatgtacacataccgaacaggtaaaaaatgccttcgagtttggttttgctcgctatgagaaggcaatggaagagctttctaaggtctga

SEQ ID NO: 84254 - DNA, 756 bp, Citrobacter koseri
gtgctggcgagcctcggtgggctgacttcctatgcggcaacggttcatctcaaagagcaggtaaacgccatgcaattagttgaaatcaagaaactcgacctagtcaccaacactgtagccatcgccgaaggtgttgggcgagatcatgacaccatcattaagctggtcgaccgaaacaaaagtgacctcgaggagtttggaagggtcggatttgaaatccgcaccttggatacgaagggcggtagacagaagcaaagggtcgcattgctaaatgaacagcagactactttgttgatcacctacatgcgaaacaacgaagtggtccggtcgtttaaaaagcggctggtcgctgagttcttcactatgcgtagcgcgctggcgaagaagaaaattgatcgcaactctgcacgcctggaatacaagccaatgaccgacgctatcaagcatgagcgggaggcgcagggtaagcaaattgcgccgcatcacttcagcaatgaagccgacctaattaaccgccttgcgttgggcatgacagcagccaagttccgtgtgcatcacgaaattggaaagaaagaaccgatccgcgattaccttacgccggagcagattcactgcatcacggagctacagcgcgctaacaccgtattcatcagcatgggctgggatttcgaacaacggaaagaagttcttcgcggtatgttcgaccgcaatcaccgtaagccgcttatcgaagaacagcaccgattggcagcctaa

SEQ ID NO: 84255 - DNA, 462 bp, Citrobacter koseri
atgagcaggttaaccgcaaccatcatcgctgtggtcgcatgcatcatcgtatctcttggctgggccgttaatcactaccgcgacaacgccaccgaatacaagaagcagcgcgatgagaaaattcaggcgctgaatctggctaatgccaccatcaccgacatgcagacccgccagcgtgatgtcgctgcactggatgccaaatacaccggagaactggctgatgctaaagctgaaaacgacaggcttcgttctgatgttgtcgctggcaagcgtcagttgcagctcaaagcaacctgtacagcaagcagagcgtccagcacctccggcatggatgatgagtccagcccccgacttacagcagatgctgaactcaattattggcgtctcagagacggaatcgacacagtcaccaagcaactgagcggattgcagcagtacgttcgcgaacagtgcctgaaatga

SEQ ID NO: 84256 - DNA, 627 bp, Citrobacter koseri
atgcgtaagccaacccgtcgtaagtgcaaagtatgcaatgagtggttcatcccggcatacgacaacattcgctggtgctgccctgagcatggcgctatttacgcaatggatctgcgcgctaaggagaaggtgaaagcagaagcgaaacgcatcaaggaaaaacacgaagccgagaaagccgatcgcaagcgtctgcgcgagcgtcgcattgcgttgaagacgaaacctcaatggagaaaagaagcccaggacgcttttaaccgttatgtacgtctgcgcgacgctggtaagccctgcatcagttgcgggcgcatgcctgagcagaagtttggcggaactatggactgcggacattaccgcactcgcggatctgctgctcatctggcattcaatctgcacaacactgctgcacagtgtgtctactgcaatcgcgacagggacggcgcacagaaagctttcgaacaaggcctcattgttcgcattggtgccgaaaaggttgaagctctgaacaacgataactcgatccgcaaattcgatatcccataccttcagcgcatcaaatccatcttcacacgtaaagcccgcgcgctggagaagcgccgcactagcagacaggaggcagcatga

SEQ ID NO: 84257 - DNA, 675 bp, Citrobacter koseri
atgattttcagcatgatgacgccgccctacgctgtcagcgataaccacacagacgagttcaacgaattgcgtaataaagtcttttacgctctgcgtgatgctcagaacgatgaacatgtaagtaatcgtgatgagttgccgttggactatctgcaagggcataaagacggcttagagtgggcggcgcaactgtcagaggccaaccatccgcaaacaggtgactggttatacgatgacccgatagcgttggctgcggctattcgaaaggggcctgatatgcctgaattaaagtcagcatttgctgatgaggatgacaatttctactcatggtttggcagattctggctcgaaaattaccagcaaaataattacacaacatctgcaaaacagatgcttggtacgatggctgagtttgcatttagagcagggagggagtcagctactcaagctggcaactctccggtgattccggatggttggataaaatgcaccgatcgaatgccggatgagggtgcttacatttcagcggtatcacggcatggtgaatacgtggcgggacaagttagcgatagttggcttgatttgcatgatggaacatcattcagcgttaatgaagtgtatctatggatgccgttacctccactgccagcagcaccgctgcaggaggtgaagtga

SEQ ID NO: 84258 - DNA, 708 bp, Citrobacter koseri
ttgaccactattaccagagaacgagtttcagaaattattcacgccgctgggcttgagccatgcgattacgaagaagtatttggctcgattaaaaccggtgaaattgttgctatggcacgtatcgcgctggcatcgctcgaagcggagcctgttggttatttctatgcagataaaccaggcgattggtatcaactttcagatggcgacagagtgccaagccaccgtcgtataccgctatacgctaatccgcagtcatcgtcagtagtgaaactaccgaatgaattcatcagcagtgagggtatcgttgttcagatagaaaagttgatggctgtgttagctgtgcatggaattcagtatgagcgcaaaggtaacgcctgccgcgccgccatgctcaaccattccggtgatgtcaccgaaatgggggaagccatcaagcaaccgtcagacaatgccagctctctggtattcgttgacgaaattgcagaacagaacggtgtagaccctgccatcactgacgtatacatgcagggatatcacgacagcgaggtgcggaagtcatctccggtagctaatgatgatttgcgcgaagcggtaagtgatttacttgcggctctggacgaataccctgaacagctcgtaccgattaacagaaagtcattcctggttagaaccatccgcgccgcaatgcttcagggggataaatcgtga

SEQ ID NO: 84259 - DNA, 228 bp, Citrobacter koseri
atgaccactattaccagattgtccaccctcatagttatgtttgttattccggctgctatggcgacggaaaatcctcattgtgttgcggcaaccgatggctacaacgtgactaccgttcagtgcgataacggaaccgtgaccataaccagcggcgctaaaaaaacagcagtggtgtgtaaccagggctatgacggtgtagcgccacaatgtacggaggtgaaactttga

SEQ ID NO: 84260 - DNA, 432 bp, Citrobacter koseri
atgaacaatatcgacaaacgcgcattgcgtgaagctgcggatagcgttatccagaaatacggtagtgaatggtttgaaacagggcgtcaactttgcactgtccacaagtcaaagatagagcttatcgccgctgctaatcccgccatcgtgctggcgctgctggatgagctggaagccaaagactcaaccatctctactcagcagcaggaaatacgtaaactgcttaatgctctagagcaagcaacggagaagcgaaactctgacattcctggtcagaaacgactgattgggtggcgggcatcagattacaccgatgagacatcagaccctgagttagctaaaaactgggctgctgctattggtgtgctgcctatttttgaaggcgacgtgaataccaaacttgccgccgctggcatcagtgagggggagtga

SEQ ID NO: 84261 - DNA, 498 bp, Citrobacter koseri
atgagcaacatagagaaattagcaaaagaaaatgggatgacagttgaattcgtgaactggtttttcgaaaccaagaaggatggctgcgggaatgtctggttcatgatgatggcagccatgtgggaaggctggaaatctcaggaagcaagatgccgggcgctggctgcggagaatgcgcatatgcagcaggtaataggagaggtgcaaatactctactacgaatcagatgggatcgttggttatcacctgaatggtgaggtagcgaagtgggatgacgtgatgcctgatttatgggcagaaaccccggcgaccgacgctttcctggctgaagtgcgggctcatgaccttaacgctttcatccagcatcacagcacagaactggatgcgcatattaaaaacggtggtgagcagttcgacgaaaaatcagtacgcatcagagacactatcgtctcagcccgcttgttcagggagcaacttcgcaaaggagtgcagtcatga

SEQ ID NO: 84262 - DNA, 1434 bp, Citrobacter koseri
gtgagcactgaaatcatgaccgtacctcacaatctcgaagcagagcagagtgttattggcggcctgctgctggacgacgacaacagtgagcgagtgcaaaaggtgctttccatcctgaagccggaatcattctacgtgcgggcacatcaggtgctgtttgctgaaatgcgtgaaatgttccgcgacaacaaacctgttgatggtctgacgttgttcgacgtgctggaaagcaaaggcctgacggtgcaggttggtggatttgcataccttgccgaaatcgccaagaacacgccgagcgctgcaaatatcgtggcctatgccatgtccgttcgtgaagctgcaatggaacgctacggtatccagcgtatgaccgaagcgacagagttgctctatgcacgcaacggcatgaccgccacgcagaagtacgaggccattcagggtattttcacccagctcgcagaccattcaaaaaccggcagccgccgagggttgagatcgtttggtgaggttatggatgactgggtagcagatctggagaaacgctttgacccttcaggcgaacagcgcggcatgagcaccggcatcccgtcactcgaccggctgctggcgccgaaaggtctggttaaaggctctctgttcgtgattggcgcaaggccaaagatgggcaagacaaccctgtacggtcagatggcgatcaactgcgcggttcgtgagaaaaagccagcgctgatgttcagcctcgaaatgccgggcgaccagatcctcgaaaaactggttggtcagaagtctggagttaacccgagcattttttacatgccagccacggatgactccgatgaccagtaccagggcgattacgacggcgactttaagaaggcgatcgccaccgccgggcgattgagtgaaatcgacatgctgtacatcgacgatactcctggcctgtcactggcgcacatcgttagcgaaagccgccgaatcaagcgcgagaagggctgcgtaggaatgattctggttgactacctgactctgatgaccgccgaaaaagccgaccgtaatgacctggcctacgggatgatcaccaaaggtctgaagaatctcgccaaagagcttggctgcgtcgtcgtgctgctgacccagctcaaccgcgaactggagaagcgagtgaataaacgcccgttgccgagcgattcccgcgacacagggcagattgagcaggactgcgactactgggttggtatccaccgggaaggtgctttcgatgacagcgtgccgccgggagaaactgagttaatcctgcgactcaaccgccacggcagtaccggaacggtttattgcaatcagatcaacggggcaatttacgacacagaccagcatgcagccgccgcagaacgccgcgggcgcgagcagcagccgaaaaagaaagggggattctga

SEQ ID NO: 84263 - DNA, 543 bp, Citrobacter koseri
atgcattcacttgcgtttcaacacaataccggaatacacccgggagcggtgataaaccgcgctcaacctaaggcggcaccagaccacgaaaagatccgcgatgcggtccgggcatggtcgtcggcgctggataatcaggacgtggtgtcagcgctgatcatcaacgaataccgggagcggggcgggaccgccatcagcttcccggaagacatcagccgggcgcgccagaagctctttcgctttctggataatcgtttcgactccgaacagtaccgccagaacgttcgccagctgacgccagcaatcatggccgtcctgccggttgagtatcgtactcgcctgataggtgccgattgcaaaatgtctcgcctggctgaagccgagaaagaactcgcagaggctaaacaggccgtgctgctggacgctccagagcatcagaagctgaaagaggtgagcgagggtatagcgtcgctcttccgcctcatgccggagcaggtaggaccgctgatgacgatggttacgtcgatgctgggggttatgtga

SEQ ID NO: 84264 - DNA, 222 bp, Citrobacter koseri
atgatcaacaaaaaatccaacgccagcaccccgcttgagaaagccattaatgcagtgggcggctctcaaaaggtgcttgctgaaaaggtcggcgtaacgccacaggccatcaatatgcttaaaaagcgaggtggcagccttccagtaacaaaaatgcgtaagtacgaagaagtaacgggacttcctcgcgaagttctatatccaggtatctttgccgcctaa

SEQ ID NO: 84265 - DNA, 711 bp, Citrobacter koseri
atgagtagcatttctgaaagaattaaatttttactggcaagggaaggcttgaagcagcgggatttggctgaggctttgtcgactagcccacagaccgtcaacaactggataaaaagagacgcgttgagtcgtgaggcggcgcaacaaatatctgaaaaattcggttattctcttgactggttattaaatggagatggctctccaaagaaggatctggagagcaacatcccgccggagtctgagtggggagttgttgatgcatgggataaagacaccccgcttcctgttgatgaggttgaagtgccatttcttaaggatattgaatttgcgtgcggtgatggtcgagttcagtgcgaagaccacaatggatttaagctgagattttctaaggcaacgctcagaagagtgggtgcaaatagtgatggttctggagtactttgctttcccgcttctggtgacagcatggagcccgttattcctgacggcgcaacggtagcagtagatacaggcaacaagcggattattgacggcgaactctatgctattaaccagggcgatttaaagcgcataaagcagctttatcgaaagcctggtgggaagctattaataagaagcatcaatcgcgattatgacgatgaagaggctgaagagtccgatgtggagataatcgggtttgtattttggtattctgttttgcgatacagaagataa

SEQ ID NO: 84266 - DNA, 381 bp, Citrobacter koseri
atgaaaaaaatagctcttgcagtgattattgccacaggccttgttgggtgcgcctcttctggaaatcagcaactgaaaaacgaaactgaaaccagtgttcagacaaaaattcaggaaggaaaaaccaccaaggcagaagttaaatcctactttggatcacctgatgccgtttcatacactgatggcggcaatgagatttggaagtatgccttcgccaaagttaaagttaacggcactactttcataccgttctatgggcttttccataacggaacgaatggcaccaagaaagagctgaccattctcttcaaagatgacaaggtccagaaatacaccatggccgaatcagcgattaatacaaaatcaggatgggctgattaa

SEQ ID NO: 84267 - DNA, 183 bp, Citrobacter koseri
atgatggctcatgccgccgggcgtgcggtgatggagttatcgctggcggatctgcctgtaactcagcaagccatcatcgacaagctggagcagtaccgaaaagagaccggtaatgtgatcgggaaaggtattaacagagatgctgcggagatcgtaatgagtggcaggagagcgttaaagtga

SEQ ID NO: 84268 - DNA, 210 bp, Citrobacter koseri
atgaaatatacgcacaaaagtcattttggtttttcagcttctgtcaggagcacccaattgggaacaacacaagcacttggaactttccctaccgctgaacgggctaacatagcggctcggttatttaagtactgggagaaaagcttcccaaccgccgagatcccaagaaagcccacgcatgtagatgcgtttaatacctttggcttttaa

SEQ ID NO: 84269 - DNA, 249 bp, Citrobacter koseri
atgagcaacccaatcacagtaggtttttcaggtctgacgaagcgaattttcgcgggtcggtcaaagccaggcaaattggcgcccggcgttcgtcagttcactggcgagaagtttgatgtgacagacgaggctattttcgctgtagcacacctgatggttgctcgcgatgacataatcgtcatacctctgccgaatggcgacgagattcacctccgcgccgacatcaaagaaaagcgggaggcatcatga

SEQ ID NO: 84270 - DNA, 435 bp, Citrobacter koseri
atggaaatcaaaactccagcaaatccaagcaaaaaggcgacggccagggtaaagaatcctcttcccgcaccaactaattgtcacttgtgctctggttcagtgagaatcggcactcatgaagaagtctatggacgcaacttcagtgaatggccgtatgtatatctgtgcgaatgctgcggtgcatacgtcgggcttcatcctttcacagcgataccgcttgggactctggcagacaagcccacccgcgacgcgcgcaagagctgcaagttgccatttgaacgcatctggaagtcgggcgccatgacgcgcactgaagcttatcaatggctggccagaaagatgggtatacctgttcacgaatgccacttcggctggttcaccgtagagcaatgccaagctgcaatgcatcactgtaacgactggctaaaccgctaa

SEQ ID NO: 84271 - DNA, 969 bp, Citrobacter koseri
atgagcgaagtaacggacttaactgtcatcgaaatcaagccggagcaggcgccagtgctttacgtagcgggcggccttgacgcttacctcgagcaaatccgccaggcagtaaacgaagtgccggacctgtccacgaagaaaggccgtgaccgcgtcgcctctctggcggcacaggtgtcacgcagcaagacggcaatcgaaaagcctggccgtgagtacctgaagcgtttgaaagaggctgtgcgccctgctgaggctgaaattaagcgtttcgttgatgcctgtgacgagcttcgcgacgcaacccgccgcccactcaccgaatgggaagccgagcaggaacgcattaaggctgaagaagccatgaacgcgctgcacgccgaagcgctggtgatgaacgagaacatcgatttgcagcgtgcgattcagttcgaagcggaccacgaaatggccctgctgatgaataaggatttcgaccgtgaccgcgaagagcagcaccgccaggcggaacaggctcagcgtgaacatgaagagcgcattaagcgcgaagcggcagaacaagcccgccgcgatgccgaagcgaagcacaaagcggagattgaagccgcagcgcgccgcgaagctgaagagaaagcacgtgcagagttggctgaacgccagcgcgtcgaagcggagcagcgcgcggcacgtgagaaacaggaagcggaagagcgtgcacgacgcgaaaaagaagaagccgttgccgccgagcgccgccgcctggaagaggcagaagccgcccgtctggccgaagagaagcgcaaagctgaagcagaagcgcgccgcgccgcagataaggagcaccgccgcaccgtcaatcgtcgcgtcatcgccgacctgattaatcagggcatccctgaagaattcgcgcagaaagcactgctggcgattgctggcggcaaagtgcaggacgcgcacatcaaatattga

SEQ ID NO: 84272 - DNA, 198 bp, Citrobacter koseri
atgaatatcacatgcgagtgcgtggacatgcgcacatctgtcggcccccacaacaccatcaaagttgagatggaaggcgttgtgctggccggcaccgttaaaacccgtgacgtactaccccagctcgacggcgcagaagtcatcgagtggctggctgaacagggatacgtcatcactcatcaggagcgtgcagcatga

SEQ ID NO: 84273 - DNA, 159 bp, Citrobacter koseri
atgacggcagcagaacggtgggatgaagagtcattcctgcgacttatgcgcgacgtcctgccggaaaagccggaggaagataacgagccagttaacctggctgccgagcggcagaatccggtcattagctgggatgaatttgcaggagatttcacatga

SEQ ID NO: 84274 - DNA, 630 bp, Citrobacter koseri
atgaacgagaaaaaggtttacgcagcaatcagcggagtcgcttcggctcttgctgaaaagggtatcagcaaagaaaggaagcaagggagtcaggtcaattacgcgtttcgtggtatcgacgacatttacaacgcgctggccccggagttggtaaaaaacaaactcctgatcctaccccgctacaccgaacgcaccagcgtcgagcgaaccagcaaaaatggcggtgcgctgttctacatcacggttcgtggtgacttcgatttcgtcagcaccgaggacggcagcatccacaccgtcaccacctatggtgaagccatggatagcggcgacaaagccacgaataaggccatgtcgatagcatacaaatacgcggcgtttcaggcgttctgcataccaactgaagagacagcactcgatgctgatgctgaggtgcatcaggtagcgccgcaagatgctgagtctgcactgagagagtttggcgacaaagcacagctagctcagtcagtagaggaattgcagggagcatacaaagaggtatggcctaagttaggcggcgttaaagcatacgaagaacgcgcagcagagacatacaaaacgcgcggtcgagaacttcacaaacaggcggcttaa

SEQ ID NO: 84275 - DNA, 222 bp, Citrobacter koseri
atgaacaaatttacccccgaatatcgaaaacatcttctccggccaatccctgaccggaaacttagcccgcaagaacgcgccgatcgcaaagagctttaccagatcatccgtgaggagcgtgagaacgatacatcaccggaaaaaccatcgacttacaggccatgtgatccatatctgaatgacaaccgcaaaggtcttggcggtgcttcaaggagtgactaa

SEQ ID NO: 84276 - DNA, 867 bp, Citrobacter koseri
atgacaacaaaaaaatggggtcataacgagcttgctcatgaccttgcagagcatttgcgccagaacacagcgcgcatctgctgggaggatatgcagcttgggcccgccggaacgtgccgacctgatgtctactctattgctcacagctacagcaagttctgcccagtcgtctatgaggttaaagtcagcgtaggtgatttccgggctgacgttacagcaggcaaatacaccaaatacttcagctatgcaggtggcgttgtttttgcagttcctgaaggcatgctcaagaaaagcgacatcccagatggttgtggcttgatgatccggaaggaaactggatggcataccctcaaggggccgacaatgcgccagattgataacctacctcgcgacgcctggatgaagttgcttatggatggcatgacgcgacaggcagagagaacccaaataaaaagtcgcgtaatcaacacctacctaagcgaacaaaaacttatgaagcgacatggcagcgaaatcgccgatcttgtttgtcgagcgcatcggtcgaaggagcggcttgagcagcaggttagggataacgatgaaaggctgaagaacctgcgccaggaaagtgaggaggagatgcaacgccgacgtaagcgccgggaggaatcggaggaaaggttaaccgacgctcagcaaggtctggcgaaagcacttggcctcgacccgaatgtccctatgtatgttctgacaaggacgctatgggaagcaatgcgccgactgaccgaggatgaagagataaagaggttgcgaggaatattgtccaaccttgagcgcacgctgaatgatggtctgaaaccattacccggggagaacgccgcatga

SEQ ID NO: 84277 - DNA, 222 bp, Citrobacter koseri
atgacttctgaaatcatcgaccaggccagcgctctcgaagagatgatgtgcgaacaggctattgccgctcaccgcctcaaccacaacgcagtatcggcaacgcattgcgaagagtgcgatgaccagcttagcgatgagcgcaggaaggcttacccgggctgcacgatgtgcgtgagctgtcaggctgagcaggaattgcggaataagcagagggggatgtga

SEQ ID NO: 84278 - DNA, 372 bp, Citrobacter koseri
atgctgactctacaacactttctcgataaaccgacatgggctgcggctgacggctacaacttcaattatttcgactgcatggcgtatacggcagcgcaatatgactgcgtgtttctggcggttcgccgcgtggcggagaactttttagacacagagctgcgtgagctgccattcgtgcttttagttctatttgtcgcactcattggagtaatcgtctggcctcttacgttttggcttacggcaatatggatatggttacgatgtaagcaccatcgccaaaagtaccagcacggaaacggcatgacggatattgcccgcagtaatctcgataattggaagcggaggttcgagcgcgaacgaaaggttaagtga

SEQ ID NO: 84279 - DNA, 651 bp, Citrobacter koseri
atggttattggagaaaagcgatggaagttaactctgctggaggaattgccaaaagagaaaggtaacaagcttaaaggtaggtttttatgtgagtgtggaaatataaccacaacgagaatagatagagcaagttctggaattaccaaatcatgcggctgccttcgcagcgaattagcaataagcaatatgactaagcatggcatgcgtggaactgcagtttacagcacgtggtgcgcgatgattgctaggtgcagcaacccaaaaagccacgcgtttaaagactatggaggaagggggatttcagtttgtgaacgttggcattctttcgtcctgttctatgaggatatgggcgatcgtcctccaggaatgacaatcgacagaatagacaatgaacgtggatattcaccagataattgccgatgggctaccacatcagagcaagttcaaaatcaaagaaagcgcaaagggtgcacgtctcgttttaggggcgtgaatattactaactcaggaagctggcaagcacggataaccatcgacggcaagagaattaatctcggtcactttgatacagaagaagcagcgtacttggcctatgagaaggcacgaggcggcgcagatacgcgccgaactggagacgagcgagcacattaa

SEQ ID NO: 84280 - DNA, 327 bp, Citrobacter koseri
atgaaagtactgatagtttttgaaaatgtccccgaaactactgatctttttatcgttgaagcaaacgaagaagatttgaaggacttgcggctatcgcatggaaattacattaattcggtggataacgaggacattgagaatgcaatctcacgcgtaaaccttcgactcggatcgcccaatgactattcagcggaagcggcgactgagtgcggccttgctcaagaagaagtgggcaagtgggatggttcagctgtagatactggcgaaccgatccttgtttatgagggccgcatcgaaatggttgttgtgaccggattcatcatgtga

SEQ ID NO: 84281 - DNA, 789 bp, Citrobacter koseri
atgaaaaatctctcacgcataaacgacgatgcacgctggcagtcggtgctggatcgcgatcctgacgccgatggtcagtttgtttttgcggtacagaccaccggcatcttttgccgaccgtcctgtcgggcaaaacacgcgttgcggcaaaacgttcgtttctttgccagtgcggagcaggcgctggccgcaggattccgcccctgcaaacgctgccagccagacaaagacaacgcccgacagcatcagctggataaaatcacgcacgcctgccgtttactggaacaggatgcccccatcacgctggacgccctggcgcagcaggtggcaatgagcccatttcatctgcaccggttgttcaaagccacgacgggaatgacgccaaaagcctggcagcaatcctggcgcgcccgccgtctgcgcgatgcgctggcgaaaggagagacggtaacgcaggcgatcctgaacgccggttttcccgacagcggcagttactatcgcaaagcggatgagacgctcggcatgacggcgaagcagtttcgtaagggcggcgataatctccccgttcgctatgccctcgcggattgtgcgctgggacgctgcctggttgcggagagcgaggaatctgtgcgattttgctgggcgatgatgatgccgggcttattgccagcctgcatgaactgtttcccgccgcgcaggatgaacccgctgatcgccctttccagcagcgcgtgcgccaggttatcgccagtattaatgcacgcgatatgccgctgtcactgccgttag

SEQ ID NO: 84282 - DNA, 594 bp, Citrobacter koseri
atgccggatgtcgaactggtgcagaaaacattgggcgaaatgaacggtgacgcggatatccggggaagcggcaattcagtggcggcgctgttaggtaacagtaatggcaacctgaagttgctgatgaacgatggcgtgatcagccgcaacctgatggagattgtcggcctgaacgtgggtaactttattgtcgggcagatatttggcgacgatgaggtacgggtcaactgcgcggcggctaatcttgacatcgttaatggcgttgcgcgcccgcaaatctttgcttttgatacggaaaatgcgttggttaacgtcaccggaaccgcgagtttcgcctctgagcaactggatttaaccatcgatccagagagcaaagggattcgtattattacgctgcgttcgccgctgtatgtgcgcgggtcgtttaaaaacccgcaggcgggggtgaaagccgggccgctgatcgcgcgaggcgcggtcgctgcggcgctggcgacgttagtcacgccagccgccgcgcttctggcgttgatttccccgtcagaaggcgatgcgaatcagtgtcggacgattttgtcgcagatgaagaaatga

SEQ ID NO: 84283 - DNA, 1167 bp, Citrobacter koseri
atgccactaacagacatacaaattaaacgagcaaagccccaagacaagccctacacattgaacgatggacaaggcctgtcattactcatcaatccagacggctcaaagggctggcgcttccgctttcgctttgccggtaaagcacggctaatgtcatttggcagttacgaccttgtgagcctcgcagaagcacgtgagaaacgcgatacagctcgtaagcaggtagcaaacggcatagacccagtagaagaacgtaaagcccaaaagctggcgcagcaaatctcagcagagaactcattcgaagccatatgtcgagaatggcacaccaataaagctgaccgctggacagtagcctatcgcgaagaaatcattaagacatttgaacaagatgtgttcccgttcattggtaaacgccctatcagtgaaatcaaaccattagaactgcttgaagtattgcgacgaatagagaagcgtggagcactagagaagaccagaaaagtgcgccaaagatgcggcgaggtctatcgctatgcaatcataactggccgcgctgaatacaatcctgcacctgatttagccatcgctctggccgttcctaagcaaaaacatcatccatttctatctgccgaagaattgcctcattttattcgggatctcgaagcgtataccggtagcatcatcaccaaaaatgctacgaagatagtcatgctgactggtgtaagaacgcaggagatgcgctttgctacgtgggaagaagtagacctcgaaaaaggtatatgggagataccagcagaacgtatgaaaatgcgtaggcctcacattgttcctttatctactcaggtagttgacctttttaaacagcttaaacctattaccggccaatacccttacatctttattggcaggaacaaccgcagcaagccgatctcgaaagaaagcgtatcgcaagtgattgagttacttggttacaaaggacgtgctacaggccacggatttagacatactatgtctacgatattgcatgagcatggttttaatagtgctttaattgaaatgcagttagctcatgttgataaaaatagtatacgcggaacttacaatcatgctttatacattgagagaaggagagaaatgcttcaatggtatgcaagtaaattaggcctctga

SEQ ID NO: 84284 - DNA, 1623 bp, Citrobacter koseri
atggttatttttgatgaaaaacggcatttgtatgaagccttactgaggcacaattatttccctaaccaaaaaggttcaataagtgaaatacctccgtgcttttcttccagaacattcacgccggaaatagcagagctaatttcatctgatacatcagggcgcaggagtctacaaggttatgattgcgtggaatattacgccaccagatataataacttcccaagaacgctgtcaatcatccatccaaaagcgtactcaaagctagccaagcatatacatgataactgggaggaaatacggtttataaaagaaaatgaaaacagcatgatcaaaccagacatgcatgctgacggtcgcatcataatcatgaattatgaggacgcagaaactaaaaccataagagagctaaatgatggttttggacggcgatttaaagttaacgcagatatatcaggctgctttacaaatatctactcacactctatcccgtgggcagttataggggttaataatgcaaaaatagccttaaatactaaagtaaaaaaccaggataaacattggagcgacaatcttgactactttcagcgtcaagctaaaagaaatgaaacacatggtgttcctattggtcctgcaacctcaagcattgtttgtgagattattttaagtgctgtggataagcgtcttagggatgatggatttttatttagacgttatatagatgattacacatgctattgcaaaacacacgatgatgctaaggagtttttacatttactcggtatggagctgtctaagtataagttatcactgaacttacataaaactaaaataactaatctcccaggaactttgaatgataactgggtttctttgcttaatgtaaattcaccaacaaaaaaacgttttacagatcaggatttaaacaagctaagttcttctgaagtaattaatttcctagattacgctgtacaattgaacactcaggttggtggtggaagcatactaaaatatgctatttccttggttataaataatttagatgagtatacaatcactcaggtgtatgactaccttctaaacttatcatggcattatccaatgctcatcccatatctaggcgtacttatcgaacatgtctatttagatgatggtgatgaatataaaaataaattcaatgaaattttgagtatgtgtgcagagaataaatgttctgacggcatggcctggactctttatttttgcatcaagaataacattgatattgatgatgatgttatagaaaagattatatgtttcggcgactgcttgagcttatgcttgctagatagctcagatatatatgaagaaaaaattaataattttgttagcgatatcatcaaactagattatgaatatgacattgacagatattggctccttttttatcagcggttctttaaagataaagccccaagcccttataatgacaaatgctttgatattatgaaaggttatggcgttgactttatgccagatgaaaattacaaaactaaagctgagtcatattgtcatgtcgtcaataacccatttctagaagacggagatgagattgtaagctttaatgattatatggcgatagcgtag

SEQ ID NO: 84285 - DNA, 564 bp, Citrobacter koseri
gtgtccacactgacgctacagaaagcctttgaggcctgtcaggcaaacaaatccgcatggctgcaacgccgggatgaactgaagcaggccgaacaggcataccgcgaacagcttgccggtaacggccacagcggccggagcctgcaaacgctgcgcgagattatcgacgtgaaaaaatgggaaatcaatcaggctgccggtcgctatatccgttcgcatgaggaggtgcagcgcatcagcatccgcgaccgattgaatgattttatgcaggtgcacggcgcggagctggccgccgcccttgcccctgaactgatgaattattccgggcaacactctgccgttcagcgctgcgccatgcagcactcactcgactgtctgcgtgaggcgctacagctctggctggtcgccggtgaaaaaattaattattcggcgcaggataatgacattttaacggccatcggattcagacctgacgcggcttcgtgcgatgatagtcgtgaaaaattcacgcctgcacagaacctgaattacacccgccgccgtgcagaactgactgtgcagtag

SEQ ID NO: 84286 - DNA, 219 bp, Citrobacter koseri
atgtttcactgcccgttctgcaaaaccagcgcgcattcccgcaccagtcgctatctgtccgataacgtcaaacagcgctatcaccagtgcatgaacatcgagtgctcggccacgttccgcacgcttgaatccatcgacgggattattcgttcaccggtgacagagccggttatccctgtacccgcaccggagcccaccgttaaccgtgccggtgcgtga

SEQ ID NO: 84287 - DNA, 744 bp, Citrobacter koseri
atgaaacccgaaacagtcattaccgccctgcaagacgttgccgccaggcagtacgcagagaacagccagcgcatcaccgacaagctgagcgcattcactgcggcaagagacacccacgcggccagcatgcaggttctgaaagagattgatacgtccattgaacgctgtaagcaggagcggcagaccgccctcgatgagagcactgaggcggagcaggactggcgcagccgctttcgcaccctgcgcggcagtctcacccctgaaatgaaaactgagcacagcaggcgtatcgccagtcgcgagctggccgacgagttcaccggcctgatagcggagctggagactgaccggacacgcgccatgctgaatgcctgctccaccggcaataaatacctgtcagcgcacgaagatgcctttaccgcttacgccggtgcggaatgggctcaggctgtcaatgcggttcctgtcgccctcatccgcgctttcctgctgcgcattcgtgccctcgaaatgaagggagaaagcgctcctcagtccgtggccaccggcgagctgcgcgatgcgctgagccgtcagggcagcctgtatcacttcgatatgacgcaggagccggtgttgtccgtgacgggcatgcaccggccgcagattacaggcgtggatacggagctgttacgcagccctgcgaagagaatgatgctcgccagaaagctggctgaaaatggcgagacagaagcggaggggtaa

SEQ ID NO: 84288 - DNA, 267 bp, Citrobacter koseri
atgcacaccgctttttcttccccgccttctgcccctgccaccccactgatgccggtttctgatgccgttcaggagcgctttctccgcctgcccgaagtgatgcatctgtgcggcctgtcccggtcaaccatttacgacctcatcagccgcgaggctttcccgaaacaaatcagcctgggcggtaaaaacgtggcgtgggcgcagtctgaaatcaccgcatggatggcagatcgcattgccgaacgcaaccggggctatgacgcatga

SEQ ID NO: 84289 - DNA, 633 bp, Citrobacter koseri
atgatacaggtgaaagctggcgagaatacagggggtagagaggctatccataggttgatggctgcctatgatttcaagtccagacagcagctatgcgatcacctaggcgcatctaaaagcaccatggcaaacagatacttaagggacagcttccctgcagaatgggtgatccaatgcgctcttgaaacaggcgtttcattactctggctaaccacaggacaaggcgaaccaggagcaaaaattgatgataaaaaaagtatcaatatcgtgaactccagcaaggtaaaacctctttctgaacttatatcgccagagatcgacaaggctacccttataggaggttcgctggttgaagccgggaaggccatcattgatagcagcctgcttccccctgactcaaacgagctgcttctcgtaaataccactggcgattcatatttagttgaccgtaaccagacaccaccagtgaatgggatgtggttggtcgatatcgacgggataaaaagcattgttaagctaactcgccttccgggaaacagattagttgtgcatcaagatgactcttcgtttgagtgcagcttggatgatatcgaggttgttggccgcgcattgaaaattattaagagcctttga

SEQ ID NO: 84290 - DNA, 339 bp, Citrobacter koseri
atggctttcaaagctgaagatatcactatcaatatgagcgccgggcagcgtgccagtgcgttaaatcatatttctgtattacgcaccgctctatatggcgactgtgaaaaagaacttaatcgttttattaacgaaatgcgtgataagcgtgatgaaaagtacgagctgaataatcgtgtgcttgctgcattattttttcttgcaaatattagcaaggagcgtcactgcgttgaatttagtgagctgacgagtgacgaggtaaccgcacttattggtgtgatgaaccatcttcgcgcagtcgtgagtttatttccaaaacggctagcgatgccgaattaa

SEQ ID NO: 84291 - DNA, 234 bp, Citrobacter koseri
atgcgaaatatcgaaacccgttccaacaaaatcggcccggatgatgcaggtcttaaccagatactgacagaggcccgcatggaagaacgccgcgcacgtgctgcggcaatggctgcccgtcttgatagcctggctagccgcattagttcccgccagcttaaccacgttgaggctgcagagctgctgcgcgccacggctgaaaacatccagaacgaagcgcaggagatccactga

SEQ ID NO: 84292 - DNA, 228 bp, Citrobacter koseri
atggctgattctatggaccttgtacagctgcgcgttgaagaagaacgccagcgccatatccaccacgcccgcagccgaaaggctggggcttcttctcttgagtgcgagagctgcggaattgtcattccggcagaacgccgcgctgcagttccgggctgtgatctttgcgtaacctgccaggaaattgcagagctgaaaggtaagcattacgtagggggtgcggtatga

SEQ ID NO: 84293 - DNA, 390 bp, Citrobacter koseri
atgactaccgcgaaactgactaatcctctgactgatagcgaattagcgcgactgatttggggcctgaaagcggagggattccatcagcgcctgctggctggattagtagagctgcagcagcgccgcaaagatgaggctgcggagcgtgaggttattcactgctatcactacaacgctgaaatgaaaaccagccatcggactggatatgtcggcacccgtgaaagggttgctgatcgtgcgtcttattaccacctaatggagttaattggtgagctaaataatgacactgttaccggcattgtatcccttgggtatttaggtgaaaccagtgaattgttacaggagcaggatgattgtcagcagatggcagtaaatgggggtgctgaatga

SEQ ID NO: 84294 - DNA, 300 bp, Citrobacter koseri
atgaatatcaaagctcataccttaaaaattgcaccgaaacaccttaatgatgttatggcagggcaaaaaaaagctgaattaagacgggatgatgatcgcggttataaagccggtgatattcttgttatgtgtgaatggaaacatggaaaatataccgggcgagaatggacggctgtaatcactcatatcctgccagtttgtgacgttattaataatgttgatggctgggtgatgctctctattcgttcactgaatccaattgatgcaatgttctatatgctttcaggaggtgctgcatga

SEQ ID NO: 84295 - DNA, 2421 bp, Citrobacter koseri
gtgacggaaatcagtacaggccgcttcgccgccccatttgttactgaaactcccggtagcattgaaaatgctaccgggccttattcgtggaatttgcccaggaacgcagttaacccctatctggacccggcggaagttgcgccggagtctgcgctttcaaacctgatcgctctttacgctgcggataacgagcaggagcagctgcgccgtgaggcgctgagcgatgaggtctgggaacgctatttcttcaatgaattccgtgatcctgtccagcgcgaaatggagcaggaccggctgattagtcgtgccaaaatggcgcgcgagcagcagcgttttaatcccgatctggtcattctggctgatgttaacgccatgccgtcccatatcagcaagcctctgctggagcggattaaatatttccatagcctgggcagagcaaaagcctattcccgctacctgcgcgaaacaatcaggccgtgtcttgagcggctggagcgcgtgcgtgacagtcaggtgtctgcctctttccggttcatggcgagccatgacgggctggaggggctgctggtactgcctgaaatgaatcaggatcaggttaagcgcctttccacactggttgcggcacatatgagcatgtgtcttgatgcggcctgcggtgatctgtttgtcagtgacgatgttaaaccagaagaaatccgccaggcatgggaaagggttgctgcagaagccatgcgccttgaggtcatcccgccagcgtttgaacagttacgccgcaaaaagcgccgccgcaagccggtgccttatgaactgatcccaccatcgctggcgcgtatgctgtgcgcggactggtggtatcgcaaactgtggcagatgcgctgcgagtggcgggaggaacagctgcgcgccgtctgcctggtcaacaaaaaagcgtccccgtatgtcagctatgaagccgtgatccataaacgcgagcagcgccgcaaatcgctggagttcttccgctcgcatgagctggtcaacgaagacggcgacacgctggacatggaagatgtggtgaacgccagcaacagcaacccggcacaccgccgtaatgaaatgatggcctgtgttaagggactggagctgatcgcggaaatgcgcggagactgcgcggttttttataccatcacctgcccgtcacgcttccacgcaaccctcaacaacggcagacctaatccgaagtggaccagtgccaccgtccggcagagcagtgactacctggttgatacgttcgccgctttccgcaaggccatgcacaaggccggattgcgctggtatggcgtccgggtggcagagccgcaccacgacggcaccgtgcactggcatctgttgtgcttcatgcgcaaaaaagaccgccgctccatcactgcgctgctgcgtaagtttgccatccgcgaagaccgcgaggagctgggcaacaatacggggccgcgtttcaagtccgagcttatcaacccgcgcaagggcacaccgaccagctatatcgctaaatacatcagcaagaacatcgacgggcgcgggctggctaaagaaatcagcaaagaaaccggcagatcactgcgtgacagcgccgagcatgtcagcgcctgggcgtcactgcaccgtgtccagcaatttcgtttctttggtattccggggcgtcaggcataccgcgaactgcgcttgctggctggtcaggcggcgagagtgcagggcgaacgcaaagcgggtgcgccggtactggataatccgcgtctggatgcggtactggcagctgcagacgcgggttgctttgccacctacatcatgaaacagggcggtgtactggttccccgcaaacatcaccttgtccgcacggcttatgagcttaacgatgaaccgagcacctacggcgatcacggtatccgtatctatggcatctggtccccgattgcagagggcaagatttgcacgcacgcgatgaagtggaaaaaggttcgcaaggccgttgacgttcaggaggcggcagccgaccagggcgcttgcgccccttggactcgtggcaataactgtccccctgttgaaaatctgaacaaatcagggggtgatttacccgatattaaaactatggatgagaaggagctgcaggaatatctccacaacatgggccagaaggaacggcgggagctgacagccaggttaaggctggtaaaaccgaagcggaaaaaagcatataaacagaatatttcggatcagcagcgcctgcagcttgaggcagaactgagttccagagggttcgatggtagcgagtcagagattgacctgcttctgcgcggcggcagtattccgtcaggtgccgggctgcgtattttttaccgcaaccaccgtctgcaggaagatgacaaatggcgtcagtggtactga

SEQ ID NO: 84296 - DNA, 189 bp, Citrobacter koseri
atgcaggattatcttttggagtcattgaagctccagcgcattgatttttttatcaagcttgtagcggctagtgagtgcagcgacgaagaaaagcgactggctatccagtgggtgtccgaactgaccaatgagctgatggaaaaaatcagaaatcatgagtacagccgagccatgggcgtttcaagttag

SEQ ID NO: 84297 - DNA, 435 bp, Citrobacter koseri
atgagcaaatatatttacagcccttcccataacgcgttttatctgaccgcattaaaagcagagtatgagctgtctgataactggcccgaagatggcatggaaattagcgatgatttattcatccagtacacatcaacaccacctgacgggcaagagcgcggtgtggacagtgatggaatgccgtgctgggtggatctaccagagccgacaacaaaggagttaattgccgaggcagaacagaaaaaaaaggtactgttggcagaggcgcaggctgtaatttcaccacttcaagatgcgctcgatcttgatatggcaaccgaggaagaaagcaaggtattgctggaatggaaaaaatacagagtattactcaatcgcgttgatatcagccaggctcctgatattgcatggcctgcacagcctacagaccatgtgtaa

SEQ ID NO: 84298 - DNA, 1080 bp, Citrobacter koseri
atgaaaactctaaatcattcttatctttctcggcttgatcacctaagatttcttgcagccgcattggttatcttccatcactgcagaggttcgataaattatcacggacacatttcaagccttcaagatttagcatccttatggctacgatggggttctactggtgttagcctgtttttagttttatcaggctttttattttgcgtaatagcaaattctggaagaaagaaaatagtatacaaggatttcattagaaatagaatattacgcatagcaccacttgccacaatatttgtatttatcgtaatttgtataaacagacaagactccacaccgatggatatattccgattgttaacacttcaattaaacacaggtcattcctatactggatgggggcatcagttttacccaacagggcctatgtggacaattgctgttgagttccagttttatttaatatttccatttcttgctttatttatgagaaatgatggaataaaaaccatattaggaatcatagttgtatttattcttatcaaagtgtcattaacgtcactttatgggaccagcatatactataaattatatcacacaattatcggtagaatggatcaattcttagttggtatagttgcagggtatttttatcaaatcggttatttaaaaaacaaaagactgcaaccaattcttatgataattacatcattaattggaattacaatattcatgcatgtaaactctaaacccacaataaaaaccataccattctcatttactattgaagctatattatggagtttgctgatatatggatatctttgctgtaattttgaaatcccaaaaaaaatagatgcaatcatggcgtatcttggagggcttagcttctcaatgtacctactacatcttattgttgccaaagtattatacaagagcgtactaaccacacctacagatgggattggatatgtgctcaatactgctatttttattctgccagtaacaattattttatcttcaattacttataggtttatagaaaaaccattccttagtctaagggttagatacactggctaa

SEQ ID NO: 84299 - DNA, 240 bp, Citrobacter koseri
atggtggcggagaataaaaaaatgatgaattgcccaaagtgtggacatgcggcgcacaccaggagtagttttcaggtaactgatagcacgaaggaacgttactgccagtgccagaacattaattgcggcagcacatttgtcacccatgaaacggtagtgaggtttatcgttacgccgacaataattaacaatgccccgccacaccctacgccaggtggtcaagggcacatgaatttttaa

SEQ ID NO: 84300 - DNA, 483 bp, Citrobacter koseri
atggaagaaatgcattttgtttacatcaatgctaatgcacgcattggtgcacattcgataagtaatgttagccacagcgatagccacattcaggggatatgccaatcaactcattcgattaggacgtttcgtaaggatagaatccttcaggaattctcttcagcagatgaagctcaacagtcctgccaatctttcctccctgagaactacctccatttaaccaaagtaattaagccaaaaaccctcacttttgatgtctgctttacaggtttcaaaaaggcagataaagagcgtttgattgaagttgccgaggcgaacagcctgaccgtaagaagttcagttactcagaatctgcagatgctttgttgtggatacaatgctggcccttccaaaataaatgctgcacgtatgaagggaacgatcgtcattgatgaagaaagttttgtgcattttatagaaacgggtgaaattcccgacgcataa

SEQ ID NO: 84301 - DNA, 270 bp, Citrobacter koseri
atgctaaagcgacttttctccccgatcattctgatagcgttgattctggcgggttgccagacgccgcaggggaaatttacgcccgaacaagttgcggcaatgaaatcctatgggtttactgaatcagcaggcgactggtctctggggctgtctgacaacattttatttgataaaaacgacacgcccggaaagccagcagcaaatccgcgagatggcctccaggctggcagccaccgggctgaaacatgcccgtatggatggccatactga

SEQ ID NO: 84302 - DNA, 294 bp, Citrobacter koseri; identical to SEQ ID NO: 71351

SEQ ID NO: 84303 - DNA, 630 bp, Citrobacter koseri
atgacgttgggtaacgcgctgcatctgtcgccggaagcggcaatggcgaccggcgtctggtttgcgcgtatcactggcctctccatgttccttgcctataccggcgcgttctttacgctgagctactcgccattgaaggccattatccagggaacgccaaaagcgctgtggcctgcgccgatgacgacgctgaacgcggcaggtatgccagccaccgcaatgtggatgcagtgtctgctggtgagtctgtttattctgctggtctcttttggcggtgataccgcgtcggcgttctacaacaaactgacgctgatggcgaacgtgtcgatgacgttgccgtacctgttcctcgcgctggccttcccgttctttaagtctcgcgaaggcctggaacggccatttgtgatcttcaaaacccatgtttcaacgatgctggcaacgggcgtggtcgtgctggtggtgacgtttgcgaatgtgtttaccatcattcagccggtgattgaagccggggactggaatagcacgctgtggatgaccggtggcccgatattcttctcgctgttagcgatggcgatttatcagaactacagccgccggatggcaaaccagccccagtgggcggtggagtaa

SEQ ID NO: 84304 - DNA, 579 bp, Citrobacter koseri
atgagttcaaaaataaatatctgtgaagttattaagggacattttcgaaccttacgagatgctgacacgaaaaaagttagcatatgggatatattcacatttattatccttccattcatcatagctgtatcattctcaatttttggccgtggtataacaaaggacttaatatctttattagtaaatttcagtgccatcctgacagctctattacttagcgtactagtactggtttatgatcaagagtcaaagataaggcagagaaaagatatcgatactttttatgagtcaaaaaaatcgcttttgaccgaactttactataatatttgctactcaatattgtgtggcgtattcttagttgtattatgttttatagtatctctgtactcagttgatttatcggggtatttttatggtgagactcacgaatacttttttgataaagccaatataacattaaagctcaatgtgttaagtcatatattatgccctcttataatatatgtatgcatacatttaattctaaatatcattatgattgttaaaagaatgcacgctcttttaactcttgactcataa

SEQ ID NO: 84305 - DNA, 927 bp, Citrobacter koseri
atgcacgctttagcaccgtatctttttcgctgctacaatcccaacgcagctagagaacagcgttactctgctctaagtaatattagagatcttgacttactcgatatactccatgattttattcagcaatataatgctgggtatattctctcagaagacactaaacaagtttttcgttttaatgaaattgtccacgacgagaacaatcgtgaaatttacggctggtttgagtctggttattacggaacaaaaactgatattattaatattgaaactggtgatgttgactttgaaaaaacaagaaataacgccgaaataattcgatattatgtacatttctatatacccagagatgtaaatgaaggcatggcatttttacatacctacagaggcgatggaattaaaacgcttttcatgaatttattttccgattatttcaaaagggttactaacttagtaattcaaatgaatcctcttgcgtatgataaagcgattgaaaaatggatggatgccatagctaaagaggtcagggtcactaaatttcacggtgtaacggatgttgcagagcaagcaagaagacttggtcatcatgagcaagagttagttatcaaaccgccaaggaactctggacttggcaggcttagagattattttgttagaggttcagagcagtatcagctcgttgaggttctgaaaggatatggagaaacagttaaaacagttgtagaattaggtgatggaagaaaaagaacatttcgcattggaactaccgtaagaggtgcggtttgtgaaatcatcttcgatgaagagcaagttgtttttaatgacggcatgccagagatcacatcattaaacagactggttgatactgttattctagaatatgtacgattattatatcgtggagtggctataaggagggcgtga

SEQ ID NO: 84306 - DNA, 567 bp, Citrobacter koseri
gtgaccactgtgacaatacagcaggcctttgaggcctgtcagacgaacaaaaatacctggctgaaacgtaaagccgaacttgcagaccttgaacgggaataccgtgaacagctccttgccggtgacgaacaaatcccgcgcagaatgcaggatttgcgcgacaatatcgatgtgaaaaaatgggaaattaatcaggccgccggtcgctatatccgctcacatgaggaggtgcagcacatcagcatccgcaaccgtctccatgactttatgcagcagcacggcgcggagctggccgccacgctggcacctgagctgatgggatatcacgaacagcttcccgcagtaaaacagagcgccatgcagcactcggttgattatctgcgtgaagccctgttggtgtggctggccgccggtgaaaaaattaattattccgagcaggacagcgacattttaacggccatcagattcaggcctgatgcggctttgcgggatgataatcgcgagaaattcaccccggcacagaacctgatttacacccgccgacgtgcagaactgactgcacggtag

SEQ ID NO: 84307 - DNA, 240 bp, Citrobacter koseri
atgtttcactgcccgttctgcaaaaagaccgcgcacgtccgtaccagccggtatctgtcggaaaacgtcaaacagcgttatcaccagtgtaccaatatcgaatgctcggccactttccgcaccatcgagtcggttgacggtgtgatacgtgccgcaccggagaaacccgaccccgcgccggtggcgccaccgccgccgcgtaaagtacagggctgctacagctcgccgttccggcattaa

SEQ ID NO: 84308 - DNA, 744 bp, Citrobacter koseri
atgaaacccgaactcattatcaaagccatgcagaccgtaatcagtaaacaggatgaaggcgcggaacaacgcattgccggtgcgctggccgcacttaacgaagcaaaagatgcacacacggccagcatgggtaaactcagcgacattgaggcttccattcagcgttgtgagcaggaacgacagaccgcgctcagtgaaagtgcacaggccgaacaggactggcgcagccgctttcgaaccctgcgcggcaacctcactcctgaactgaaagctgaacacagtaaacgtatcgccagccgcgaactggctgatgagttcaccggtctgattaccgagctggagaaagacaaaagccacgccatgcttggagcatgctcctccggtactgcttatatcagcgcccatgaaaaagcgttcaccacttacgccaacagcgagtggaagaaggcgctggccggtatcagtcccgcactgttacgtgcctttctgttgcgtatacggtcgctggaaatgagcggagaaacctcgccgcgtgcgaccgtgacccgtgagctgggtgatgccctgaatctgcagtcagccctgtatcattttgatatggagcaggagccggttctgtccgtaacgggcatgaatcgcccggtcataaccggggttgatatggcgctgttaagaagcccggccagacggatgaagcttgccgctgaactggccgcaaaagaccacgaacaggcagagggctga

SEQ ID NO: 84309 - DNA, 267 bp, Citrobacter koseri
atgcacactgctttttcttccccgtcttctgcccctgccgcgccgctgatgccggtttctgataccgttcacgagcgctttatccgtctgcccgaagtgatgcatctgtgcggcctgtcccgctcgaccatttacgacctcatcagccgggaagccttcccgaaacaaatctccctcggcggaaaaaatgtggcgtgggcgcagtctgaaatcactgcatggatggcggatcgcattgccgaacgtaaccggggctatgacgcatga

SEQ ID NO: 84310 - DNA, 699 bp, Citrobacter koseri
atggataagactagagactttattcttggagggctttctcgctttggcttagctgatttgcccggcagaccttacgattctgcttttgaattaatagcctccccacctatacgcaaacgcctcattgtgatgggctttaatggttcgtcagccgattcccatatgaccaacagccagtctattattcaggatcattcaaagcctcttgtctcgaatgtccatttagggacgcaaggggaatggggaattactcacctagctaagcgactacaacagatacctatcagcctaggttacagatgggaagacgtagtatttacgaatgctctaatgatgtgctcaaccaatgcctcagaactcaaacaagaggcgagccggcacaaactaactgtcgaacaactcgtaaaatactcaaccagattttttgagaatgtcacaatccctctgtgtaagcctgaactgattatcgcttatagcaacagtctacaatccctttcagcagcaaatattttgctaaaatacttcggtgatccaagcactctcatctatacgcagcagaagggttattacacaactttcgctttctcagccgtactaaatgatgtgaaaatccctgtaatatgtgtccgtcatatgtctagatttaaaccttcagaagagttaattgaaacagctctagagacgatgaaggagctttag

SEQ ID NO: 84311 - DNA, 2334 bp, Citrobacter koseri
atgaaaatgaacgtaacagagacggtaaaacaggcgtgcggccactggccgcgcattctcccggcgctgggtgtgaaggtcataaaaaaccggcatcaggcctgtccggtgtgcggcggctctgaccgtttccgctttgacgataaagaggggcgcgggacgtggctctgtaatcagtgcggcgcgggtgacgggcttaagctggttgagaaagtgttcggtatgaccgcatcagaggctgccgggaaggtggacgccgtgaccggcaacctgccaccggttgccccggaagtgattgcggccgcagaggctgaaacggaggctgaccgcaaggcggcggccgcactggccgtcaggctcatggagaacacccgaccggccagcggcaacgcctacctgacccgcaagggcttccccgaccgggaatgtccggtactgacgtcgatgcataaaaccggcggcgtgacgttccgcgccggtgatgtggttgtcccgctgtatgacgataccggcgcgctggtaaaccttcagcttatcagttctgacggtctcaaacgcaccctgaagggcggtcaggttaaaggggcatgtcatgtcatcgaagggaaaaaacaggccggaaagcgcctgtggattgcggagggctatgcaaccgcgctcaccgtgcatcacctgaccggtgaaaccgtcatggtggcgctgtcgtccgtgaacctcctttctctggcgagccttgcccgtcagaaacacccggcctgtcagattgtgctcgccgccgaccgtgaccttaacggcaacggccagaacaaagccgcggcggccgcagaagcctgtgagggcgttgttgccctgccgccggtgttcggtgactggaatgatgcgtttaagcagcacggcggggaggcaacgcggaaagcgatatatgacgccatccggccaccggcgcaaagcccgtttgataccatgagcgaggcggaatttacggccatgagcgccagcgacaaggctctgcgggtgcatgagcattacggcgaagcgctggccgtggatgcgaacggccagctcctgtcccgctatgaaaacggcatctggaaaaatatcccggcagccactttttcacggaatgtggctgacttattccagcgcctgcgcgccccgttctcatccgggaaaattgcctcggtggtggagaccctgaaactgattattccgcagcaggccgcaccggcacggcgtctgattggctttcgcaacggggtactcgatacccaaagcggcatattcagtccacatcataaatcgcactggctacgcacactgtgcgacgtggattttaccccgccggtagaaggcgaaatgctggagactcacgcgccgaatttctggcgctggctcgaccgggcggccggtaaaaatccacaaaagcgcgacgtgatactcgctgcgctgtttatggtgctggcgaaccgttacgactggcagctctttctcgaagtcaccggtcccggcgggagtggcaaaagcattctcgccgaaatcgcgaccctgctcgccggagaggataacgccacgtcagccgacatcgacacgctggaagacccgcgcaagcgtgcatccctgattggcttctcgctgatacgtctgccggaccaggaaaaatggagcggtgacggcgcagggctgaaggccatcaccggcggcgatgcggtctcggttgacccgaaataccagaacccgtattcaacacatattccggcggtaattctggccgtgaacaacaacccgatgcgctttaccgaccgcagcggcggcgtgtcccgtcgccgggtgattattcatttcccggagcagattgcaccggaagagcgcgacccgcagctcagggataaaattgcgcgcgagctggccgttatcgtgcgccagcttatgcagaaattcagcgacccgatgaccgcgcgcgcactgctccagttgcagcagaactccgacgaggcactcaatatcaagcgcgatgctgacccgacgtttgatttttgcggctatctggaaatgctgccgcagaccagcggaatgtttatgggtaatgccagcattgtcccgcgtaattaccgtaagtatctctatcacgcgtatctggcctatatggaggctaacggatacaggaacgtgctcagcctgaaaatgttcgggctggggctgcccatgatgctgaaagagtacggcctgaattatgaaaagcggcacacaaagcaggggatacagaccaacctgtcgctgaaagaagaaagctacggcgactggctgccgaaatgcgatgaacccgcagcgacataa

SEQ ID NO: 84312 - DNA, 429 bp, Citrobacter koseri
atgtatgattttagacaaaaaataggtgtactcgagactgaatacaaacgaatgtatgattttaaaaaatatgttttagacattgcattaaaacaagtaaatgaacataccgatattattgtcaaagttgaacagcataaaacaggtagatctattactggtttttcatttagctttaaacagaaaaaatcagccacgcattcagtcgaatctaaaagagatccgaatacattagacctcttttcaaaaataacagataaacaacgccatctattcgccaacaagctctcagagcttcctgagatgagtaaatattcacaaggcacagaaagctatcagcagtttgctgtacgtatagctgccatgctgcaagatgcagagaaatttaaggaattacttcctttactcagaaaattaggatttcaatga

SEQ ID NO: 84313 - DNA, 543 bp, Citrobacter koseri
atgaaaaaactgtcagtttcagagttagctaagctttatggatattcaagacaagccatatatgcacatataaacaaaggaaatttatctaaaggatctgatggattaattgacttttcagaggccctaagagtttttggggaaccacaaaaaaaagaggatacagtcaatcaaagtcaatcaattaacagtcaaaacttgacagaagttgacttactaaaacgtcaagttgacatactggaaaaacaattaaatcaggcaatacagagagaaaatcaatctttagaacgtgaatcgttttatcaagaacagattgaagctatgcagcgcttactagaagcaccaaaagccaatatgactacctttaccgatcagagctttaaacaggatatagcaacggatcctcggtcggaactagcaacgaactatgacgaattgactactcctcagcaagacaataagcgtattcctatcccggagcatgttgaaccagaacagaagaagagaggcttcctaagccgctttttccttccatatggttag

SEQ ID NO: 84314 - DNA, 558 bp, Citrobacter koseri
atggacaaagatagcccgaaatacataacatctttggcaaaaaccttatttgaaatccatagtattcctgaaaaagaagttcgggaaaatgatttgaaaattatgaaaccttcagatttaagacctgaaatagcaaacaatttgcagttagtaaaatctgaaattggtataagtgagcaattggaaacccgctacagaaaatggttggataatgatgttctatgggcagatttcacccaatttatacatggcgatttatatgctgggcatgtactagcttcaaaggatggagctgtttcaggcgttattgattggtcaacagcccatatagatgacccagcgattgattttgctgggcatgtaactttgtttggagaagaaagcctcaaaactctaatcatcgagtatgaaaaactagggggtaaagtttggaataaactatatgaacagactttagaaagagcagcggcctctcctttgatgtatggtttatttgccttagaaactcaaaatgaaagccttatcgttggagcaaaagctcagttgggagttatataa

SEQ ID NO: 84315 - DNA, 237 bp, Citrobacter koseri
atgacaattcaagatattcaatcacttgctgaagcacacggcttgttgcttacggacaaaatgaatttcaatgaaatgggcattgattttaaggtcgtttttgctcttgatacaaaggggcaacaatggttgctgcgtattcctcgtcgtgatggcatgagggaacaaatcaagaaagaaaaacgcattttagaattggtaaaaaaacatctttctgtagaggttcctgattggtga

SEQ ID NO: 84316 - DNA, 1476 bp, Citrobacter koseri; identical to SEQ ID NO: 48588

SEQ ID NO: 84317 - DNA, 1176 bp, Citrobacter koseri; identical to SEQ ID NO: 48587

SEQ ID NO: 84318 - DNA, 186 bp, Citrobacter koseri; identical to SEQ ID NO: 48586

SEQ ID NO: 84319 - DNA, 774 bp, Citrobacter koseri; identical to SEQ ID NO: 48585

SEQ ID NO: 84320 - DNA, 837 bp, Citrobacter koseri
atggacgaacaagccattaagcagtggcattgcctggtccaccatggccgccgagggagaggtttccactacagtgacaccgccattgagacggccctgatgctaaaaggcttgttcaagttgccgctgcgggcgctagaaggcttcattaactcgttgttccaactgatggcggtgcctttgcagtcgccggactatagctgtatcagcaagcgcgccaagaccgtcgacatcaagtaccgcctccccagccaaggcccggtggctcacttggtcattgatgccaccggcctcaaggtctatggcgaaggcgaatggaaaattcgcaaacacggcaaggagaagcgacgagtgtggcgcaagctccacttggcggtggatgccacaacccatgcggtcatcgctgccgaagtcagcctggagacggtggcggataacgaggtgttaccgacgttgctcaaccccttacgacgcaagataaaacaggtcagcgccgatggtgcgtatgacaccaaggcctgtcatgcgctactgaagaaaaagggggcgaaagccaccataccgccgagaaaaaatgcggcaccgtgggaggaaggccatccccgcaacgaggcggtgacggcgctcaaggccggtgaactgaagcaatggaagaaagactccggctatcaccagcgctcgatagccgagaccgccatgtaccggttcaagcaactcatcgggccaacgctgagcctgcggaactacaacgcccaggtgggcgaaatcctggctggcgtgaaggtgatgaacaagctgatagggcttggtatgcctgttcgccagccagtgaattga

SEQ ID NO: 84321 - DNA, 1542 bp, Citrobacter koseri; identical to SEQ ID NO: 30088

SEQ ID NO: 84322 - DNA, 705 bp, Citrobacter koseri; identical to SEQ ID NO: 8686

SEQ ID NO: 84323 - DNA, 861 bp, Citrobacter koseri; identical to SEQ ID NO: 6162

SEQ ID NO: 84324 - DNA, 543 bp, Citrobacter koseri
atgataatctggatcaacggacctttcggcgccggaaagacgacgctcgctaagcggctgcgcgatcggcgttccaaatcgctgatctttgaccccgaggaaatcgggttcgtggtgaaagaaacggtccccatgccagcgagcggagactatcaggatctccccttgtggaggggacttacgatcgcggcggtcagggagattcgaaggaattactcgcaggacatcatcatcccaatgacgctcgtgcacccggactatctgactgagatactcgacggggtaaggcggatcgacgatcagctgctgcacatctttctgacgctcaacgaggacctattgcgtcaccggatcgcgaaccagaccatgcatcctgacccgaatcgaaatgcggagattcgagagtggcgattagcgaatgtcgcccgatgcttggccgcaagggaacggcttccatgcacaacccgtgttctcgatagtggtgcacacaccagcgatgaactcgcagcgatggtgctcgacggaatcgatgggcgcacctga

SEQ ID NO: 84325 - DNA, 222 bp, Citrobacter koseri
atgcacagggcgcaagggaagccgcagcctgacgcacacggctggcgggagttggagggggagaccgcgaaatctgagcgggtgaacgaccggaaaatcacggcagacgggaaggagggaccgggtgaccgcagcggcaaagcgtacccttgcatcaacgccagcccggctaagatggaggcacggcacagcccgcacacgacgctgaggccacataactga

SEQ ID NO: 84326 - DNA, 1725 bp, Citrobacter koseri
atgactgagcaggctacaacctgtaaaggtgcgtccttacttaacggtgactcctggcacagtatcaactggcgtcagtgctatcgggaagtgcggagactgcaagcgcgtatcgtaaaggcaacacgagaaggtaaacatggcaaggtcaaatccttgcaatggatactgactcactcgtttagtggcagagcagttgctgtcagacgagttacagagaatagcgggaaacgtactcctggggttgatggtcagacatggtcttccccggaggttaaatttcttgctattaacctgctgaaacggcgtggttacaaaccacagccacttaagcgggtttatatacctaagtcaaatgggaagtctcgtccccttgggatacccactatgaaggatcgggcgatgcaggcgttgtatttgctggctcttgagcccgttgctgaagtcactgctgaccagagatccttcggctttcggactggaaggtctactgcagatgcgatagcacagtgcttctgtgttcttgcgcagaaaacatccgctgaatgggtgcttgatggggatatacggggatgctttgacaatatatctcatcaatggctaatcgataacacctcaacagacagacaaatcctgacaaagtggcttaaagcgggttacagggaaaatgggcagttattccctgtaaattcaggaactcctcaggggggaataatttctcctgtactggctaacattgctctggatggactggaggcgcttcttgcgtcggagtttaaaaagagaacagtcaagggacgattggttaacccgaaagttaactatgtgagatatgctgatgattttattatcactggagagtcaaaagaacttcttgagtctcaggtattacccgtcgtcaggcggtttatggctgaaagaggattaatgctttctcctgaaaagacgaaaatcacacatatcgaggaaggatttgattttcttggacagaacattcgcaaatatggcggtaagatgctgatcaaaccctctaaagccaatgtcagttcctttttaaagaaaatacgcgctgtaatcaaaggcaacaaagccatggatcagcttacgttgatccgtatgctgaacccaatgatcaaagggtgggcggcttaccatcaacacattgtggccaaggtcgcatttaacaaagttgacaatgagatctggctggctttatggcgttgggccgttcggcgtcatcccaataagggaaagaagtggattcggaaaagatatttccatcaacaaggtgcccgaaactggtctttctccgtggctaccggagaactccttgccaacggtaagcctcagtatgcaaatctgaggaaagcaatcgatacgcctatcaaccggtttaaaccgattaaaattgcagctaatccgttcgatcctcaatgggagatgtactttgaggagcgttgtgcagacaaaatgcggcacaaactgcaaggacggaaaaagctcattcaaatctggtttgagcagcggggccgatgccccatatgtgatgagaggattacatctgattcccagtggcaggttcatcacatcatacggcgagtcgatggagggagcgactgcctctccaatttgattatgctgcatccgatgtgtcacacacttgttcatgcgaaaggtatacatgtagtgaaaccggctcatgagagtgggcttagaaaggcttga

SEQ ID NO: 84327 - DNA, 492 bp, Citrobacter koseri
atgaatactgaagaattacttggtcaatttaccaaagttggactaaatgtagcgggcacttatgttgagtatcattttaaacaatatcatgcatccaaagatcagagccaaaaggtccacagaatgatggaagatacgctgctcggtaccagtagattgttcagcgtgagcgcacccatacaggagctaaaatcaggactgagaaacatgctgcagccactctctcaggagactcgcaaactggatgatatgacgatacgcctcccgttaaagcgtctgcaacggaaacaacgtcatgttttgatgcatgcagtgtggttgttacgttatctcgattcgcatctgggagataatgaaggggaattctttttgtttctgcatgacgtggcgatgaatagcgatgctcaaatcctagatttgtggacgtcaatgaatgatagaaaaaaatgtagtagaagctgtttacaggtcaaatctactacctgttcttaa

SEQ ID NO: 84328 - DNA, 567 bp, Citrobacter koseri
atgatgaattttgataaattggggtacaattgcaaaactaacaaacaaaagttgcagatcatgcctaatatgatcggttttcagtctgtattacacggtatttgctcccgtttaggggcaccaaacagaaaagcaaatatcattgtggatcagcagtcacagtttaataccactcaacgggaactgaacgatctttatttcaagattcgcgaacaaccgtgggaacttggacctggattgcccgtcatggatatgaagaacatgccagctgaaccacttgtcttcctgtcgggtacgcaaagcgcagggctggagctggttgatatttatctctggactttcaagcggtttatggaagataaggagctgaccaagcctcttacgcgccttgtttatacaaatcttaagactgccagaacagacaacgtttccctgcagtcagttggaaaacgttttaaggaattttttgaaaataaacctgagcctacagcagagaaaatggctcaggtacgtgagctgcgtgaattagaagaggccagacgtatgccatatgtgatgtccaaataa

SEQ ID NO: 84329 - DNA, 867 bp, Citrobacter koseri
atgaagtatgtctttattgaaaaacatcaggctgagttcagcatcaaagcaatgtgccgcgtgctccgggtggcccgcagcggctggtatacgtggtgtcagcggcggacaaggataagcacgcgtcagcagttccgccaacactgcgacagcgttgtcctcgcggcttttacccggtcaaaacagcgttacggtgccccacgcctgacggatgaactgcgtgctcagggttacccctttaacgtaaaaaccgtggcggcaagcctgcgccgtcagggactgagggcaaaggcctcccggaagttcagcccggtctgctaccgcgcacacggtctgcctgtgtcagaaaatctgttggagcaggatttttacgccagtggcccgaaccagaagtgggcaggagacatcacgtacttacgtacagatgaaggctggctgtatctggcagtggtcattgacctgtggtcacgtgccgttattggctggtcaatgtcgccacgcatgacggcgcaactggcctgcgatgccctgcagatggcgctgtggcggcgtaagaggccccggaacgttatcgttcacacggaccgtggaggccagtactgttcagcagattatcaggcgcaactgaagcggcataatctgcgtggaagtatgagcgcaaaaggttgctgctacgataatgcctgcgtggaaagcttctttcattcgctgaaagtggaatgtatccatggagaacactttatcagccgggaaataatgcgggcaacggtgtttaattatatcgaatgtgattacaatcggtggcggcggcacagttggtgtggcggcctcagtccggaacaatttgaaaaccagaacctcgcttag

SEQ ID NO: 84330 - DNA, 300 bp, Citrobacter koseri
atgacaaaaacagtatcaaccagtaaaaaaccccgtaaacagcattcgcctgaatttcgcagtgaagccctgaagcttgctgaacgcatcggtgttactgccgcagcccgtgaactcagcctgtatgaatcacagctctacaactggcgcagtaaacagcaaaatcagcagacgtcttctgaacgtgaactggagatgtctaccgagattgcacgtctcaaacgccagctggcagaacgggatgaagagctggctatcctccaaaaggccgcgacatacttcgcgaagcgcctgaaatga

SEQ ID NO: 84331 - DNA, 579 bp, Citrobacter koseri
atgaatttttatgtggatgaaaccggtcataccggtccaaatctgtttgaccgcacccagcgtgttctatcttacggcgttctgtcctcacccgatgacctggacaaggtggccgaatctgaactggccagtttgcgcaaaaagctgggcgtacagcgccttcacgctgctgagctgggcatgtatcgccttgatgatgtggtcgatacgctgctggttctgcagaagaagcaccggatacggtttgatgtctggcaggtggttaaacgggatcacgccattatttcgttctttgatcaggtatttgatcagggactgaatcctgcggtgccttggagcgcctactggacgccactgcgctatccgttgctgctgaatttagcaaatctgtttgatgacgacctggctgaaaaatcatggcgagcccggctcgaggcacatgatgaacgttcttcctctcttttcagcgaagtttgtaacgtgttgcttcagcgggttcatactttgggtgacgctcgctcagttgaactgataacggatgtgatcttacccagcaatagtggacacgcggctaagtga

SEQ ID NO: 84332 - DNA, 1557 bp, Citrobacter koseri
atggcagaaaaaaagaaaaaaaccattactggtcaagtcttgaactccattaaaattaacaaactaaaatgtataaatggattaaacgagattatttttaaacctcatgcgttaaccgcaattttaggtccaaatggaagcggaaaatcaacaatactccatgctatagcaagcatatacatgcctgaaaaaggtttccccggtgaagaccatcggttaatgcatttttttccacgcagtccacatgctgaatggaacggcagtgacttcattgtaaatttaacttatcgtaaagatggtgtaatgattgaaaatgaattaaaaaattatggaaaagctgatgttcgaggctcacgatggattcagatttatgctcgtcgtcctttaagagaagtttactatcttggcattgataaatgtgttcctataatagaatcagaaaaaaagaataatattcagtatgaaaccagcagtgtcagtaatgatttaataacaaacattcttcattacgcctcctatatacttaataaaccatatacaagtttcaatcaacatcaacaacccaatggaaaaatattgattggagttgagtcagagggactggcctactcatcattaagtatgagcgcaggagagcaaaagatatttttaattctggaaacaatattaaaagcggacaagaacgccttaatattaatcgatgaattagatttgctgttgcatgacgaagcattgaaaaagttaatagacgtcatatcaactcatgccgaagataaaaataaacaaatcatcttcactacccatagagaaatggtaaccactttatcagacaagataaatataagacacgtcgtaaacattcaaggccgtagttattcatttgaagaaacaaaacctgatgctataaacagattaacaggtaaatcaacaactcccattgaaatatatgtggaagatgatcttgctgttgcaataataaataaaatatgttcttcacttaaggccagcagatatgtgaaaatatttaaatttggcgcagcttcaaacgcattcactctacttgccagtacacttattcgtggagataatctatctgataaactttatattcttgatggcgataaatactccacagaaaatgaaaagaaagctgctcttgataaagttttcaccggcacagaatcacgaacttatgagttaaaagcggcagcggaaggaaaagtaaaacaatttaatctcccaaatggagttaagcctgaacaatacattcattatcttattacaaatgtcccactggacggattgggtggagaatatttagaaataatagaagcagcaagggatatcagagttgaacttgatgctcataattatatctcgaacattttaactaaattgggcattgatcgtccgtccgggttaacacgagtgatggatctggcctccaggcatcccgaatgggatcagtatgtaagtgaagtcactgactggttacagcccgtagtttctgatttaatggaacgattacctgagaatgatacagtagatataacttaa

SEQ ID NO: 84333 - DNA, 618 bp, Citrobacter koseri
atggggaaatatcaggaagaaaagaaaacacccatcattatggtgaaaaaacgtcgcactcttttacccccttccttatctgaaaaaacaggtgttatcgcacgttcagagacggtaaagatggaagatccagtatctgtgggaagcagttctcctgccgtcgatactcatccccctgaagcttctgccagtaagaaaaaaaggaaaagacgccgttttccacgccagcctcattggactcatgaatttactcacaattgcgtggaaaaagttaagtctctgtttccccatcttcgcgcagaaagcgggggatttcttccactgaaaattggcataaccaatgattttgccgcattcctgacagaacaccctgagacagaactgacactggatgaatggtcctgtgcaatatcctgcatcaccacccgacaggtatatctgctgcgtactgctgtcgcaggtatccctcgttatggactggatggactaccagcaggtcaggtatcagaatgcgatgcgcagaatgccagacgctggctggcagtaagggaaaaacaaaagctaaagatgaaaaccatgcaggaacagaccgcgtcaaccgaaaaaattgagcggtaa

SEQ ID NO: 84334 - DNA, 993 bp, Citrobacter koseri
atgaatgataaaaaagagagatacatatcttccgagctgtcagataaaactcaactttctgttttgcgcagtatagttggatggggctatgaaaaaataagacattctctgggacgacctgggcaacttgaaagagcgattgcatccggggagttaatcccgtgtcctttaaaaactcctgtcgatacactatggacgcgatcggtgatttactggcaggactggatatccccatcatggataccatctgattctcgccaatgtacgatagatttctataagccaggctactatcgtggtttagaacgatgtcatctggttgttcccgaagttcagaatctgattagcaaagaagatattcctcatttttcgtgtgatatcaccgatattcagggtatctccgcatcgaaatctgagatgtatgatattggtgacatttatgaatttcctctactgagatgccctgggctggttaccccggtaaatgaagaacatctcagagaaaatatgcagtactgggagttaaggctccatcgaatgcgctttgctgaatatccgtggactgagcgtaaactgtattggctgaatgaaggtggctcacatcattttgcagctgctcgttatcaggcatgccgtctgggaatttctgttccgcttacgggcagattgagtcgcttccatgtaaacatgcagatggtttcagctttatgtcagcaatggcacctgtttgctattcctgcagatgaacggttagcctgctttttcagggcgatgattgcctttgaatgcccatttggtaattcagaattacctcggaatatgcacaatactataaagtcaggagtcaaactcaaactcgtttggcttgaacgtggccataccaaagcagacattgttgcagatgtacttgccacagcaggtttccctgattttggggatcaattgaagctgctggctaccagcagcctgcaaaaaacacataagctggcctga

SEQ ID NO: 84335 - DNA, 261 bp, Citrobacter koseri
atgaacgcaaccgaagcaaaatgtttattcttttcctgtgccggagtgctcatccttctggcgtactgcatccagttattagacgatgctcgctggaaacaatacagacaagaacaccagtgcaccgtgacggactcccgtgaatctgaacccggtttaatattcacccgtcctgcccaggaggcctggacatgcaacgatggctctgtccactggaaaaaactcgaccctaaccgtgatggacttctgtacggagaataa

SEQ ID NO: 84336 - DNA, 594 bp, Citrobacter koseri
atgaaaaataataacgcgccattatatctctggttgctttggtgtacgctttgtctgtacatcactaccccatggcaatacttacgttatccatacactgacaacttatcattgccttatatgttatatttctgtgtggtggttgtgatttgcattttcccactacttttcagatgtgtacttcttattgtaaggtctgcatctaaatacgacttcacattctttgtgaagaagaaaaagggaagcaagaaatcaactatacatcttagcccctatgctgacacacgttgcccgaagtcaatgaggaaacactgggatgtattgctttctctgatatcaaaagcaattaataatgatgaaatcattgtcatgcattcacatctctttactccagcaagaataaataaacttataaagagactggaatcttatgatttgagtttttcagttattacatacccacggaaaacaagtctgtacgaaaaattatcaattccttttatatatctcttgtttcagtggtctttcccgcatttgcattcggacggaatgacagtcgtcattcgtcctctccagacccaccacaccaattaa

SEQ ID NO: 84337 - DNA, 615 bp, Citrobacter koseri
atgttaatccaaaatattgatgttaacgctctgaagaaaaatgagaaagaaacgtctcatgacaaaggctggggtattatggaacagggtgcaatagcacttgttgtaattatcgtacttgcccttgtttttggtggattgtatatgttgcgttcacgaaccggtgtggcaaatgaaagttcgaacatacagacaatcatcacaagtactcaggggctgctaaaaggtagcgatggatatacgtttaccagtggagccaaaatgacgggtgctctcattcagatgggtggcgtacccaagactatgacagtgcgtggtactccatcatcaggtacagcaacgctctataactcatggggcggtgccgtaactgttgctccggcttcaacatcaggtttcaacaatggttttaccgtcacctatgaaaaagtcccacaggatgcctgtatccagattgccacacaaatcagtcgtactggtttaactaacggtattaccctgaacagtacgactcacaatgatggaaaagtcactactgaagaagccagtgcgcaatgcacagctgataatggcagcaccggtacaaacaaactaatcttcaccatcaatggctaa

SEQ ID NO: 84338 - DNA, 255 bp, Citrobacter koseri
atgacaaaaccggatctcaatgattttgcgtggtttgttcatgtcgtcgaggagggggatttgcggcggcagggcgagcgctggatgaaccaaagtcaaagcttagccggcgtattgcgcaactggaggaacggctgggcgttcgccttattcaacgaaccacgcggcaatttaatgtcaccgaagtcgggcagaccttttatgaacattgtaaggcaatgctggtggaagcacaggcggcgcaggatgcgatag

SEQ ID NO: 84339 - DNA, 282 bp, Citrobacter koseri
atgttttttttgttgttaagctttttaattatcttgttgagtgtgtcagttggaaggaataaatcttcactggcattattgaaattatatgtggtaatttctttttggttgttatttaacttgttgatattatttttttgtttattaaattattatatttatcaattgcttcattcagtccagatactagagagttataatcaacttcattattggtttggtaaacagagtgaaataatgaagtgccatatttctctgcaggtttattatggtattccttaa

SEQ ID NO: 84340 - DNA, 951 bp, Citrobacter koseri
atgggttccggcgggttcttcgtgtccagtgaccgttttattgaagagcacgcgggcgagaagcagtacaacgccgctgagcagaagcagaaaatctccgtttacggtcaggaatccaacccgaccacctggaagctggcggcgatgaacatggcaatccgtggcatcgactttaattttggtacgaaaaatgccgataccctgctggacgaccagcatccggatctgcgcgccgacttcgttatggctaacccaccgttcaacatgaaagagtggtggagcgcgaagctggaaaacgacgtgcgttggaaatacggcacgccgccgcagggcaacgccaacttcgcatggatgcagcacatgatccaccacctggcccctaaaggttcgatggcattgctgctggctaacggttcgatgagttctaacactaacaacgaaggtgagatccgccgcaacctgatcgaagccgatttggtggagtgtatggtggcgctgccgggtcagctgtttaccaacacccaaatccccgcctgtatctggttcctgaccaaagacaaatccggcggcgacggcaaagcacaccgtaaaggcgaagtgctgtttatcgacgcgcgccagattggttatatgaaagatcgcgtgctgcgtgatttcacgcgtgagaatatcgccaaaattgccgacaccttccacgcctggcaggcggataaagactatgaagacgaagccgggttctgcttctcggccacgctggacgatattcagaaaaacgactttgtgctgacccctgggcgctatgtgggtgctgccgagcaggaagaagatactgaaccctttgccgagaagatggcgcgactgacggctcagcttaaagaacagctggcagagagcgcgaagctggaagcgcagattaaggcgaacctgggggggctgggttatgagttttga

SEQ ID NO: 84341 - DNA, 936 bp, Citrobacter koseri
atggatatggaacagcgcattggtcgtattcaccgctatggacagcgagatacagcgcaggtttataaccttgtgttgggtgacaccattgaaggtcgcattttcctgctactagatgaaaaactggaggagattgccaaggcgcttggtaaagtggatgaaaagggccaggtggaagaagaccttcgatcacaaattctaggccaattatctgagcaggtgaactatcagcaactttattcgcaggcactgcaagacccagagcttaaacggacccggctggagcttgaagcggctatggataatgcccgtactgctaaggatgcggtattcgaactattccaggacctagatggcttcagtttggatgactacgcatcactctcagatacaagggaatccatagacgatctgatccggtttatgcagaaggccttgccatacgaaggggaagctattgagattcgcggacaaaagcaatgggccctggtaaaagatggtctcgaacaaatgctgtttaccacggttcgagaagacgcgaccaattcggaaaaattgcatttgattggtttggatcatcccgtgattgcaaaacagctcgataaataccgcaatcttgatcctgaataccttggtttctattctagtgagctgaatgctggtgaaaccgtttctttatgggaagtaagggctgccaacgaaaaaggacacaatgttcactccatcatgaaacttgctgtcgattgcaatggtaaccggctacctcatttagaaaagcaaatagacgcagtgtttaaacctaagggaaagaaaggcgctcacgaagtagatttgcataaaattgaagccgtcttggagcgtgaacttcatcaccggaatatcgtgaaacctgagcagtctttctctgccaagctgatctgcttagcgtgtggttga

SEQ ID NO: 84342 - DNA, 1773 bp, Citrobacter koseri
atgacttttaaacccggtgaacgcgtcagccattttgaatttggccaaggtgttgttatctcggcagtgggtggctacgcccgtgtcttctttccccagggtgagcgacaagtacccgtcagcaccttggtggcggcacttagccataatgagcgcgtggtagccagcattggcagccatacagatagtgacacgaaagcctggctctcctggaaggcgcatgaattaccccttcaggattcagccagctcgctgacttcagccaagattgatttgctaccccaccaggtggtgctgactcatcgggttgccagcgcgagcccacgtcgctttctgattgccgatgaagtaggtttggggaaaaccattgaaacagcattagtgctgcgggaattggccagtcgtggcgagctaaaccgggctttaatggttgtgccggcaggtctggttaacaactggcaccgcgagctgaatgaagttttcaatttgaattttgaagtattcggccgcgaaggtgatgtcagcgaccgccgcagtaatgcgtttgctaaacataacctgctgattgctagcatcgacaccttaaagcgtccagcaagaatcaagaaaatactcgaagcaccccgttgggatttgattgtttttgatgaagcgcatcactgcactgcctataagcaaggtggcaaaacccgcaagacccagaactacaaattggcggaagccttacgtgaccacagtagggatatgattctgctttcggccacaccacaccagggcgatcattttcgtttctggaagctgattgatttgcttgaccccactttgttttccagtgaaacagagatggtggaagaacgtcaccgcctgaatccaatcatcttccgtcgcaccaaagccgacgcctgtaaagccgatggatccacgttgtttgctaggcgctgggtgcataccgaagccttttcaatgtcaggtcaggagcgcgatttctataacgccctgaatgaatacctgcgcgacggttttgctctggcgaagaagcaaggcggcaaaggaacggctctgggctttgtaatgacgatcttccaaaagattgcggcgtccagctttgcggcggtgcatcgcaccttgagacgaagactgttggccctgactgttcatgagggcttgatgcacgatgaaaacctcgacatcgacgccagagactttgcttttaatgaggcgaaagaacagattcgcgttgagttcgatttaggtcatgaccgtctttctgaccttgagatcgaccgtatattgaatgacatcaagcgtcgcctacttaaaaagatcaatgaagagcagctggccgctgtatccgatacgtttaccgatgagctggaaactgccgccgctgaagatgcggccatggatgctgtggcatacgccctgccagaagagcgattccgcattaaagaactactggggctgttcccttcagcccgtgaaactaaagtagataagctcattggggctttgggtgtgctgtggcaacaaaacccagaggaacgcattgtgatatttgccacctatctgggtacggttgaaatgctgggcgaccagattgaaaaagcgtatccaggccaaggtgtagttgtgcttaaaggtggtgatcacggaagtaaactcgcggcagaacggcgcttcaaacaggccaatggtcctcgcgtaatgatctgtacagccgccggtcgggaaggtatcaacctgcaacatgcacgggtgctgtttaacttttga

SEQ ID NO: 84343 - DNA, 507 bp, Citrobacter koseri
atgagcgatgtgctgaccaacgacaaatggaagcgacgcggtgtctcagtgctttggtgtggcaaaacactggctgaattaaatgccgcaagtcaggtgatcagtctgcgtcagttcatcggctattacgaagcgggctggccggacgatatgcctctggtgaatgacgatggcttatacgtcgcagggttggacgtagccgtagacgctttatcaccagaagatgcactggaatggctggaatccgagatttacgaaatgatctacgactttcagaaccatgccgatgccgcgttgattttctggatgccggatcaggggcgctggaaggaagatctgaccaccagtacctacaactggtgcttggctggtaaatacgatgcgcaaatgttcccgttggggcaatgcatctggaacggcgcacaaaaggacgtgcgccggattgaatccgcttttggcggaaaaacgaacgaatggctgggtttatacctagagcggatcagctaa

SEQ ID NO: 84344 - DNA, 3264 bp, Citrobacter koseri
atggcaactaaaaaaacgaaagcggaactaacgactgagttagtcgcagaagctgttggtgcgggtaaaaaggcgcagcttgaaacggttgatttttctgatcccaatcgccccctaacttgccttgaggttgattttcctattctaccaatcaaccagattgcgcaaatcgaaggcaacgcaggtaagccaatatatcaaatgagtaagtggtgggcacgccgtcgctccagtgtgttccgctcgatgttgattgcggctgcgactaaggctcctgaagagccagccgaggcagcaaaactggtatgggacaactactactccaatcatcaagataacaaagcttttaatgatctcaaggtcgctgacatcttcatgggtggtggtaccacgctggtcgaaggtgcccgactaggcatgcagatgacaggcaacgatctcaatccggttgcctggctggttgtaaagaacgaactggctgatgtcgatctgaacgaagtaaacaaactgtttgatcacatcgaacgggaagtaaaaccccagatcatgccgttttacgcctgtgaaggccctagcggtgaaaaaggcaaatggacacagcgttctactggcaaagtcatgggcaatgattttgatccgctggctctgacacctgaagaacgcaaagactacgtatacgaaggtccggaggttatttacaccttctgggctaagcatggcccctgtgctgctcccggttgcggacatcgtacgccattgatgacctccccagttgtggcggtgaagtctctctcggttaaaacctggcaagatgttgagtgccaacactgcggttcgagctttgatcttgagcgccaggaagcccgtatggctccagatgttccgctggtcgtaagcgattcagaagctccttacgccatcatggatgatgctgggaactatcaatgccctcattgccagcatcaatatcgtgatgaggcggcagcgcagaagggagagtcttcgcgcttactcaagaagatgagtaaaaataaaaaggttgatttgtctctgcttgttcatcctgattggctcaaaggttcttcaaaagcagacgaaaaaggaatatttggcggcacctcccttagtgaggtggaagcaacgcagcgttggaatctgcacagaacaaagacacttaagctgctggaagtacggggtaaattgccagaagaaattacctgccctgattcaggtttggtgataaacactcagcaaggaaccattcctaagaagtctaatttcacctgtcaggaaagcacttgcggtcgtcaacaagatgttctcgacagcattaaagcttctggccagaccggcccgatggctgcttacgtattacagtgttattcacctggacgtgatgcaacaggttcaccatacaatggccgctactttgctccagctgacagcaatgctgccaaaagacaaaatttggcggtatctgagtgggcgcaaaggaaaaattcggatttgcggggttattggcccgaatccgaattgccctatggatttatgacacaccatttgcaaggcggcgttcctaatcatggttttacgcactggaacaccatgtttaacccgcttcagcttctgattcatgcacaaattctcaaggctattgacacatcccatggcttcagcgattcaagcaaagagatcgtactgggtgcttttcagcaatatcttcgcaatcagaatctcttttgtttctgggatcgtggttacgacaagcttgttccaatgatgagtaacaataactttcaccctaagtcgaacattgtggaaaattccgttttttctagcttagggcgaggcaattgggattcgtgcagagcaaacaccttgaaaggtcttgaatggtgtaagcaaccatgggaaaccgtttctaacgagatgttaaccaatatgtccgccgacattggcaaattggtgagcggtaaaagctcaaaggccatgccaaacgatcctgtgttgccgggtaccttagtgacctgcggctcgtcgacggagttaaaacagtatgccgatcagtcgtatgatctcgttattaccgatccaccatttggtggcttgctgcactacgccgagttagcggatttcttctatgtgtggctacgtctgctgctgaaggataaatacccagaggtttatgctggggaatacacaccaaagacgctagaagctgtttctaacaaagcacgccatccagatgatccagatgcgttttataagcgcctgctgaccgaatgttggcgggaggcgaatcgcttgctgaaaccagggggcattttggcatttaccttccatcacagcgaagacgagccttggttggatgtattagagagcttatttgacgcaggttactacctggaagcaacgtatcctattcgcagtgatgaaactaaaggaaagggcgagtttggttccaagaccattgaatacgacattattcatgtatgccgtaagcgtactgaagcgcccagtaaaatcagctgggctcgcttgcgtcgcaagattcttgcagatgtgcgtcagttgcaagagttgttggaacatcaccagtcaaaaggtttgccagtagcagatattcaggtcatcaagcgcggtaaggctttagaatatttctcacgccactatggccaggtatatgttgaggaaggccgcgaattcacggttaacgaagcgttggtagggattaaccaaattctggatgaccaatcagaatcagaatcgggtggtaccccggtggtgtgtgagccaaacacacgccaatttctgcgtatttttgcacgccaaccttcagtcgagcgcgatcagatgcagaaattcctacgcggtagcggcatagcaccatcgacttttatcgctttgggctgggctaccgaaaccacacgaccaaaggcttttcattggcgatctccgctagaaattgcgcaagagcgaatggccagcagtcgcagtgtgagccgcgactttgatcaggccatgttgcttgtgggggcctgttatccggaaagcggtatcaataccaagaaaattctggatgataactttaagcctcacccggcattaggtcatctattagattggcttgttcacaacggagctgacttatctatgcgcagtgcctgcactttggcaaggcaattgtttaatagatgggaagcagatcatcagcaggttatgcaggaacaaatatcattgtttggtatggaagatgaaatatga

SEQ ID NO: 84345 - DNA, 999 bp, Citrobacter koseri
atggataagtcactgatcgctgatatacacagactgcccgcacaggaagcatggccgaaaattttttcggccctctggtccctgtttgcagaaccgatcaggcaggatctggcggatgcaaaaacaaccgaacgggaccgcgccatcaaaccattagatgacgtgttggcaggcagtgcctgggatttgtgggcatcgttcgagagtgcttcgccaaaaacggcagatgctctgaaagcattctggcaacgccagacaacaccgaaagccatcctgattctggatgcactgtcgctccgcgaagcgccctggattctcgaaagtgcgcagcagcggggctacacaattcacagcgccggtgcgaccgcctctgagctacccggtgataccacaccgtttgcacgggccatggggtttgggcagcgcaccagattgcaaaacaaccaggggaatagtgctgctttccctgaagccttcactgagtccaccgacttgccatgggtggattgtgcatctctgatcaaggctgacccgaatattattttctggcatcactggcctgatgaacgtatgcatcatctggcagaacagggagcaggttatcgggtgttggcgaaagaagccgcagccgtattaaccggcgatgaattctgggccttcatcgacaaactagccacgggccgtcgtctggttattactgccgaccatgggtattcaaaccccgcgttgtttccagatgtttacccggaagatcaaaaagcctatctgaaagggcaattcaagtctggccgcaacagcgaagtgaaagacgcaaaagccgaacagcattgggtgccgccattatctcaggtactgacgacgcagcatggcaattggaacatagtactgggccgcaagaaatggcgttcacaagggggctacccaagcttggctcatggtggacttagtctgctggaagtagcggtacctttcatcgaactatcgaaacagaataattag

SEQ ID NO: 84346 - DNA, 2682 bp, Citrobacter koseri
atgctaggactgaagttacgtgaggagttttctggtcgtcgtattaaaggaacgatgatcgaaatgcataaccggaatggcaccggtgcgctcgataagtctgcaagtgaatttctgaagatcacttacccttcaatcgacatgctcaagactgtggaagctgtacaagctggccgggctgagcctgtcgtaattatcggtgcgcggggccaaggtaaatcacaccttatggcagcactgtcacatatgcatcaggataaggatgcaacagtaaactggttgaatgactggtctacccgactgaaaaatcctgacattgcaaatctcaaattgcagtatggcatgcatgtcattactgaaagcttgcacttgcaacgctataagcatgtatgggatgttttgttcgaccagcatccgcatggcaatattattaaagccaagtgggaggtgcacggcaccgaggttccaggttatgacctgatactggaaatggcagagaataaaccatttatccttattctggatgaattccagacgtggtttgaaggcttaacaaactccaaccagtacaaacgtaaggcctgggcctttaacttcattcaaatcctctcggaaatatctgcaaagtaccctgaacttctgacacttgtcgtatctgtgcgcgaaggcaactccgacgcagcgcagcagctgttccgtgtgaaccccgtactgattgatttcaaagggccagaagccaaacgagacagacagcgtttgttgctctatcggatcttcgaaaaccggatgaacattccagagtctgatattgcttcactgataaaaactcatgtggatgaattcctgcgtttgagtcatatctcaggctccgagcacgaaaaacatagacagcaatttatcgaggcctggccttactcgccaagactcctgcaattgctggacgatcaggtgcttatcgcaaccgaaactcaagagacacgcgatctcttgcgtattctggtggatgtgtttaaggaatctggtgacgacacagccatacttacacctgccaacttcagcttaaccagtgaaaaatcaggcgttacctcactactggattcggtagcgagtcagctgcatcgggatttgcgtgagaatgcactgcgcaacctcgaagctgttaaaaacggtgtacctattgttcaggtcccacatcttgagcccattctttccgctctctggctgcgttccctatcattggagaatcatgccggtgctgagccgtcagaattgcagctggatattactgagcgaaaagcgattgatgacaacctgtttgccgctgagcttgcagtcatcgaggacaacagcttcaacattcaccgccaagccaaccgtttggtcttcaagaacgaggtgaatccacaggccaagctgttagcacatgctaaaaacgacaagctctttcaaaaggatgaggatgtagaacacctcgccaaagagattcgttacgccctggttggggatggcaatcagtcgaatatctatcgaaccattgtcttaaagaagcagtggcgcacttcgccatgggcggatattgaagaaaaagaccatcctcagcattgggataaccggattccagtgattgttatgcccaaggcatcgctggacaacaaagagctgggagaatggctgaaaacaaatgttgccaaggcaagaaacactgtgcgcttcctgctgccacgtgtgggtactggcgacattttctacgataagtctttgctggtattagcccgtgcggtttatcttgctagcgattggaaaaactccgagcgtgagtacgctcaattgcatctgaaataccagaaggaactgcgtgagcagttgcaatcccgctttgatcgttttgcagtcttggtcgtatggaatttcgcagacccatctcaatgcgaatttgagatttcacagcacggcgcagaagggttacagatcctcgaaaagctggatgcgaaaatctgcagcgagctgttcattccagaagaattcgacaccatactgcttgatgccgcgaccaatagccgtagcgtggccgaccttatcgaacagctcaaagagccagccccaaaaggtgcagaaagcattccttggcttggtgaaacagccgttaaagagcgcattgggcgagcctgtgcagaaggcaaaattgccatcaacgccaaaggcagtctgtacgagaaaaagccgtcagaaaccacggatgatgcttggttgcgagtccgtgggagactgggcagcggtaaagatctggaagatacgacattgcacctgcccggaggctctgttggttcaggcggttctgtccctgttcagcctgttccaggcgtgccagaagaattcaccgccggtggtgttaacgagccaaccgcaggctcaggcaatggcggcacagcatccggtacgacactaacgccgggatcgctattcggtggttccagtggcggcttcgttgctcatcacagcgcccagaatacatccacattgagcttgctcggtaagcttgaacaatggggcattaacaaaggcagtaaggtgaaggacgtaaaattgtctacctcgcagctcactggtgcacagttagagcatctgctgaaaaacttaccggatggtgttacttactctctggatttggataaagaacaataa

SEQ ID NO: 84347 - DNA, 195 bp, Citrobacter koseri
atgagtgagcaaataatgaccgttaaggatgtcgcgtcgtacctcaagctcaacgagcgtactgtctatcgcatggccacagcagcaaagatcccagcgttcaaagtgggcacctcgtggcgttttaagaaagaagagatagatatatggatagcgcagcaacacaaccaaatatcaagtaataaagagagctaa

SEQ ID NO: 84348 - DNA, 168 bp, Citrobacter koseri
atgattaattatggctgcactgtccggcagatagctgttgaactgaagcgacacccggtgagcgtgattaacaagctagcgaagtacctggacgatgacagtatccagaattgcattgcacaagatttttacgatgtccctgcgcgggagctagtgcgatggtggtag

SEQ ID NO: 84349 - DNA, 585 bp, Citrobacter koseri
atgatcacttttgagattcgtatggaaattaaagtcctgcacaagcgaggaatgagtatccgggccattgccagggagctgggtatttcgcgcaatactgtccgcagccacctgaaagccaaatctgaaaagccgcagtattcaccacgcccggcaccatcatcactgctcgatgaataccgtgattacatctctaagcggatcagcgatgcgcatccctacaaaatcccggcgaccgttattgccagggaaatcatggagctgggctatcgtggagggcttactatcctgagagagttcatccgtaaacagaccctgccagcacaggcagaaccggtcgttcgcttcgaaaccgagcccggacggcagatgcaggttgactgggggaccatgcgaaacggcaagtcccccctgcatgtgttcgtcgctgttctgggatacagcagaatgctttacatcgagttcaccgacaacattgcgctacgacacgctggaagcctgtcaccgcaatgcgttcagcttcttcggcggtgtaccgcaggaagtcctgtacgacaatatgaaaacggtggtgctgcagcgtga

SEQ ID NO: 84350 - DNA, 465 bp, Citrobacter koseri
atgaaaacggtggtgctgcagcgtgatgcttaccagaccgggcagcaccggttccatccttccctgtggcagttcggcaaagagatgggcttctctccccgcctgtgccgtcccttcagggcgcagactaaaggcaaggtggagaggatggtgcagtacgcccgcaacagcttctatatcccgttaatgacacgcctgcgtccgatggggatcaccgtcgatgttgaaaccgcaaaccgttacggcctgcgctggctgtacgatgtggccaatcaacgtaagcatgaaactatccagacccgcccctgcgatcgctgggtggaggaacagcaatccatgctggcactgccaccggagaaaaaacagtatgacgtgcaggttgatgaaagcctgatgaccttcgacaggcagccgttgcatcatccgctctccatctatgacacgttctgcagaggagccgcatga

SEQ ID NO: 84351 - DNA, 210 bp, Citrobacter koseri
atgaaagatccaagactggttgcttttggtgagaaggttcgccagatacggaaggaaaaaggcctctcgcaggaggctttggcggacctagccggtatcgatagaagctatatgggacatatcgagcgcggtgaccagaacatcaccctgacgaagatccatcaaatcgcagacgccctggagattccggtcgtaaatctcatttcttaa

SEQ ID NO: 84352 - DNA, 456 bp, Citrobacter koseri
atgttatcgaaagcaattgaaccaagaaaagttagcaaggccgaactgaaattcagggaggctttcgaacgcctcaaagtgggcaaaccagacattttgccgaaagggacgccactcagtcagaacaatgttgccaaagaagcaggcgtagatccttccgcccttcgcagagcacggttccctgagctggttgcggatattcaagcctggatcgattgtcataaggatgaagcagcgaaaaaatcgcccagacagatgatgcttgcgcaaagatcgcggaaccgagatctactggaaaaggttaaggcgctggaagaacagcgagataaagccctgggtcagttgctggatgcccaacaccggattttggaactgacacttgagaaccagagtttacaagctcagctaccggcaagtaatgttcactttatttcgaattcgaagaagccctcatga

SEQ ID NO: 84353 - DNA, 2037 bp, Citrobacter koseri
atgaatttggcttacttcccgggattgcagattgaatcggccttatcaaaagaagatgcgctgaattttaaacctgacagttggccccctgcgccggattttcctgctgtgatagatgcctatggccatgttgtgtctcgatatggtgacgtaagatgggatctttcaccttggtctgggcacaccctcaccatttactttggggatggttctggtcagggaaaaagagttagccctcagaacgcggagttattgcgtaaagttgtagcgtggtggctttggggcgaagcggctattcgttctgccaaggcattggtgtttaagtttgagacgataaaacccctgtttgtggcctgcacagatgccggtattctggctactgagctctatagatatcccaaggtcatcgagaagttatccgaatattataagcaacgcggaaatcgcttgattgaatgccttcattcattattcatcgcacgagagactttggggtttatcttgcttgacgaaatcggaattaaactacttagcagcgtattaacaacgaatgattcgacgcaaacagcttatattcctgttcgtatatggggctatcaggcatctcggcttcgagaatgcctagatgactttttgcatcaccaagaaaaagttgaggcctgctatgatttttgtttgtcagcctatgcacggaatgcgggaggcgatttgtcaaaagcatttggcggtcttggcgtcgatggaccgtttagaacgtctcggttaaaaggggaaaggagaaataaaaaagtattttacggttcatttcaggataccgccgaagaatacggaatatttgatttgttaaaccgctgggtgttgtttaatgaggcaaccgggataagagcgctttctacgtatatgacattaataagtaatgtcggactcgcctacatattgaatttttcattgatgcgcatcgatgaaggcgccaagcttcgatcaaattgccacgaggttgaacgtgatcaacttggcgatgatattcatacacttaaaggtgttacaaccaaaaccatcgaagatagtgatgctcgatggattgtttcaccttctgtggaagttgctctgaaagccatgaggtcagtggcatttatgaggctgaaggctgcaaaagaaaatccattcataacgctgtcaaaagaagacgttgagaacccattattgcagtctttaccacatgagccatggagtgcacggtgcccaaaaactcatgataacaaaaagtacaaaaagattcggtcatacggcgacattgccaaaaatatgtggccaaagctctttgatgacaaggagctaacgattaccgaagccgatctggaaatggccaatagaatgacatttggccttgatccagagaagtttgccgtaggtaaagtctggccccttgcctggcatcaattacgacggactggtgctgtcaatatgctggccagtggattggtgaccgaagcttctcttcagtatcagctgaaacacgcctcacgcgccatgagccaatactacgggaaaaactactaccgactcaaagaacctttgaatgacgatgctcgtgcctattacttgcgcgagatgtatcaatcaatggtgcgggagtataaagcgctccaatctgatcagtatgtttcgccacacggtgagaagcgcaagcaacagatcctctccgaaatatcggagaaagaccatcagcagttgctcaaggccgcaaaatcaggacggatcagttaccgtcaaacattccttggtggctgcgccaattcaggcccgccttgtccacttggggggatcagcaatatcagttcctgtatgggatttagcagcaataagccatgcgcatcagcattgttagataaagccaaactaccaatgattaaacagcttaaaaacgttattactattcagatcagtgacgctgcgccagactcccctttatatgagtcattacaagcgcagttagaatccgcagagcgagcaatccatgttatcgaaagcaattga

SEQ ID NO: 84354 - DNA, 1731 bp, Citrobacter koseri
atgcatgagttaaatcttactttcccgggcatgagtcttggtacgcatcaaatcccttggaacctgaacatattgcttcatcatggtgctgcatgtgtaccgagaaaaaatgcgatggaatcgatacatcattcctcagtcgatgatgttgacgttcttcgacttccgattgtatacgcatttcatgaagctatttccagcatgataagtcaggggcgctctcgttcacttatcgaaggcagtctggaagtgctttggcggttctttgcatggtcagataccaactcattgactatgtctcgagataaagtggtaaccaacttcaagaaatggtcggaataccagttatatagatcaaaaatcaaaaaggaagtgtctgaaatttacgtttacagacagacttcaaagttagccaatctcatcgctagagccttaaaacttcctggagctaagcctggcggcgcacttttgatgcaaacaaggatcagaaaacctagcgcaaaaaagagcgtactgaccagcagcgcagataagcaaaatctcagcagtacatttgagtttggtcattgcctgaggtcgatctgtgacgccttggattgcgcgacggtcagaggacggctacctatccgtattgcgctgcaaggcggcaagaccttggtggttgcaggaagcctccttaatccggaaatggatgtcgaatctataaagtgcagcaccgtcaggaaaaatgctgagaaagccagagcgccactgacggagagagaaagccttttcgatcggcataaaagatcgggaatactaaatctgagaatagaatctgagcttttgatattcatcgcacaaacagggatgaatctgactcaggcatcagcgcttgaaagagaaacttatcgttggaagtctaacggtgacgatctggaggttttccgcgtatacaaggggagacgcagcggcgaagctgtttttcgttgctatcgctcttataaggaacatctcgagcgatatttgcagtggctgaatgacacagggtttgctgaacatgatacccggcttttccctttacaaagtcgaggcatgattcgcgcaaaagattcaaagattggattctacacattgaaagaatccttcaagaaaattgatgctcggattttagggccacaggagctgcgtaaaaccagagtaaactggctactcaggcgaagcaacgatctcgaacttacggctgagcaaatggcccatgataaggaagtccttctccgtgattatgaaaggccgcatcatcaatcagcggcatccgaaatagtccggttccatgcatcaacagatcctgcttatacgccacctgggccgggtgtatgtatcgacaaagatcgcgcccccgagtcgatcaatggtatagctaaagaagcgccgaaaccggactgtaccagcccagaaggctgtcttttttgtactaagcatcgagacgttatgagtcctgattattgctggaaacttgcctcgcacgcaaagatcaagagcctggaagcaaacctgtataaaccaccggaaaagcaagacattcatcctgcataccgggttattgaaagaataaataaaaaacttgaagcaatagcgtctggcagcgaaatacgagcaatgtgggtaagtgaatctcaggatttgattcgtgccggtaaatatcacccctattggagtggccatatagagctgatggaggtaattgcatga

SEQ ID NO: 84355 - DNA, 1266 bp, Citrobacter koseri
atggcaagccttgagcaaattaactaccagccacaccgagcagaaatatcagagggctcgttgcaatggtctccattaaaaagaaaacccattaaaaatcttccccaaatagtctgggaagataactcaacttgggctgaagctaatctttgggccttggatcaagcaacatcatcaaaacgggatctgaaaaccgttcgatccaacatgtcccacctgcttgcctatgctaaatggctagaagcagagtctattcaatggtgtcacttccctgagcgagaaagtgagcgctgcctggttcgctttcgtggagcacttgttgccgccagaaataatggtgagcttgctccaagtaccgcatcccaacgaatggcggctgtcatccgtttctataaatggacacaatcgcgaagattaatttcaccagaatggccaatgtgggagcagcgatttgttggaatcaaactaaccaatccttttggtctcgaacataccatgcgagttgccagtacagaccttgccatccccaatcgaaaggttgctggggccatacagcttgaggatggccttctcccagtaactgtttctgcaatgaaagaaattctcgcgctggcagatcgcagcgcaaccgaagagctttcgctaatgctacgaattggctttttcacagggttgcgcattggctcaattaccgatctgaaggttcaaactcttcacaacgcaaccctggttcctgaagtcggttggaagcgattagctgttggtcctggtgcgaggccaatggtctcaaccaagtttggcgtttccggttcagtgccaatacctgaggagcttctcgaaacacttattgcctattccatgagtacgagacggctgaaacgccaaatgttagcgagtcatgaagatagggacctactattccttactcgctatggcaactcgtacagcggagatgatagccgagcggttaacgtggaaatgtctcgtctccgatcatctggtaaaagggctgggctgcaagtgatgcgcggttttcatttccatcgcacaagagccacttttgccacagagttaatgcgcgtggcgctaaagttcatgccagtcggtgatgccatccagtttgtaagggaggcatgtttgcaccgagatgaaagcacaacgatgaaatacatcaagtttattgaagcaaacaaagcaatggcagatgcagcggaagctttttcggaagcctttatgggattggctagagggcgtgccaatgcatga

SEQ ID NO: 84356 - DNA, 816 bp, Citrobacter koseri
atgaacaacgccgaacaacagttcctgaacgagctggataacaaattctggaaagccgccgacaagctacgcgccaacatggatgccgccaactacaagcacgtggtgctggggcttatcttcctcaagtatgtgtccgatgccttcgaggcgcgtcagcaggagctaatcaccttgttccgcgatgtcggcaacccggacaacatctatgccatgtcgcgcgacggttacgactctgatgaagagtacgcacaggcgattgtggatgaactggaggtggaagattactacaccgaaaagaacatcttctgggtgccgaaagccgcgcgctgggacacgctgaaaaacaaagccatgttgccgaccggcaccgtgctgtgggtggatgaaaccaccggcaaggatgtgacgctgcgctctgtgtcctggctggtggataacgcgctcgatgaaatcgaaaaaaccaacccgaagctgaaaggtattctgaaccgtatcagccagtatcaattgggcaacgaagtgttgaccgggctgattaatactttctctgacgccaacttcagcaacccggaatataacggcgagaagctcaacttaaagagcaaagatattctcggtcacgtgtacgaatatttcctcggccagttcgcgctggcggaaggcaaacagggcggccagtattacacgccaaaaagcatcgtgaccctgattgttgaatgcctacagccgtataacggccgtgtgtatgacccggcgatgggcaaacgttacatacaatgttttaatcacacaccatacatgtttcaatggtga

SEQ ID NO: 84357 - DNA, 462 bp, Citrobacter koseri
gtggataacccgcatctcagttttactaaagacctgtttacggtcacaaccgatcccgccttttttgagctggaagccattcatgattacctttcgcaatcgtcctgggctcctggtattgatatagaaacggtcagtgtatctatccagaacagcctttgttttggcctactggatggcacaagacagatcggtttcgcccgtctggtgacagactttgccacttttggttatttgtgcgacgtctacgtgctgaacgactatcagaaaagtggcctcggtcgttggttgattgaatgctgtcacgcccatccattgatgtcacgcctgcgacggataatgctggtcactgacagcgccccttggctataccagaaaatggggtatctcccgttgaaccgaccagactttgtctggcagatcaaccgaccagacatgtatcgtaaaaccgaaggtaaatga

SEQ ID NO: 84358 - DNA, 243 bp, Citrobacter koseri
atgaatatgatgatctcatatcaggaacttgttcgcaccttcccttatagtccctgcgaacgcaatgataacaaagagaatgagaactatactcattctctttgtattatcaaccctgactgcaggtggatttaccagaagccgaccagcctcatccacgcgccgcccagcagcaaccagatcagaatcgaggctatcgagacgataaaactcactccccaccactgcccggtggtgttatag

SEQ ID NO: 84359 - DNA, 1521 bp, Citrobacter koseri
atgcatatcaatacgtccctgacgacaaccctgacaatagggggtaactataaagggtatgaaactatgactgagcttaaaaataccattgacgtaaagctggctttcccactctggaaaggcgtgctgaccctgctattcggcgccatcatctggtttatcccgccgccctccgggctggcggtgacggcctggcatatgtttgccatctttgccgcgacgatcttcgccattattctcaaggtgctacccatgggggccgtcacgatgatagcgctgatcgtctccgcgctgacgggggtgacgccgctgaccgctaaaggtgagcaggtggctgcgctctccggttttgccaacgggactatctggctgattggtatcgccatgtttatctcacgtgcggtgatcaaaactggcctcggcaagcgtgtggccctgtggtttatttctaaatgcggctccagcatgctgggcgttgcctacggactggcgctgtccgatctggtgctcgggccgggcatcccgtccgcttcggcgcgcgggggcggcattatgtatcccattacccagtctatcgctaccgcctaccagtccgagccggggccaacggcgagaaaagccggtgcgtttctgatgctctgcgtgtcgcagattgacgctatcgtttgtaccatgttcttaaccgcgatggcgggtaacccgttggtggccgagctggcaagaagccagggcgtagaaattagctggaccatctggtttgtcggtgccatcgtgcccggtatcgcttcgcttattctgctgccgctcgttctctggttcttctatccgcctgagctgaaaaagactccggaaattcccggtattgcgcgtcaggagctgagcaaaatggggccgatgtcgctggcggagaaaatcctcgcgctcgactttgtgctgctgatcctgctgtggaccgtcggcgatatcttcttcgctattccggcaaccctgtcagcgtttgtcgggctggctatcctgttagtcagcaatatcatgtcgtggaaaaatatcgccgaagagaaaacggcctgggacacaatgttctggttcgccgtgctggtgatgatggcgaatgcgctgaacaagtacggtatgattagctggatctcagaaaaaatcgtcggctatgtcgggcacttcgactggctgacggtgtttttactgctggtattggtctacttctatacccgctacttcttcgcctcggcgatggcccatatctccgccatgtatctggcctttctggccgtggcgatctctgttggtacaccgccgctgtttgccgcgctggtgctgggctatacctccaacctgtcgatggggctgacccagtattctggcggccctggtccggcgctctttggttcgggctataacaccaccgggcagtggtggggagtgagttttatcgtctcgatagcctcgattctgatctggttgctgctgggcggcgcgtggatgaggctggtcggcttctggtaa

SEQ ID NO: 84360 - DNA, 144 bp, Citrobacter koseri
atgcaaaaaacagaaatagcgcttttggttcttgtcctcatggtgctgacatttgggctctggttcgtgcttagcggcaacgtgctgacggtgatcagctggctggaaaccctgctttatccggcgattgagtcatctgtttaa

SEQ ID NO: 84361 - DNA, 747 bp, Citrobacter koseri
atgagaaaaatattgggttacacgctgtggctggcaggattgctttttttcttttctaacgcctgggcggaacgtcaggtcaccgaccagttgggacgaaccgtcaccatccccgaccacgttaatcgcgtcgtcgtgttacagcatcagactttaaatctgctggtccagctggacgcgcagaacagcattgttggcattctatcaagctggaaaaaacaactcggcgaacactatgttcgcctggctccacgtctggtggatttgcccatgcctggcgatctgactcaggtgaatattgagagtctgcttaaactctcgccacaggttgtgtttgtcgccaactatgcccctgcggaaatgattacgcaaatagagcaggccggtatcccggtggtcgccatctccctgcgtgaggatcgggcgggtgaagccaataaaataaacccgacaatgaccgatgaagacaccgcctataacaatggtctgaaaaccggtatacgcctgattggcgaggtcgtggaccgacaaaaacaggcgcaggaactgatcgattatactttcagtgagcgtcagaaagtcagtgcgcgcttacaaactattgcaccggagaaccgcattcgcgtctatatggctaaggaaggtgcgaataagcaggtcatttcttcccaagctgactcgctgattaaaatttcgcggatctgggccgatttttttcccgcaaacacatcgaatcagcctatttag

SEQ ID NO: 84362 - DNA, 981 bp, Citrobacter koseri
atgagccatcaactcaccttcgccgatagtgaattcagcactaagcgccgtcagacccgaaaagagattttcctctcccgcatggagcagattctgccatggcagaatatgaccgctgtcatcgagccgttttatcccaaggcgggcaatggccgacggccctatccgctggagaccatgctgcgtattcactgcatgcagcattggtacaacctgagcgacggtgccatggaagatgccctgtacgaaatcgcctccatgcgcctgtttgcccgattatccctggatagcgccctgccggatcgcaccaccatcatgaatttccgccacctgctcgagcagcatcaactggcccgtcaattgttcaagaccatcaatcgctggctggccgaagcaggcgtcatgatgacccaaggcactttggtggatgccaccatcattgaggcacccagctctaccaagaacaatgagcagcaacgcgatccggagatgcatcagaccaagaaaggcaatcagtggcactttggcatgaaggcccacattggtgtcgatgccaagagtggcctgacccacagcctggtcaccaccgcggccaacgagcatgacctcaatcagctgggtaatctgcttcatggagaggagcaatttgtctcagccgatgccggctaccaaggagcgccacagcgcgaggagctggccgaggtggatgtggactggctgatcgccgagcgtcccggcagggtaaaaaccttgaagcagcatccgcgcaagaacaaaacggccatcaacatcgaatacatgaaagccagcatccgtgccagggtggagcacccgtttcgcatcatcaagcggcagttcggcttcgtgaaagccagatacaaggggctgctgaaaaacgataaccaactggcgatgttattcaccctggccaacctgtttcgggtggaccaaatgatacgtcagtgggagagatctcagtaa

SEQ ID NO: 84363 - DNA, 894 bp, Citrobacter koseri
atgaagctcttagcaaaagcacctctaaatctgttacgcgcctttgaagcggctggtcgtaccggagcttttgcgttggccgcctctgagttggaactgtcacccagtgcgatcagccatgccatccgcaaactggaaaacttgcttgatgtacgcctttttcagcgcagtacgcgagaaattacgctgacgaaagaaggtgaaatactgcttgagcacatacagcggggatttaacgaattacagcaggggttggcattagtgacggctgatgaatccaggcctttgcgccttcatactgcaccgagttttgcccatcaatggcttttaccacgtcttggtaagttcatacgtgagaacccaagcatcgatctgcgactttcagccagcacagaatatgcacgttttgaacaggatgattttgatctcgatatagtctacggtgaaccccgcccatcaccctatgagaagatcccgcttgctgttgaagaacttacgccactgtgttctccccaactggctgagcggctaaagaaaccagaggatctctatgcgttgacattgattcagtgcgatgtgcagttgtaccagtggaaaggatggtttgaggcgaataagatgacgccacccaataattatggccttcgatttgaccgtagctttatggcgattgctgccgcagttgacggcttgggagttgtgcttgaatcaaaactactggctgaacgtgaaatcgctagcggtaaactggtatgcccacttgtaaacagtaccagcgaaatacattacatcggtcattatttggttttcccccagcaccagcacatgcattctgcgcttgatgtgttcaaaacctggctactgaatgaactcaatctgggtaaaattcgttga

SEQ ID NO: 84364 - DNA, 1476 bp, Citrobacter koseri
gtgttcggtgactggaatgatgcgtttatacagcacggcgaggaagccacgcgcaaagccatttatgacgccatccggccaccggcgcaaagtccgttcgataccatgagcgaggcagaatttaccgccatgagcgccagcgacaaggctttgcgggtccatgagcattacggcgaagcgctggcggtggatgcgaacggccagctcctgtcccgctatgaaaacggcatctggaaaaatatccctgccgccactttttcacggaatgtggctgatttattccagcgcttacgcgccccgttctcgtccgggaaaattgcctcggtggtggagaccctgaaactgattattccgcagcaggatacaccagcgcgccgtctgattggttttcgcaacggggtactcgatacccaaagcggcgtattcagcccgcaccacaaatcgcactggctgcgcacgctgtgcgacgtggattttaccccaccggtgggcggggaaacgctggagactcacgcgccgaacttctggcgctggctcgaccgtgcggccggtaaaaacccacaaaaacgcgacgtgattctggctgcgctgtttatggtgctggcgaaccgttacgactggcagctctttctcgaagtcacaggtcccggcgggagcggcaaaagtattctggccgaaatcgcgacattgcttgccggggaggataacgccacgtcggccgacatcgacacgctggaagacccgcgcaagcgtgcctccctgattggcttctcgcttatccgtctgcctgaccaggaaaaatggagtggtgacggggcaggactcaaggccatcaccggcggcgatgcggtctcggttgacccgaaataccagaatccgtactcaacgcatattccggcggtgattctggccgtgaacaacaacccgatgcgcttcaccgaccgcagcggcggggtgtcacgtcgccgggtgattattcactttccggagcagattgcgccggaagaacgcgacccgcagctcagggataaaattgcgcgcgagctggccgtcattgtgcgccagcttatgcagaaattcagcgacccgatgaccgcgcgcgcactgctccagtcgcagcagaactccgacgaggcgctcagcattaagcgcgatgctgacccgacatttgatttttgcggctatctggaaatgctcccgcagaccaacgggatgtttatgggaaatgccagcatcatcccgcgtaattatcgtaaatatctctatcacgcgtatctggcctatatggaggctaacggctacaggaacgtgctcagcctgaaaatgttcgggctggggctgcccatgatgttgaaagagtacggcctgaattatgagaagcggcacacaaagcaggggatacaaaccaatttgtcgctgaaagaggaaagctacggcgactggctgccgaagtgcgacgaccccgcagcaacataa

SEQ ID NO: 84365 - DNA, 633 bp, Citrobacter koseri
atgagcgcaatcacattacgtaaagcgttgggtgtacttgcgaagtcatcttcgttttccgtcaccaccgtgacacaccgtcagaaggatgagttcgatcagttaaaggaacaactctttgttaaacaagaaattgaaaccgaattacaacgctatctggatgttgctaaacccggtgaaatcatttttttgtgcggtagtagcggggacggaaagtccgaaattttaactcgctgtcagtcagatccgcgttatcagcggcgatttattttccatctggatgccactcatagctttgcccctcgacaatcagccattgatgctttgaatgagttatttgctaatcatcatcagcagtcatctccattgctcattggcatcaacaccggaatgcttgctaactttgcccgagaaggcgctgaatgccataaggtgatccggtctgcaattgactcatttttatcagggcagcaagatgcaagccgtccttaccgtaacgagaattgttctttttttgattttgaacactatcctaaattccagtttaacgaaaataaaaactattcatcatttattaaaaccttattagataacttaactcgtgacgatgataatgatttatttcagttctaa

SEQ ID NO: 84366 - DNA, 954 bp, Citrobacter koseri
atgcctggcgtgcagaatgtattaattacgcagctctttaaagcgcggttgattaaagaccagtttgttacaacccgagcgctgctagattttttgcatcatctgctgatggggcctggctacttgtttgataacctcttcaccggtgcagaaaatgatctgattaaaaaaatttgcgattttgatcccgccagattgcacacttatgaacttgatcagtttgttttgcgctatgaactgagactggttgatgctgagttcgatgattttttagccgcacttgagccgttacacattaagtttgatcgccagtgcattaagcctggtgacgcaacctcgttgatccggcttttctggctattgcagcacgagtcattgggtaatgattatcatcggagattttccgcgttctttaacgaatcgttgtttgaacattactcagaaatctggcatttacatagaaattacacagcagatctggagcaaaaaagatcactgaatcgcttttacacctctgaacttatcgctggtatccagcgctatgcaaaccgtaaagcgccggagttgagtaagcataaagaagaattttttttaggggagtttggtggggttaaaataactgcgccagtagcgctgaagcctgactgggacgctatccgtagtaaacatactgctcatcctactggcttcgatgttcatttaaaagtgggtgaggatccattaccacccatccgtatcggacttaacctgttcgaattattgaaaaaattaaataatggttatcgtccgaataaatacgataaaaatgctattgttctattagacggaattattgatttagtttctgataagatcaagctcagttctgagataagattttatgatggtatgcgccgagtttatagtgcaagatttgatgacgatatgatctctattagcggaatggaggggtaa

SEQ ID NO: 84367 - DNA, 1341 bp, Citrobacter koseri
atgtatcctatttcagagatcttggaagtaaggaaaaataatccacagcctagctatcttcctatacgaaataaaaataataatattaactggcaaatagtgaccggtttggtactaagttattccttgaaacataaaatcgaagagtcttacgggattgaacaattcagagatgattgcaaagcccattttgaaaaaataattgatgaaccagatttctgggccgtcttggaacgaatgtatttttcgaaccacgatatttttcgtgtttctcctatgtttttattgtttcaatcccagtttaacaatgaaagaataaactctggttctgcagccgataagcgtcttggagctctcttcgctaatttgatgggggattttaatctcaactatccaatgccggataagctgaattttatcgaaaagcaacttttgaataagcttgatgaaaaagtatatgagtttactggtgaaagtccatttaccaaagaacaatcttatcttccctttattgcgaaatgttttcagtccgatttggcatttctagcggaatatccacaatatcttctacaggaactagccaatactttgcgattgtatgcttttagctggtgcgctcaacttgcgctcaatctagacaattggcaaaaaggggaaccgcaaagcaaatccctttttttcatccttgactcggaaaaagccagtgcagaacgggaaggtgtgcaaacctatggttacaagctttttgctcggcatagtaaaaatcttttcccgatgctctctgcgctggaagttttacagtggaatgataaaaagcacaaagggcaacccaaacgcccgctatggcaggtttatcaagattgtctcaattactcagattcaacaaaggtactaaattcgcttaacaattacttgcaggagtttattgtcgagcgcgaacttcaggtttgcgaacgagctgcaaacttggatgaggcctttaagcagctaaaatcagttgctgttggacagtttcagaataaaagatctgatagagcaagagtgaaccgagactacattaatgagcttgagagccagatttgcactgactttattcaggttcgtggtcgtgcagggaaagtgctggtgctgaatcaggatcgtcttctgttactgaccaatctcaccataggcaaaaatgacaaactccgcctgcacgaactgctgcgtggttttgaacagcgcggtttttatctggataaccagtcggcgcaaacgttggtggcgttttatgaacgcatgggaaatgtagagcgaatgagtgatagtggagacgccgtgtatgtccgtaaaacagtatga

SEQ ID NO: 84368 - DNA, 5082 bp, Citrobacter koseri
atgtccgtaaaacagtatgaaacctatctggcaaaaacctttattgaatgggtaggtggcatcattcagcccggcgagcgctaccagttcaaatctcccgatcccgataatgccctaaaactctgggaagcattcgtctctctggcggacggcaatcagttggaaattgcgccagggcaatatattgattgcctcccctgcaatggtgttcagcttattcctgtactgcacggagccgaggctccagcattcacagaaaactacatttctcatttgcgcgatgaagttgcagggcgcagcggcgtttttgcccaaacagcgctgttgattattcacaacagtatgctcgataccctgattaacagcacgaaagacgtggcggcaccggatgctatttggtacccacaaactttctgtcatcaactggacaagctcattactactaatagtaaccgttcggaattgtcccgctgtttgctggaggatcaactggcgacggtactggatgaaggcgcgaccgtatttggtttctcgtcgctgtatcgcttgctggatgatggcaatctggatttctccgagcttcatctgtttaaagatgatgaactactgaattatagccagaagcagctacgcacccgactgagtgaaaaccggaaattatatcgccagatagaagatagtgttgaacgctacagtggacagctggagaatgtgctgcctgagtttagttcaaaattcattcaggagcatttttacgataaagatgactggcgtgagctcgatttctccgactacaggaaagagaaagaacagaatagtgaacaaaaactggtactggagaacgtctccgtcgaaaacggtgaggtttggcaacgggcgaaaagcgccagtaaggcaggcaaacgtgacatcagcctgctggtgcaggtgcagccagggcaatcaaaggctgagctggaattcagtttccaaggtaatgatcttcaagataaccagataaagattgcccataatcgccagttaaagaatgcatctttctggcgcaccagccgggcgggcggcaagacttcccgcattatggcgtcggtgccttttgacgggcatccctgcttcttcagtctcgaactgaccaaccgcaataattcagctgaagagtataaatttcgcctgttgttggtcgaacaagggcaattctggctaaacgatattcagcactgctaccgcgttgagccaggtaaagatcaaataaccctgcaactggaagataacacgctgcgtattgccgagtctggcaaccttacctgtacgttggatgacgagagcgaagacatcgactgccagcattatgctctggtgaattttgagacgctggcaaatcaaagtgacctggttcagtttgtgctcgtttccggtgattcccgtctgtcgtttaacatcgaggggccgggagcagaagaagggctaacgttgccgttgctttttgaccaaagtcgtttcaataagttgttcaaagaagagggtaatgcaacctggaaccgactaaaagggcgcatcatactcgataatactgaacacaaggtcgtcggtgtacgccagcagttgttgatactggaagcctcattaattgagcaacgtttgctgggtacgggaagtgacgatagtgagtttgcgctggatgaacttcttgccagctaccccgatctccataacgcctatgagcagttatttgcctactatcatcgtcgtaacaccctaccgagtctggtgtcgtggtcagcggaatatcgcacactggtcagctacattgttactacgtttgagcagtcgctccagcaaatcggccagagcagagcgctgacagcgcacgagaaacgtcttctgcatctggggatctgccgcaatgatagccatgagcgtctctcaccactgcacccattagtgctggcctaccatctgcaactggcagaaactatcgttgcggagtcggaacagcacgattcggcttcatttgccacactaccgccgatcactcttgatcgcttgatggtttccgggttaatgccgtttgtttatcacagtgagcatgaatacgcgcaactacagccggtggaggaaaaccgcttctggattgatgtggttcctcagcgacaggttagtcatgactacattaagcgtctggtaaaagacaaactcaatgagttcacagacgcttacgcccggttgttccagagtgctgaaaatagtgcgttgattatcaatgctattaatcaagggaatgccaaagaattgtttctgggattagtagaatattttaaggaagaaaaagagcacgctatttcggttcatgtgaactgctacgatgaacgtttgctaccaaatatgttcgatcactttgctgaaagtggtagctatgaacagcttaaaaacgatctcgatctgaacagcggcgtatggcgggcggaagccgatatgctgattgatttgctgcgtagccggttaacgttcagcaagtttgtcctgccgtcagaaagcgacaagctggcctatgcacatctggcatttttcaccaatacagcacctgtggattgccgccagatccgcattgaagatgcatccagcggggtattgtgtcatgggttgatcgctggggagggggctgaaacgcagggggatgcttactttaccgcgtttggactgcgtgatgtggatactgagtcttattgcgccctgcgtcttgccagactaatcggctgcctgtggcaacccgcacgtcaaagcaatagccagtatcatggacaagggatcggcctggctgtgagtggcaattttaaacagttgctcaattactcttacaatagcgcgctttggaccaccatcattgatcctaaagtcaccctcgactttttcaccagtcagaaagatgtggtgcttatccactattctgaccagtacaccagttgcgcaggctacgatgccgtcaccgtcacgaagcaggttgatttgttcctgcggttgctccagacaggaagccagtcagggcaacctgctgttgatagtcagcatttgctggctgaatttaatgcctttaacggtgaatggctgctgaaaatgctgcgctccagtgaaagggagcgtaaagagaaacacggcattataggcgcgtacaaatttgtgcaatccatgttgcaccagtccgatatttgctggattccgctatcggtggccgaaatgatccgtgtgtccggcaatgttgggctgaaaatgaaagaaagtgatttatcgagaaatttacaggggtatcgtaaaggtgcgatctctgatgatgtgctctttgtgggattcaaagaagaccgcctctatctgttgccgctggaagttaaaaccggggcgcgacctgactacagctatgcaggccaacaggctcgtgagctgaaacgttatttacagcaggatattctggaaccacaaacgctggcatcacagctgtaccgagcactctttattcgtcaggtactgatgcaggtggagaaactgcgcctgtatggtgtgctggacagcgacaaactggctcccttgctggaacgacgcgaatggtggttaacgggcgactatcagttaggtgagttgaccgactatgcggacggcttcgttgtggcgcatgtggacagcgcaacctgcttcgatctctcttataaagagacagcggagaatattttacagatcgaaatcccttattcactgctgccttcgctgattgctgcgcagggggatgaaccaccgctggcggaacgttaccgggtgccggaaaaatacctgcttaagccagagtgtgatgccagtccttcactacccgaagttgtggtaaaagtcacaacgccgaccactgcacagtccatttcggaaccagagtcgttacagcctgctgtatcggtggcagctcctgatattagcgataccccattacagatcctgtttggtcatgatgctacgcgtcagagtccgttatattgggagccaaccaacaccgccaagtttatgaataccaataccggcattattggaacgatgggcaccggtaaaacccagtttactaaatcactggtcacacagttgatgcgtaatcagtcctgtaacgttgatggtaaacctattggtttgctgatcttcgactacaaatcagactatgtggatgaggctttcctggatgcaacgggtgccaaaaagtacaagttatttaagctgccttacaaccccttatctctatttggcgacacgccaatgctaccaatccatactgctggtggactatccgaaacgatggcgaaagcctatgggctgggccataagcagcagctcaaattagaaaatctgattttagaatgctacgaagcggcaggtatttcgccggaagatccgacaacatggtcaaggactgcgccgacgattgaagatgtatggcagcgcttcctcgatcaggagaaggttgaagaggattcgctttacgcagcactttctaaactggcgcgttacaagatattcgagactatcccggagaagatgaccagcttgtacgaattgattgacggcgtcaccgtgatcgaactggctggttacccgccagaagtgcaaaacctggtagtcgcacttacgctggatctattttacgctcagatgcaaaagcgcggtaaaccggtggtgaggggggattatcgtcagctcaccaaaatgattctggtggacgaagccgataactttatgcggcaggatttctccagcctgcgtaagattcttaaagaaggccgtgagtatggtgttggtgcgatcctgtcaacgcaggagatcactcactttaagactggggaaaataattatgcttcatatattttgacttgggtgatccatcgtgtttctgagattaggaatgcagatattaaggcggtatttaacgttgatgataaaggcgagcaggagtctttgatggggcagattcggcagcttgaaaaacattatagtttgtatattgatggagataaaaaggtcaagaagatgcgtgataaggcattttgggagttaattgtatga

SEQ ID NO: 84369 - DNA, 804 bp, Citrobacter koseri
atgaataaaagagaaaagtttcttgtttgtacaaaatattacttatcaatcaataggctaaagattgatgaaaaaggctatttcaagtattggtttttattatggaattttcttctttctgtaatatatgaagtaatacaaaatccaaaatttatattttcatttttagtgattatgcttatatccagtgcagggatatgggctccatggttatactctttagacctctcacctgtctgtgaaacaatagttccaacaaatgctgttattacaacaacatcgggaggagttatacactcagataaaatagttgaatctgttaatgtggtttgtttgtatatttcatctcttgatattactctttttcagaatttttcattatttatgtttaacttagggttgttgggtgggattgctgctgagttttttatacaaaaaaaagatgattcagaatgcgagaaaaatattagctcagatgatttattaactgatgacggtagtgatagccgagtaaaggaatatgcagcatttttcctttgggtagtagcatttatactgtcattctttgcattgaaaaatccaacaggtgattcccctcaggttttctggggaggggtattatcgatttttttatggatattcacaaatattaggaaaaaggaatatatcgtaaaaacggatgcaaataatcttattggtggcatagtattggatagtgataaattacaaggtatgggactcgacgaggcggcaatttctccagaacatcccgtcactcaactaaatggagatggcctagaatga

SEQ ID NO: 84370 - DNA, 1149 bp, Citrobacter koseri
atgagtggatatcatgaatttttagcaatgaaagtgtcccagccatttgctgattattatgcctgtgttataccttctggtactctaaaggaaataagtttttccttaaaggccgagaatgtaaatgggactatccaaggtgttcagcgtttactgaataataaaaggctacacgaaatatcaaagtttattgatggagagtctgctgcttttcctaactcaataattctaggggcaaattttttaaaatcaggtagatatgctggagaaagcgaaagatgcttagtcgaaccaacaactacagagaacctttacacaataaaggtgcctaaacattcggaagttctttctattattgatgggcagcatcgcttgtatgcttttgaatatgctgaaacacaaatggatctactttgtgcaatttatatcgatttagctatgccttatcaagcttttctattttcgacgataaattacaatcaagggaaagtcgataaaagtttagcgtatcaattgtttggttatgaactggataatgaagagccaataaattggccgccagaaaccctagctgtttatcttgttcggcttttcaacagtgaaaagcctttgttaaataggattaaatatagaacagcagacgaacataaaaaaaacaatacagcttcttggcgtgtttctactgcctctattgtagaagctatactttctctgataagtaagaatcctaaagatgatcgatatttgatgaactcaaagcgatatgcgggcgaaagtactatatatggaagaagtgttcttaaagatgatgcagagtatcccttaaggaaattatatattcaaggaaatgataaagctattcaagaagtactgtctttagcgttggatgccacagatgaaattttttggaaagatctgggggatgataattttctcaagaaaacagttggcattgcttgcatatttaaatttctaaaagctgtcttgcttaagcatggcgtttctaggaaggttataagtgatgactttacaaactatctaaatgtaataaaaaacaaagaggatttctctgactctactctttatccctcatcaacaaaagggatgaatgatgcttataaacggatgttgtttttgacaggtttataa

SEQ ID NO: 84371 - DNA, 354 bp, Citrobacter koseri
atgctccctaatcgaatggtgcttagtcgtcagactgaagaccaactcaagaagttaaaaggatatactggaattacaccaaatgtcgcggctcgactagcattttttcgctcggtggagagtgagtttcgctattcgcctgaacgggatagtaagaagctggatggctctctggtgctggataaaataacgtggctgggggaaacactgcaagctacggaactagtgctgaaaatgctttatcctcaattagaacagaaagcgatcattaaggcatgggcggcacatgtcgaagatggtattgctgcattaaggaattatcggagcttaaaagatttcgccttaaacttataa

SEQ ID NO: 84372 - DNA, 2010 bp, Citrobacter koseri
gtgctcattaagcaactggtattacataattttcgcgtattttgcggcacacacaccatcgatctggctcccagaaagcgcccgcatgaagtaacccctcgcccgattgtgctatttggtggtttaaatggtgcagggaaaacgtctattttgtcagcgattcgactggcactgtatgggcgtttagcatttggcccggcaatgcagcagcaggagtatgttgaacaactcggtgcgctggtgcacaacgggacgtataccacggagcgcccggaagaggccgcagtagaactgacctttacctacaaccaaaacggccatgagactgaattcaccgtcacgcgtagctggaagaaaggaaagaaagatcgtctctctttgcaacaggatggacaaccgcgtagtgaactcagttatgaccagtgccaaggatttttgaatgaattaattcctcacggtgttgccgatcttttcttttttgatggagagaagattgcagagctggcggaagatgaatccggcaatattctgcgtacagcggtgcgtcgtttgttaggactggacctgatcgccagactgcaaaatgatctgatgatttttgtcaaacgccagcaaaccgctcagttgggtggctcccagcaacagcaggttgaagcgcttgaggcaaagattaaaacgcttgccggtcaggcggagaaattgttggaagaggcagatttcgtcaactcgcggattgaatttttatcccaggacattattcgccatgagggattgttaaatgcgcagggtggcgcatttgcccagacgaaagcacaggaaaaacagaaagttgaaacgctgttaaaagaaaaagaacgtctggaaaaagcgttacgacaggaatgcgatggatcgttgccctatgcgctagcgcctgatacgttgtcgcggttgctagaaaaaattgccaatgaagagcagatcaagcaggcgaaaatttttgagacggagttaaatcaatttttaacccaactcaaaaatgatattacgctccgtgccagcagtgagagtaataccagaaccattgctactgaagctattgccgataatttagatgcctatatggcaaccaaacccaaaggtgacttgctgtttgatatttctgaacgtgaagccggtatgctccagcagtccattaaacaggacagcaagaaagcctgggagagatttgatacctatcgccaacaattagcggatattgaacaacaactggagcaggccgcagctaatattgctcgcgccccggaagacgagcaattaatggatctctttgcagcattacgcgagctcgatcataagcgtgaaaaacagcggcaaaaataccgctcactgctggaagaggctaaacggacaaaacagcagcaactggactgtgttcgtcaggtacagaaagcacatgacatcacccgtagccaacatggtttgagcagcgcatttaaaaatgcgcaggaaaccattaacctgctcgattactacagcgatgtactaacgcaggcgcgagtgaaaaaattatctgctaactttgaaattgcctaccacaagctggctcgtaaagaggatttacagcttaatgcgcacataaatccacagacatttgatgttgaactggtggatgaaaagggttcggtgattaatcgcaagctactttctgcgggtgaaaagcagatttatgcgattgccattcttgaggcgctagcaaaaacttctgggcgtgatttcccggtgattattgatacaccgctggggcgtctggattctcagcaccgggataagttgattaatcattatttcccggaggccagccatcaggttgtgctgctatccaccgatactgaagtggacgagcgttatttcgtcgaccgactgcgtgacgatatttctcatgcttatgagattgtgtttaatgcgcataccaaatcatctgcgctgaaacccggttatttctgggaactaactaaggaggctgtttga

SEQ ID NO: 84373 - DNA, 495 bp, Citrobacter koseri
atggtcaggcaaaagtgtagcggtattaggcgcagctatttagatatggctgaacaacaatttcgcttactatcattaggtctacatagagatcgagatttatcttacaggctagtggcttttcactctagccactcacaaatatatattcaatcgttaaaggcaatattacggtggccggggttatataacatcgacgatggcaagatatatccccacagccatttaaagtgggatctgccactcatgctgattgttatactgaccattatgggttcagaggtaattgaaagctactcacgtgaggatgtcagtcaatttattcttttcttgactgtcaccttggctgcgctaatcccatggttttgggtgttatcctgtaccctcaagatatttagcatcagtaaaaaactgaacgcatatactccaccaaccattggggctgaagctagtaaagaggatttcagctcaattctcaataacaaatacccttaa

SEQ ID NO: 84374 - DNA, 807 bp, Citrobacter koseri
atgcgctttactgatggcagcaagcaactgaaaacgcaggctaatcgctatgtattgcagattggcggcgacctggcgcagtggagcagcgatagtctcgaccgctggcatctgggtgtgatggcaggttatgccaatcataaaagtaaaacgcataacacccataatggctacgcttcacgcggtcatgtgaacggctacagcgcggggttgtatgcgacgtggtatgcgaatgaagcggataaaaccgggacgtatctggatagctgggtgctctataactggtttgataacaccgtgcagggtgaccatcttgccagtgaaaaatacaaatctgacggtatcacggcatccatcgaagggggatacaccttcctgataggcgaaagcgagcgtacgagttactggctccagccaaaagcccaggtgacctggatggacgtgcaggctgactcgcaccgtgaaagcaacggcactcaggtgaaagacaaaactgacggcaacctgatgacccgactcggtgtgcgtgcatacctgaagagccataacgccattgatgatggcaaagaccgcgagtttcagccgtttgttgaagcaaactggctccacaatacccataaccagagcgtccagatgggggcgatccgggatgaaatcagcggcaccaaaaatattggtgagctgaaagttggtgtggaagggcaaattaacccgcgtttgcaggtgtgggggaatgtagctcagcaggtaggcgacaacagttacagtgataccgcagcgatgttgggggtgaaatacagcttctga

SEQ ID NO: 84375 - DNA, 2007 bp, Citrobacter koseri
gtgattctgacccccgcgacagcccctgcctggtgtacgaaccgtgccgaactctggaatgccgttgagaaggccgaatgccggaagaactcacaacttgcgcgggaaattgaactcgctatcccccgtgaactgccgcaggatgccgcacgggaaaccgttctcgcctttgtcagagaaaactttgtcagtcagggcatgattgctgatgtggcgttccatcacatggataaaacaaatccccatgcgcacatcatgctgaccacgagggctgtcggacctgctgggttcggcggaaaggtcagggactggaacgaccggacacatgccgagacgtggcgtgcatcatgggctgaccatgcaaacagagcactggcgaacgccggttatcaggaagagatagaccatcgttcatacgagcgacaggggcttgagaaaacgcctggtattcacctcggaaagtctgcctgtgcgatggaaacacgcggtatcgaaacagaacgcggcgaacagaatcgtctgattaacaggcttaacctggaaatacagatttcccgcactgaactcaggaacagcgggctgacagagcctgcccgccgtgtggctgaccttctgaatatcgtgcttcctgacaacgcaacttcgtacacactacgtgacatcatcgaagcgttgccgaaggacagtaatgcggcatggaaactcaccagtaatgccatgtcgatgatggcagatatgcaggcgacgcgcagacgctgggaagagctgaacaccgaacgaaaggaagcgatgagccatgctgccagcctgaaaaaatcatcgccgttttcgtccggtttttcccgtattcccctgatgcaatgggcggcaccggaataccgtagcgaacagggaaaaatccagtcgctgagccagcaaatggaaaaattgcgacagcattaccggaaggtggagaaacaggacattcccgcgagtcagacggcatttgaaaaacagtggcagcagtggggggcatccggccttgcagctctcagagtccagttgcttaaacgtgaagaggaattgcgccggaaggagcaggaggatacagaacgtagtcgcgcggagcgacgagcggaacagctcaggaaaaatgacaatgccgttatggattcaggggtactgagcgcagtcgttacggggtatggcgaggcccccatgcctggtaacggggaaatgacctgttaccttctgcttcacaaccggaacggagaatacacgctctgggggaacgagctggagaaataccgcaccagaatctttgagcgtgttgatttaatgcgtgacaggagtggttatatctgtgaccgaagcgaaatcggtcaacatccaccactgcaacgtgtttattcctctgcgacctttgagcaacttctgacgcaggtttgccagacatggccgcaatatacccgcaatctccgccagccgaagacatggccggagtctttctgtcttggagaagaccgccagccagccatgccatcactggcagcaaggaaggtggattttacgcagggacgtctgctaccgacgctgatgccggtaatgagttctgtcgaccgggaaacccgccagcttcagcttttgctggtcatgggcgtggatgactctctgggcggtgttgtccggcttaatggtacgctgtatcccgcgtttgccgttccctcagccgataacagccagctggtcatcagtgcactgaccgataaggggttacggtatgcagggtatggtgttgccgtaaatcacgatgcagacagccacatatcacctgcgccggaacttatggagtttcatctgaaaacccgtgaggcaccgctttttgctgccgtcaacacaccagaaaaacagccggatcatctgttccgctctctgggtttcaatcgtacctgggatgaatggcggcgcgaggaagatgcaagaacacacaccaccgagaggagacatgatcgcggttggtcacagtga

SEQ ID NO: 84376 - DNA, 693 bp, Citrobacter koseri; identical to SEQ ID NO: 7206

SEQ ID NO: 84377 - DNA, 255 bp, Citrobacter koseri; identical to SEQ ID NO: 7207

SEQ ID NO: 84378 - DNA, 1341 bp, Citrobacter koseri
atgatcaaagagactgttacgatgagtcataaggaactccaccgacttcagattattcaggagtcaattaatcgacatattactcaggaacaagctgcggcacgcattggcatttctattcggcaggttaaacgtctggtgcaacggtatagaaatgaagggccttctggtctggtttcccaccgacgtggaaagcgtcctaataattccttttctactgaattcagagcaacagtaatttcactcctcaaaggccgttacgctgattttggacctacgtttgcgtgcgaaaaattgcgcgagatacacggtttatctttatccgttgaaactctcagaaagtggatgatagaagaggggttatggcgtgaacgccgtcgtaaaattgcccgtatatatcaacgccgcatgcgacgaccatcttacggtgaactgatccagattgatggctcacctcatgactggtttgaaaatcgaggccccagatgtacactgatcgttttcattgatgatgccaccagtgcgttgatggcgttgcgttttgtgcctgctgaaacaacccgggcttacatggaaaccctccggggttaccttaatgatcatggcgtaccgctcgctctctactctgatagacacagtatattcagggtaaataacccagagcgggaaggtgagctgacccagttcactcgtgcgataaagacactgggcatcgagccaatccatgccaacagcccgcaggcaaaagggcgggtagagcgcgccaatcagacactacaggacaggctggtcaaagaaatgcggcttcagaatatcagtgatattgaaacagcaaatgcatggttgccgacctttattgaagcctataacaaccggttcgctacgtcgcctcgtactactgataatgctcatcttgatgtgcaccattctgaagaggaactgggttatatcttcagcctacaggcgaagcgcgttctgtctaaaaatctcactttccagtacaaaagcagtgcgtttcaggtacgcagtgagggccggggatatcgacttaggcattcggttgttactgtatgcgagaactttgacggtgaaattaacgttctgtatgacgggaaagcgctgggctgggaaaagtatgttgatggcccggagcctataccactggatgatgaaaagagtgtccatgaacgagtggataatgcccgtattgatttacgctcaaaatactatgttaaacctaaagctgaccatccctggcttacgcgccgaacgcaaagtcatcagcaagttaagcccccgaagttacctaaaaagaagcctgatcccgataaaaaagattga

SEQ ID NO: 84379 - DNA, 333 bp, Citrobacter koseri
atgtctgtcacaattcagggaaatacctcaaccgttatttcaaacaactccgccccggaaggaacatcagaaatagccaaaatcacaagacaaattcaggtgctgactgaaaagcttgggaaaatctcatcggaagaggggatgacgacacagcagaaaaaagaaatggctgcattggtacagaagcaaattgaaagcctcagggctcaactggagcagttgttaaggcagcaggcagagaaaaagaataaagacgcgacagttcagcctgataaaaaagaagagaaaaaagacgatacaaataccgctggcaccattgatatttacgtctaa

SEQ ID NO: 84380 - DNA, 240 bp, Citrobacter koseri; identical to SEQ ID NO: 7038

SEQ ID NO: 84381 - DNA, 288 bp, Citrobacter koseri
atggcgtattttctggattttgacgagcgggcactaaaggaatggcgaaagctgggctcgacggtacgtgaacagttgaaaaagaagctggttgaagtacttgagtcaccccggattgaagcaaacaagctccgtggtatgcctgattgttacaagattaagctccggtcttcaggctatcgccttgtataccaggttatagacgagaaagttgtcgttttcgtgatttctgttgggaaaagagaacgctcggaagtatatagcgaggcggtcaaacgcattctctga

SEQ ID NO: 84382 - DNA, 438 bp, Citrobacter koseri
atgcacggtgagtgcggtcgcataaccctctgcaatccacagacgttttccggcctgttttttcccttcgatgacatgacatgcccctttgacctgaccgcctttcagggtgcgtttgaggccgtcagcattgataagctgaaggttaaccagtgtgccggtatcctcatacagcgggacaaccacatccccggcgcggaacgtcacgccgccggttttatgcatgacggtgagcgtcagacattccagagcggggaaacccttgcgggtgaggtaggcgttgccggtggccggtcgggttttctccatgagcctgacggccagcgcggccgccgctttgcggtcggccacagtttcggcctctgcggccgcaataacttccggggcaaccggcgacagattgccggtcacggcgttcaccttcccggcggcctctga

SEQ ID NO: 84383 - DNA, 435 bp, Citrobacter koseri; identical to SEQ ID NO: 19847

SEQ ID NO: 84384 - DNA, 1827 bp, Citrobacter koseri; identical to SEQ ID NO: 11454

SEQ ID NO: 84385 - DNA, 927 bp, Citrobacter koseri; identical to SEQ ID NO: 11456

SEQ ID NO: 84386 - DNA, 1557 bp, Citrobacter koseri
atgagaatgttgcctgttttgcctgatgaatccttgttcagccggttttgtcggacaactaccgtgtacggtatgtccccatcttctctgttaacgatcattttcaacaaacctgatatgaacgtccatccaattctcaattcaggattaaaggctatttctcttcatacatccgaaagtgcagatcagctctggcatgaacagactttactccctctttttgcctgggcactaccaatcagtcgtaatgaaattatggatttcaacacgacccctgccaggcttaatcgattgtgccgccttagtaatttttcactagggcagcgcacactattgaagttttgcccggtttgcgctcgtgaagatacttttcattatggtgttacttattggcatctggcgcatcagcttcatggggttacaacctgccatcggcatccggtagcgcttgaaagcatccatgtcccttcttcaccgcacatacgtattggactgatgcctcctgtttcgtatacagaacaacttagcaatgagatagacttcgattttgctaagttttgttatgagtccctaaatataatcagaagaaaagatattacacaccccaattacatggatgtacttaaaaagttgaatttattatcattggatggaaatttaaagaaaaatgtattctacgcacatgtttatgctaagtgccagttatttggggagggttcatcgggacttataccaacatccctaactgattatcattactgggagcctatactcaaagacaaatgttgtcagcatcccacaaagcatcttttgctttgttattgtttgttaaatacttgctggccaacgtatgcaggaagtcgtactaataaaaagaaagaaatctttaaaagtcataagaaatacagttttcatatagttgaaaataatactagtgttagcaaccttgggaaggaatttagtcgcagcagatgttacattaaaacacttatttataaaaaatacctgagggcgtttaagcgaaacacaaaaattaatatattcactgaattgcttatcaagtctatggctgtaagggggtttagtctggcatccatagctgagaaaaactcattatcggaaggagctgtatcctctgtaatttcatcttgttacggtttatgctcatggcgtaaaaaatgtaaaaaagattctttaagacggcgtcataagcagaaaatattaagatttatacataatcaatccgtttctataacacgaaagttagtcaaagaaagttgttatgcaagtttctattggctaaataaacatgaatgtgactggcttaattcctgtcttcctaaaacaatacgatgctataaaaataaaagagtagactggagcgagagagatattatctcatcatcattaataaatgatgttttatctcaggggcagtactcgatgtcacttacaagtctagatgctttactgggagggcatggctggcttttgaaatacagagataaactaccaatgacaatgatacttctcagaaaaatggaactaattaaataa

SEQ ID NO: 84387 - DNA, 1449 bp, Citrobacter koseri; identical to SEQ ID NO: 11330

SEQ ID NO: 84388 - DNA, 2124 bp, Citrobacter koseri; identical to SEQ ID NO: 11329

SEQ ID NO: 84389 - DNA, 843 bp, Citrobacter koseri
atggctaggggtaggcgtctcaaatcctatttggattatgaaaatgcgctaggtgacggcataggagtgggctatggccaaagttatcagccctggcttagagctcaggacgttaaatcccgtggaaaccgttcgatagtctttggccttaagacgtttcgaaaccatcatctcctttcttctgtcgaaagtaactttttctatctggctgagtttaatgactcggtgattgatatccgggaacaattcccactctttcctctccggcttacccaacaaatagcaaatcatctacattttcaacatcctatggtgaggggagtaagaggagtacctgtcgaagttctgaatgttatgacaaccgattttttactgaccttgagaactcctgaaggcggacttcgatacaaagctatagcagtaaaacataacgagagcatacctgaacgcgaagcccaaaaacttgaaatagagaggatgttttggcagttgattgatgttgagtttcaaatttatgttggctcggaactcaataacgtcgtcggtaaaaacatttgctgggctacttctgtattaagagatggttctgaattttatgataaatatcctcttgataaaatcctatggaagcttaaaccagatgtttatcccatagtaggactacgtgcaatgatttcatcaatctttggggtagacgcacaagaagcgatgatgttattgcaggcaatgattggattaaaaatgataaatgttgatttatcatatccaatactcgaaaccggtctgataaagataatttccaatgaccactatataggactgaacgcaaatggatattattag

SEQ ID NO: 84390 - DNA, 1626 bp, Citrobacter koseri
atgagcgttttttcaccaaccactcagcaagcatcagccattgactaccctaaaagtatggtaataacagcatgccctggtagcggtaaaactacagttataaaagagaaaattagaaatattaccggttgtcttcctgagcataaaggagtcattgctattacttttacaaggaaagcaagtgcagaactagagcgtagatgtaaggccgatgggcacgatataaaacatagtttttttggtacgattgatagcttttgcttaaatgaaataatcattccgtttcttcccaaaatatggggtggcaaaccaacagaatgtaaagtacttaagaaattagattctccttataaatattacttaaaggaggatttttttggaacaccatcaattgttaatgtcaatgaagacgctggctataagagactgtatgatgagggaatgctgtggatgagttcatttgctgccttatctttaaaaatactcaatgaatctcctgcagcacaacgatatataaaagcgagatatagccatatatttatagatgaatatcaagactcatccttatcacagcatcaattatttttaaaaataaatgagatcggtttatgttctattgctgttggtgatgtttggcaatcaatttatgagtttcgaggtggaaatgcagagttgttacttgacttggttagagataaaagtatttttgagcattttgagataaatttaaatcatagatgtcattcatcaataattaattatgcatctcgactactagattcaaatttcgtattattgccaagtgaaagtattaatgtttataggaagagattgcctggaaatcttaaagatgtttcgatgacattatcatcatggatttcaaaatggttaaatgtaggtcaatggggcgtggagcaagcaagccaaatagctatttttgcaagaaaagaacagtcgttactattgctatgctcgggattgacatcaaatttcagggtttatattgatacgccattagataaattgggcacagaatgttcagatttatataaagatcttctagcgtatagatacaaggcaataggtactgcgcaagaattaattaataaagtatttgatggcttaatcatgaatgacaaccatcagtttttattaaggaaaaaaattaaaattctcaggagtaatctaactgatgaggaactaattaattacttccatgaaatcgctggaatgctaaacattcagtttactgaatctaatgataatgcagttttggaaattatatcagatggtatgtacttaaagcagtttatgccattagataaaaatgaagttcaagtaatgacacttcacaagtctaaaggacttgaatttaaaatagtattacatttggatatggatgaatggtcttttccatatagattagtaaatgaggttgatagaaatatagcactttatcccagtcttccacaagaaacaaaccttcattacgttggtattacaagagctgagaaatgctgcgtattaattaatgcagagttacgccaaaactcgactggggcatttaagaagtctgaagcatcttacttttttaaattgccccaactagagggtctttatcgttag

SEQ ID NO: 84391 - DNA, 1701 bp, Citrobacter koseri
ttggaaatatcatatctgaaacttaaaggttttagaaactttaaagatgcacatatcaattttaattcgaacactctgattatcggagctaatgatgttggcaaaagtaatatgctgcattcgctaagaatgctattagataaaagtgtatcagattcagaaattgaaccaaatgagcttgatttccatttagaaaatgggaattcatgtgaagagtttgagattattcttcattttaaagatatcaatgaagatgcggttctttcaattttgaaaggtaatgtcagtgactctggtgaatcttttattaagtatgttgcacaaaaatctgatctcagctacaaactttttataggtgactctttagagtctttacaagaaattaactctcgttattatcttaagttcgttaatctaaaatatattcagtcacaacgagatttagaaagatttatccgcaaagaaaaaagacaactcttaaaaattgcccaacaatcattgaactctgatgaaagaaaagaagatgaagatttattaggagagataagtacagatttgcagttgatcaatgataaaatatctcagcttgtatatgtagaaagagctacaaaagaagtcaacgatgagttgaaaaaacttgcacatcattattcagagtattctgtgcaactagatactggggcaattggaataaatgattttattgataatctacaacttggagctaatacaaatggttctaacgtaatgcttggaggagacggacggaacaatcaaatattattagcattatggaaagcgaaaagtattaaggaacatgatatcgataacgaagtcatcttctatgttatcgaagaacctgaagcacacctacaccctcaccaacaaagaaaattggctgattatttgatagctgaactcccaggtcaaacgatcatttcatcacattctccccaaatagcggtaaactttgagccagactctataataagattgcttgaccgtgggggacacactgtagccgcaagtgaaggatgctcaaaaggtatttcagatggctgggaggatatgagctatcggatgagtatattaccagcagaatcatttttttcaaatggcgttttcttaatcgaagggccatccgaaattttgttttatcattccttagctaaaagtttgaaaattgacctagattatttaaatatttcattgatttcagttgatggaatatcatttaaaatatacgcagcaattctagatgctttagaaattccatgggtaatgcgcactgataacgatgtatcaaagctaaaagataaagaaaagtggcactatgcagggattaatcgatgtttagatatagctggtatagaaaagtttgagcatagcgacaaaaaaatatcttctcaagatactcttgctaacggtgattggcaaaaagtttctgatgaagtgaatagatctggaatatatttatcaaaaattgatttggaaactgatcttgtagaagaattaggtgcttcaatattagatgcactagataaaaaaaataaccaaagcgcaatagaatatttacaaaagaaaaaagcaataagaatgcgtatacttcttaagaaaattaaaaatgaccttgataaacttagtatgggtgatttggttaaaccgttacaccatcttgtaaaaatagttaaaggtgaatga

SEQ ID NO: 84392 - DNA, 204 bp, Citrobacter koseri
atgagcacgattaatattcacgaggataaatttgtcagcatgcagtttattactgaactaaccggtttgtccgataagtggttttataaaatggcgcaggacggtaagttcccaaaaccggtgaaatttggccgcagttcccgctggattgaacgtgagataaaagaatggttagaagcccgtgttaatgagtcaagagcataa

SEQ ID NO: 84393 - DNA, 1164 bp, Citrobacter koseri
gtgagtgatgagttatggttcgacattaaaagctcgcgtgatatcaggttatttctgtggctaaacggggatgatgtcgctatttacaattatcgtttgaaagatagcagcaagaaatacagcgcagatctaatttatggagaagattatagattagcagcagaggcaataactgacgcgtttcgtctgttttataaagacccagatatacttcgtgcatatgcatctaattttaaaaaagccaaagatgcaatgttgccattaaaagaattcaactggtttaaacgctgcaatgatgcctgttactttacctgggtgtacataagggttctcagtaataaaaataaagcacttggtagttttaatataaatgaaccgtgcactgtttatacccggacgtattatcaccggctgattaaaattcagtatcctgtaagccatagtgaacgccttgagtgcataaaagatttttttgacaggtcatcgatggatctttcaacaaaactattgataatgtcgaagataagatacgagtgggacagacactctcctttagtaaataacctccccctaaagaaatctgagaaagtaaaaatacaatgggcgtgggactatatttctaaggacaaggttaacgttatcattggttcaataaagagagcgcaagctaagatagcaaaaggaactcaaccccatcaggacaatataccttctgagcatatttttaatgaggcgtacaaagcagctttacagggatacgtccacaaccctcatttcgttagccttttcaggccatcaacgacaactgagaagtatcttgcactacgttgtatttatatttgcatgtattgttacgacaataaatttttatccagatttaagaaatcgtgggaatcatcggtttacaggaagacaaagaagaaagtcacggttcgcgaaaaatcaacgtcagaaccagtagggcgggaattcagtaatgtaactgatgcagagaaaatcatcgcaaaaataccttcagaagctgaaaagcttcatgataaattactcttacaaacatccaatgaaaagctaaatgaaattacacctactcctgaaattgatgccgcagaaaacaaagaagtcaaagatgactcagtaaataactggtatggcattcctttttag

SEQ ID NO: 84394 - DNA, 435 bp, Citrobacter koseri
atgttgaagataagttccgcattctttttcagtacggcactgttcagcgcggcggtgcacgccatgggccaggagcaacaatggggcaactggtttggcactgttaatgcgatggagtttgaactgaataccgacaatagcgccggagaacgcatgacgctcacctgccgggacaatcatctgatgttgaactacagcgggtctgataagaaacccctgggtgtaccagatgaaggtcaggaagccatggggattaatatcaacgcagtacattacctgccaggcaaggcggctttcatcgcactcaaaaacacagacagccatgggaaaattgaaatcaccaggatgaataaatccgtatctcacccgttcaataccgcagggctcagggacgcactggagaacctcaactgggaagactgcatcagccattaa

SEQ ID NO: 84395 - DNA, 762 bp, Citrobacter koseri
atgttaataaaatattccaagtggggtaatatgtcattagaaattgtttctttggatattgttgcaaatactactgatggccgatatggagtcactattccattttctaaaggcttatttctattacgcatggaaaactctcatggtaaatcaacatgcatgaatgctatagcctacgctctaggaatggaaaaagcattaggtatgggaagtgccaaaatcccattcccaccttctctgacaagagtcttaaatacaatagatggtcaagaaattaatgtcatctcatcgtttgtcactttaaaaatcaagaataataatggcgtagttgcatctttgaagagaaatattattggttttgaaagtgataatattatttatatcgacgaaactgatatgaatggagaggggaatagaagtggttcatatttcctccatcgtgaaggtgatactgagcgggatatggggttttataaatggttgactgtatttttaggctggaatttacctctagtacctaatcataacggtaaagaaacccctctttacccgtcagtgctattccctgcatggtatgttgaacagaagaaaggttggtcatcaataatggccacaattccaactcaatttggtattaaagaagttaaaaaaagagctcttgagtttttaatgtctcttgatgttaatgaaaatatacttaagcgaagcgctataaaaaatggtattgatgaagttatatatcaatggaaaataatcaagtga

SEQ ID NO: 84396 - DNA, 375 bp, Citrobacter koseri
gtgaaggcgaaaggcgcgccggttaaggcgatgtttattctttctgcggggggcagcgccccccagatcgccggtaagggcagcgtcgctgacgcgattctgaccctcgcaggcgcgcagaatgtcgcccagcatgcgcaatataaaagttacagcgcggaatcgctgattgcggcaaacccgcaggtgattgttgtgacatcacagatggtcgagggcgatatcaatcgcctgcgcgccattgccggtatcacccatacctccgcctggaaaaatcagcggatcgtcgccattgatcaggcgttgattctggggatgggtccccgcgtcgctgacgccgttgaaactctgcaccagcaactctggcctcattaa

SEQ ID NO: 84397 - DNA, 795 bp, Citrobacter koseri
atgggattgtttcaaaggattaataatgaaaaaaatgaactgattcattttgagactctaattactgaaatatccaaacaggagggaatcactttttctgaagcttgtgcggtaattgcaagagaggcagaggaccatctcgatgatatcccatggaatttctatgaacctttttatttgtatgattacaatgtggttaatggtttcaccaggggtgattctttttcaaaacaatcaattaacttccttaaaaatatggcttttggtattgattatgtagaagattctaatcctgaattttcgggtgtctatcaaagggttgatggagagagtggttggtttagagaattttatttcaaggggtcagaaattacactttcattcttagattcaggtgtggctcttcctccatgtttagaaaaattcagggggcacgcagaaagaagattgaaagctaaagctgaacgacttgccaatgaaaaaaatgaacaacaaaataaacagctctcggttattgaattgcagcaagaaatagataggttaaaagatgaaaataataaattaaaacaaaaaataccatcaatgcttggcgagttcagagatgatgacccattgctaatcgctattcagttacgaaatgctgaatggttaaattatgacgttgatgatcgcaaaacaataccttcgcaagaagcactggttgctcaggtcaagcagcaatataaagagtttgacatgcctgatgttcaagctcgcgcgatagagaaagttgcgtgccctataaaacgaaagtaa

SEQ ID NO: 84398 - DNA, 618 bp, Citrobacter koseri
atgaataaattaaatgccctctccgggcagggccttgctcactctgaaatcggtcagggcgttaattgccgcgaactgaagtttcatgaccaggtggtaattccatttgacaatggtgacgggaaaatatggttcactgctgacactctggccgggcttctgatgtatgccagcaaagataaggttttgaacctttactaccggcacaaggatgaatttaccgaaagcatgacaaccatcgccaaagtgagggttcgtaatgaaaacaatgaattgcaatataatcaggttcgtcttttttcgtcacgaggcgctcatctcatcggtatgtttgcacgcaccaaagtagcgaaagagcttcgtgtgtggttgctggatttagttgagaaggagggttcggtgcctcagcttggcgttcatcacacgattgagcaaatgcgaaatattgttgcagcagcctggaaggcttcagacgaagattcttccgatgctggccgccgtcttcgtaagcgccaggatgatctgcctgaactggttaaggcgcaaaagctggtggatgaaattggtcagattccattcgagctgattggtggcgggaaagtcgaggtatcagtatga

SEQ ID NO: 84399 - DNA, 198 bp, Citrobacter koseri
atgctttgcttgagagtggtaaatttcaggctatggttagccatgaaacatcgttctctgggcctttaccaccacctgaaatcattcgtgactacgataaaatacttcctggcggtgctgagcgaatttttgctatggcagaaaaagagcaggcccaccgacataacattgactcaacagctgttaatggtgcaataa

SEQ ID NO: 84400 - DNA, 192 bp, Citrobacter koseri
atgcttccgcaaccgctgacaggccgcatggacggggtgggggaggttttcaggacaaacctcaaggtgccaggcaccgcccgccccctcaaatttttacgcacggtgatttttttgaaaataaaacgtgatggaaacgagaaattattatggcaagaccaccaaaaccgccagcttaccttgatgagttag

SEQ ID NO: 84401 - DNA, 153 bp, Citrobacter koseri
atgaatgagaaagacgtggtgaatctgtaccgatcattgatgcgctgccgtgatggcttcatgcaggggcgaagcagacgcaatgagcgccagcctgtgcagcgtatgagcgagcgtgaacgggagttgcgggaatgcttccgcaaccgctga

SEQ ID NO: 84402 - DNA, 444 bp, Citrobacter koseri
atgccgtggcaaccaatgcgccggtgcactgagccgggatgcaataagcgggtgaagtctggtaagtgcgatgagcacaagcggcaagcctggcgggcggaagatgccagacgcggccaccgtcgcgcccgtggttactcagcatcatgggagaagtaccgagctcagtatctgaaacatcagccgctatgtgtcgagtgccagaagctgggcctctacgttcctgcaaagattgtcgatcacatcatccccatcgacggcggtgatgatgttctgttctggcctgagtggaatcaccagccgttatgccagatgcatcataaccagaagaccacgcagcaagaccccatcaccaaagcgaaccgtaaagcagggctgtaccgagagcaggaagagcgtgcagcccatcgcaatgactggatgtatgaggccagcaatgaatga

SEQ ID NO: 84403 - DNA, 300 bp, Citrobacter koseri
gtgagtgaactaattgggcttgatgaggcaaaacttcactgtcgcatcgataacgatgattcctatgaagatgcaatgattcaggcatacatcgaagcgtcgctggaagtctgccagaagcatatcggtaagcggttcagtgctggtctggaattcactcctgccatcaagatcggatgccttatgtacgtttcccaactgtacgaataccgcacgatgattagtgatgtggaggcgaaagagattccccttgctatctctgcattgtggtctgtgtatcgcgatgtgggggtgtactga

SEQ ID NO: 84404 - DNA, 336 bp, Citrobacter koseri
atgaggccgggaggattaaggcaacgcgtcacgattcagaattttactaccagccgaaccccttctggtggcgtcattcaggaatggtacgacgttgcgacagtctgggcagaagtgaaggggatcagtggccgtgagctgattgctgcgggtgctgaaatgtccgaggttacatttcgtatgtgggtacgttaccgctctgacgtaaccagcgccagccggatcatctggaaacagaaaggacatgatgcaaaagcatttgatattcagtcggcaattcctgatgaaaaggctaccaggctggagttgctttgtaagggagggcttaagccgtga

SEQ ID NO: 84405 - DNA, 315 bp, Citrobacter koseri
atgcgtgatatctatcaccttcttgataaaagttaccctgaatttaaacacctctcagatgaagaactggcagagtctgctgatacatatgcaggggcgggttttgccatcaatagtgcgcttcaactgatcggtaatctggctcttgacgcaacggaatcggaagggtattccggcgacgatgccctccgcgacatggaccttatcagtaatgtattgagacacctcccgaggatgatgcaagcgctcaataattgcagccagtctgctgaatatgtccgaacggctcgcttaaaagcagggggccaaaagtga

SEQ ID NO: 84406 - DNA, 1251 bp, Citrobacter koseri
atgctgacgctgaataaaacaaaggcagctttgcagagctgccaatgtcactaccaaaaacttaagcagaaacagcataccagggttagtgctggtggtcaaagactgagctttatagtgatccctgtatccttttactcgctcccgacattacaggagcggttaacttcccctgatggaggttgtttaactgcggcattggtgcggttagggagtactcaactttttttcaaaacatcctcgcaacctggccgcaatagatctcgttcattgcttccgcaaaggctctttgtcgtgaagcatgattttaagagaaaggctgcgacaattaaaacagccgccaagatgagaattttcttcattgctcatccttttggctcaatgccgcgctgctgtaactctttgcggattattcgcttgatccaagcagaaacagaagcgtcaccatcttgcgccaatgcttgctttatactcgcttctaattctggttctacacgcaatgcaatctgcttattgcctttccctttaatacttatggttgacatttggttgacacctaattatcttgaaatggtagtcaagtgtatgacaagtgcataccaaaaagcaacgccccggttgtgctggaacactccggggcgtctaaccaaaccgttatacgaggtaacgatcatggctgaattacagcatacccaaactcgcccggaatttacatggctattcctggctacccctaaacaatacccagattgtgccccggtagttcttcgctttgatgccgacacggaagaggaagctcgcgcagcgttctgtggctggaatatggttttcgccgccagaatttgtactcatacgcgctggcgaataacgttttacagtgatgttaatcgcttattcgcgatgcttgaaaccgagctggtggagggggttttcatgtctaacaaacaatcctccgatctgaataaattacgggctgctgtaactgatatggataccctttctcaaacagcattcaatcagatagcagcaatctccacacttttacttagctggcttgaaacaccgcgcgggcaagttgacagcgaggttacggccgaagcactgaactgtatcgcataccttgcacaaagcacctgtgaaaatattggacaggaagctgatgctgttggttgtgcttttgatgatgactcacagagacgccgttcagaggctaaaacggtgcgtcagtggtatggggtgagtaatgattaa

SEQ ID NO: 84407 - DNA, 216 bp, Citrobacter koseri
gtggagattgaagtaacgaatatcacggcagcagacaacgaggtagctacgggaattaacgctactgttacctttattgattacgagaataatagtggtgaaattgttgtttacgtaaagctgcctttagaaaagcaactatcaatttctgatgttgaggaaaaggctcaggaattggcgaaaaataaattgaaagagcttgtggctggcttttaa

SEQ ID NO: 84408 - DNA, 3177 bp, Citrobacter koseri
atgacccagaacgtcggcgatattgaatatgtgataaaggcggatactgctcagttgctgagagctgacaaacaggttcgtgacgtaacagacggcatggaagtcggtttcaagcgggctgataaggctgcatcatctctcacttcctcattcggatctttgagccgggttgccacttctctgatggctatcctgtcggttcaacaggtatctcaatacgctgacgcctggacaacgctcaacaacaaactggctaacgccatcaggccaagcgagcaactggtcgatgtgacggagcgcgtatttaatatcacgcagcaaactcgcgggagtctggatgctacggcttctttgtacgccagacttgaacgagccacccgggaatatggaaccagtgctgacgatctggctaagctgactaccatcatcaaccagggatttgttgtctctggtgcgactgcacaagaggccgaaaacgccattatccagttgtctcaggggctggcatctggcgcgctgcgcggtgaagaatttaactcagtgaatgagcagggcaaccgcctgatcgttgcacttgccgactcaatgggtgttggtattgggcagatgcgtcagatggccgccgccgggaagttgactactgatgttgtggttaacggattactttcacaaggggtgacgatcggcaatgagttcgccaataccacgacaactatcagtcaggcattgcaggttgccgggaataacatcaccaagttctttggtgaaaactccacggtaaaaaccggcacagccatttttaacgatgccgtgatcagcgtcagtgagaacatcggcgctcttagcgccatcctgaccgccgctgctgctgttatgggtagccgctacgttggcgcactgacaatggctactgctgcgaaggtaaaggccgctgtagctgcaagaaatcagtctgctgctgaaatgcaggcggcgcaggccgttgcaaataaagctgccgccgacctccgcgcagccgctatcgcaaaagaacgggcgcttgacgagatccgccttgcggagatgatgaagcagacagcggttagtgcgacgaatgccgccgctgccgagcaacgcttatcttccgctcgcgtagccgctgctggtgctgttgataattacaaccgcgctctggcagcaaataaagcggcacaggctgggttagctactggagcagggttggttagccgaggattgtctctcataggtggcccagctggtgctgccatgctcgcggccagtgcgattctatatttctctcagcgagctaaagaggccagagacgatgccaataacctggcggatagcgtcaatgaactgagcgctaagttccagactatgtcgcataccgagttggcagccaccattggcaagttgagcaagaatctgccagaactaagcgatgcggtagccgacgcacagaaagaatttaacgacgctgaatatgcagtaaaaaactataaccgcgaaataggacgatatggcaacaccacaagagggagagaggcagcagaagcattgtctggtgctcaaaatagacttgcaatagctactttcgaacttgaaaaagcacaaaacagattaagccagacccagaacgccattaatattggacaggcaacactcaatggcaccatgcgacaaggcctaccgcttctccagagagaaggcgaggaagctggtatcactgccggtatgatgggcaagcttggcgatatgatcaatttcgccgccaaagcgaaggagaaatataactcttccagtctgatggttatgcgcagcgaggatggagataaactcctgtccagccttgaaaagcaaaacaatctgctgtccataacagacaaaaaagaaagggctgtagccgaggccagacaagcggccctggatgcgggggtggatgcgcattcaaatcagatgaggcagattgaagaggccgcggcaaaaagatatgaccttcaggaggctgattcagcagtaacaaagtctacaaaagagggaactaaagctgttgatgaggctgcgcagtcactttcaaggcaacaggctgctctcgatcgcctgaacactggttacgccgatggctcgctcgaattagcgaaatacgatgctgttgtagcgcttggtaacaaagcatcagtagagcaaatcgccaaagcggaacagcaagctgagtccatctggaaagtacagcaggcaaccaaagccgcagcagaagaggaaaggaagcgcacacaggccggacaaaactttaccggattgcaagggcaggtatcgccagttgccgcagtagataacacctacgcgcagcaaatggcacagcttgatgagtatgtgcaactttacccacagaagattgcagaggctgaagctgtccgagcagggattgaagatcagtatcaccagaaacgcatggccgcaatgtgggaggaatggcagcagcagagcgagatcaacaacatgcttggctctgcaatcgattccttacaggggggcgcaaccaacgcgattaccggccttatcaacggcacccaaagcctgcaagaatcctttgccaacatcggcacaacaatcctcaatagtgttgttggtagtctggtgcaaatggggatcgagtgggtcaagagccagttaatgggtcaggccgctgctgctgcatcactggcatcgacaatggctcaggctaccgccgctgcatctgcatgggcgcctgctgctatgagtgcatctatcgcaacatacggtagtgctgctgccgtgggacaggctgcgtacgcagaatcgctattagcggcgaagggaatggctcttgctggcggtcgtcgctacggcggaacggtatctgctggcaacgcctatcgagtcaacgaggatggtcgttctgaaatcttccagactgctggcggtcagcagatgttcattccgaaccagtcagggaaggtgatatctgctgataaggcgggtgggggcggagttcaaaacgtttacttcaccattaacactacaggtggaataagtgatgctgagtgggctcaaatcgaggctaaagcaattaacatcagcaagaaaatggcgcttttccaaatcagtgaccaggccaaccgcccaaatggtatgatacaaccgcgtaggaaataa

SEQ ID NO: 84409 - DNA, 297 bp, Citrobacter koseri
atgaaaaaaatattgatccctgcaattgctattatcttggctggatgtgtttatatgggtaaaaacttcgatgaaactaaactagcgagcatctcaaagggggagactacaaagcagcaggttgttagtctctttggcgaaccaactacgtccacttatgattctgacggaaaccaaatattgctgtggtcgtatagtgaaggtaatgctctcggtggcgctaattcaaaaatactgagtgtcaaactgcatgacggaaaggttgaatcctactcggtaagtaagtcagcaatataa

SEQ ID NO: 84410 - DNA, 414 bp, Citrobacter koseri
atgagtttcgccagtcaatctacacagcaaatatttccatttccggctgatgttgcctatgaaaaactgattgaggcaattccagaggtcgggatgtctataaagcaaaaagacgacattttgcgtagagtttccgttagtgcgggcatctcacttttttcatggggtgaaaatgtctctatcgtggttaacgccgatggagagaagtcatgtattgttggtattgattcttcacttaagcttggagtaaacgtgacaggggcgcataggcatcaaaagaattttgataaaatcatctacgcgcttagcaataagctgaaggaatggcaaagacagcaaccattagatctcggcccagaaaaaaccgatgaggactacctcgaagaagccagaaaaaaagcgggcttaatttaa

SEQ ID NO: 84411 - DNA, 177 bp, Citrobacter koseri
atgaaagacctgttacacagccagcgcgttatagagcaattctccctgagactgcctgaaagggttaagaaagctgttcagaaaaaggctgaggaggagggattgtctctgaatgctgcgattgttcagagattagtttggagcttgaaaaacgatgaaaagatgttcggtgcctaa

SEQ ID NO: 84412 - DNA, 348 bp, Citrobacter koseri
atgagcaaattccccagccaagaaatggatagatttaatgtaaggttgccagcaggaatgcgagacgccatagccgaacgtgccaagcgtaacggcagatcaatgaactcagaaattatcgacatgatcggaaagtcgctcggttctccagatctgactgatgaggagtttgtttacatgctcgaggtggcaaccaaagaacatatgtctgataccgataaagttcttgcggaatctgtattaatgcagatggcagaaaaacttacgcaaaaaattgacagtgacacctcaagccttaaacaggtgatctcaatgctttccggcattaaaaaaccatctgactgttaa

SEQ ID NO: 84413 - DNA, 174 bp, Citrobacter koseri
atgcagcatcattttaaaaacgtcattttccagcgtatcgcgaagggttcaacggttggcaatcaggtaaagctaagcgatgttcttgctaatgggaagacggaagcagctctgctagaggctcttcagaagcaatttaagggcgatactataaagctgaaaagctaccaataa

SEQ ID NO: 84414 - DNA, 468 bp, Citrobacter koseri
atggcgacactgaaaggtgaggtcaaagccttcatcgttcagtcccttgcctgcttcgatactccatcccaggtggttgagttggtcaaaaaagaatttggcctgagcatcactcgtcagcaggtcgaatctcacgacccgacgaaagcaaacggcagggggctggcgcagaaatgggttgagctatttcacgaaacccgtaagcgcttccagaccgaattaagcgacattccgatcgccaacaaagcatatcgtctccgtgcacttgaccggatgatgacccgcgccgagggaatgaaaaacatggcgttggctgcttcgctgatggagcaggccgccaaagaggttggcgacgcatatagcaacaaacagaaggtcgagcacaccagcccggatggcagcatgtcaccgagaccgacgacaattcgcctggtaggagttgacccagccaatggaaagccaagttga

SEQ ID NO: 84415 - DNA, 177 bp, Citrobacter koseri
atgagcgaagcgaaaccgcaggatggtagtaccgttaagggataccgtactttaaccgctggcgatattgagcgcatgaaccgcctgaagggtgtaagccgccatttttgtaacctactggatactgagcgcgaaggctcttcgtccgaggttgtagagcgtggcagccagtgctga

SEQ ID NO: 84416 - DNA, 216 bp, Citrobacter koseri
atgtatcgcatggacaaactaacgactggtatttcctatggcgcgtcaggaggtagcgcgcttttctggttcaagaggcttcttgatggatatacaccagaacagtgggctgcgattggcgtcgtgggtagcttgatgtttggcttcctaaccttcctgacgaacttgtatttcaaaattaaagaggatcggcgtaaggccgcgagaggtgaataa

SEQ ID NO: 84417 - DNA, 690 bp, Citrobacter koseri
atgaacagtcagcaactggaatacgtacgtcagcagctcattgtggcaaccgcagatctgagcggggcgacgaaagggcaactggtggctttcgctgagaacgctcaattcaccgtgacggcgcgcagccgggggcggaagaaagtctatgacgcgcagaaaaagcggatggttaatcccgccggcccgccgatgagcggcagccagtcacgcgccaaggggtcatctatcgctctggtggggccggttgagttcggcaccgcatcctggcgccgcgctgtcctgtcgctggatgagcatcagaaagcatggttgctgtggaactacagcgaagagacaaaattcccgcaccagacaacaatctgtcaaatctcatggcaagagttcaaaagacagattgagggcgagaaaattgcatctaaaaccatggggaggctgaaggcgctggtatggcttgcatctcaggatgttaaggcggagcttgctggaaagcgcgtttatcagcaacaggagcttgcatttctgactggcacaacgccgaacaactggagcacaaactacgccagtcgatggcgtgcaatcagagagatatttctcaagttggatcgggattcactgctgaatgtgacaaaagcacgatcgcaacaaaaggcgacaaattaccatcaaggtattgcagaaatgaattaa

SEQ ID NO: 84418 - DNA, 141 bp, Citrobacter koseri
atgaagccagaaacgctcgagatactccgtactcgttggcagcgcctgcgcatctacagacgcccaggttccgtgctggttgactaccgaatccttcgaaacttcgtccgcatttatcatcaagcaggagccacacaatga

SEQ ID NO: 84419 - DNA, 195 bp, Citrobacter koseri
atgccagcaataaacgaaaaggcaaatctgcatgcaacccataaatgctctttctgcgacagaagcaatattgatagcgacgttaaagccatagtcgcaggtccaggtgtagccatctgcgataactgtgttttgctttgtgtagagatcattttcaagaaacgcggggaggttgcagatgaacctggcaattaa

SEQ ID NO: 84420 - DNA, 222 bp, Citrobacter koseri
atgatcaacatgacagacagatcggatactccccttgataaagctattaaggccgttggtggttctcagaaggttctggctgaaaaggtcggagtttctccacaggccatcaatatgcttaaaaagcgtggcggcaatcttcctgtctcaacagaaaaagtccgcaagtacgtagaagcaactggcttatctagggaagtcttgtatccggggcttttttaa

SEQ ID NO: 84421 - DNA, 327 bp, Citrobacter koseri
atgaaaagtcgaatcactgaagtcggcaccgaccgctttaaaacagttgggacaataaacagcccttgcatacccatcagaggggtcttttctaaaggccgcagtgcgatgaaggacaaactgctcctgtgccctgtaagcctctatttgcttcgtaagttctacgttttttgctaccgcttcggcaagtttctgctcggtggcagcatgggttttctgaagtacgtcaatttgctcgccaatgaaagcaatacgttctcggagcacctcgttgctctggatcgtcgagagagcaccaagtccgtttttgagggacgcgatgattaa

SEQ ID NO: 84422 - DNA, 213 bp, Citrobacter koseri
atgagaaaagttcgctgcgttaaagacagatacatatgggaaggctcagacaggaaaaaggtaaccgacacgttcgaaggcgttttccatggctggggttgtgattatgaagagttcgaaaacggtccggggaattactcggtcggaattgtagagcttgaggatggcagtgttcaacgattcataccagagagcatcaagttcatcgaataa

SEQ ID NO: 84423 - DNA, 324 bp, Citrobacter koseri
atgaagaaagtttcgctttccaggcatcgctatagccttgactggttcactgtcgaccaagttgaagtcagtcttgatacgtgctggcactacgaaatgcagttcaggctcgggtgctggtatttgatgcatcgccaatatgacaaatcgcaagagaagtggctaaaccgttccgaattggatttccgtcttgacgaccctgctgatgcggtaatgaagcttggcgacagggtttatcgttttagcaaaattcacgatgaaaacctttcaaaagaggtttcagaccttatgaagcgtgtatccgctcgctcggaggcgtcatga

SEQ ID NO: 84424 - DNA, 189 bp, Citrobacter koseri
atgatccccgttgatttagcaagaacaccaaaactaagtcgtattaagcgcaaatatcacattatcgaagctatttactggcgagagagcggtaacaaaagcatgaagcgccattgtctgcgcatggctcgtgatgaacgcatcaataaatgtgagttcttgtccaacccttccgaaattccattctga

SEQ ID NO: 84425 - DNA, 681 bp, Citrobacter koseri
atgggaactgcaacattaattctcggtgaatctggaactggaaaatctgccagcttgagaaacataaaccctgatgacgcaatcctaattaaagctgttggaaaaccgcttccgtttcgctcaagcggatggcatacctgggacacagcagcaaaaaaaggaacggtagtcgtatcggatgactggcattacatccagacaataatcaaaagagcgccagcctatggcaaaaaaatcattatcgttgacgacttccagtatgtaatgagcaacgaatttatgcgccgctcagaagaaaagtcatttgataagtttacagaaatcgggcgtcatgcgtgggaggtaataaaggccgctcaggatgcgcctgatgacctgcgtgtctactttctggcccacacggaagaaacacaaatgggccgcacgaagatgaagacgatcggcaagatgctagacgaaaaaatcactgtcgaaggcatgttcaccatcgttcttcgtacaatgacgcgcgacgataaatttttcttcaccaccaaaaacaacggttcagacaccgttaaatcccctatggggatgttcgaaaccaacgaaattgataacgacctcgcttacgtagacgcaacaatttgcgaatactacggattcaccaatgttcaccaaattaaggattctgccgcatga

SEQ ID NO: 84426 - DNA, 582 bp, Citrobacter koseri
atgagcaacgtaatttttacctataacgaagaatcagcactgtccgccggaatgggaggttttattaatgaaaacggtgcatacatcatcaccattgcagaggctgagctgaaacaaaacacggagaacaacgcacagtggattgagttttctggagaggctgatgacggaagaaaggtacagtaccttagagtctactcagtaaaaaaagacggcacagaaaacaccttcggcgtgaacatgatcaacgcaataatgggttgcgctggcgtgcaaagtctcacgcagaagatggagtcagccagcaaatttattgcccctgagttttcgggtaagcgtgttggactggttctccagaaattgcttcgtagcaaacgagatggcagcgacacctacggaatggaaatccgcatcccgtttatcgctgacactcgccagacgctacaggagcgaaaagacggcatgaaacctgaaaccgttgataaattggctgcgtcgttaaaagaccgggataaccgtaacaaaggcggcgctcagcaaattgacaacggtcattacgactatggtaaccaggacttctaa

SEQ ID NO: 84427 - DNA, 285 bp, Citrobacter koseri
atgccatcacctcttcacggggcgggatatctgcgcccgccagtcagttccggcaccaaagaagaggtgctggaacggtgctttaaagctatcgccaatgacgattatcagaccccagacatggatgaacgcctgctgcgactctacgaaaagagagtctggaatgacaacttcgaagcttcattcaggcctggatggcagatagtcgggcctgttcaacatcactacaccgacgatcgcatgcgtaattatcgcggtcgattcggtcacaccaggagtgactga

SEQ ID NO: 84428 - DNA, 753 bp, Citrobacter koseri
atgattcattttcacggcggaccaataacccctgatacatgcgcactgaaggcatggaaaggcaggcacgctttcatttccttcgccaaccccggccaattagccctggccagcgaagtcacccagtctttcgcgctggataacggcgcgttcagcttctggacaaagaatcgtgttgttgactggaacgagtattatcgcttcgttgaacgctggggtaaccatcctcgtttcgggtttgctgttattccagacgtgatcggcggcaccagcgaagagaatgacgcgcttatttctgaatggccgcacgggaaagtcgtgggcgcgccggtgtatcactttaacgaaccagacgagcgctttattcgtttgtgtcatgagttcccgcgcgtttgtatcggtagcatgggggagtatgacgccaagcgaccgagagcgtgccgggcgaaactgcgcgatctgatacgtcacgtagtcgataaaaacggctatccaattacgaagcttcacggcctgcgcatgctgaataaagatatcttctcccacgttccgctctcgtcagctgacagcacaaacgtagctcgcaatatcggtatagacaaagtgtggaatggttcgccctacgcgccggcaagcaaagaaacacgcgctgcggtgctggtcgaacgcattgaagcctttaactctgcaagttcgctgaattacgacgcagaacgcgatcggttcacgccacaacttgctttcgaggtgtaa

SEQ ID NO: 84429 - DNA, 537 bp, Citrobacter koseri
gtgaaggttgaaaaaaacgatgttctggcgtttaccatatcagatgttgaacgcctcgacccggtaagggtgatgattgaaaactatgagcccggtaaggggcgcatcaccatcacctgcttcggtaaggcctggaccggtgcctggtttgctatgggcggtgataccgtgcaggacttcattaagcacgtcagcaatgagtaccttataggctatttcgacccgcaactgcaaagcacggtggatgatgacaacgacgccaaccttgaattcgtcaaaggtgagatcatcaaactccggcgccagcaggaaatcgatgctgatgatgctaggaaaatgtgggatgaggctgaagatgctgaagatgtgaaggcgagctgctgcaactatctcgtcggcgacaagttgcttaacctgctgggtgatgacccatggtacgcaaaatggccgtctgtgccgaaccatcattatcagtacctcgaacgcatcattgatgcagtgcgcggtgggctcgcagaactggagcgtgctgcatga

SEQ ID NO: 84430 - DNA, 288 bp, Citrobacter koseri
atgaaagagtttgaagggacaaaaggtgaatggatttaccttcaggaacttggtgaggttatcagtaagccctctggcctcattgctgaccttgtagtaaatggcagcgaggaccacaacggcagacttatcgccgccgcgccggaattattggaagcgctgcaatgcctgttcgacaactataagcagctcgctgattcaggcgatgccggtaactggcggctcgaagatgaacctgccggaaagaaagcgctgaacgccatcaacaaagccctcggtaaggagtga

SEQ ID NO: 84431 - DNA, 657 bp, Citrobacter koseri
atgatttttaacggcgagatggtgcgcgccatcctcgacggccggaagacgcagacgcggcgcatcatgaaaaaccagcctgccggagattaccccgacaccccagccctaatcagaagcgtgggcggtggttttcagtggtacgggcattacggagtaagcagcattttcaattgccctttcggtgccgtcggcgatcgcatctgggtgcgggagacgtgggcagaggctggagccagtgcgccggatctgaaactttatcgcgcgaattaccctgcgcatgttccatctcattacgagaacgtgccgacggctgaggaaattcgctggacaccgtctattcacatgccgcgctgggccagccgcattctgctggaaatcaccgacgttcgtgttgagcgattgaataggattagtgaagcggaggcagaggcggaaggtatcgacatggaggcgctttttgacgcccaggactgttacgactgcattgcagaccacaacatgacaggaaggccaacggcaacaggcgcatttaagtacctgtgggaatccatctacggcgaagaaaactggcagtccaacccatgggtctgggttatcgaatttaaggtggtgcccaatgttccaactaattcagcggggtcagatttacgctga

SEQ ID NO: 84432 - DNA, 477 bp, Citrobacter koseri
atggcatattctgcacaagcagtagctaatgccttcattgatcgtgctcagagaggggttatccctgacctgacaccgatgaaggtccaaaagctgcttttctatacacagtcttggtatcttcgcttcaaccaaggtcttccgttatttgatgataatttcgagcgctggaagttcggaccagtagttccttctatttatcatgaactgaaaccgtatggatatcatcaggtaactcgtaagatatccagcataatacaaacacctcagggcgtacgtatcgtaactcctgagataaattacgcagatgagtctgcaatacagcttatcgatcagatttcttctgcctacggcaagtattcgggttctgagctttcagctatgactcatgcaccaggtgccgcatggtcgatgggaccagataacgggagcgttatttcccttgagcaaatgcagaattatatacacccgcaatga

SEQ ID NO: 84433 - DNA, 240 bp, Citrobacter koseri
atgcaggatgtaatgctatttggtgaaggacgtaatggcgaagtatataaaattaaagagggtcgtcgtgaaatccgttacaccccagacaaaacctttcctcttggtgagattgtattcattattaaagagtacctttcagacgatggagagatgtatctggttggttatcatgggcgtgaacccttgatgccggatgtggaagaggccatccagctatttaaacccatcccaatttga

SEQ ID NO: 84434 - DNA, 177 bp, Citrobacter koseri
atgctctctaagcgcctgcatatgctgaccgttgcggaaggagtggaaaccccggagcaggcccgatggctacgcgatcatggcgtcaacttcctccaggggtactggattagccgccctttagcgcttgaggacttcgttcactggatgaatacccggcccgcgccgaaatggtga

SEQ ID NO: 84435 - DNA, 660 bp, Citrobacter koseri
atgaatcctgagcgttctgaacgcattgaaatccccgtattgccgttgcgcgatgtggtggtttatccgcacatggtcatacccttatttgtagggcgggaaaaatctatccgttgtctggaagcggctatggaccatgataaaaaaatcatgctggtcgcccagaaagaagcatcaacggatgagccgggtgtaaatgatcttttcaccgtcgggaccgtggcctcaattttgcaaatgctgaaactgcctgacggtactgtcaaagtgctggttgaggggttgcagcgcgcgcgtatttctgcgctgtcagataacggcgaacacttttccgctaaggcggaataccttgaatcgccggcgattgatgagcgcgagcaggaagtgctggtgcgcactgccatcagtcagttcgaaggctacatcaagctgaacaaaaaaatcccaccggaagtgctgacgtcgctcaatagcattgacgatcctgcgcgtctggcggacaccatcgctgcccatatgccgctgaaactggcggataagcagtccgtgctggagatgtccgacgttaacgaacgtctggagtatctgatggcgatgatggaatctgaaatcgatctgttgcaggttgagaagcgtattcgcaaccgcgttaaaaagtag

SEQ ID NO: 84436 - DNA, 870 bp, Citrobacter koseri
atgtcacaccagacgatttgcgcggcttcacacagtgccatttcttcgccgggatcggcgtctggtcttatgctctgcgtctggccggatggccggataacaaacaggtctggacaggaagttgcccgtgccagcctttcagctcggctggtaaaggcgctgggtttgatgacgagcggcacctatggccagcactattccacctcatcagcgagcgacgccctgagctggtatttggcgaacaggttgcgggagtcaatgcctggttcgatcttgtacaaactgacgtggaagcagtggactacgcctttgggcttgtcccgtttccggctgcgggcgtcggtgccccgcatatccgagacagagcatattgggtggccgacgccagcggcgagcgatcacagcggtggcggaagcgcctcaatagcactgaggaaaatgtctggggatcggcgaccgtcaggcaaccccttgcacagctcccttcgggatttttcccatctggcgggctggccgagtcctctggcaagcaataccaaaacggcttatcaggatgccgagaaagtgatcgcgcgacagcaggctggccgacagccgaatttgcaggattatgcctgcctgagcggctgggcgacgccgaccactcgagaccacaaagacgggaaggagacgccgaatgttccggtcaactctcttttggggcgtcaagtctggctgacaggcccgcacagattaacggcagctgggacgatgctgactggctcttctgcagggatggtcgctggcggccagttgaatccggcacattcccgctggctcatgggattaccagcagagtgggacgactgcgcgcctacggcaacgcgatag

SEQ ID NO: 84437 - DNA, 357 bp, Citrobacter koseri
atggccttgcgtcatcgcagcaatccgcacagcactgaagcgcattttgtgcatcgcatggaaacgccggtcgtctggctggaaatcttcctgctggcggcgttcttcgttgggctggcgttgggcgatgacggcaaaatgcgctcgctgactgcggcgctgggcggcggattctggacatggtggttctggcttggcgtcgcggggctggggctgattgtgccaatgctgctgaagccgtgggcgaatcgcggttcgacgtttcacggcgtgctggcggtatgcggcgccagcctgaccggtgtcctgctgctgcgctttttcattctttatgcgggacagctaacggtcgcgtga

SEQ ID NO: 84438 - DNA, 1437 bp, Citrobacter koseri
atggcaaggacaatattacgcgcacgccgtttcttcagcctgatattaccgttttttttcatttcctctgtatacgctgaacaaacgtccgttcccgcaaagaccgtcaccgttgaagcgaagaatgaaaccttcgcccctcagcatcccgatcaatatctctcatggaaagcgacgtcagaacagtcaacgcgtgaagatgcgctggcagaagacccgcgtctggtgatcctgtgggcgggataccccttctcgcgtgactacaataagccgcgcgggcacgcttatgcggttaccgatgtgcgtgaaactctgcgtaccggcgcaccgaaaaatgccgaagatggcccattgccgatggcctgctggagctgtaaaagcccggatgtggcgcgtctgatccagaaagatggcgaagacggctacttccacggtaaatgggcgcgcggcggcccggaaatcgtcaatgccctgggctgcgccgactgccataacaccgcctcagacgatttcgccaaaggcaaaccggcgttaacgctctcccgtccttatgccgagcgcgcgatggaaaccatcggcaaaccgtttgataaagccagccgttttgaccagcaatctatggtgtgcgggcagtgccatgtggagtactactttgacggtaaaaacaaagccgtcaaattcccgtgggatgagggaacaaaagtcgaggatatggagaaatattatgacgccatcgccttctctgactggacaaacccgctgtcgaaaacgccaatgctgaaagcgcagcacccggaatatgaaacctggagcgtgggcattcacggcaagaacaacgtgacctgtattgattgtcacatgccgaaagtgcagaacgccgaaggcaaactttacaccgaccataagattggcaacccgtttgataacttcgcccagacctgcgccaactgccacacccaggataaagcctccctgcaaaaagtggttgctgagcgtaaacaggcgattcatgacctgaaaatcaaggttgaagatcagttagtacacgcgcatttcgaagcgaaagccgcgtgggatgcgggcgcgacagaagcggaaatgaaaccgattctggacgatatccgtcatgcgcagtggcgctgggatctggcgattgcctcgcacggcatccatatgcatgccccggatgaaggtctgcgtatgctgggcggcgcgatggataaagcggcggatgcccgtaccaaactggtgcgcctgctgggcagtaaaggcatcactcatgaaatcccgctgccggatatctccaccaaagagaaagcccagaaagcgattggtttgaacatgcagcaaatcaacgccgagaagcaggacttcatcaagacggtgattccgcaatgggaagatcaggcgcgtaaaaacggtctgttaagccaataa

SEQ ID NO: 84439 - DNA, 543 bp, Citrobacter koseri
atgaatatcgcgctggtggaaaaatactggaagccactgacggtgatatttctggtgtctggcgcatttatcacaggaaatgtctggagcgatcggggctgggaaaagaagtgggcagaacgcgacagcgcggagtcgtcacagacagtgaacgcacagaccgccgcccgctggattgagcaagggcgcataattgcccgtgatgaggctgtaaaagatgcacaagcacaagccgctaaatctgctgccactgctgctggcctgtctgccactgttagccagttgcgcaccgaagcaaaaaaactcgctacccgcctggacaccgcaaagcaccccgcaaatcttgccgcttccgtcagaagcaaaacagccggagccgatgccggaatgctcgccgacatgctcggagatattgcagcagaagctaaacgttatgctgcaatcgctgacgaacgctaccgcgccggaatgacgtgtgagcggatttacgactcggtcagactctcaaatatggaggagcaccatcgggcaggcaaacaataa

SEQ ID NO: 84440 - DNA, 477 bp, Citrobacter koseri
atgaaaaaaatactacttgcgataactttgagcttgatgccgctggggtgttactccatcgcagcagaagttgttacctgtgaaagcgaattgaaggaatttaatgcgtttttttctaataatggcggaccgataattcacaatattgcagatgctgtcaccgtattgcgttcactgaatagcactaacagactgccagtcagatatatcacttccgatgaagcgagaagattaggctggtctggacatgatcttgagtcgctatggaggctaaaggcgacttatggaaaatggattggtggtgatgcttacaggaaccctatcctccctggtgaagtaccatggtttactgcagacctggatatgcaacgcggttatcgtagtgatattcggcttatatatagccctgcaacaacacagcgctatatttccccggataaatatcaacacatttttgaaataagtccttgcaggtga

SEQ ID NO: 84441 - DNA, 195 bp, Citrobacter koseri
atgagcacagatgaaagcctgttaagtagggttcaggaagtacggatcgttgaagatgtagaggaagttaacctgggcctttctaaaggttgggtaattctgatgattaccgagaatactactatctgggatgacggcagcaaaagcagtcgtattacatatcacatgggcaaaccgaaaacattgccgatctga

SEQ ID NO: 84442 - DNA, 660 bp, Citrobacter koseri
atgattcaagaacttctaaaggaaaaagggtggagtaaagctgagttagcccgtcagttaggggttaccgcgcagacggttgtgtactggacgaaggggagcaccgtgccaagaggcaagagactaactcagctttctgaaatcagtggttatcctcgctcttggtttttaggggaagagcaaaaccaatctttcccctccccccctcaaaaagaagacacaaatagcgtaaaattcaaagtattagatatcgagtttagttgcggtgatggaactaacgtaagaggcgattttattgacgtagtacgttccatagaattggatcccgaatacgcccgtcaggttgttggtaacagaccttttaagaacattgaaataggtaatgccaggggtgatagcatgttaccaacaatagcaccgggagatttattatttctcgataaaacaataacatacttcgatggtgatggaatttatgccttttgctttgaaggcgaatgttatgtaaagagattacaaaaaataggaagcaaaattgttgtgttatctgataattccaattatcaaccctggagcattgagaaagatgctttaaatatgctctacatccaatcaaaagttatctcttcagttccattcaacatcaacagattcggttaa

SEQ ID NO: 84443 - DNA, 192 bp, Citrobacter koseri
atgaaagctttcaaaggtctttctttgcatccacacgatgctttcaaaaatattggtgtttttattgaagccgcaggacttctgacagtcgttactgacgaggagtatcaggaactaagtgatgtcatacttgagttcgcccgaaagtatgcaaaagccgctcaggaaattgaactggagaaactcaaatga

SEQ ID NO: 84444 - DNA, 1047 bp, Citrobacter koseri
atgctgtgcgctaagcgcaaacatggcttccaggtcacgtcccggcactttatcactgccttcacctgctttcgggctgtgaaatatggcagaaatcacatacccgccggggaccgctttccccagggtcttcacgctgttcagtatggtgttcagaatgcttttttctgctgcaccggaaagcgtcaggctccctgcgcctgccagcgccatctgcaccgtacccggactctggttcagcaccattgcaccgggtgctttcatggcattattcgcacctgtcaccatttgcgctgtgtatgtcggtgccggtttcactccggcttttgcaaacagttctgccctggcctttgctgcggcatcagctttcgctttggcttctgcggctgccttggcctttgctgcggcatcagcttttgctttggcttctgcggctgctttggcttttgcggcagcatcagcttttgccttggcatctgcggcagccttggcctttgcagcaatatcagccttcgctttgttttctgcattctggcgctgtttcagttcatcactgcccatgaactccaccgtcgaaacatacagtggactcacaccactttctgccggaaaacggactatcacatcccggttatggctggcggcggtaaaaccggatgcaccataggctccctgctccaggaacactccatccgtatttggcttatagttatacgggagaccctggagttttttatctttatgacggtttttgacaaaagacatatcaggcagaccgggggcaacagaagcctgatagacccctttcaggaaacggttagtgccaggtgccctgtcctttactggtttagcatccaccaccggaaccgtcatgatctttccccccatgagaaccagatactgtttcccccctttcaccatatccgtcactcggcgtctgacgttcactttccctccttttgcaggcagcttacctgccggaacgtcggtcacggcattcagtggaaggaaagtcaccgcccgggatatacctttctctttcactga

SEQ ID NO: 84445 - DNA, 1284 bp, Citrobacter koseri
atgttaaaacatctgatgcttgaaggggtcgggcccgccacgacttttggaccggttgaattttcgccaaggctgaatttcatcacaggtgataacggtctgggcaaaagttttattcttgatattgcctggtcctccctgacacgtacatgggcgcggaataatgctgccgttcctcatgcgtcagtaaaaaagccatcaatcaaatacagttacagcaaaacaacttccggtgacgtaaaagattccatcactttcaaaagagaagatcagagctggcagtggccacttaaaaagggcagaccagccatccctggcgtggtgatttatgccggagtagatggcagttttagcgtatgggatcccagtcgaaatttctggctggatgaggagagcaatggacgtcagcgttctttcgacttcagtcccaaacaagtttgggatggacttaggggtgctgatgggacatctttctgcaacgggttaataagcgactgggttttatggcagagtcgttctgatccggcctttactgacctgattaaagtgctggaagtgctttctccttcggatactgaactgctgacgcctggcaaacctgtccggtctggatacgatgtcaaagagtatccttctttactaatgccatatgggcaggaagttgctttatctaatgcttcagccggcatgcgtcgtattaccgcgttagcatatttactggtctggacatggaaagagcacttacttgccagtgaaagatctggaagaagtaaagctaaagaagtgatatttcttatcgatgaaattgaatgccatctgcatccacaatggcagagacgagtcgtaccggctctgctgaaggttatggaggcattaacaggcaaaaaagtatctgtacaaattatcgtcgcgacgcattcacctctcgttctttcttctgtagaaccgacatttgatgagaatctggatagagttttcaatatcaaaatggaaaaccgggaagcaaaaataagcgtggagccgtggtctaagcagggtgatattgctaactggctggtctcggatatttttggtcttcaacaggccagatctatcgaagctgaaaaagcgattgaagcggctgaggcattgatgaggggagatacggacgcccttcctgatgggcttaagtcgaaggaagatattcataaagagttaaaacgtgttttagccggtcatgatgacttctggccaagatggctggtgagcacgaagcaggttccaggagcattaccggaggcgtaa

SEQ ID NO: 84446 - DNA, 609 bp, Citrobacter koseri
atgaaaaaaatagatcagtcagctttcgttgaacctgaaaaattcgatcaggattgtcgagtcaaaggccagcaatggcttgaaaaacatcctaaagcacaaagaaaccccgccaacaaccgtccaaaggatttctggtcacctttcaaaggcgatttgtccgatgcttctaaggatttgtgcgcgtattgcgcgatgtacgaaccagtcggaaccgtagatcatttcatttcagttaatgaaaatgaaaacctggcctatgaatggacaaattacaggtatttatcttcgtggataaacagcagcaaaaacaaaacgcccgacgttctggatcctttccttgtggaaaatggttggtatgaaattttgttaccttcactgcagcttgtcgcagtttccgcgaatattccgcccgcttttcagtctattgcagaaacaacaatcacacggttgcatttgcgcgatgacgagcgggttttacgtcaacgcaggacgtggttaaagatgtatgaggaaggaaaactgacacttgacggtctttatcttatggcaccgctgattgcagaagcggtcgagaaaagagaaagacaaaatcaaggcgctgcctga

SEQ ID NO: 84447 - DNA, 1197 bp, Citrobacter koseri
atgattattttctgggatgcagtcaaggaaaatgtagaggttataggtacgctcaccacgtcattagcctttttagccactgcatgggccgcttacgaggcaagacatagtgcaaaggctgcaatggaggcgactaggctgacggcggcttcacttcttgaaatgaaaaaagcctcttttaaggaatggtacggtatattacttgaacagcacaataaattacttgaagatgttaacaagaccttactggatgacagtcagtacaatgtcaaattgggtattaatatcatcaagggcatttattaccatacaactaaaaaacccacttatattaagtatgttaaccacattattttaatgctgaattatgtagataaagacttctatctgtcgtcatcggctgataatgaaaagagatcttacatagaacagttgcgcaacaatattaccccaaaagtaggtctgctgatcgctattttcggtcttaatgtcgacaataacaaaacctacgacgcaaagaaactttacagtctcctaaacaaatacaatttcttcgaaaatgaacttttttttgaagatgctatatcgaaagttcattacctagactcttatgtcgctgatatatttaataacgaataccgaaaaggcgtagagttttgtgttgatcaaatggttattgatggtttaacacataatatcaataatatatacaggcatcataggcttacgttcgcagttctgtggtcttacaacaacccctgccgacagcatttgctgcaaaggtttaatgacctacctctgcatattagaaacagcattgggctgaacatggaaaaagcagccgaggaagtggctaagttcaattcctcgttgcttggttttgtcggctgggaacttaacattacaggtaacaaagcaagagtgatcaaggatgaaaagcagctaaaacggctaacaaagctctactacaaacatcctttcaaccctcgacataccggtatcgtattaaccaatggttacaccagtagattcggtgaagatattataaatagtctgtctagttatgctttaaataaagcctatttagaactcagctctaatccgaacagagaagaagtgcttgacggaattgtggccgaagttgaaaaaatggtcgataaatttaaaatggaacttaattcattcggttttaactaa

SEQ ID NO: 84448 - DNA, 702 bp, Citrobacter koseri
atgaagatgcttgcggagcaggcagaagcgaatatttcccgtgctctaattgatgctgataagccagaagccgttgagtcaggagaatttccggatgaacatcatcatgaagatggccgaattacaacgtttcaatgcacttactattcatgcggctcgagcattggctatgatgaagatgaagttaggtctgaatacaaacatctgatcgcgcagctgacacgccgctccgtatttcttaccatttttggtctgttcgaacaccgtatggttgattgcctcgaacttatggacgacctttcgtgcaagactacagacaaaacgcacaagacggttgaggattgccacaagcgtctcaaacgcaattttggcggtaaaagcatcaaggatgtcgatcacctagcagtgatccgaaacatcatggcccatagcgatggtgttgcagacgactataagactctttcctgtaaaaaaacaaaaaaaactgaatatgaaaaacgcctcctgcgtgctattcctcgtgctatggatgagaacgccggtgtgtcaattaccatatctaataacgtacttatggatgatcggtttctgatgtatgccgtcggtgaatttgagcgctatgttaatgaactggacactgcagttcgcacttatcaaacgcagatgagttgcactcacttaaaatctctaagcagtccttaa

SEQ ID NO: 84449 - DNA, 1815 bp, Citrobacter koseri
atgaccacttataagcaacaagttaaagaattaagtcgagaagaaatatggagtcaggccatagataaactaacaataaacagagagcaacaaaagataataaaaacagaaacggttagaaagttatggaactattcttttaatgaagtattaccccataaatattccaatccaaatatgagtgtgcttcaagcgtgggaagaatttgcagatgagatttatggaagcagaaagcctagcaatctaaaaattgcttttttctgtggtccagaacctgaaaatgatttaaatatactgacgaagcttggcgtaagggtggagaacgtttgggcaattgaaatagatgggactacttataggtcagcattagattccgctaaggaaaaatatcctacactaaaaatattcaatggggatattgttgacttgatgcaaataacctcatttaaatttgatataatttatttggattttacagcaacattactgacaagaaaacctgctccaattcatacaataaatagtatttttgaaaatgattcattagcggacttgggggttcttatcattaacagtgcattacccaatgcaactgaagataatattaacttcctttcaagttatttcgcttcacatactttccttgaaaaatccatttattctggttcagatgaagattcataccatgtcgaagggagattgtcgcattcatattttacaaagcgtgagatagcggaaattggagatccagaagataaagtttttgaatatttgattcgagacaattttaatcaggcatacggcgcattttcctcacattatccttatttatttgcgagctaccttgcgccaattttcaaagtggccagtaacgaacgcttaagaaatctttttttgaataaaaatgaggaggatataaatcaagccatagaaaaaatctctactcctaatgaaattgttgaaaaacacatgaataatgaagaagagtgtatgagcggtggtgagcttatagaatacttgaatgaaaaaagtgatgaaaatatttatgagattgattttgatacggtattgaagtattcagagatagcacttcgaaaggaagagggagaggaagaggaagaggaagaggaagaggaagaggaagaggaagattttgaaggtatggaattatttgaagatgctgaaaattatccattttggagtttcgttgataatctaaatgattatgaaggcaatgcatgtaaattttggtacagtgaatttatcaaaaacagacataataaaatatcatatcttaaatgcgctcaattatatgacctccttaaaaatggaagctatatttataaaaaggtcttatcacccactttgtccgattgtattagtgaggttgaaaaatcaattccagacagacgtagtcatttcttttgtgatgttccaatgccacacctttgggttgagcttgcattaaatcatcttggtaatgcctatcatattaatacagatcaacactggagggcaagatataaggctaagagtcgagaaatgtatcttgatatgttttcgtttgataactgccgccctctttatgactggcttcctatgttggagttatatggtaatgatttaaaggtaatggaacggcaagttatcatcagagcttgcatggacttaattacaaaacaaagtcattacttatcgaccgtaagttactatggcgcaaatttagttgatgcgcatacaaaagagtggcctaatttctctgaatttgaatcgagaattaaccttaacgatcttctaaaagagggcggtgagtga

SEQ ID NO: 84450 - DNA, 729 bp, Citrobacter koseri
atgctgcataagttaattgttaaaaacgcacgatatattatctttatatcgtatgcaaattattatcaggctatgcgaaaatatcccactatatttaatatccctgataaaataaaaataatacccaatggcgttgatgagtattggttggaaaatatcaactatggaaaattggatgtttgttcagagggtcaaaaaatatttaaactaatatatgttgggcgacttgatggcaataaaaatttagatggaacatacaaagcatgttgtcagttgttgcaagaaaatagggatctccactggactattatcggtggcgaaagaacagagttaattaaccttttaaatataaagtatcttcctgaatggatttcacattatccaaccacgaatgacaaaggttttattaaagagaaatatcgagagaatgatatttttattatgccatcttttcgagagacatttggattggtatatgttgaggcaattacacaaggatgtgtctgtatttgcagtacaggtcaaggtattgacgggttttttgaaagattcaatattattgaaacctgcataccaaccgatacatgctctattaaaaatgccattgttaatgtgcaaaaaaaaagaaattatcctggttctggaaagcttaattcctatattatagataatttttcatgggatagtatatcaaaaaaatattatgagattttaagggggagattttag

SEQ ID NO: 84451 - DNA, 357 bp, Citrobacter koseri
atgagcattcactcagactccggtaccaagccggagaatcccgccagccagccgtggggacttaaacgcgttattacaccctgttttggagctcgtctggtacaggaaggcagccgggtgcattttctcgctgaccgcgccgggtttaatggtgctttcagcgacgaggatgcgttgagcctcgaccaggcatttccattaatactcaaacaactggaactaatgctcattagtggcgagctcaatccccgctatcaacacagcgtcatgctttaccacaacggactcacctgcgaagccgatacgcttggtagttgtggctacgtatacatcgccgtttatcccactcaacgttaa

SEQ ID NO: 84452 - DNA, 231 bp, Citrobacter koseri
atggctgaattcactaaattgcctgatggaccgtttactcgccagcaggcagaggcggttacgtctcaatattccaacgttgcgatagaggacgaccaggggacacatttccgtctggttatccgtcatgcgcgttgcatggtctggcgagcctggaactttgagccggatgccggttactggctgaacaggtatgtcgctcgttatggcatccgcaaattccctgcataa

SEQ ID NO: 84453 - DNA, 885 bp, Citrobacter koseri
atggttaagctagtgggaaatgagaatagtaagatacggaatcttgaaaacaaacttattgcgaatggttatcgttttcaatccggtggaatggataaagactaccgggcctatcaggtgagggttctcaattatcttctttcattaaatattccagagcaaaaaattagtgatttccttgctgaagtagataatagctatacaagtggctttccatccgaaaatgaactggattggtatcgtaatgatccacgagcaagtttgtggttggtctgtgtattatatgaaaaattaaaatcagaaactcctgaatacaatagcggttttttatcccctgcgtcattacaacccagtcatgatgtaagaattgatgcaatacgtcgctgcatagatgaatggcctatactttatataacacagtctgactttatgaaggatcaaagtattgagtgggctggattgcttgatcaacatgatttatttaggggtgttagatccagtaaagttgatgtctgttcctggttaagggattacttaaaggggaatacatcaattggactgaaacgtatttgtggtaattctcccgaggaaataatgtcgtggtgctatgccagttactttatgtggagaaaaaacagcctgcactctccggattctgtcgagttgttcattaggaagtttaagagcgcctggtctacacagaaaaacaggaataaaaataaagaagagaaaaagcttgtgacaatgagtgtaaatatctctcagcaagctcatgatatgctgagggatatgtctatgaaagatacgatgtcaaataacgcaattatagagagtgccattctcaggctatatgatagtaaaaataataaaaagcattccaaataa

SEQ ID NO: 84454 - DNA, 129 bp, Citrobacter koseri
atgaaaatcatcatcctcatttgcatatgtaaaccacatcacataactgtcatttttccctggatcttacacatgaaagttattgatatacagcgcggagttgtgctaaaagtctttgattcactgtaa

SEQ ID NO: 84455 - DNA, 207 bp, Citrobacter koseri
atgattactcgcccctcacttaccgaagaccagttcgttgacatggcatttataaccacgctgtttcaaatgacagataagtggatttataagctcattaaggacggagcctttcccaaacctatcaaactggggagaagctcccgatggttaaaaagtgaagttgagacttggcttcaggatcgtattaatcagtcccgtaaatag

SEQ ID NO: 84456 - DNA, 654 bp, Citrobacter koseri
atgtttttattcaatgacatccacccaatggtgcttgatccgaagcaccatcctttcaacgtggcttatctgccgcgtattgcacaagtactctgtaacgccctgcaggagcattcgcagactacggtagtcagggcggatttgcacttaccggaagacggggatgtatgtgacagcatcctctgcaatcctgacttgagccctgggctaatgtcccgttttatcgactctctgaaagctcagatagccgcttaccgacaccaaaaagcccgagaaggtaaacgttgccatcgtagttcagttcgctatgtatgggtactggagcaaccggaactgggcggcaagaagcattaccacttggctctcttcgtcaacaccaacacattcaacgatctgggaagctatgacgaaacaggcattgggctggcttcaatgatccagaaggcgtggttgagtgcaatggataagcgcggctggtctgaatatctaacgctggtgcactttgctgataatcctctggcttacctcgatctcaataagcccgatatcagaaagaaactggatgcgctgacgtttcgtctgagctacatggcaaaacatcgcaccaagcgatacagcagtaccgaacgctcattcggctgcagccagggctga

SEQ ID NO: 84457 - DNA, 1305 bp, Citrobacter koseri
atgattatcaaaagtaaaataatacctgtattgttgtcatgtatcgtgcttttcttttccattcgttatatatatacagatatattttatttgcaattttcatatatgggatttactctaaaagtcgcgaaggataacgatatttattttacattgctatttttcttatcgactattatattagggatattcctcccctctgaacttaactctgcaagtcgacttttgatagcactttgtttttttgttatttatattcctactctttccttattaccaatagtttctgaaagttcatattcacagtatttaatgttgtatgtggtattaacattatgtatgattattgtgttgctattcgctaaaactgatgctctaaggttaaatattccgacattatcagtaagagcttatttattaatattctgcatcattacggtttctgctctatgccttgttatactaaattataattttagtatttctaacatactgaaaataagtgccataaatgatctttatagtattagaggtgactttagagagcagaattataacattccaaaaatatcaatatatgccttaacgattggagcaaaagttcttgttccatttattttattttacggcatggaaaagaagaaaactagtattattctattctcactatttatccagttgatgttgtttataattactggtcaaaagagtgtgtttctagggtggtttttggtttttggtttttgtatttttatgcgaaaaagaaaaatattaactctccgtgctttttgcaatatattgacttttgcttttatagtagccttgatacttaattggttaggaagtcaagctttactattgatagttataagaagaattttcattatgcctggtgtactaggatcatattattatgattttttctctagtaatccttatatgtttttatcgtattcattcttatccccattttttgaaaatatttataaggtaacgccaccttttgtcattggtgactattatttttctcgtgcagaaatgtctgcaaatgtaaattatttaatggcatcatttgcggacttttcattttttggtatgctaatatatactgtgctgctttgtgttatttataaaataatagactcgatagttatctttaaagataatattagaacgttatctttgatgttattgcctacctgggccctgctagatagttcattaccgacagtaatattaactcatggcttacttgctattcttttattaacaattatctgtccatttaaaaggattttcccgtga

SEQ ID NO: 84458 - DNA, 768 bp, Citrobacter koseri
atgagcaatatcgatgatctgaaattgcttcaaaagcaatctttagcagccgcgagactcagcggagaaaaacactaccgtggttatgtcccatgtaagcatgggcatgtttctgacaggctggtatcaacccagcaatgctgcaagtgcctcgaattaagaaagtgtggcatgcgtaaagtagatggggttccccagtcgaaatcatcaagagtgaagaagaatacagccctcaacctggggaaaacacactatttcacaggcgtggcatgcaagcgtggacacatcgccctgcgacttgtgtcgacgaggcaatgtactgaatgcctatccttgcgggatcgcaaagatgccccgcagatattaagtgaggcggcgaaaaacaggctgaacgcagccagacgtagtcgagttgggcgggctaagagcagggcgtactatggcaatgttttaaagcatgatccttgctataagctgcgccgcaaggcctatgacgaaatcaataatgctctcgcctggaatagcggaaaggtgaaaatggcgattggctacacctctgacgaactgcgcgagcgtatacagtctcaattccagcccggaatgacatggagcaataggggtgaatgggaaattgaccatcgtaagcccatatcagcctttatcgctgaaggggtgaccgatctgatggtcattaatgcgctggataatctccagcccctctggaaagaggaaaatgccatcaagggcagcaaatacataccagcttaa

SEQ ID NO: 84459 - DNA, 897 bp, Citrobacter koseri
atggaacgcgacattgaggagcggtattacgcgattaaggtggccctgaaagctctgtttgaccagcgtctgaccgggcgagagcgtgagatcaacagccacaactggcacttcctttgccacgaccacggcacggatatgcggctataccaggtcaacgccggcaagttcatttacgacatgtcagcgcaggaactggctgatctgctggaagcggtgcagggcatcctcgacgattacctgcttgaaggtggcgagcaaaacctctgggcgatggattatgtcgtcgcagaagcgcagcgcggcacgctggaggcattcaacaacctctcgcagcagtcgcaggtatacgccagccagacaacgctacaacagctcttaagcagccccggtcaccttaatcaggtggcggcagccaggctgacaacgttcagtgactgggaggtcatcagcgacaccgcccgcggcgatttaaccaacatcatcactgacgccgtagcgcggggcgtgaatcctcgcgaaacggccagcgtcatcagcaagcgtctcgatgtgtcgatgttgaaggccaagaccatcgctcaaactgagcaggtcggcgcgctgcggcaggcgcagtggaacgagacggactgggccgctgatcggctggggctgaataccggtctgctgtggctgtcagccctcaaaccaacgacgagggagtggcatcgggccaggcacggtaaagtttttacgacggaagaagtcagggacttttatgcagaaaacggtaacagatataactgttattgtgctcaggttcctgccctacttgatgaaaacggcaagctctttaatgaagggctgtcagataagctcgcggccgagcgcaaagcgtggaagccgggagagtaa

SEQ ID NO: 84460 - DNA, 1452 bp, Citrobacter koseri
gtgaccgaaagcgaaatgaaacaacagcgcgccaataactccagcgttgagagagatcgttataaaaatctctcaatgctgtttaacggcaccagtaataccaaacgccagcgactctaccaggagttcggttacccccagcacctcacgtttgatgacttttaccgggcgtaccggcgtaatgcggtggccggtgccgctgtgacgcgcatgctcgatgggtgctgggaggacttcccggaggtttacgaaggtgaccagacaaaggatgcatcgaagcaaacagcgtgggataagcgcgtcaataaactcctgaagcgctgctgggagcagattaaaggcgctgaccgtcgaaacctggttggacgttactctgcaatcctgcttcagattaaggacagcaagcaatggtatgaggaagtcgacaagacagtcgttggacgccttcaggaaaaggcacttgttaagttaatccctgcatgggaagcgcagatcgacccgattaaatgggacgatgacccggaaagtgaaacgttcggcgaagtgacgatgtactcgtttactgagttgcctgtcgacggtaatttcgatgcgcgcccggggagaattattaatgtgcatcctgatcgggtaatcatcctggctgaaggatccgacgatggcgtcatgacgtcaggtaagtcactgctcgaggccggcttcaataagttgctggacatcgagaaggtgagcggcggggcttctgagggattcctgaagaacgccagccgacagcttaactactcattcagcgagaagacgaacttttcagcgctggctaaagctcttggtgtagcggaagggcaacttgctgaggctctggatcagcaggtgcgacgcctgaacgacagcaccgacagcgccagctttatgcaggccggtaccgccgaggtattaagcgttccagaagccgaccctgagccaacatggcgcacagcactgagcgagttctgcgcgaccgttccaatccctgtgaaagagcttattgggatgcagacgggtgagcgcgccagtaccgaagatgcgaaaggctgggggcgcaccaggatgagccgccgtaaaggcttcctgactgacgttatcactgacgtggtatctcgcttctggacgcttggcattattcctccggcgcagaatgcggaaattaccgttggttggtctgatctgctggcgcctagtcaggcagagaagattgccaatatggataaactggcggacgtggcagtgaaatcaacgaatgccttcgggcgttcggctatcactgaaaacgaaatccgcactgctggcgaattacagccactgcctgagcttgatgatgaggttccgcctgatggcaacaaaccaaagcctgatcctctggccgaccctcagtcagaagccgaaaagtccggtgataccacggtcgaaagttga

SEQ ID NO: 84461 - DNA, 1569 bp, Citrobacter koseri
atgaattacaaagctgtatggaagccactgcctggatctcagtccctggcgctgagctgcccgtgtaacgaaatcctgttcgagggcactcgcggaccgggcaagacagctgcgcagttagccaggttcaggcgtaatgtcggcgtgggttatggctcgttctggcgcggcgtcattttcgacaccgaatataagaaccttgccgacatcatcactcagtcgaagcgtatgtttcgcctgttcaacgacggtgcgcgctatctgtcatctgcgagcgaattgcgatgggtatggcctactggcgaggagttgcttttccgcttcgggaaagaagaaggtgattactgggattaccacgggcaggagttcccgtttatcgggttcaacgaactgacaaagcagcagtccgcagagttctacgaaatgatgttctcctgccggcgctcgtcgttccggccagaaaactacccgctggcggacggcagcctgttgaagccgatccccctggaaacgttcagcacgaccaacccgttcggcatcggccatacctgggtgaagaaacgcttcatcgagccagcgccacgcggcaccatcattcgcgaaacgcagcaggtgtttaacccgcagaccgagcgtgaagaggatgtgacgctaacccgcgttgctattcacggttcgttcaaagaaaacccgtatctggaccctcagtacatcgcgacgctgatggctatcaaagaccctaaccggcgcaaagcatgggtagagggctcctgggacgttactagcggcgggcgctttgaccacctgtggaatgaagcgctgcacgtcatcaagccattccgcataccggatagctggactgttgaccgctcccatgactggggcgagtcgaagccgttctctaacctctggtgggcgcaggctgatggcactgccgccgagttgcctgatggtcgacagttctgcccgccggcagggacgataatcctgatcggcgaatggtatggctgtcctcctgacgaactgaacaaaggcctgaatatgtcatccaccaacgttgcgaaaggcgtggcgtggatagacaaacgcctggttggcgaagagattgacgagccggaagagattcaaatcgacggtgtcacgcagggtcagcttcacattatgccgggcatctgtagcgaagtgattcccggaccagctgacggggcgatattcaacaccggcgataacgagttatcgatcgctcagaagatggaagcgcagggcgttatctggttgccagctgataaaaagccaggctcccgtatcaacggcgcatctctttttgcggatatgctcgaagcggtggttgaaggcgtgaagctggaatcaggcatgcctgagaagccagcattctacgtttttgactactgccgtggctggataagccgcatcccggtgctcgttcgtgacgataaaaaccctgatgatgtcgacacccagcaagaagaccacgactgggatgccactcgttaccgcgtactgcattcaccacaaaaaatcaccggcatgttggtgcgatcgcgctga

SEQ ID NO: 84462 - DNA, 651 bp, Citrobacter koseri
atgagcaagccggactgggaggccatcgagacggcgtaccgggccggagtgatgtccctccgagaaatagcatcacaacacggtattagcgaaggcgctatccgtaagcgcgccaagcgtgacgactggtcgcgtgacctgaatgcgaagattcagcaaaaggctgatgatctggtacgcaaacaggaggtacgcagaacggtacgcaacgaaagcactttgaccgaacgcgtactgatagaggcgactgccgaggtgattgccacggtacgcatggagcatcggggagacatccgccgggctcgcgaactgaccaacacgctattcgatgagctagccggagagtgtggcgacgttgctgcgcttgaggaactgggagaaatgatgcgttcacccgacgacaagggtgtggataaactcaacgatctgtaccacaaaataattagcctgccttcccgcgttaaatccatgaaagacctgagcgacagcctgaagacgcttatcggcctcgaacgtgaggcgtatagcatcgagaacaaggctgaaacgaaagaggtcacgcataacgtcatgctggtgccaaccagtgacaacgtggatgactgggaggcggcagcgcagaaacaacaggacggggtgctcggtggatga

SEQ ID NO: 84463 - DNA, 147 bp, Citrobacter koseri
atgatcatcaccgctaaagtttcactacgaccgtacatgaagtcgatcctcatcctctccgcgttgcttcacttggattggttaaccggtaaatgtttcaaagttgaaatggttgacggcaatacggcgaccatcgaatcgaaataa

SEQ ID NO: 84464 - DNA, 465 bp, Citrobacter koseri
atgagcaggttaaccgcaaccatcatcgcttttgtcgtctgcatcatcgtatctcttggttgggctgttaatcactaccgcgacaacgccaccgaatacaagaagcagcgcgatgagaagactcaggcgctggatctggctaatgccaccatcaccaacatgacaacccggcagcgtgatgtcgctgcgctggacgctaaatacacgaaggaattagctgatgcgaaaaagaccattagcgatttgcgtcgggatgtcgattctggcgctaaacggctgcgcatcgccgcaacctgtccgggagtgtcaaaaaccacctccaccaccggcatggatgatgcaggagcccccgaacttactccagacgctcgacggaattatttcgatcaccgggacggaatcgcaaccgcggacaaaatgattcgcggcatgcaggactacatcagcactcagtgcctgaaatga

SEQ ID NO: 84465 - DNA, 450 bp, Citrobacter koseri
atgaagcagcaatactgcctcgttaacgataacgttaaacgaaacctcatctcatacatccagtcattgccggttaaccctcgctccccgatggtagtcgaagcgcgtgaagagacgcgcacagacagtcagaaccgcctcatgtggcccttactcaaagacctttcaactcaggttgtctggcacggtgagaagctagccagcgatgaatggaaagacctgatcaccgtcctggtgaatcagactcagcagcaggaacagaaatcagcacccggcatcaatggcggccgtgtttatttcggcgtccgcacatccaaatccagcaagcgatacatggtagacgtcatcgaggcgatttactggtttggcactactcatgatgtgaagttctctgaggcgtccaacaagcgcattgcatgggctcaagagtggagggattcacatgcgtaa

SEQ ID NO: 84466 - DNA, 204 bp, Citrobacter koseri
atggctgacaaatgcctccgctgtgtaaccgggatgatcggagcgacgaagatttatcagggcgactgggagcaaagcgttgccttgtttgaaaagaaaatcgccgactggaatgagcgcacgcgtcattacgcgatccctcatccgggctttgccaataagtttaaccattgcccaatgtgcggcagaaaggttgaggactaa

SEQ ID NO: 84467 - DNA, 381 bp, Citrobacter koseri
atgaaaaaaatagctctggcagtggccttggcagtaactctcacaggatgcgcatcctcaggtaatcagcaactcaagaatgaaactgaaaccagtgttcagactaagatccaggaaggaaagacttctaagtcagaagtgaaatctttcttcggatcccctgatggggtctcatacactgacggcggtaatgagatctggaagtactcttttgccaaagttaaagtgaatggaacctctttcattcccttctacggcttgttccataacggaacgaacggaactaagaaagagttgaccattctcttcaaagacgacactgtccagaagtacacgatggctgagtccgctatcaacaccaaaacaggctgggctgactaa

SEQ ID NO: 84468 - DNA, 360 bp, Citrobacter koseri
atgtctgcatgtttcgcggttgttcttaacggcaacaccgagatcaaatatttcccattccatgatgcgcgtagcgctgacaaagctgaggttatggcggacgaatggcgttaccaggcgatcgacaccatcggtgctgaagagtctgttcgcttccacttacgtgtagtccgtccgaaggccgtcttcaagcttatgtctggcgcagtgattgaatgtgacctggacgacattgatatcgacccagcagctagcttggatatcgactgtcacctgtccgcattcgggtacaaccgtaacgttggatattgtggcaactgggatttggatggtgctgaagtcatcgagtttatcgcataa

SEQ ID NO: 84469 - DNA, 195 bp, Citrobacter koseri
atgaaaagcagtttattaacaagtgagattgaaaaagataaggctaatgagattagcgaaatcatcttccaggcattgcaggaaatcgacccagcagagtttaaagatgaggactctggtggcccagagagggcatcaggccttgctgatcaaatttcagaacgccttgtactcaagggcgcatctatcaactaa

SEQ ID NO: 84470 - DNA, 963 bp, Citrobacter koseri
atggatggtgtttcctttgggcttcttactgaacagtatttttacagcaaatcattacgaccggcgacggagtggagttaccagaaagtggttcgctcattcgaaggattcacatcgtttaatccgactaagatcgatcacctgacggtgctgagatggcgtcatatggtgctgaatgaccagaactgcgcgacccgaacatggaacaacaaggttgcccacatgagggcgctgtttaattttggtattaagcagggattgttgccgcaggccgaaaatccttttaacggcgcggtcgttcgcccgggcacgaaaaagaaaaagacgctgacacagacgcaaatggacgcgatgtaccgactgatggaacagcatcttgacgctgagacagggaaggggaacagcagtatgttcaacggtcgcagaaatgcgctactcccggcgtggttctggctgacggtggtgaatgtgtttcgttataccgccatccggcaaaatcaacttctgcatatccggctgggcgatatcaatcttgaggaacggtggattgacctgaatatcgagggagcgaaaaaccatcgtgaacatagggttccgattgtctcgtcgttgtatccatcgctggaggaactggtgagaaaagccggtgaggctgggatggagtcgggtgatcaggtatttaatgtgggttggtttgacctgatgagaaagagtaagtacccggaggtgatgaacgagtacccgctgagagcattcttccggcgcttgtcccgggagtgtaagtttacgatcacgccacaccggttccggcatacagtggcaacgcacatgatgaaatcacctgagcgcaatttgtacgcggtgaagaaactgctgggccatgtcagcattacatcgacgctggaatacattgatgaaagtgttgatagtctgcgggatatactggaaaccgaattgatgtag

SEQ ID NO: 84471 - DNA, 462 bp, Citrobacter koseri
atggctacaaccctcgaccagactcaccagttactcaccattcctttcagctccaccaccgatttcaccgtgttagcttcgtactgcgaaaactttgctgaagcgctgatcgaatgcgatgacccggtgatgaaaatggcgctttgtggcaggatcaacacctgcctgacgttgctacagcccacactgcttgaacctgttcctccccatcttgttgaaagtctcactgttgatactcttccggccggttcttctggtttcggacctgaatgcactgaagtttgtcagtattgcctcgctctgacgcaaacactgtccgggcaggggttttcctctgaaacggagaaatacctcagctggctattgttcgacctgatccaccacttcgcggcggaaatgaaagccccacgctggatacgcaccgctgagggggtgaggtttatcgatgaggtagccgcatga

SEQ ID NO: 84472 - DNA, 333 bp, Citrobacter koseri
atggacgctattcgtaaaccactctggcagcgggtattacgggtctcgctgttttgtgttgtcgccattctggccctcggaggttttagcttcacgctgctgcattttgtaggtagcgaaacggaactgaggacgtggctgcttcagataaaaacgccgcttctgttctggcggctggcgctgtacacggttatcacgtttttctggttgcaccgtgtccggggttatttcctgcgtcactgtacccggcgctttcaggtttaccggctggagataatgacggtttgcctgtttgtgatgattgaaatcaccagttcgcgttgggggatgtga

SEQ ID NO: 84473 - DNA, 1416 bp, Citrobacter koseri
atgacgaataaacacatggttcttgcaggcgctctgatgggatgtcttgcgctgagccttccggcccgggcggttttcgatctggataatgatgtgattaacactgattccagcaaaggattgaaaggtgcggttaacgataacctcttttacaccattggaggtgggacggtgatatcgcagccgcccagcaacaacaatatggaaaaactgggcatggggatcggctggaacagcgatctgatgtgcggcaattttgatatcaatactaccgttaaaaatcagctcaatggcgtgaccagtggctttaaagacatgatgagcaacgtgatcagcagcgccaccggcgcggtagcaagtttgcctgcgatgattattcaacgggcaaaccccggcttgtatgaattgctgaccaatggcgtgcttcaggccaatgtctcgtttgataaagcccagctcaattgccagaacatgtcgaagaaaatggcggattacaccatgtccagccagtggacgcaggcggcgataggggaagagttcaaaaatatcgtctccacgacgccggatgcggtggcggcggataatcagctaaaaacatctaccggcaaagagggggtaaagtggattggtgggcaaaaacgaggtggcagtggtcagcctgcgattaaacccacgcatgacctggcaaaagcgggcttcaatattctgaataagcagtctgttaccagtagtggtggcgtcagcggatcggcctgtaatggttctttgtgcaagaagtataagaccagcgaagaagcggcggaagccgtcgtcaaagtcttgggtgacagggcgattcgtacctgttctgaggccagtgattgcagcagcggtggcgtagaaaacgaaccaggtgcatcaactgccggtgttggtttttcgccgatgctggaagagaccacgcaggagaacctggaaattcttgtgaagctggttaacgggaacctgacgcccaacgcgactaatctggcgacgctgaaaacgggtgatctggccgtatctcgcggcgttattcaggcgctgaaagatgatccggataacgctgcgctggtacagcgtcttgccagcgaactggcgatgtcagagaccatttctaccgcgctgggtatgcgtcggatgttgatggccggtcagtcggaaccgaatgccgcggatcagacaatggcgcttgatgagtccgatcgccgtctggaattcctcgaccgtgaggtgctggcgctgaagaacgaaatggagatccgcaaagcaatcagcaacaactccattctggtcaccctgacgcgccaggaaagccgcgaggccgatcatggtctgcgtcaaccggtgcagcagaatgatgatgccatgcagaacctgaatcagaaggtggaggaataa

SEQ ID NO: 84474 - DNA, 951 bp, Citrobacter koseri
atgaaactatttcgacgacaccggctggggattgcgctggcgttgggttgcgcaactcaaccctttgcggcaggtgcaattaactccgcgcagatcatcgccagtgcgttgtctccccagtgcctggaatacaaaatcgtcggcatttgctactggctgctttgtacgcctgtaggctgcgttgtaaagacttccaccaaagtacgccactacatccccaatgccgtggtttccagctacaaccagacgggcagtaatccctggacggaaatgtcgtttctgggaacgggtctttccggtattgccgaaggcggcggtgcgaacgagcagaaacgcgttgagcggaaagataacctgcaattcaaaaatgcggatgttatcggtcatccggcgctggccgctcccgtcttcaataagttcatggggcagatggggtatacctgttccggcccggccacggcgatgatgccgtatcttctcagtaccctggatgcagtaatgtggcgctctggcctgccggagtcgttttatccggaagcgatgacgcccgggctgcgtgaaataggtttcacaactggtggtaatatgtgggggaacgtctatccccgcagcgggtttgttactcaggttgatgattataaagcggcagcggtcgtcgcacagcgtgcggcggatgttgtcacccgtaccgggcaaatccacgtttatcaacccatgacggccagcgccagaccgggttactggcccccttcgccggtcacggaaaataccggcacccgcaatcataaatggcagcaactcacgccgtcgcagtccacatcctgcgcggcctttccggacagccctaatcccatcgcaaccgatggcaattacgcctgggcgttatggcagccctacagctgctgtaagcggcgcggccagacgttcctctacagcatcgattttcaataa

SEQ ID NO: 84475 - DNA, 399 bp, Citrobacter koseri
atgaatccttcaaagttcctgatctcactgttggccgttgctgttcaggctccggcagcgaccgttgtctacaccgatagccatcaccccccattgaatgcggccagcaacctggtggtttacctggatgcgccggataccgttcagcgccagctgtttggtgagttgcctgctgatccagtacaggcggagcaggttgcgaaaactatcatccagtcaccagactggcagcaaaaacagcaacaaatcgggcaagcgtaccagggcgtactacaggcatacagcctgaagctggcgaagtatcccgccgtggtgtttgacgaccgctacgtggttttcggcacggcggatgttgcggtagctgaagcccgccttgctgaatttcagggggcgcggtga

SEQ ID NO: 84476 - DNA, 843 bp, Citrobacter koseri
atgcgttttaatacccctttaagataccctggtggtaaggcaaaattaaccaattttgtcgaagaattattacgattaaataggtttacatcaattcattacgcagaaccttatgccggtggtgctggacttgctctaaatttgttgatgaaagggagcgctgaggttatacacctcaatgatattaataatgcagtttattcattttggtactcggtgctaaatcattgtgatgagctttgctctttgattgaagataccggtgtcacaattgatgagtggcatagacaaaaggatataatgtctaagcaattagatgtaactactcttgaattagggttctcaacattttttctaaatagaaccaatcgttctggaattcttaaaggcggagttattggtggtaaaaaacaagacggtaattggaagttagatgcgcgatataataaaaaagacttaatggatagaattcaaaagataaataaaaaaagtgatagcatattcctgacgaatatggatgctgttgattttctagattatgttgtagtaaagctttctggagattctcttatttatttagatccgccgtattatatcaaaggtcagggtttatatgaaaatcactataagcatgatgaccacactttaatctcaaagaaagtgatctctgaacttaatgtaccgtggattgtaagttatgataatgtccctcagatcaatgatttatataaatcatgtaaaaaaatgtcctatggcataaattatagtgctcaagatagatatttgggctctgaagtgatgttttttagcgatggtttgaagaaacctcgtgtttttaagtga

SEQ ID NO: 84477 - DNA, 1722 bp, Citrobacter koseri
gtggcaaataaaataacaaaattaaagtctattgatataaagaattttagagggctaagtggtgtatctcttgatatagctgatcgtattacaattgtttgtggtaaaaatggtacatcaaaatctactatattgggaattattgctcaggtttttagttttaaaaaagattattcagcaaatccgcctgaaaatctaaaattcaagacattaactgatgttaattttgagtctgttttttctgatcatttcaggttttctaaacatgatgaaccaggttcaatggatataggatttgttgtttatgacggtgcgtcagatacaactcaatctgagttaaaactccgtgtttatgatgttgctgatagagataaagttcgtccagtggtaagaggaaataaaattgaaggggttagtaacactagtcgaaatattactcatccagttatatatctaagtcttgctcgtttgcaaccaataacaacgagaaaagaatattcagtaaggaatgaagagtacatacggaataattctgattattttaagggtttgaataataaaattcttataaaaacaacgtctactctaattacggctacttctggtagcattaaatctgtagtagggcatgcgaactattatgatcaagattcggtatcagttggtgaggataatgtaggccaaatattacaagcattattatcctttaaaaaattaaaggaagaatacaaaaattatcatggaggaatattattaattgatgaagctgatgctggattgtttccggcagctcagttagaatttatcaagctattaacgaagataacaaaagaattaaatttacaggttgtaatgacgtctcactcacctacaatgatcgaagaggtatataaattaagtaaggcatctaaagattatagaacaatatacttgacagatacatatggaaaaataaaagtaaaaaacgatttatcatggccgcagatttatgctgatctacatgttgatactgtaaaagttaaagatgactatttccctaaggtgaatgtttactttgaggaccttcagggatttgatttgtataatgctataattacaaaatccactctaaagaaaataatccatccattgaaggatattaatattagctgtagcgatttaattagtttggtaaaaagaaaaatcccagaattttccgcaaaaagtattattgttctagatgctgatgttaaggaagataaaaattataaagatatacaaaagcaaaagaatgttattttgctaccttcatctttgcctcctgaccaattactgtttgaatttttgtgtaatttagaacctgatgacgcctattgggagaatgatacaggattcacaaaggcggtgtttgaacgagctgcatctgatatttataataaattgaacattacggtgactcctggagttaaagtgaatttgcaaaattatattgatcaatttagaaaccggcctgagtatcaaaaaggacaagttagagaaatgtttaaacaattctcgaagaaagaaaaaatactagaggttgtagatggtaaagtttcaataaatccttataggtattgggcaaagaaaaaccctgacctagcaggggggtttttggataggtttatttctgggttaatacatgttctagttagtggttatggcctcgaggtggcacttgtcactcctcgtatccaaggctaa

SEQ ID NO: 84478 - DNA, 393 bp, Citrobacter koseri
atgatgcgcttcagatccacggttctggacgttgtggacggtaatatttccaataccggcgtgttgtttgatgcgccgccacagggtaatccgcgaattagccagcaccatcatgcgcaactggcggaattatgccgccagatccgtcagcgggtaggggagaaggcgacatttacttattctcctcatcgcgtggccgggcataactgcctggctgttcaggtggaggggaagttgggtacggttaacttgctgctgactgtaaccggcagtctgcgctggccggtggcggaggattacgagcagggggtgcgctggtatattaatgtgccagatgcggtggatgtgatctttttagtgagagaagttagaaaatgtgtagatatcaactaa

SEQ ID NO: 84479 - DNA, 2769 bp, Citrobacter koseri
atgttcagtttattcaccaaaaaacagccgcagccggtggctgatgaaccggcgctgctgtcacagaaaaagagtggcaggctgacgcaggacggcgtgcgctcgctgtatcccaataacgcctcgtttgtcgacttcctgccgtgggtggaatacctgccggaaagccagagcttgttgctcgatgacggtgtttcggtgggcgccgtgtttgaagtggtgccggtgggaaccgaagggcgcaccggtgaacgtctggaagagatccgcgatatcgttgaagatgcgcttcaggacagctttgacgagcgggacagccatccgtgggtcgtgcagttcttctgccaggatgaaaccgatgtgacggaatacatcgataaactgcgtggctatgttaaaccgtgggcgcagggaacggcattcacagcagcgtacctgcatgagatggaacgtcatatgcgcggcattgctgtgccgaaaggtctgtttatcgataaggccatcaccggcgcaccgtggcgcggccagcagcgccgtacccggatggtgatttatcgctatgtaaatccgggtgtctctgagccgtattccccggaagagcaactgaatcaggtctgcgagcggttatcttcggcgctggccggggcggggattgtgaccgccaggcagaacggcgagcagatccacgcctggctgctgcgctggtttaatcccgaacctgactgggtggataaggagacgctgtacagtacggcggcgcatgttgacacccgcaacggcgagctgccggtgcttaacgatttcagcgaaaccctgatgtttacgccgccgcgctctgacgttgagaatggcgtgtggtggtttgatgagcggccgcataaagcggtcagtatcgatcgtatccgccgtgctccctcggtcggccaccttaccggcgaaacccgcaaaggggagaacatcaacgcgctgatggatttactgccggaaggaacggttatctccctgacgctggtcgtgcagccgcaggatgtgctggaagagcgcttcaaccatctggcgaaaaacgccattggcgagaataccgaatcggaacgtgtgcgagccgatgccgatacggctaaaagctatctgggtgaacggcacaaactgtaccgcgccagcatgaccttctttctctccggtgagtcactgaaaatcctcaacagccgccagcgcgatctgacggcgatcctgcttaacgccgggttacagccggtgaaaccggaattcgatgttgcgccgctgaatggctaccttcgggcgctgccgatgtgctttaacccgacgctggataagaagaactggtacacccgtctgacgtttgttcagcatatggcaaatatgctgccggtatttggccgtgacactggcaccggccatccgggatttaccttctttaaccggggcggtgcgccgctgacgttcgatccgcttaacagcgccgaccgttccaaaaatgcgcatctggtcctgtttggcccgaccggttccggtaagtcggcgacgcttaacagcctgtttgcccagttgatggcgattcaccggccacgtctgtttattgctgaagcgggtaactcgtttggcctgtttgccgactactgcgcggagctggagctgtcggtgaacaaagtcagcatcaaaccgggctgtggtatttcgctggccccgttcgccgatgcatacaagctgattgaagcgccggtgaaaaccgttgatgaaagcgagctgagtgaccgtatagaggtagatgaaacggacgatggcgatgcggaggaagagcgcgatattctgggtgagctggagattgtggcgcgtctgatggtaaccggtggagaagcaaaggaagaggcgcggctggaacgtgccgaccggggcatgatgcgcgaggcgattctggccggggcgcgtaaagcctggaatgaagaccggcagatgatcactgccgaccttcaggatgcgttttactccttcgcgaaggatgagtcccgccccgaagttcgccgcgcccgggcgcagaatatgggggaatcgctgggcgtgtttatgcagggcttcctgggcgagctgtttaaccgcccggggcagaactggccggaagcggatgtcacgctgattgacctcggaactctggcgcgtgaaggctatgaagcgccgctggccgtggcctatacctcgctggttaataccatcaacaatatcgctgaacgtgaccagtttttggatcgggagatcgtcttcccgaccgatgaggcgcatatgatcaccacgaacccgctgttggccccgtatgtggttaaggtggtgaagatgtggcgtaagctcggtgcgtggttgtggctggcaacgcagaacctggaagatttcccggccacggccaagaagatgctcaatatgattgagtggtggctgtgtctggtaatgccgccggaagaggtggaagagatagcccggtttaaaaagctgactgctgagcaaaaagcgatgttgctgtctgcgaccaaaacaccgcgctgttatacagaaggcgtggtactggcaagccgcattgaggcgctgttccgggctgtgccgccgagcctgtatctggcgctgggcatgactgagaaggatgagaaggcggcacgtcgggcattgatggttgaacacggtattagcgagctggacgcagcgaagcgtattgcgcaccaactcgatatcgcccgtggtattgccacgaaggaggcggcatga

SEQ ID NO: 84480 - DNA, 402 bp, Citrobacter koseri
atgaaaggatacggtttattcatgctggtcacgctgttgctgagcggttgcagtacctccaaagatgaaatgctgccgcccggcgacagtaccatgctggatatgtggcagaacaaagccagcagcgcccggaccacgacagaagcccggagcgtgttacgccgggggcttaacgatgcggatctggctacccgtcagtcgctggaagaaagctatacccgcgatgctcacaatgaaatccagcagtttttcccgcgcctgcccaacccggatatggtgatttatatctacccgcatatggcgggaaatgagccagcgccggtgccgggatacagctcggtcttctctttttacagccgggtgcagtatgcgttaccgggcgagcgactggaggcactctga

SEQ ID NO: 84481 - DNA, 1467 bp, Citrobacter koseri
atgcagattaaatcgaataccctgctgaaggttattgtgccagtggtgttgctgtcggcagttatgatcggcgtgaagtcctgcggtggcgcgaaacagacgcaggattcggcggataacgctactgtggccgacctgacccaggaagaactgcgcattctcggcatcgagggcgatacaccgcaggatacgttacgtacgctggttggccgaattaaaacgattcagaccagtcaggagaatctggagaagcagaatgccgcgctggccgaagaaaacgcccgtctgcaaaataaaggcagcaacgtggacgggcgtatcaatgacgcagttaatgccgttaagcaggaaagtacccaggcacagcaaaaacttcaggctgaacagcagcggctggctggcctgctggaatcactgaaaaatacggttcccggcccgggagcgggtagcaatacccccgcaggcagtgatttacccgtcgggctggggctggaagatgcagggcaggctgaaacggtggcgcaaggcacggtctggattgagccgcaggatggcgtgcaactggatcgtaacggtaaaccggtgaccggcgcggcagttgcgaccaatggcaccggcacattccagttccctacagcattcggtgggctgaatgacaacgagatcacccgccataaagcggaactggatcgtaacgcgaaaaaccagcagagcatcgaggaaaccgatctgcccgtctacacactaccagagaactccacgctggttggtagccaggctatgaccgccctgctggggcgtgtaccgattgatggcaaagttaccgatccctatcccttcaaggtgcttattggtaaagagaacctgaccgccaacggtatcgagcttccagacgtcgaaggcgcgattgtatccggtacggccaccggtgactgggtgctgtcttgtgtacgtggtgaagttcactccattacgtttgtctttactgacggcacggtacgcacggtgccgcagtcggcaaaatccagcgatggcagcaacgggaaatccaatggcggcagtattggctggctgtccgatgagcacggtattccctgcctttccggtgaccgtaaaagcaatgcctcaacttacctccccacgttatttgcgctgtctgctgccggtgcggcctctgatgccatgtccgaaagccagaccacgacaaccaccgaagggacgtccatcaccagtacgcttaccggcagcgccggacaggctgcgctggggaaagcgttatcaggcggcacgaacgagctggcggaatgggtgaaagcgcgatacggccagatgtttgatgcgatttatgtccctcccggtgcgaatgttgcggtgcatatcacccgccagatcccgattgattacgaagagaagggccgcaaggtcaaatacgattttgatgtcagccagcaacacgagctggattaa

SEQ ID NO: 84482 - DNA, 876 bp, Citrobacter koseri
atgagtttacgacgatttttactgtcgctggcctgtcttgccgcattaccagcgcaggcggttgaactggtgaagtgggagcgtattccgctgccggtatccctgcatgtcgggcaggagcgcattgtgtttgtgaaccgcaatgtgcgcgtcggatttccgcctgagctgaaggggaaattgcgtgtacaaagtaccggcggcgcggtgtacctacaacccggggagcagttcgcccgtacccgcctggtgcttcaggatgtggagaacggcgagatgatcctgctggatatcagcgccgaagagggtaaaaacgtactggagccggtaagtctggtgtatcagggggaggtctccagctcgatgggcaacggtgatgttgccgcgaccgacaaccaaaccccgaaaaccggcgaacggcagtccacatcgaaaccgaaagagaaaaaatccaccacgccgctgccggtggccctgacccgatatgccgcgcaaagtctgtacgcaccgtcacgaacgattgagccgctgcccggcgtgcattccatttcgctggcgctgccggacaaacttacgtcattgctgccgtcagaatccgttgaaatcaaaccgctggctgcatggggattgcagggttacagcgtggtcgcgctgaccctgcgtaaccagcgtgcggagaaagtggttctcgatccacgtcggcttcagggcaatttttatagcgccacgttccagcatcgctggctgggcgcgagtggaacgccggaagataccacgacggtgtatctggtgaccaaagggcgtccggatgccgcgtttcttcctgagccagtgaaggcgaaaacaggcaaaggagggaagagcgatgcagattaa

SEQ ID NO: 84483 - DNA, 657 bp, Citrobacter koseri
atgagtaagtttaaaaatgccctgaatgcccgggacaatcatatctggacgctccgcactgcgtgtggggttatgttggtactgttagtgttgtccatgcttggctggatgatgtctccgcgcaatctgaccattcacaatcctcccgatctccgctccggcagctcccgtccgtggtgggagatcccgccctcaacggtgtatgccttcagcttttatattttccagcagttaaacagttggccgaaggatggcgacgttgattatccatatcgtatcgagacgctgtcggcctacctgacgccgacctgtaaggaactgctgcataaggatgcgaagcagcgtaaggacctgggggaatcgcgggatcgtgtacgcggcgtgtcggagatccctgagcggggctatcgggatgacagcgtcaccattattgaccgcgataactggcaggttcgtctggatctggttaccgatgaatatgttaactccgagccggttaaacgctcactggtgcgctatccgttgaaagtggtgcgctgggataaaaatccggaggctaacccgtttggtctggcgctggattgtctctcggaagcgccgcagcgtctggaggcggccccggtggttaaggaagagaaaaagggagtgtttaactga

SEQ ID NO: 84484 - DNA, 381 bp, Citrobacter koseri
atggcgactatcgaatttatgcctgacaggctgaatgctgagccggtggtgttccgtggcttcaccacgccggaactgggatttaccgcgctgttcagcgtactgggcggcctcgtggtcgccataccggttctgccatttctcggctggatagcctttccgaccgtggcgatgctgatgccgctggtcacgattatttttggcggcaggttaatggcgcgttttaagcgcggcaagccggaaaactacctctatcgcaggctggatctgctgttaagccactctggcatgggaacaaaagggctgatacaacacagccaggtactggcgttacgccgtctgcgtcctgtggttcgccgtcaggaggccgttcatgagtaa

SEQ ID NO: 84485 - DNA, 372 bp, Citrobacter koseri
atgttttgctctgcattatcttctctgcgtttttctcttcgtctctggtgtactcggggtctggccgttgccctgactggggtttctgctgcccgggcggggttacccactgttgaaggtccgaaaagccgcactgatagctctttctacggtcagatctccggatatctcaatgacggtatcgtgctgggcggattaattcttgcggcggttgccatgctggccgtcggtaacgccattattgcgacctttgccgaagtccgtgacgggaaatcaacctgggctaaattcgggatgctttgtgtcgtgggggtgatcctgatcgtcgttgttatctggctggcgtctaaggccgcaacggttctgctttaa

SEQ ID NO: 84486 - DNA, 237 bp, Citrobacter koseri
gtgaacgatgcccagaccagcgcatttaaagcggcaagcggtaacgccgatcccgcactgctgagcaaagtgtttatcggtgcgctgattgccctgctgattttgtgggtgggatggggttttctgcatgtttatcgggggtacgcgacaggtcatatcaaagagcaggctctggtacgttttgccatccgctcagtccttctcatcattatcgctatctatctctttgccagctag

SEQ ID NO: 84487 - DNA, 312 bp, Citrobacter koseri
atgcgcatgacacaaccccgggcatggtgcctgttggggattatgctgacgtcgggcgttcaggccgctgagtctgacgagctggcgctggtaatgaagcaactggatcaggtgcaggccgcgctggaacgcgcccgtgttgtcgccgttcaggatggacagaacgggcgcttctggttcgattatctgagggcaacgcaggacatcaaggcgattcgccaggggatcggtatctacctggaaccttcccgtgctcagcctgtgccttcggcctctctcaccggtcagtaccggatggagcgtcgcccgtga

SEQ ID NO: 84488 - DNA, 156 bp, Citrobacter koseri
atgaaacaacgcaccaccctggtattgtgtctgttaatagcgtgtctcacgctactggtattcacgtatctgacccgctcaacgctctgtgagttgcgaatacgggacgggaacagggaggttgctgcatttctggcttacgaatctggtaagtag

SEQ ID NO: 84489 - DNA, 765 bp, Citrobacter koseri
atgtcgcagatgaacacatcttcagctccggtacaatccactacgcccccaaagccacatggttttttcaccgtgctgctgtgggatacgccgtggcgcattatcgggatgctgctggtatcgctgctgtttagcctgattgtggaatatatcggtatcgcgttcttctggccggatcagggtgcggaacatagtcgtgccgttatgcagacggaaagcggttattttgctgaaggatttacgcaaagtttgctgctgtcatcgccggtggtgaccgtacagagctggatcgtgctgggttatcagtggttatttgtaaacagcggctttactggctggttgcagtcgattcagacgccgactgccggaagcggcaatggcgttacggatgagctaaatgcctggagtgcctgggcggtgcaggtcgcatatgaatatctgatggcgacaatgtatgtgtcgctggtctttctgatgcgggtcaccattctggtgttgtcagtgccgttatttatcctggttgctattgtggggatcgctgatgggatggtacgacgtgatctgcgtcgctacggtgcggcgtatgagtcgagttttctataccaccatgccaagcgcttagttaagccagcgatgtatataccgtgtgtgttgtatctttctgcgccgttcgcggtatatccgaacttgttgctgttaccggctgcgttgctgatggggctggcgatttcggtgacgatgggaagctttaagaagtatttgtag

SEQ ID NO: 84490 - DNA, 300 bp, Citrobacter koseri
atgcagctactttttgaaaaggaaatcatgatgaaacaacgttatcgggttgaagcggttatggcgtcttcaagacaaaataagctgcaagtcccgcgtgatgtgatggatgttttgtgcgagcaggattgctcgtcacttcagatcccggaaattattgagcgtctgacttcgttgggctatcgcccgagatatgaagccaccgttgatacgctcacggatatcgttaccctgtggatttgggttgggcaggaagagatgttgctgaactgccagatggagccgctggcggtgcattaa

SEQ ID NO: 84491 - DNA, 2085 bp, Citrobacter koseri
atgagcgaccgctatgttattgaagctatgctgcggcctgcggtggagctgaacaccgccgttgttgccgcctgcgccagctatatctgcgtgacggctccgtgggcggtggcgctggcaccttcagtcagctatgtcacggcggcagggtttgccgtgctgtcggtgaaacggactcagcaggggttacgggtattgcgttaccggcgcaatatccggcgtttgccgcgttatgttgtgacaagtagcgaggtgccggtgagcaatcagcggttatttctggggaaggggtttatgtgggagcaaaagcatacccagcgtctgcttgataccctgcgcccggaagttgcggggtatgtgaatcccccagcgctgtaccaggcagcacgtcgttttgaacagcactatgaacatcgctttcctgcattgtgcaagctgctggcccgtgattcggctctgaaccccgttcgaccattgccgccggtcggcggccatccggcattgcacggcatcgagccggatgaggtcaatgtctcgatgagtctgggtgagcgcgtcgggcatatgctggttctcggcaccacgcgcgtcgggaaaactcgcctcgccgagctgctgatcactcaggatattcgtcgcggcaacgtcaccattgtttttgatccgaaaggcgatgccgatttgctgaagcgcatgtatgccgaagcgcaccgcgcaggccgcgccggtgaatttcatgttttccatctgggctggccggatatcagcgcccgttacaacgcggtcgggcgctttggtcgtatctctgaagtggcttcgcgtgtcgccggtcagctcagtagcgaagggaacagcgccgcgtttaaagagttcgcctggcgtttcgtcaatatcattgcccgggcgctggttgcgctggggcagcgcccggattttggccttatccagcgctacgtgaacaatatcggcgatctgtttgagacctatgcggaaacctggatggtgaagcacactccggcactgtggcaacaggtggagaatctggcgcaaattctggatgagcgcgatatcccccggcatatggaagggcgttcgctacgggtggtggcgattgaacaggtgctgaacagcgacgaggggaagaaagtttacgatccggtgctcgatggcctgcggtcgtcggtacgctacgaccagaagtattatgacaagattgtcgccagtttgttgccgttactggagaaactgacctccggtaagacggcgcaactgatctcaccaaactacaccgatatgtccgatccccgtcctatcttcgactggcagcaggtgatccgtaagaagggcgtggtgtatatcggtcttgatgcgctgtccgatccggaagtcgcggcggcggtgggcaattcgatgtttgccgatctggtctccgtggcggggcatatctacaaatttggcgtaaatgacggtttaccgggtgatgagggtaagaagacgccgatcagcctgcactgtgatgaatttaacgagctgatgggggatgaatttatcccgctaattaacaagggcggcggggcgggtattgaggtgacggcctatacccagacgctgccggatattgaggcgcgactgggcaatgcggcgaaagcggcgcaggtagtgggaaactttaacagcctggtgatgctgcgggtacgacatacggaaacagcggagctgatgactaaacaattgcctgaagtggaggtctataccaaaacgctggtttccggtgtcactgatatctcgaatccggaaatgggcagcgattttacctcgaatacccaggacagggtcagtacggtgcgcacgccgctgatcactgccgcgaacgtgatcaatctgccgaaaggacaggcatttgccttgctcgaaggagggcgattgtggaagatccggatgccgttgcccgctgctggcgcggatgccctgatgccggatagtattgggcaaattgcagattacatgcagcgaaattaccggaccagcgatgcctggtggtcggggagtgcgttaccgggagattacgatgcagctactttttga

SEQ ID NO: 84492 - DNA, 501 bp, Citrobacter koseri
atgatgatgcgttttccgctggttctcgcactgctgtttccgggcataagtcaggcagagctgaccgttgtcgccgatctgggcggacagtcaacggctgaatactttgccggtattaacaatcaggaggaagctctatccacctcgcaagtgttgacactgtcaacacctgacaaagcatcggtattacccattcgtaccccggagctttcgcccgggccgctggaagctcgttctctctctatgcccggaatgcggtcgattttcctgataggcgacgacgacctttcccggcactggctggctttgcggcgcgatcggcttgttcagcttaatgccgtgggctatgtggtgaatatcgtcagcaaagcggcatgggatgatttgcagcaccaggcgaacgggctggagttgcttccggtttctggtagcgatctggctgtccggctggggatttctcactatccggtactgattagcgagaaggggctggagcaatga

SEQ ID NO: 84493 - DNA, 567 bp, Citrobacter koseri
atggcagcgcgtaaactgatgtggctggcaatgctcatcgcgttgccggaatgtctggcggcgcaatctgttccggaaggatattaccgggtcgctcaggcggaaaatgttcccgccgaggcgctgtatagcctggcgctgacggagtcatctcgcaagctggcgcatggcgtacgcccgtggccgtggacaattaatgttgccgggaaggggtatcgctacgcctcccggaacgaagcataccaggcgctgttaggttttatgcggcgctatccgctcaaacgtattgatgtcggtattgcgcaggtcaatctgggctggaacggccactatttcacatccacttgggaagaatttgatccctatatcaatttgcacgtagccgctcgcattttgcgagcctgttatgagcgtagtcccgggagctggatatcggctgcggggtgctatcaccatccggcaggcggcaaacctgcacaaacttataaggccatcgtgtcacgtcacctcggcacgttgcagccgtccgtacaggcgctggcattcaatcagggaggaacacaatga

SEQ ID NO: 84494 - DNA, 705 bp, Citrobacter koseri
atgaaaaagctaaaagttgtgttgttgtcgggagtgttgacagtgtcaacagtcgcactagctgcaccttcagtgaatcaggaaaacagcctgacggtgaatacgtcgttacagatgctggaacagcaacaaatgacgcggagcgcacaggagtgggggctgacagcggaagagtggcagcgttatgaaacgctgaaaaaaggacggcgtggcgtgctgtctccggggttagatccgctgacgatgctgggcatcgaggcgcgtagtgatgaagagcgccgtcattttgccgagctgacggtgaagcaggagtttcagcgggttgaagctgagctggcatttcagcgggaagtgaacagcgcgtggacgcgggtctatcccggcgttctgcccgttcaggatctgagaagtgaagtcagtaacgcccgtcaggcgctgtttgtgaaagatagctgtccggcctgcgagcgcaaactggctcagttgatgaaatcgaaccagccgctggatatttatctggtggatagcggcggtaaggatgaggcggtccggagctgggcgaagaaacacaatatccctgctgaaaaggtgaaatcccgccaggtaacgctgaaccacgacaacggcatgtggctgaaatatggcaacgggctgatgccggttgtattgcaacagggggcgcagggatggcagcgcgtaaactga

SEQ ID NO: 84495 - DNA, 720 bp, Citrobacter koseri
atgaacgagtccgcgagtttcatggagataccggagatgaaagagtctgtcagacctgcccgcagcaaactttgggcgatagtccgttacggatttggtgggctggtcttgtttgctttggggggaaccacatttatcagccttaagtccgtccaggtactttccgccgaggttagccagcttaaaactgcattgcatggtagtccggatatcgcgccactccgggcacaactgacaacgctgcaacagcagtttgaaacgtcacaaatgcaactgggaggaatggctgacaaaccggcgcttgcggctttgcagcagaaggttgaggcgctggataagcaacagcgtgagcaggctgcttcggctgcggcccttaaaaccgggctgtcttcttttcaggagcaggttcgctctttgaatcagcgtccggtcagcgtcgctgccgttgttcctgccgtaacgtctggcgcggtggtggtgaagaaaaagcccacgccgaaaacgcagcggccagctaccgcacccttcgtccttaccggtatcgaacggcggggagggatagcctttgccgcgatagcgccacaatcggcaacgcaactgacagaaataacgttaatggaaccaggggaaacccgtcagggctggatgttgctggcgattacaggtcagcaggctcagtttcgcgtggcggggaaaaaccagacgttgacggtgcgataa

SEQ ID NO: 84496 - DNA, 597 bp, Citrobacter koseri
atgaatcttcacatttcactggctgtctgcctgacggccagcatcctggctggttgtacgcaaaaactccagcaacctgatacgcaacctcatcccgcggcgctgaacggcaacgtccagccagcccgactggatgtgtatggtgccgcgccagaagttgtccgctatgaccgctacctgctgatcgatacttccccgagcgctgcgcaacgtgcgccgctagagcaaaccatagatatccgtattcccgcatcattatcgccgaccgtggcggatgccatgcgctatgccctgcgccagtccgggtactcgttatgcagtacgacaccggcgaaccgggtgctgtacaaccagatgttgcctgctgtgcattatcaactggggccaatgcgcctgagtcaggcgttacaaatcctggccggatcggcctggcagcttgaggttgattctgtacaacggatcgtctgccattcattacgcgatggctatcgtttgccgccggaagcggtgaaaacgtcggtcacttcagtctctgtgccgctacccgctcaacccgtcaatatcaccgctccggctccgcagaggatgctgaaatga

SEQ ID NO: 84497 - DNA, 531 bp, Citrobacter koseri
atgtctacagcatctaaaaccgccactactaaacctaaaaaagatagcgcccgtaagcaagccccggctcccgttcctgctgaatcagcaactccggttccgtcagcagctccggcacaaccgaaaccacaatccagctactttaatttgcatattgatgggctgggttatctgagcaacattcgcgaagttaatacggctactggttcgtttttgagctgtacgattaatgcgttacacggctcaactgaaaaacctgaatacacgcgttttgatgtcactgtatcgggtaaacagactagttctttaatcagacgctgccagaatgcggtgaatgaagagaaaaaggtgcttatcggttttaagctcagtaacctgactgccgatgtgtttactttgaccaaaggcgatcatgcgggtgaatcgagagcgtcactgcaagccagactgataaaaatcagttttatcaaagtggggccaaatatggtttataaatctgaaaaggctgagtctaccgactccgcaaactga

SEQ ID NO: 84498 - DNA, 525 bp, Citrobacter koseri
atgaatgcactgttaacgcagatagttatggagctgaagtcgggcaatatccgccgttgtgaggcgatggggttaacgctggaagagatccaggaactaaacagcctgaccgtcgaggatctgcattatctggtgaatacacaggtatcgcttctgaccttccgcatcaaccacaccaacctgaataccatgctggcgcaggcccgtcgtgagcagacccggacgcaacggatcgacagggcgttaacgctgggcggctctatcgagctgatgcagtgttttttcggtctgacggcgtcggaagtcagttcccggcgacgcctggtcggtgttgtaacccggcaggggcgcagccagatcccgacagaagaacaggagctggcggtgtggcagcagtggaaggcatcgaacgttgacaacctggagtcgctggatgcgctggaggccatgatgctaatcgctgagcagcaggacatttcgctaacttcagtctggacgctaactaaaggatggagtgccgcctga

SEQ ID NO: 84499 - DNA, 243 bp, Citrobacter koseri
atgaaagctgactgggttgatgaggcgcaggaagtgacccaactgatggtcgatagccaggtcgagcggattcgctcttcattgatatcaccggcgatatcgtctgctgagtgcgaactctgcggacatgagatcccggaggcccgtcgcagagcggttccgggcgtcaggctgtgcgttgaatgccagaccattgctgagtttcggcggcgtgttggatatggaggatacgatgaaagctga

SEQ ID NO: 84500 - DNA, 1620 bp, Citrobacter koseri
atgacttctaagaaatcgagccagttgggcgaaaagttgcttcagcggggccgtactccgaacactgaaagttctgctgtagtgttgccggtgaatgaaatgccgatggttctgactctggagcagttgcgccccaacccagataacccgcgcacatcgcgcaatccaaagtatggcgatattaaagcatcgatccgcgcccgggggctggattcggtgccaaaagtcaccagagatccggaaagccccgaagatgtttatatcttcagcgacggtggcaacactcgctattccatcctgacggaactgtatgcagagactggcgatgagcgttttcgccgtgttcagtgcatcgtgaaaccgtggccggggcgtttgcagtgcgttatcggccatctggccgagaatgatgtgcgtggtgagctgtcatttattgagaaagcttttggcatcgagaaggcgcgagctatctacgaggaacaactggggcgagaagtgagtcagcgcgagctggccgatctgctgaaagaggccggttatccggttcaccattcgaatatcagccgtatggtggcgacaatcgaacacctctggccgtggatgcccaacttgcttaattcaggtatggggcggcctcagatcgcccagcttatcgcgttgcgaacggcggcggaaaaagcctggcagaccttcagtcagaacgtcgcgttgccgccggaacagaaatttaatgatgtctttggcggtgtctgccgtgcctttgacgacccggatcactactcagccgatatctttaaagaagagctgattgcggccctgctgaaggcaatgcccgatccgcaactgacctacgatagctggctgattgagcttgatccacaggaacagaaccggcgcaaactgtttggagcgccggagccgcttccccagcatgttctggatgcagacaaaacccatgatgagccttcaccaccaccggctgcggagccaccctctgtcaccactgattccggatcaacgaggaaaaagcctgtcactaccgggggcgactcctctgatcatatcgatctaccgcccgatgaagaacagctggatctttatggtgggaatgtctcacgtgattcaacacctgaattatccgacgttcctccggacgttgatcaagagcctggcgattgtactggcggccagcgtcaggagcctccggtaaatcccattacttttgctgcgaatgggctggagccggtaactgacatctggcatatcccggcgttacaggatgatgttgagcatctacaggacatcgcgtttcgcctggcgttcgaactggcggaggtgatggggattgaagatgctgttcaggaagataaatctctcctgggcgcgggttattccctctcatcaaacccagatggcgaacctctggctacgttgtgcggtgaggcgacggatatgcctatatcgatattaaccgggtttcttatcggtgcatccagttctggcccgttagatgctccattatttgatgatgtgtatgcggtgaaattcctgcgtttaatcagagttgtgcgccgtttgcgtgagctgcaacgtcagacattcagggagggtgcagcatga

SEQ ID NO: 84501 - DNA, 1353 bp, Citrobacter koseri
atgaataacgccgaacagatattgcctccgcattcaatcagcgccgagcaagccgtccttggcggtctgatgctggataacgatcgctgggatgatattgcaacgattgtttctgctgaccgcttttattcgcgaccgcatggcgtgattttctccgccatgcagacgttgttgcttcagaacaagcccatcgacctgataaccctggctgaatcaatggagcagcaagggacgctggaacagtgcggtggctttgcctatcttgccgaactttccaaaaatacgcccagtgcagcgaatattgtggcttatgcggagtatgttgccagctacggccagaagcgccagctgctggaactggggcacgatctggtcgggcaggccagtgatgccagaagtgacctgatggtattactggatgaagctgagcgccgcatctttgccattgccgaacagcaatccccggatggtgacgttgatttacctgcttcactggaactcttcctcaaccgattagagcaacgttgcggtagtgaagatctcattaccggtacgcctaccggtttcgttcaactgaatacgatgaccagtggattccagtccagtgacctgattttactggctggtcgcccatcaatggggaaaacagcgctggggctggcattctgcgaaggggcattgaacgagcgcccggatatggcggtgcaggtctacagcctggaaatgcctaccgagcagttgttgatgcgttttactgccatgcttgggcgtgtgcctctgcaataccttcgaaatggcgatatgcaggatgaagactgggcgcgggtcagtaccgcaatgaaagttttgctcgaagactggaaaggcaggctggtgattgatgattccagctatatgacgccggcgatcctgcgctcccgggtaagaaaaaatatccgtaaatacggtcatccatccctgatcctgctggattatctgcaactgatgcgctgcccggggcaggagaaccggacgcaggagatcgcggagatatcccgctcactcaaagcgctggcgaaagaaattggttgcccggtagtagcgctgtcacaacttaaccgttcactggaaagccgggcggataagcgcccgaataatggtgacctgcgtgattccggggcgctggagcaggatgccgatctgattatgttcgtctaccgggatgaagtgtatgaccctgatacgcatgagccgggtgtggcggagattattcttggcaagcagcgtaacggcccaattggcaccgtaaaagtgcaatatcaggcggaaattacccgtttcgaggatttcaccggaggtcgctatgacttctaa

SEQ ID NO: 84502 - DNA, 390 bp, Citrobacter koseri
atgacactttatcgtgcaaattacagtctcgtagctcgcgatggtcgggtaaaagttgatgagcaatgggttttttttgaagccaaaacctattctgacgctctggaaaaaatccctggcctactggaggcgatgtgggaatgttgtgaattccagctcgaagtatggggtctgatgccggataaccagattgttgatcttagcatggatatggagattgattctccccgggagtggcgtttctttgaggtcggttattccgctggttctgctgtttatcttgatgtcgaacgtgatggctggccgctgtttcttgtctccccgtcctggctggcccgtttgaataaagctctggtcgaatgtcgtagcgccggaggccagcatgaataa

SEQ ID NO: 84503 - DNA, 876 bp, Citrobacter koseri
atgcatgtaatttcagtaatttctaccaaaggcggtgaaggtaagtctactaaatctgccaacctggcaggcttatgtgccgatgccggtctcaaaactctcctgcttgatggcgattaccgtcaaccaaccgtttcaagttattaccctcttcgttatgaagctccatgtggtctgtatgagctgcttatgcagactgtagatctcaaccatccggagcagttaatttcccacacctgcattgaaaatcttgatctgattatctctaacgatcctcatgggcagctaaaaacagcaatgatgcatgcaccggatgggcgcatccgattacgtaatcagctacagcatccattatttgcatcttatgacgtaattattggtgacacacaaggcgctcgttcaatcatgctggagcagatgcttctggcgacaacacataccgcgctggcagttgtgaagcctgtaatgcctgacattcgggaattcttacgaggaacggtgggattgatagaagagctgcttccctaccgtgggtttggtattgcgttgccgccaatgaagatattggttaattgcatggattacaccctgctggctgaagaagcgctgggtgcgttaaccacgattattgctgatggaacgtatagcaaagcagatattcctcctgtcactctgctcgaaacccaaatctacgaccttgaagtctacaagctaggccatacacgggggcaacccgctcaccgccttgaataccatactgaccgtaagagtctgccagctgcgcaaaccatgcacgatctggcctgtgaattattccccgaatggcgtgaccgctttggtgcggtactgcaaaaccagccgaagggggataaataa

SEQ ID NO: 84504 - DNA, 159 bp, Citrobacter koseri
atgatcccggccaccaagccgggctcgttctatcagcgcttactaaaaatgcccgttaccccgtttgtatacgggcagatcgccggtatcgttcagcgctcccggaaactctttaatccactggttcatcttcttcttgttaaagtgggtgacgcttaa

SEQ ID NO: 84505 - DNA, 300 bp, Citrobacter koseri
atgattttatctgatttaagtgtatacctgagactttcattgcagagggctttgttgggaaacgtgacccctaatattagagccgttattgctgaattatctggtaataacattagcttacttttttattttgaaggtgaagttgatgacgatgacgaagagcttgcatcggtaatagaaacggaaattattgctgattttgatgacgattttactgttgatacaacagttcagcgtcttgactctccacagaggataaagaatacaaatggtttactggtatatctaagaaaagagtag

SEQ ID NO: 84506 - DNA, 171 bp, Citrobacter koseri
atgcacaccatttttaccatagtggactatgccatttgtagtaggtgtggatactcctgtctgagggtcaatataatttccaatattttaaccataatttattcgctccttagaaccaggaacgcctacgggagtattacctacttgctgacccgttcccaatttgggtaa

SEQ ID NO: 84507 - DNA, 363 bp, Citrobacter koseri
gtgagatttgcaacaatcctaactcatatagttgagattgttgttgagaataacccgctgagcaaggacaagccgccggtcaatatcgatgacatcaatccgctgaaaccaaatgcgctggatgctgaaggggatccgcttaaaggtggaggtggtattggtaagttcacgattaataaagggcaacagaacaagcacttaccagggacgaacgagtataaaatagcttccgaagcgggtttgaataaaagcgttcttaccgttgcacctgattcattgttacccaaattgggaacgggtcagcaagtaggtaatactcccgtaggcgttcctggttctaaggagcgaataaattatggttaa

SEQ ID NO: 84508 - DNA, 261 bp, Citrobacter koseri
atgaaaaataaaaccacgttatctgttttttttctaagtactatttactacggactttgtttttttgcttttattttcctagtaaataatgtgattattgaattgttgacatcgggacatgttgacttttccaaaaaatcattaacttatttatctgttgtgagtttgattattgggttggcttcaggtgtaagaatatggatcttcgcgaaacttgacgagcggaaatcgcgtaaagtgcctccgtcagatcctgagtga

SEQ ID NO: 84509 - DNA, 576 bp, Citrobacter koseri
atggacagttatgtcaatgctgccgcctcatggaatcagtttgcgaccactcagggattgtcacctgaagaaacacaggccggactggataagatcgcaaaaggcgaattaccggaaggtgctaatatcgcaaaagtgatcgtggaaggttatcaggacggtgtaatgatagcgggggcatggtatttggggcctgccgcttcggtcggtaaaatggtcagtggtggagtcatcgcggagatagccaatggaagttaccagtggtttgatttaagccagccaggcaatgaaaacaaaaactgggactggaaaagcagtgccagttcaggcattgcgggtatgcttgcaccgggaagaactatcggacaaaacgtcggaattgcgatgggtggtgcattctttaccgatggtccaaatactggttctatcggtggtgcggctattggtgcatggttcggtggaaaatttggtgagtttgctcctttccctggggaagttaatgacctgattggtggtatcggtggggaagttataagtaataaaattaaggataaggttagtgaaaatgaaaaataa

SEQ ID NO: 84510 - DNA, 267 bp, Citrobacter koseri
atgagtaatcgaatattatatgagcagattagagctgttttactaaacgaatgggatcctatagggatcaacggtctaattgaagctaatgatgaatatgacgcatatgtacagcctatctgcgagttaatatgctcaggaaagggcgttgacgatatttattactatctacactgggttgctactgagtatatgtgcttggatggcgatagtgatttggatcgtagggttgccgaaaagctattttatttaccaaaaactcattag

SEQ ID NO: 84511 - DNA, 12510 bp, Citrobacter koseri
atgaaaaaggatcaggttcatttctctcagcgtctgttaagtggagtcctgagcgtactgttggccacgcagccgttgttcccggcgattgctgccactatcactccaacgggtaatacgcagatggataaggcggcgaacggcgttccggtgataaatattgccacgccgaataagtccgggatttcgcataacaaatacaacgactataacgtgggaaaagaagggctgatcctcaacaacgcgaccgggcaatttaatcagactcagcttggcggcattatccagaacaacccgaacctgaagtctggaaaggaagccgcagggatcatcaacgaagtgacggggaccaaccgttcacagcttcagggttacaccgaagtggcgggaaaggccgccaatgtcattatcgccaacccctatggcattacctgtaacggctgcggatttatcaacacgccccaggcgacgctgaccaccggtaaaccggtgataaacgcagacggcagccttcaggcgttggaggtgacgaaaggcactattaacgttagcggcgcagggctggacggcagtttgtcagatgccgtgtccattattgcccgtgcaaccgaagttaacgccgcgctgcacgcgaaagatttacgtatcaccgctggcgcaaatcgcgtcgggactgatggcagcgttaaacctgtttccggggaaggttccgccccgaaagtggctgttgacacctcagcgcttggcgggatgtacgcaaaccgtatccgtctggtctccaccgaaagcggtgtcggggtgaatctggggaacctgaatgctcgtcagggcgatatcacgctgaattccgcaggtaagttagttctcaaaaacagtcttgccagtggcaataccacggttgccggaaccgacgtcacgttatccggcgatcacaaggcggatggtaacgttaacgttaccgggcagacggcgctaacgcttgataacacccgcgttgccgcagataacaatcttcagctcaccacaggcggcagactgacgcagaacggcggttcactcaccgcagtaaccgacaccacgctgacagcaaaaagtcttgcccagagcgtggatgcacagacaggagccggtcgcaaccttgccgtaagcgttgcggaaaacgcagaacttaagggtaaaaatgttgccggcctggatgccaccattaagacgaaaatactggagacaggcacgcagcttaccgcgtcacgcaatgcctcactggaggccgcacagcatgccacacttaacggctctgtcgtcgcaggtcatcagctttcggtcaacggtggtgcgctggcgcagcacggaaatttaagcgcctcaaatatcagtatcagcggtcagactctggtacaggagagtagcagtaaaacaaatgctggtgataatattgcccttaccatctccggcgatgccacgctcaggggcaacgccattgccgggaaagccctctctgtcacatcaaatagcctgaacaacagcggtacactggtcgccggaacggatacaacggtcagcactggtacgatgatcagcagtggcagcgtccaggggaacacgctgaaggtctccgccagcgatctcaccagcaccggcagtctgaaaagtgcctcatcgcttgatatcagcgcccgtaacaccactcttacaggcgagacaaccgtgaagggccgggccagtgtcactacatccggcaagctggataacagcggaaaactcatcagcgatgacatgctgacgctcagtgcggcacaaatccacaacagcggcacgctctccggtaaaaagggggtgaatacgaccgccacttcgctcaccaccgctgcaaaatccgtcattcattctgacggtaatatcatgctgaacgcacaggacaccacgcttgccggggaaaccagcgcaggcggggcggtggaggtgaaaggtaacagtctgaaaaccaccaccaccgcacagactcagggtagcagccttagcgtggatgtacagaatgcacatcttgacggcacgcaggcagcacggagcaaccttacctttgatgttcacgataccctcacccacggcggtaaatcctcggcggccacgctgaaggctgacagccagacgcttactaacagcggcacgatgaccgcagacttgcttgcgctcagtgcgcataatgtcaccagttccggcacccttgccgcacagcggctggatgtgagcagtcggcaacttgataacagtggcatgattcagggcaacgatcgtctggcgatcaattctggagaaatatttaaccggaataccggttctgtcaccgccggggaactgtcgattagcgcacagaccgtttccggtgaggggagcctgtctgccagaaagatgacgatcgcggctcagacgctggacaacgggggcagtattcaggcaactgaaatcctccggatgacaataagcgatctgctgaataacctgcataatgcgaaaatcagtgccccttcactgactgtcgatgccccggtatttcagaatgccggaacagtcgaagcctccacgttaaccgcgacgcaccagaacctgaccaacagcggcgcactccgggccaccggtacatcgacgctggacgtcggcacgctggagaaccagcacagcggggagatcgcggcgtctgctcttacgatccgcagcgatcatatgagcagcgtgggcacgctccggggagataatttatctgtttctgccacacaacatctcacaaacagcggcagcgtggttgcacagcaactgtccgtcagcagccctgaaattatcaacagcgggcagcttcagggcggggaaaccctgaccctcgtcacacgccttctggataaccgggcgggcggcacggtgttcaccccgtcctcgctggtgctcttgcttcagtcgctgaacaatgcggggacactggaggccgccgcgctggatattgacagccggacattcactaacgccggtcaggttctggcgggtaatgcgcttacgctgaaagcagataacatcagtaacctgcacggtggcgaactggcctcgcccgtactgaacatttgcggcagtaacctggataatgcggggacggtccggggagaggcggtttcactcagcgccgcgtcggtgaacagtagcggaagcatgaacgccagggcgctggagataagcagcgacacacttaataatgccggagcacttcagggtacggagagactggcgctcaccgtcaatcgtttgctggaaaacctgaacggggcggggatcagcgctccggtgcttcatcttaccgcaccggagctgagaaatgacggcgtagtggaagccactgcattaaccgccgacagccacacgctgatcaacaggggggacatccgggcaagtgatgtactgacgctgaataccggcatgctggacaaccagggcaacggggagatcgcagcacctgacttcacaatcaacagtgatcgcctgaacaatgcgggtatgcttctgggggagtcacttgccatccgtgccggacagacattcaccagtaacggcgtgctcagtgccggtgagctggcgatcaacagtccggaaatcctcaacagcggtctgatccggggtgataaaacgctggctctgatctcccgtcttctggataaccgggcagacggtatgatttacacgccttccgccctttcgctttcggtaccggcactgaaaaacgccgggatcatcgccagcgatgccgcattatccctgtcaggctcacaactgaccaacagcggagagttaagtggcgcttcactcgctcttgattatggctcgctgaacaataacgcgggtggtctgctgctggcacagaacacaaaccgtatcgcctcgcagtcactcacaaatgcgggcagtatcgcgggcaacatgctgacgctgaatgccgatcatctcaccagttccggcctgttacagggggatgcctcgctgtcgctgaccgccgggatactggatttactggcaggctcccgtgcgctgacggacggatatctgtcgctttccgggacaacgtttaccaccgcaggtcagctacagggacagaacgtcaacgttaatgtccgtgactggcagaacagtggccgcctgctggcaacgggttcacttgacgcctccgccacagggacgcttgacaacacaggcgaactgatgaaccagggcaacaccacgctgaatgcggcgaataccgttaacagcgggagtctgttgtcggcaggcgatctcatcctcacggggaagacgtttcgtaacaccggcactcttcagggtaacaacgttaccgtacatcaggacagcattaccaacagcggtacgctcaccggtattgccgcactgcggcttaccgcccgcccggatatagcggcgccattgctctcactggttaacgaaccgtcgggaaaactgctgaccgcaggcgatttgtccgtcactgccggcaatctcagtaacgcagggcagtggcaggggaaacgggtacttatccatgcgcagacggtgacaaacagcggtgcgatccaggcgacagaattactggatgcgcaaatcggcaacagcctcaccggcacatccggcagcaaaatcacctcaaatggcgaactggcgttatccgcgctgacgctgagcaacagcgggcagtggatagcgaaaaacctgacgctgaatgcgggttcgctgacaaacagtggtgaaatcaccggtgttgatgcgcttgcggtcacgctgaaccagagtctgaacaaccaggccgggggtaaactgctgagtgccgggaacatggtgctgaagagcggaagcaccacaaacgctggtcagatccagggcagtgccaccacgttaactaccggttcggtaaccagtagcgggcgcgtacagggcgactcgctggcgctgaacgtgtccggggaactgaacaacaccgccagcggcgtgctgctgagccgggatgtgatgaatgtcactgcggaaacccttaaaaaccagggcattcttcagggcggcggtgagtcttccgttaaagcctccacccgcatacagaatgacggcagagtcctttcgggcggtaaactcacgctgaccgcgccggaacttgcgaacaacggcagtggactggtgcaggctgtctcgctgctgctggatgtggtgaacgccgtgaacaacgggcgtgtactggcaaccggcagtgcagaactgaaaggcaccacgcttaataacagcggcacgcttcagggtgctggactgctggtgaactacaggaatttcagcaacagcggcactgtgctcggaacaaccgccctcaccatgaagggcgactctctggcacagaccgacgccggtcgtctgtacagcgcgggtaatctgctgctggatatgcgcgatttcggcggtcacgggcaggtggtgtcgctcggcgatgccacgctgaatctgatcaccgcgctcactaataccggaacgctggccgcaggccagaccctttccgtcacgtcacagaatgcgatcacaaacaacggcgtgatgcagggcaatgtccttgcgttgagtgccgggggcagttttagcaacaatgcgcaactgaccaccggcaacggcagcagtaccttcagtgcacagaacatcctgctgaacgcctccggttcgctccaggcgggcggcgatgtgcaactgacatcccgtggcaatatcaccgtaaacggctttaccggcacagcgggcagtctgacgatgagtgctgcaagcaccctgctcaataccgcgctgatttacgcgggaaataacctggagctgtttgctgacagaatacataaccttcacggcgatattcttgcgggcaacagcctgtggatgcagaagaacgcacaggggacgacaaacgcggaaatcatcaatcgctcggggatcattgagaccacaaacggtgatatcaccattaacactgcgcacctgctgaatgaacgggacgggctggaggtgatcgaaacccacacgggcggcgcctcacttatctccgggctgggggatgacatcctttatgtcaatatcgggcagcttgaggacggcagttacgggctgaataaataccggggttatcgtgaacgatgtgccggtggggctaacggtagtgaccattgtgatattatcgaatgggaccagtactattacactatgacagaagcggcagttgaccagcgctttattcaggaacgtcatcgtgttgacgtgacaagccggggaggtgttgcgcgtattgctgccggccgggacctgacggtcagagcgtcccgcctggataaccttgcaagtcttctgatggctggacagcatgcagcactttccggaaatgtgctgaacaaccagtcctggcaggcaggcaccaataccgtgtactggttgtatcgctatattccgtattccagctggacagaaaaaaggccaggctatgccgatccgctactggaactgtcagcgcccagtccctgggatcatggtgggagttccatacgcgctcctctttcctcctcgataagatttgtttatcagggaagagagactgaaacggttgacggagagattttccgttctgtcatcagtgtgggcgggaaggtgtcggcagacttcacaaacgacatcagcaataccacggtcacggcgaacgcaggcggtgtcagcaacaccattagtgcaccttcgctgaacacactgaggccgcagggtatcggtaatggtcttaatgtcgaatccctcaccggtaccggaaacgccaccatcagcggccccggctggctggacagtatcacggatggactgctgtccgttgccggtggcgacagcctgaccggccataatgccagcggcggtgacacccgccccggtggcagttacggtaatggtggagccggaaatgctcagcctggcgataacagttatggcagtaacggcaacccgccgccaggcagtgcacattacggcaacggcggaagtgggaatatcagcctgtatccgctaccgtcgggcaataacggttactttgtgcccgccgcagaccccgacagcccgtatctgattacggtgaacccgaagcttgatggcctcgggaacctggacaacagccttttcgatggactgtatcagcttacggggataaagcccggccaggctccgcgtgaaaccagtactacctttaccgatgaaaaacagttcctcgggtcgtcgtatttccttgaccgtctgaacctgaagccggagaaggactaccgtttcctgggcgatgcagcgtttgacacccgctatgtgtcaaacgcgatgctgaacctgaccggttcacgctatatcaacggcacgggttcagacctggagcagatgcagtacctgatggacagtgcggccagccagcagaaaggtctcggactgaccttcggcgtggcgctgacggcggagcagattgagcatctcaccggcagcatcctgtggtgggagtccacaaccatcaacgggcagattgtgatggtgccgaagctgtatctgtcaccgaaagacgtgactattaacaatggcagcgttatcagcgggaacaacgtgcagcttgccggcgggagtattaccaacagcggcggcacgctgacggcacaaaacggtctgtcactcgacagtgccagcagcatcgacaacctgaacgcaggactgattcacgcgggcggcagccttgaccttagtgccatcggggatatcagcaacatcggttctgccatcagtgctaaaaccgttgcactggagagtgtcagcggcagtatcaacaatctcacccgttcgcagcagtgggatattaataccggacgtacacacctcagcgggactgataccggcaccacggcaactattactgcctctgatgcactgtcactggatgccgggaagaatataaacatcacgggcgcacaagtgacctccggtggttcactcggcatgtcagcaagtaatgatatcaacattgccgcaaaccaggtgatggaaagcgacaaccgtgggggtaaaggtaatacctccaccacatatcagggaagcagtgtcagcgctggtggcaacctgacgatggcggcggacaataatctgtacgtcaccgcgtcgtctgtgtctgctggcgacagtgccctgctctctgcgggcaatgacctgaatctgaatgcggcacgggaaagtgaaacgcaccgtaacggtaaatcagaaaaccataaaagccatgcggcgatctccgtggtgactgccgggaacaacctcacccttgctgccggtcgcgatgtaaacagtcaggctgcgggtatcgcggctgaaaataacgttgccgtccaggccgggcgcgatgtcaatttgctggcagaggcagccaccgatggcgacagctaccgcgcgaagaagaaaaccttcatcaacgagtctgtgcgccagcagggtacggacatcaccgcaggcggcaacgtcacggttgtcgccggacgtgatgtgaccgcgcaggcgaccgacgtgtatgcctctggtgacgccgctgtcgtggccggacgggatatcatgctcactaccgccagcgaaagcgattaccactataaagaagagataaaaacgaagaaaagcttcctgaaaaagaaaaccacccacaccatccatgaggaaaaccacacccgtgagaaagggactcagctttcaggggaaaacgtggtactcagtgcgggcaatgacctgacggtacagggctcatccgttgccgctgaacgcgacgtggcgctgaaggccggaaacaacgtgacggtggaagccgcgaccaacaccgacacgtactacgacatgaagaagacgaagaaatccggcattttcagcagcggctctggtctgggtgtcaccattggttcgcagtcgtcaaaaaccacccgccagggcgcggagaccacgcagagcgatgcccgaagccttatcggcacctccggcggtaacgtcattatcagtgccggaaacgatgccacgctcagcgctgccgatatcgttgcaggacggacgaacgacgataccacccgcgccaccgggcatatcgacatcaccggcagcaatattgtcgttatccccggacgggatacggtcactgaatcggtgaaacaggaaactaaatcttccggtattaccgtcagcgtgaaggccccgtttgaagacacggtgcgcaacgtgcgtgacaccgtgcgcggcagggacggtaacgggggaaacagtaccgtcgataaagtgaagtctctgggggcggaaggtgccgcccttgcccttgatggtccggggcagatggtcgcggtctccgcaggcagcagcaaatcgtcctctgaatcacactaccagggcgagtttaacagcggaagctctctggcagcagcaggcaatatccagatgactgccaccggtaagcagggcggtaacagcggtaatatcctgattgcaggcagccagttgaacgccggtgaagcggtgatactggatgcaaaacgtgatgtgaacatcaccacctccaccaacaccgaacagtacagcaacagtagcaaatccagtggctggaacatcagctcagaaatgccaaccgcaggcagtgccacccgggccaccactggcgggggcaaacacggcagccagcttctgccgggcgggatgagccagactgagagcaacagcagcggaacacgcaccacagagaacgcgtcggtcattcagggttcagatatttacgtcaacagccgggaaggcagcgtgaacatcagcggcagccagttgactgccacggaagacctgatgctgtcggcggtaaaaggtgacatcacggttaccgccggccgtgacgcgtcccacaatgaaagcagtggtagcagcaaaaccattggcacactgggtggtgatggctacagcgccacagcaggttacagccgggagaaccacagcagccgggaggatgcgaccaccgaaagcggacagcgcagtcagttgacgagtacgaacggtaacattattgctcaggccgggaaggacgtttccctttccggtacggatatccgcgccggtaaatcggtttcactcggtggtgaaaacgtgctgatggacgtgagccgtgatacccgcgacggggaagcccacagcaacagttctcagtacggtgttactgcttctgccggaggctgggcggttgacgccgcaaaagcggctgagactgctgcccgcagcgcggaaaacggtgacgatgcacgtctgacagccattaaaacaggccaggcagggactaccgccgcgcagggtatgatgacggactctgctgtcgttaagggcaaagtttccgtgacggtgggctcttcctcacaggacaacagataccacagcactgacacgcagggcaccaccattaatgccggtgagaatgtcatcattaatgcccacaacgatatcgccggtcagggggtgcagattggcggtaaacaggtggtgctggatgcgggacgggatatcctgctgaccgcatcccggaacacacacaacagtcagagtaaaaacagtggcaaccaggtcagcgcaggcgtgggcgtcagcctgattggctcacagaacggtatcagtatcgagctgggtgcttcgcagcagaaaggtaaggaaaacagccagtcacagagcaacaccaacagtgtgattcatgctgatgaacagcttacggtgaacagcggacgtgacaccacgctgaaaggcgcagagcttgagggcaaccgcgtggtggtgaacaccgggcgcgacctgactatcagcagcgttcaggacacggcatcttacgacagcaggcagtcctcgtccggtgcgggtctcagcctgtgcgtaccaccgatttgctatggcgcgtcttccggtaatgtcagcgcctcgggagaaaacgtcacccagaacggcaggagcgtcacggaccagagcggtatttttgcaggaaacggtggctttgatatcaccactggcagccacacccggcttgatggcgcggtgattgcgtccacggcagacagcgacaaaaacaaactggatacggggacgctcggctggaccgatatccacaacgagagcaaaacctccggtgacggctacaccgtggcgatttcgggcagtgcgggtggcggcggaagcggtgaaaaccgcaacgtggttccggccatcggtaccgggcatgcggaggaaagcagcagcggcaccacctcatcggccatcagcaacggcagcattatcatccgcgaccaggcgaaccagaaacaggatatcgccgacttaagccgggatacggagaatgcccaccacggcgtggatgtgaacggtgatgtacagaaggtgaaggataacctggcggtgcagagtgcaggcatggctctggcaacctctgcgctggatgtgtacagtaagtatgcagagcagaaggcgaaggaatccaatgccgcgctggaagcgcaactcaccgccgaaggcaggcttaacagcaacatgacggcagaacagcgtgaagctgcgctgaaggcccatcctgattatcaggggaccgactacggtccggggagtgagttctggacgaagggcagcgcggcggcaggactgctggccggtgcgcttggcggtaatctgaaggctggcgctgctgccggagcggctcccctgctggcttcgctggtgagtcagcaggagaatccggctgtacgtgcagccctgcacggtatcgtggcggcagcgctgacgcaggcgagtggtggcagtggctctgacggtatgaaggccggtgctatcggagccatcaccgcatcggcgatggcggatcatctggtgagtgcgttatatggtaagaaggtcagcgaacttaccactgatgagaaacgtctggtcagcagtctggtgacaattgcgggcggactggctggcgcggcgatcacggatggtgatttgtcgatggcggctcttgcgtcaggtacagcgaaggtggaagttgagaataactcgctgagtaagaaagacaagctgccggtcaatatctttgacatcaaccagttgaaaccaaatgcgctggatgctgacggggatcctcttaagggcggcggtggaaattcgggaagcgcttataacccgacaggaagaagcggtaatcctatgaatacaaaaggctctaattcaccagaggtaattggtgaacgaacctattcagctcacgcagttgatcgtatgcaagggcgcggtgtaccaccttctgctgtagaaaacacaatcaaggccggagtaacctacccaacaaatcctggaactacaggttattatgattcgaccaacaatctccgtgtgatcattaactctaaaacaggcgatgttgtaacagtaatacccggagcaccaacaaaatga

SEQ ID NO: 84512 - DNA, 1680 bp, Citrobacter koseri
gtgaaggtcagggatgaaagagtggcggctttactggcaggattgtttttactgccattcacaaccgtttctgccgcaccgctatcacccgccgatcgtaataccattcagcagcaacagcagcagttgctcgatgagaaccaacgtcagcgtgaagagctggagcgcagtgtcatcctccccagagcaacaacgcctgtcgtacctgccgcgccggaaggcccgtgttttatgattacgcggattgacgttgacggcgcaacgaaattgtcgcccaccgctgcggcgaaactgacagcgccgtgggtgaatcagtgtctggatgttccccgtctgacggagttgaccaacgcgatttccgactggtatatcagccggggctatatcaccagccgcgcattcctgaccgagcaggatctctcatccggtgtactgcacattgcggtactggagggaaagttgcagcaaattcgtctggagggcgtcccgtcccgcaccctgaaaatgaccttcccagggctggaaggcaaaattctcaacctgcgtgatatcgagcagggaatggagcagcttaaccgggttcgccagatgcccgttgaaatcgaaatcttacctggcagccagcagggtttatcgatagttaaccttaccgccgcacctgaatttccgcttgatggctccgtgagctttgataactgcggacaaaagagtaccggaacgggccagttgagcggggcgttatttgccaacaatgtgtttgggctggcggataaatggtttatcagcggcgggcgaagcagtgatttttccagcagtaaagatgcgcagaattttgctgctggcgtaagcatctcttacggctacgggctacttgattacaactacagctggagtaattacctcagcactatcgataacaatggctatttatggcgctccaccggcgacagcgaaacgcatcgactgaatggctcctgggtgctgtttcgtaatggtgatatcaagacggcgtcgtcgctggggctgacgcaccgaattaaccgcaacaggctgaatgacgtgttgctggagaccagtagccgaaaactttccagcttttcgctgggtattaaccatacgcaaaaaatcgcttccggcgttgccacgcttaaccccatgtttacccagggcgtgccgtggtttggtgcagaggatgacaaccataaacagggtgatgtgccaaaagcggagtttcgaaaatggagcgtcagcggcagttttcagcgtccgctggcagagaaattatggtggctgagcagcgtctattttcagtggtcgccggatcggctgtacggcagtgaacgcttaactctgggcggtgagacgtcagttcgcggctacaaagagcaatacatttccggtgacaatggcggctactggcgaaatgaggtgaattactcactcctgacgttgccggtgttcggacaaattggcgcaatggcggctttcgatggcggctggctgaaaaaagatggctttgatcgttacgccgccggcacgttgtggggggctgcgctgggattaaccagcgcagggcgctggttctccagccagtttactgtcgggacgccagtgaattatccggactggctggcgccggatcatctcaatatttattaccgtgtatcggtggcattttaa

SEQ ID NO: 84513 - DNA, 267 bp, Citrobacter koseri
gtgtctccgtatgcccggatggacggttacaccgcttcaggcgcaaatttcagtctggataacgggatgcaggtgaacagtgaccgttactggtcagcccgtggcgagctgggtgtggaagcgggcgtgaagaccacggtaggtggcattaccgttactcctcatatgatggctgcggcaggtcatgaatttgttaaaaacaatgacgtgcatctgaacggcatgggaacagggttcaacaataccgtggatggttccggttactga

SEQ ID NO: 84514 - DNA, 528 bp, Citrobacter koseri
  misc_feature (489)..(498): n is a, c, g, or t
atggacgctcaagataccgcaatagtaataaatattgatgaatgcaatagctatatgaaaatgggttcggatgaactgatacatcaagatgtatataaaaaattaatatttgacatcaaaaacaccatattacaaaccaaagtaaaaacccctcttggtgataaatcgtcagtaccaaccttccaaaatgaataccctccaagcagtgggttggtttattttattgatggatcacgtggtgcaggtaaaacgacatttttacgtactgtgtatgaaaacttaccctttgaattatctcaaacagatataaacagtacttccattagcatttcaaaacttgattatattgatcccactcggctggaagcatgtgaaaatttattattgaacgtattgagagcactaaaggtagctgtcgacaacagttatatgtctctagataatgaacctctcaaaaataattttcgtcaagccttcaaaaaattagcnnnnnnnnnnattagctggtggactaagcctctttcgtaa

SEQ ID NO: 84515 - DNA, 252 bp, Citrobacter koseri
atgcttttctttcagaaggttaattctttaaagaaggtactgctgcatcatgggggtatgggcgtcgagattatcgattgtactcatggagtcgtgtccagttccctgattttaaatggattgcgatgctttttcttttcgttgttatcacataaggggcacatgataacggagatacgcatttcagggaaagcagcgatggacgacttatcgatccttattccgtttctgatttttataactgctgtttga

SEQ ID NO: 84516 - DNA, 633 bp, Citrobacter koseri
gtgaggtttgcaaagattgaacacattaggaacgaacattcgttacatcaattcactggattatcttccgattgtttactgagaaccattaattcttgttatcgcacattggatcatattgacagccaacttgttgctcaaggcattcctcctatagctaatcttgtagagttggctaatttgtcttcgatggtgggcaatataataggtgctgggttagcagtgaactctggagggctttatattagaaatagaccacacgcttatccagacctaataccagcttatcctggaggtagagaattagagcttaaaatggctttggaaactaataaacctaaaggacatttacctaaagctggaagttatatgacaatccgatatgttttggggaattctaatggtagttttataccaggaaaagattctcgcggagatacggtatggatttgggaaataaaaattggatatttgaatgtacaggatttctcgattagtaatacagacggtgattcaggtaaaacagcggttattacttccgctgcacataacaatatgagcttggtttattttgctcctgagttcttaccttacaagtctcgtgggaataccatttatcctgggtttaattaa

SEQ ID NO: 84517 - DNA, 252 bp, Citrobacter koseri
atggcagctaataatgaattttctcgtgttttttgcatgaaaatcaatgagataagagtgttaaaggggttgacaatcgaacaactcgctgagcttgcatctgtgcataggacaacgataggtctaattattcgctatgaacgctttccatcgttgtctatggcaaaaaaaatcgctgatgctttagacgttaagctgagtttgataattgaaagtgttgagtttgaaatatcaaaaggagatgcagagtga

SEQ ID NO: 84518 - DNA, 1131 bp, Citrobacter koseri
atgaaggttttcgatttattctgcggtactggtggtttttctaaaggttttgaaaattattcaggggctaactttgaggtagtattcggaattgatctattatctacatcaatcgagacatttaaactcaatcacccaaaagcacatgctattactggtgatataagaaaagtttctaaaacagatgtttcggaggctacaaaaataaaaaaaggtgatctcgatgttttgatcggtggccctccttgtcaaggtttttcctcaataagaccgtttagatcttccgaagacgatgatccaagaaatactctttttgaagaatatgcttcatatgtaaattttttccgccctaaattttttattttggaaaatgttgtaggtcttgctactcataaaaatggcgatactataattcaaatgcaagaatgttttcaattacttggttatgatacagactggaaaattcttaactctgcacattttggagtacctcagaagagagagcgattaataatgttaggtgctccaaaaggaagtaaactagaatttccaacccctaaaaattattactcaggttcaaccatagggtataaagacaaatcaaaaatcatactacctaaaatgacagacaatctccctccagcaattacaacgatggaagctataggggatttacctcaaattggttcaggtcaacaggttgaaacgtatgatagagagccatataatgattatcaacgagaaagaagaaaagataataaaattcttgaattacatagtgcaactaagcatagtccaaaaatgatggaaataattaagcactcagggaagaatataaattgcattcctaaagaattaattacaagtggattcagtagttgttatagtaggttagacaaagatgaaccggctgtaactattacagtgaattttgttcatccggcatcaaaccgttgtatacaccccattcttgatagggcgttaactcccagagaaggggcacgactgcaatctttcgacgatgattttaaattttttggaaatagatctgaaataacaaaacaaataggaaatgcagttccacctctacttggtaaagtattagctgaaaaagttaaaaataaactgtag

SEQ ID NO: 84519 - DNA, 276 bp, Citrobacter koseri
atggataacaccttgaattatataaataaaagcaaattatcagagaatttgctaagaacacattgtgttagcgtcaggctaaataatgatgaattgcagcttctcaacaccaaacgtggcgaaacaagcaagggagaatggcttcgattagcttcccttgacaagtttccaccaatagttcccccaattaatatagaagcatggaaatcattgtctgaaatctctcagaagctgaacaagctacttattcatctcgaaagtaaaagcactggttga

SEQ ID NO: 84520 - DNA, 444 bp, Citrobacter koseri
atgaaaatcaatattatcaacggctcagaagtgtctagattatccgtggcgattcattctgtattgagcaaagacttcgctgatagtgagttcagaagcctctgtttctcgcttgattctattgggattcctctttgttgcgatcatggtctgaaccaactgtcgggctacttcacgagcttgatcgatattcggaaaatcagaaacattgccaacttttactttgagcacagaactaggtttcttaccttcactcacactacgatcaccggaagacactcttctctggattacatacgtttttttcgtcaaacttaccttcacaccaaaacctactggcgaatcacggtgatcgtcaaaaacgatgtatggcttctgttgtgggttagattcgaaaacaacttttcctctatcgttaagagcaggctttgcactgatgcttaa

SEQ ID NO: 84521 - DNA, 1266 bp, Citrobacter koseri
atggcgttaacagatatcaaggtcagaacagccaagccaacggataagcaatacaaactgaccgatggcagcggtatgcacctgcttgtccatcctaatggttctaagtactggcgtttgcagtaccgtaatgacggcaagcaaaagatgttggcacttggggtttatcctgaaatcacactggcggatgccagagcacgtcgagacgaagcgcgtaagctgctagcgaatggcgtcgatccgggagacaaaaagaaaaatgataaggttgaacagagtaaagcacgaaccttcaaagaggtggcgatcgagtggcatggcaccaataaaaagtggtctgaagatcacgcccatcgtgtgctaaaaagcctggaggataatctctttgcagcgcttggtgagcgtaatatcgttgagttaaaaactcgtgatttattagcacctattaaagccatagagatgtctggccgtcttgaggttgctgcccgtcttcaacagcgcactacggccatcatgcgttatgcagtgcaaagtgggttaattgattataacccagcacaagagatggctggggcgattgcttccagtaatcgacaacatcgtccggcgctggaattaaagcgcatcccggagttacttgagaaaatagacagctataccggcaggccgctaacccgctgggcgacagaactcactctgcttatctttattcgatccagtgagctgcgttttgctcgctggtcagaaatcgattttgaaacgtcgatgtggaccatcccgcctgagcgagagcctattcctgatgtgaaacattctcagcgaggctcaaagatgcgtacacctcatctggtgccactttcgaagcaggcgctggcgatcctgaagcagataaaacagttctgtggtgaacatgagctgatttttattggcgatcacgatccgcgtaagccaatgagtgaaaacaccgtaaacagtgcgctacgggtgatgggatatgatactaaggttgaggtttgcggccacggtttccgcacaatggcctgtagctcgttaattgagtcaggactatggtcgaaggatgcagtggagcgccagatgagccatatggaacgcaattcggtgagggcagcgtatatccacaaagcggaacatctggatgagcgcaagctgatgttgcagtggtgggctgattttctggatgcgaatcgggagagagcgattacgccgtttgattatgcgaagatcaatcgaggtaatggcgtgtga

SEQ ID NO: 84522 - DNA, 1128 bp, Citrobacter koseri
atgaaaaagaccgcctggcttatcagcctgatgcctccgatactgtctcttattattataagaacatatcttggttattttaataacggctcgttatttacagagaacctgtcagcaacggggatatttaattacgtctttatttttatggtactaaccacaataggggtcgggttgatttttttcttaccttcactcattttttgcttgtccttgccgaaaaatgtgaaaacaattcacaattaccgtgacataaaaggaaggatttctctggctgccctgctgtcctttcctctgactgtatttacattttttctgtgggcttatctttccgctggccacccggattatgagcctgcactgggatggctcctgtcactggcagggatctcatcggtcgctctaatcaattaccttttcctcagacaggcggcgaaaaccgctcaggaatttcagcgtactaaagctcgcagaaaaacagcgtgctggcttttcatcggtagtccgcttctcattttcaccattattctttgcttcacattttgcgtcagcaccattatcagatgggtagatacgcaggtagcgggagacagcattgtcgcaatactgaaactggccaccttgatttcggggttaggcgtattgttaatgttacccggtacggtatatgtaaatactgataacgctgcacggaatgagtcatggcatatcagattcacccttgtctcagttagcctctggcttctcataaccagcatatatgtgtcatcgttttatcctgtcctcatcgacaaaacgatggcatttgcgggtatttcggactggcagacacggcgttttcaggttgaagaaagtaagtttccggcctcacatttcggtcatcaggactggcatgttgctgataatatcccggggagaagttacacggtgcagggtattatggtttattcccttaacaacgtcagactgctgtgccctgaatccgtcagtaaacaatacaggaacatgcttcattttattccctgggatcgggtttatgaccagaacagatctaacgaactgaagaaggcctcagccagatgtcagccatttgtacagggtggcattacgcggctttctgaaaaatag

SEQ ID NO: 84523 - DNA, 984 bp, Citrobacter koseri
atgactgatactgatacagctcgatggaacactgaaagcgctgctttgctagttctatcagaaatacgtggcgttagttattggtccctatataaggttgctcaaaaagggatccgtttcagagatgttgtaacttgctcaacattatcaaaattcgaatcaattctcggagtgagactacatcgtgcaccatattctttgactgagaataattggtcgacttttcgtgatggaatgatttctgccgcgaaaagccttttaacacattatcatagcaacggttataaattaatacatcatggttctccagattatccggagaaattgaatgatttaaatgagcgcccttactggatttttgcgcagggcgatacttcgttgcttagtaaaaaatgtgttggtgttgttggtacgagaaatccaactactcttggaatttatttaacacaagcagttgtctcgcagtttattgcatcagattatgtaactgtaagtgggttagcttatggtattgaccaagctgctcatgaagcatctattttatttaaaatacccacaatagccattctaggaacaggtttaaattctaactatccaaaaaacagtgttggacttagggagggtattgtaaatgccggtggacttatactcacggagtatctcccacatcaaaaaccatcgcaagaaaactttgttcgtagaaacagaatacaggctgctttaagtgatattttaattcctgtcgaatggaacttgaaaagcggaacgtcgcatacggttcgaaatgctgctcaactgaagagaacgatactgtgtccattactaagaggtgaatctgttcgggaggagattaaatactctcaggacgaatactctgcaataatactggagactcctttgacgggatttaaagatgtgatggagttaattaaaacaaaatcgagtaataaattgcaacaactgtcacttctgggggatgaataa

SEQ ID NO: 84524 - DNA, 1275 bp, Citrobacter koseri
atgcatttgaaagctgttatattttcaatagcagatgttgttttgcccacaacatcaaatccgcaatctcagcaacttaagtcacgaatcgatgttgagttgaggaagttgttcgcttttttattatctaaaaatattaaagttctttttctaacaaataacaataggaatgttaggactaataatggaaacattgcactggatgattatcttatgcaacaattcccagactcaatccattattgccgtgaacttaacaatgaaatacctgcgaaacaaacaggaagagccactgatttcatcatgaatgatttagatataaatcgtaatgagataatttatgttggccgttcagaagaagacttacaggccgcgacaaatggcaaaactttatttattaatgccacttggtatcaaccggtcactgagtatggttttcagttctctgaaccaaaagagattgcgagatttatcgatgtgttttgtttaagagaggaattatggggatggcagggccacttaaaccaagatgtccactattatgccttagctccctttagtactcataaccctgagtttacaatgtactctgccaatgcacgaaacttagctaagttatccattgggagccctgatttttggattaggtatcttggtgctagtatttacttctctggtttaagtgaaggtgcaagttttatcacaacttatgttggacataatgctaacgacccctataagttggcaaatatcatggagcatgacctcaaagggttggcagtatcatttaaaggtaaatatctcaaagatctctttataagacatactacagctgtaaaatctcagcaggaaagaatagagcgccgacaggttataataacatcgcaaactaatactgtgaatttaaacgcctctcctatcaaaaatcttaacactggagaacgatatgttaacaggccagtattgcgaggaaagaaagtactagttattgatgacttctgcactgagggaaatgctcatgaaaccgccaggatgtatttaaaggctgcaggagcggaagttataaatatttcatggttaaaatttgttaatcgagatgtagccgtttgcgaaccaaattgcagaataagaccatgggagacaaacaccctcacttctgaaaatattaattatatcggacgaatcggttatgcagcaaaccttactcatggcggtgcgcctcaagagttggcagataaaattagacaatatgatcattgggactggccgcaatag

SEQ ID NO: 84525 - DNA, 2457 bp, Citrobacter koseri
atggccaaaatgattccggcattcggacccattgataatgatagttatggagaaaaaacggtctataccctgttaaaagaggggttgtccgatgatttcaccgtgattcatagtctcccttggttgagttcggcggcccggcatttgggtatgaaattacctccaagtggagaaatagattttcttgttctccatcgtatctatggtgttttggttttagaggtaaaaagtgggatatatcgtgtagatggccctatttttgtacatatcaaaacaaatactaaagtagatgtagttaagcaaacacgtaacaatgtccatggattagcccgttggttagggggagcaacaacgttacggttgcgcattggttatggttttatttttcctgatagctatttcgatgataaagttataaatatagcaatggtggatgcgtctgtcagaccatttagaagaatattcattgataaaagccaactcccggaaattgcaaagtatactattgatataatgcactactggaaacatgcattaggaaataatcctttggggagtgagaaacttcaattaataataaaatctctatgcccagattttgatggcactcctaactgggggacccggattatttatgataaccaactctggttaagactcacacatgaacaaatcaaggtcattgaacttttgtcagaatatcaacgatttgttgtatctggatggcccggaacaggaaagaccctgattgggattgaattcgccagacggttggttaaagaacaaaaaaaagttttatttattactttcaataaccgcctgtctgaatatattcggcaacaaactcctgattcattatgcgacgtttttacctggcacaaactctgtcatcaggctcgtaatagattagctctgcctcccgagtcgccaacaggctggtttgaatcaggatgctgcgaggatttgcttagtgcattaaataaaaataagctaaaagattatgatgttttaattattgacgaagcacaggcgttacattcttcatggttggaaactttattttgttggtttgaaaataaaaagattattgcattttgtgatgaaacacaaacgttctcttttgaaaaagggacgaatcacgctgatcttcaaaagattattaactcccaattttccttcaacttaactattgtgttaagatgccccaaaaccgttactgattatttaatggctatcaggccctcttcatatcaaattacttcccccaggaataacgaaccagatacgttaaaggaattagttgtaagcgatccatatgccacactgcttgatgaaatcttacgactgaaaaaaagttctgtgccatctgatgaaattacagtccttgttcctactgatttagcgaaaaactttcttcaggacgacatgaaaacttttgatataaatattgaaactgtatctcgttttcgtggtatggagtcacctgttgttattactctggattcctcaaatatggaggatgctcaattattttgtgcttactcaagagccacaactgtttttattgcaatttatgactcggagaaattagcatggagagaaaatcataattttttacaacagttgattaataaaaaagaaactcagagggcaattaccgaagccaagcataactcctcatccaaagttcttatggctaattttttcagaaaaggggacctgaaacttaacagtgtaaaattagcatggtcagaagatctttattcgtggcttattgagtttgatgcagacaattcaccagcggaaacatggattgattacttatactctcattatacttggccgataatatattggtctgtaaactcacgaagagttgtttattacattacaaatcaacaattcgaattaaacacattaggcgtagggacaagcttatcaataaaaaattgtgccatatgtgaaaagatgataccttttgattctgataataattgtttgctttgcaataagaaaactgaagaatcgtcaccaaccagacatgaaattaatgaaatacgcgagtttgatttaacaatctctcagggcaattttaattcagctgttcaaaaagaaaagagacgactattacccataccgttagcggcggctagtgcccgaagagtggcatttgaaaagtcatatagaaataaagtactaagcgaatcattacctggcggaaaacttctctacagaagtgcattagcttttatacaggcttgggttgcgttattaccaccagataaaacactagtattggatgagataacagacgcactacgtaaacgctatattcatcttgagcaattaggtcgcactgaattacggaatgctttagcctgtgcactgtcaacttgctacaataaaaagcatcttattaaagttgaaaaaggggaatattcacctattgacgactaa

SEQ ID NO: 84526 - DNA, 3135 bp, Citrobacter koseri
atgctaaccgaagacgacttagagcaactttgcctgggctggtttgccgaacaaggctgggaaattcatcacgggccggatattgcccctgatggcagtaacccgcaacgcgccagctatcatgatgtgttcctgacgcccgtgttaacctcctgcctgcaaaaaatcaacccgcatctacccgcagacgtcttcgaacaggttatatcccgtattactcgagctgaaagcccggatctgattgccagtaacaaagccttccatcactggctgctggagggggtaccggttcagtaccgccgcgacgaagaacttatccacgatcacgctctgctggtggattttaaccagccgcaaaacaaccgttttatggtggtcaatcagatgaccatcagcgggacgaaacagcctcgtcgcccggatatcatctgctttattaacggactgccgctggcggtggtggagctgaaaagccccatcgacgacaaagtagatatctgggatgcctaccaccagttacagacctataaagatgaaatccgcgatctgtttatcagcaatgaagcgctgattatcagcgatggctatctggcccgtgtgggttccctgacggccacggaagaacgttttatgccgtggaagaccatcagtaatgaaaatgacaagcccctgctggaatggcaactggaaaccatggtgcgggggttctttaaccgggaactgctgctcgactatatccgctacttcgtcctgttcgaaaacaacgatgaaaggctgattaaaaaaatagccggttatcaccagttccacgcggtacgtgaggccgtgcaggcgacgatcgtcgctgctaccggtaagcaactggccctgcacagcaacattcagccaggcagtaagaaggcgggcgtggtctggcatacgcagggttccggcaaaagcatttccatgtgttgctacgtcggcaaactgttgcaacagccggagatgggcaatccgacgattgtggttgtaaccgatcgcaatgatctggacggccagctctacggcacattctgtcaggcgcaggaactgctcaagcaaatgccggtacaggcggatgaccgtgaagctctgcgtgaactgcttgcaactcgcgatgctggcggcattatctttaccaccgtgcagaagttctccccggaggaaggggaaaacgcccatccggtgctcaatgggcgcagtaatatcgttgttatttctgatgaagcgcaccgcagccagtacggcatgaaagctaacctggaccgggaaacgggtatctataaatacggttacgctaaacatatgcgcgacgcgctgcctaacgcctcgtttctcgggtttaccggaacgccggtttcggcagaggatcgagatacccgcgctgtctttggtgattacgtttcgatttatgatattcaggatgcggtggatgatggtgcaacggtgcctatccactatgaatcccgactggcgaaactcgatctcaatcatgaagagctggcggcactgtctgatcaggttgatgaactgattgaagacgatgaactggaccagcgtgaaaaaaccaaaggtgaatggagccgtctggaaaaactggttggtgcaaaaccacgtcttcaacaggttgccgccgatctgatcgctcattttgagaagcgcaataccgtaatggacggcaaggcgatgattgtcgcgatgagccgagaaatctgcgtccatctttacgatgaaattatcgcgctacgcccggagtggcacaatgacgatcctgaaaaaggacaaatcaaaatcgtgatgaccggtacagcgtccgataaggcaatgctgcaaccgcatatctacaacaagcgaactaaaaaacgactagagtcacgcttcaagaatgtgaacaatccgctgaagctggtgattgtgcgcgatatgtggctgaccggcttcgacgccccctgctgtcacactatgtatattgacaagccaatgcgcggacataacctgatgcaggccattgcccgcgtcaaccgggtatttaaagataaacccggcgggctggtggttgattacatcggaatcgccaatgaactgaaactggcgctgaaaacctataccgatgcaaacggtaaaggcgatgcgaccattaatgccgaagaagcgctggcaatcatgctggaaaagctggacatcatccacggtatgtttgccaaaacagcaacgtcagcgggttttgactacaccggctttgaagctcacgcacaaaagctgttggtgcctgttgcaaactacgtgctcggccttgaggacggtaagaagcgttttcttgataacgtactggcaattactaaagcctggtcgctttgctgtacgctggatgcggcgcagccttataaactggagattgctttcttgtctgcggtgaaggccgctatcagtaaattcactagcgtggacaaaaaaataagccaggccgagaagaactccgcactgaaacagattctggataatgccgtaattgctaatggcgtggatgatattttcactctggcagggttggataaacctaatattggcttactttctgatgagtttttgcaggaagtccacgatatgccatatcgcaacctggcggtagagttgctggaaaaactgattaatgatggtatccagtcccgcacaaaaaataacgtagtgcaggagaagaagtattcggaacgtcttcaggcagtattgattaaatataacaaccgggctattgagacggcgcaggtgattgaagagctgatccagatggcgaaggattttcagtccgcaatggcgcgtgatgatgcgcttggcctgaatcctgacgagatcgccttctacgacgcactggctgaaaacgaaagcgccgtcagagagttaggggatgaggtacttaagaaactggcgatagaagtgacgctgaagctgcggcaatctacaaccgtagactggcaggtacgggaaagcgttcgtgcaaggttgcgtattctggttcgacagactctgcgtcggtataaatatccgccggataaaacagcgggtgcggtagagttaatattaaaacaagctgaagttatttcgaatcactggacgatgtaa

SEQ ID NO: 84527 - DNA, 1197 bp, Citrobacter koseri
atgtttaaagtcgatcagcccagcaatagcctgcaaccgcttcaggaaatcaccttcagccaagcgggtttcaccgaacgctatcacctacaggaatggctggcgaagaatccgcaggcattgacccgtaacagtgatgatgaactacttatcattcagaaagagtttgccgggtttgacgacaccaaagagcggttagatctgctggcaatcgataaagacggcaatctggtgatcatcgagaacaagctcgatgattccgggcgtgatgtcgtctggcaggcgctgaaatacgcgggctactgcgccaatttgcgcaaagaacatattgttgagatcttccagcgctatcttgaccaaaacgaaccagaagaaacgcgtcctgcggctgacgtgctggctgaatttcttgagcacgatagcctggaagaggtgcaaattaaccagagtcgttcacagcgcattatgatggtcgcagcaaatttccgcaaagaagcaaccaataccgcactctggttaatgcagttcaatattcgcgtacagtgctttaaggtcacaccttaccgttatggtaacgatgtgtttattgatatcaagcaggttatcccaacgccggaagcggaatcttacatgatcggcatggcacagaaagaggctgaggagcagtccacgactggagaatcaaaagctcgccaccatttacgtaaggcgttctggacctcggctctggagaaattccgcgttagctcatgttcactctacaataatatcagcccgtcaaccgaccactggttaagcgcaggttctggcatcagtggcgtttcgtacaatcttatcttcagcaaaaaagaaattagggttgagctttggattgccaaaccgtcagcacaaaccaatacattcgcgtttgactggcttcatgaacgcaaatacgctatcgaaaatcgctttgggcatgaaattgtttggcaggccttaccggataagaaatcctgtcgtattacttacagaaaacccatcaacggcatcgcagatcaagaaaagtggccggagatggtcgactggttggtagaacatatgacagcatttgaaaaagccttttcaacatgtctaccggaacttaatcagttgattaagcgaacctttaacgggcatgatgaagctgaaattatcactgaagaagccgaacacgtttaa

SEQ ID NO: 84528 - DNA, 1446 bp, Citrobacter koseri
atgacatctgatattcagaaaactccttatggttatcttcctagctacttatgtgaagctcggttaggagatctttgtattaataatggcgttcaaactgggccatttggcagccaacttcatcaggaagattacgtcgcaacgggaacgccaattattactgttgagcaccttggtgataatcgaatcatccatcaaaatctccccaaggtttcaggtgaagataaagtaagattgtctaaatattctctacaaacaggtgatattgtatttagtagagttggctcagttgatcgtcgggcgattgttcaagagcatgaagatggctggcttttttctggtcgatgccttcggattcgtccggacagagaaaaattagatcctcagtggttatcttatttctttgggttgccagcattcaaacaatatatccgtggaattgctgttggggctacaatgccttcaatcaatactaaaattttaagtgacattcctatttatttcccttctctgtcagaacagaggaaggcagcaaattttctgaaggatttggatgataaaataacaattaacattagtattaaccagaagcttgatgaaatagcacaaactatctttaaaagttggtttgttaattttgagccagtgaaggctaaaatagatattcttaagcaaggtggctcccatgacgaagcaataatatctgccatggctgttattgctggtaaaaatatcgattcgctgatagggttaaaatatgaaaaccctgagagttatgaagaaattaagcgactggctgagttgttcccttcttcaatgatagatagtgaactaggtaaaatccccgatggttgggaactggtttcgttgagaaacatagcatcctttgtgtcaggaaaaataattgtttctgatttaaccaatgagaattatatctctactgagaatatgctcccaaataaatcaggtgtggtatacgccacatcattgccgtcatctactacaactgcatattttaaagctaatgatattttaatatcaaatattcgtccgtattttaaaaaaatctggtttgcaagattttctggtggacgatcagcggatgttttagctcttgaaaataaagaatccataacttctgaatatttatataatcttctttatcaggactcatttttttcctacatgatgcaaacatcaaagggtgtgaaaatgccaagaggagataaagtagccattatggactggccttgcgtaaagccagaaaaaaaactagttgatttattttcaaaagtggtgaaagaattttatttatatattgatagtcacaatagagaaaatattcaactttcacagctccgggatattcttttacctaagcttctttttggggaaataagccttccggaagctgaagaattagccaaggaagctgactatgtttaa

SEQ ID NO: 84529 - DNA, 972 bp, Citrobacter koseri
atgattactctcgttttttcctattctcatgcggatgaagcacaacgcaatgagctagagaagcatctgtccccgctaaagcgaatggggaaaatcaccacatggcacgatcgccgaatcgttcctgggcaagtgtttgaacatcagatcgaccactatttttcgcaggcagatattatcctattgctaattagcagtgatttcatcgcttctgactattgttatcaggtggagatggctaacgcactggagcggcataaaaaaggcgaggcggtggtcattccggtgattttaagagagtgtgcttggcatcagctgccattcggcaacatcatggcagcgacaatcgacggtaaagccataagcaggtttgccagtcacgatgagggttacgttcaggttgccgatgctgtctcccgagccattgccaatttggaagcgaaaaagccgcagcagattgtgcacgccccagctccggctaatccgatgcttcaggcaacggatactgtttttacaccgcgttcgagcaatctttctctaccaaagtgttttactgaccttgataaagatcgtgcccgtcgcgagggttttgagtatgtcgctcgttactttgcaaactcgctggacgaactcaaaaagcgccacgcagggctagacgttgatttccaccgacctgataacgattccttcacatgtgccgtgtatatcaacggaggcaaggttggtcagtgcggagtctggtgtggcagtcgtaatatgggattcggggatatctgctacagtcaaagcggtgtgactcgcaatagttgcaatgaaagtcttagtgttgcggataatgggcagacgcttgggttccgcaccttgatgggactgggttacagtaattcaagggattcgttgctgactaacgaaggcatggcagaacatctatgggatatgttctttagcccgattcaacagcgtaatcgataa

SEQ ID NO: 84530 - DNA, 207 bp, Citrobacter koseri
atgtatacaaaacccactctgcttgaagaccaattcattgatatgaaattcattacccagctcactggtctgagcgataaatggttttacaaactaatacaggatggcttattcccgaagccgatcaagctgggcagaacttcccgttggttaaaaagcgacctggaagaatggttgtattgtcgtatttatgagtcccgcgcataa

SEQ ID NO: 84531 - DNA, 576 bp, Citrobacter koseri
atgaacgataactacccatacattgctaaatataaaatggactggtttttacatagtctgataaatcaccacctgaacagtgttattgaacgttattcaaaggtgatcggtatccggctggacttttcgtacaaccagaactcagaacgttacaaaaaggagtacagttgtcttcaggaggatcttcgaaagctatttaggcaagttgaacaggaacatggtgtagctggatttttctgggtgattgaatatggtgaggacagtagatttcattctcactcggttgtgtatctggatgggcaaaaaatacgtaaagcatttccgatagcagaacgcataggtgctttttggaaggaaataactcaaggggaaggtaaatatcatcgatgtgaatacaaggagagttataaagctgacatcaacaaaactattaaccatcgggataccgattatatccatggcttgagatatatcatcagctaccttgccaagcaggaacaaaagaatggcatgaatatttacgcctgtaatgaggtaccgccaccaagtgggttaggccgcccaagaaacgtgtaa

SEQ ID NO: 84532 - DNA, 1167 bp, Citrobacter koseri
atggtgcagatggattatggtcgttgtaggaagtactatcagtatctgagatgccttgagacgttctacaaagcaaaggtgaactgggatgaagtgagattttttcactctgcgactcagtatgcttatttgatcaataaacttattgctgataatgactcgttaagagaacgaaggaaaataatcattcgtgatatgaaggcatatgcctctgcgactattgttcctgaggtttattttatttggatgaaagatagcgatagggttgcatgttatacaatgttttggctagcaagccaaagtgagatttctcttcctgttttaaatagcttaaaaggattctctattccatctgttaaaagtgattttaatccttttattaaagatgaatcagaccaagctgccgatgcttcatatatacagtcggtccaggggttgacgaatttttctaaaggtgatcaatatctggaaaatcctttttttgaaaagaatagctttggcgtttttgttgatgaccatgctaatggaattaactttcagcgtattaatgccgtcagcgatacggttgatggttatatttttaatgtgatgctactgattgatcagataaacactacaattgataaaaaaatttctttaataggtaaagcacaccaagcgtggtgcgagcattttagtcgattccctcgcccatttaagtggattgatttaaacgaagaagataatgttctctggttgtgggactatatgcggaaaaaccatattggatgcgatgtgcttccgtcatcgtctaagcaacaaaaatattttttgctggcaacatttgataactgggccggttggacgaatgaacagtttaataaacaaaaagaaaatgcccgtaaagtgagggctaaccccgaagagccttcttcgctaaagaagctgttaaatccccttacgcccgatgattacaggaacgttttcctggacaatgcgcgcaatgcttgggtgcagagaaggcatcgtcagaaaataaaaaaagatacgacgggaatcaaacttacggcggaatctaggaaaaagcttgtggctatacagcagttatcaggcgttgaaccaaatgtcatactgaaaagtttgattgatgatgcttaccaaagaatgaaagaaaaaagcaaagattaa

SEQ ID NO: 84533 - DNA, 468 bp, Citrobacter koseri
atgacaataggttcactaagccggtttgtactggcatgctcactgtttaccagttttacagcctctgcggttcctggactctggcagcagagctatggccagggcaatacggaatacaacgtgacggatgccagtgggaaaatgtttaccatcaattgcacgggaaatcccgaccagaacggtttctaccagcattctgtttttctgacccagacggataacaggatggtcagttcgcatgatgacggcaccacgatcaccgtggtaatgaatcaccagcagtacgttattccgtccagactaggctggcgaaacggggataacgcctggtatgacttcatcagcgatatccgcaaagcccgtcagtttgaggtctacgtcaatgaccgcaaagcgggaaccttcagtattgacccgacgaatgccgtgaaggttttgcccatgcccggagactgcggtaacgactga

SEQ ID NO: 84534 - DNA, 240 bp, Citrobacter koseri
atgtcccaatctgtgatactgccaccgggaccgttcacccggcaacaggcagaagcaattacctgccagtatcacagcatcactattgaagacgaccaaggcggtcacttccgcctggtggttcgcgaccctgaagacaggatggtctgtagggcatggaactttgaaccggatgccggtgaaggtcttaaccgctatatccgcagctcaggcatccgtactgacactttcacccgctga

SEQ ID NO: 84535 - DNA, 462 bp, Citrobacter koseri
atgaaaacagcgacacaaaacaacctcgtatctgttgctaacgaagccgaatttgaactgaccgtaacgcaggtgcccgacgaacagcgcatacgcttctggccgcagcactttggcactatcccacagtggataaacctggagccgcgtatttttgcctggatggaccgcttctgtgaggcctacagcggcggcatctggtcgttctacatcctgagcaatggtggcgcatttatggcccctgatgctgactgtggtgataaatggcacctgttcaacagcatgaacggcaatggcgcggagatgagcgcagaagccgcaggtaccgctgtctgtctgattgaatacagccatcatgcctgtcgcaccggatgcgatgccatgacggaacactattaccgcctgcgggattacgccctgcagcaccctgaatccagcgccattctgcgcattattgattaa

SEQ ID NO: 84536 - DNA, 798 bp, Citrobacter koseri
ttgcaaaacaaaatcaaagaacttcgtacccaactgtcaatcactcagcgtgaattggccgatatggttggtaccagccagcaacagattcaacgtatcgaaacagggaaagttgcggctaagttagggctggcacaagcaatcagtgctgttttaaaaaagccgttgaacgctgtttttcctgatagtgacaacctgctacagaaattgcgtaatcaaggtagtcgtagcagcgacgaactgaaagatattgccgcaagcggaattgagatggatggccgcttttggacggtaaagctctggttacgggggcagaaagattatttgctactacccatttctccggctgataagcgtcgtttttactcatactttgaagaaagcactgtcccagatcatgagcgtttttttgttttcgattcagagcagcatcgttatgccataaatgcccgagaagtcattttccaccaattcttgtttgatggttttccacctatccctgatgacgaggacagcgatattaatgaaggaagctatggtaatgtccatattacaatggtgaacggtggcccagtcattgagctatgctgtgagtccgaggtatcggagaacgatgaatttgacgatattggtcagttgaacgcattgtttgatactttggagttagagcctgaatcaacagagcgataccagataaccgatgaggatggagaggatgctttcatccgtattggctctgttgcgatggtccgaatctcgctcgatgtactggattcggttgaggaagataatgactga

SEQ ID NO: 84537 - DNA, 198 bp, Citrobacter koseri
atgattaaagttcacgatatcacttatggcacaccgacttcctctgtgaaagatttgaatgaatggttagattcacagagtgagcacatcgaaataataaatattgaaaccttaatgaatatcagtctggggtcacgcattaacagctaccttaaaccggaatttatccgggtatggtacagaaccccaagagactga

SEQ ID NO: 84538 - DNA, 786 bp, Citrobacter koseri
gtgaacttcagccggacagaacgcgccctgcatgcatttgctgtggtggctatcgtcatcctcatcctgatcattctttctggccagatagtgaaaggcagtggcccggcagaatggctctccgctttgctgaatctggtcatggccgtagctgcggtaatggcattttttaccgcacgcagctggctaccccagttgactacacaggaagggtatcgacttgccatcgatctggtgaacaaggaatttatctggcttgggatccagaaccatctactccgtgatacgtcgaatctggttgttgccgcagagcagcgctattcgggtcaggatcgtgcttcccggctaaaggcttatgaaaaagccatcatccgtctggaggagaccattctcgacaataaaaagcgacttgatcgtatcgatatggcgatgtttcagatgcagacttatggcctgcaggtggcgggcaacaaatctgccagtatggataccatgttgaatgccttccgggcatcagtatctgatgccagtggcatacttgcggcggtgcgccattaccagacggcacgggataaagtgatgagtaaacctatctcattatttactcaaggtgaggctgaatcaaggaaagagattatgaggatctccgacagagagacgctgaagcaggtaaaagaggctctggagaaccttacgtcgtcatggaacacaatggttctcagtcagggttccttcaccggggacgatcaccgaattgcgaaacttttcattgtacgtaagggctga

SEQ ID NO: 84539 - DNA, 702 bp, Citrobacter koseri
atgccgatcggctgcacctgcatgccctcatctttaagagaggggactgacatcgtggcaacggttaacattcgccgaccgtcgccgctgcagcggcgggtgctgattgtgctggccgccctcgatgcaaaggggccgggaccagtggccacgcgggatgtagagcgggtgctggagcagggcggggacgtcccggtgtacgggccgaacctgcgcgcctcctgccgccggatggaggccgcgggttggctgcgtaccctgcgcgccccgaacctgcagctggccgtcgaactgacagacgccggccgggagattgcagcgccgctgctggccgccgaacaggagcgtatccggtcagaacgacgcgcaacagaggtggttaggctgcccctggccggcacgacgttggctgacggttctgaactcaccggcgacgaacgtccggtgcaactggcggatgtcggttatcgcgcctgtagggccgattttgtgctgcgcctcgatgggacaacctgtctgcaactgtgggatgccgatggcagactcacgcgtcttgagggagacccactccaggtggccagctggctgcagaccacacatgacgccggtattgccgtcgggatgcaaatcaacgaaagcacgatacctgaaacccacgtccagccatctgccggccgcaccagaaaggaagtaaaagaatga

SEQ ID NO: 84540 - DNA, 246 bp, Citrobacter koseri
atggataacgaagtgacgttttcactcagctatgagctgttgacgcaaacagctgaagaagaaatcaggaatattaatcttaaccaggacggcatcggttacatcgaggcgctggccaaagcctccgccattctgagtttctggtacggtctggctttgcggggttatccgggctcaacaatggatgaacgtgttgatgccgatcggctgcacctgcatgccctcatctttaagagaggggactga

SEQ ID NO: 84541 - DNA, 381 bp, Citrobacter koseri
atgcaaactctaaagagcaggcttgaaacagtagtgcattgttttgaaaatgattttcgtggttttaaaatcaagaacagtaaggctgatgccatgaaatggcttatgcgattcaatttaccttacactgtcagtgaacatgaaccaggtaaatatctgcttcttaatcgcgaatataaacctcttggatttatggcagagtccggtggccatggagcggagtacgctgtttacgatgatcatcttcttacgggggaaccggggttacttggtagcgacatttatttttataacgacagttcaaccccgtgggaaagcgccagaaactggacggcctaccaaaaggcagtgctcaaattccttgagaaacttccaggctga

SEQ ID NO: 84542 - DNA, 1365 bp, Citrobacter koseri
atgtctccattaaacgaaacatatcaggcatacacaaccatagctggcgcagtgattagtgcaatatcagcagtgattgcatatcgggcgttcaaaaacacaagaaaaacggccagaaatgctcaggaaatgagtgtcagacagggatttgaacaacgatacacacttcttctcacacagcacaatgccttgcatgatgccttgtgcgagtatctaaacaatactcagatggttgttaatcgaaatggttatgagctcgaattatcaggggccatcgaccgttatgacgcgctggaacattacttttactatcttaccggacaccctgttatcagcccttacatgcgggttctgttccacctcctgaagcacatcaattcagatccttacattatggacaagaccgacgctgaaaagcggcgttactcttctccattgcggtcttacattcgcaatgacgtactttttttaatcgccatcaatgctctgaacgtcagaagcgatcgcttaaaagatgctggttatcctgaatatcaaaaactgcttcatcgtttcaatttctttgagcacgctgttttttccaacccctggaaagcaaatgaaccctttgcaaaaacaattaagagcctaagagaataccgagaacatgatgttgatatacgcgacaacctagctgtagaaatctatcacattgagcagatatttcgctcaaagttgtctttcgtgttgaaaatctgtcgcgatgcgatggaaaaggggcaaattcctgagcctggcgctatgttctttgagagaaatgaagatggtcaaaatataaaaatgaagccagaggattgtttagccacgccatttctgacctgcgcagctatttacaacagccctcatacacgggccttacaattagcacagcagtcctgctcccgttatttttttcagcagtgcaaagataagtattatgcagaacgaaaaaggtatgatgagtgtcagtctgttgtccagtacataggtggtcagtatgcgaataaggacggcctgataaaaaacattgccagcccgtatgagctgaaaaaactcgccagtagcacccccgcatatgaaaggaataaaataataatggtgcctgccagtggagcttcagagaacgtgataactcttgatgacatttataccgatattgacgcgtatttcgagtttcagaatgtaaaatggcctgaagatgagagcttattcttcgagaacttaaacctccgtatctgcgacttactggaacaatcgatgaacactctgattggaaattaccagcacaagtttgaagttaaagaaacgaagagaagttggtttatgtgctttcgcaggaaaccataa

SEQ ID NO: 84543 - DNA, 828 bp, Citrobacter koseri
atggcaggcaaggcaccgtcatcaggcgcaaaaatctatgcgatcatgaacaataaaggtggtcctggaaaaaccagtacggcgacaaaccttgccgttactctggcaagagcaggtaacagagtacttcttgtagattcggatcaacaggccaactcaacagaggttctggccaacggcaaaaaatactattctatgtacggtgccaccatctgcgatctgtataacaacgcccggtttaatgtccgcgacgctatagttccggccgtggcaggtgagatctcaatccctaatctggatttgatcccctctgacccgacatttgaaaaaattatcgagcagacactgacgcgtagccaccgtgaaaaaatcatggctcgtcatctggagaaggttcgctccgattacgactacattatctttgactgtgcgcctggcctgaacatcgcaacagggaatgcaatttatattgcagatcatgttctggtacccgttgatgggggaagtttttccctgagcggactggaaataatgctcgattacatggatgagatatccgaagaagattatacgcgcttcagtgttttccggaataattacaacggagccaataagaaaattaatgccttcattgataaagcgcttactgagcatgagcggatatcgccgcgtctgcttgaaacaaaaatcagaactgaccaggccatcgttcagtctcaggtacaatgtgtaccgctttattactaccagaaaagtgcaatggcactgaatgattacagtaaacttgcccgtgaattagaagcactggtagcacaagaggtagcgtaa

SEQ ID NO: 84544 - DNA, 285 bp, Citrobacter koseri
atgagcaaagaactgaacaggccaaaaatggaaaagccgcagcgaacctctgcaggtagcagcctgactaatatcgcggccaaaaagaagaatacaaccggcgagacaccgaaaaccgtccgcatgacgccagctgaaaaggtgctcgcgcaggaactggttgaacagattcaggcgctgacacacaagaacataacggtatctaccctgctgcgcgctggtctttacctggctcagtcagccggtccggaaaaagtcctcagagctattaaagaaaatatctga

SEQ ID NO: 84545 - DNA, 624 bp, Citrobacter koseri
atgaacaaatttacagaggacctacataatgtagtagatcaaatcttagccggtgcagaaatctctgatagcgatatttttaaaaatataactattgggcacgatttttacaaagtgcaggaccagtattactgtggaaatggtatccatttcaattcgaaatcggaaacccgcttttcactacgtaacaaatccaaaggtgtaatgtatctggccaccacggcatttacaggactgaaagagttttatcaggatgctccattcgtccagacagatgaacttgagagcaactgtatggcggtgattcaggcagcgagcacaatcaagatcattgatttagctgccctggcaccccacctgaaaactccgttaggtcatttgatgggttctaaagctgtctatgaggatactcagttgctggccgaagttctgtctcactatgcggatggtatggaatatttgtctcaacacaccggcaaaccctgcattgctctgtggtccgacgccgttgatggcaacggaatgctgaaaaacatctcagtcaccccgttaagccagttcagtctaaacggaaaaagtacgcagacaatcttaaaatcaaagctgggtattcttactctctga

SEQ ID NO: 84546 - DNA, 675 bp, Citrobacter koseri
atgacaggtttaagctatccaccaaaagcccgtgctcacctcaaaaatcgtgagcacacagaaacccagttgctgctgacccgcattcagaatgtgggcaccaagtttgtggaagcattacacgagctgccgcaggagcaactgatggaaatgctcacactgcaggatgaagagttctgggctgaattaaaaaaacaggctcagatgcagatattaattaataccagaacccctgaaaagcaggcacaggaagacagagccgaagccagagcgttatttctgaaatctctggagaaatccggaggcgtacacaaatcaaccgctgtaattaaaattctgtcaacgacagtgccgaccctgattaagaaagggaaccgcggcgaggttatttttattaagtggggcgcggagaatctgtatccggtatttcagttctgcacccgggaagataattctgagagcggcatgttagctggtatcccggaattattatcccggattacgcatcaggtcagtgctgtgcggaaatgccacttctttacccgtaaggtagatataccgggtaccgaaacaaaagtatcaattgttgaagcgctgcgccgtggcgcgacccctgaagaaatggcctatttcagaattctggctgataactttggtactaaccataccatgtaa

SEQ ID NO: 84547 - DNA, 768 bp, Citrobacter koseri
atgacactgccctcacccattcaagcctcccctgccctgcagacacacctgttgccggcggggtttgattacggccgcgcgctgtcgctgcgcgagatggcccggcactacaccgagctgccgagatacctgctggcgccagagatcagcgccctgctccactacctgcccgactggagccagcacgccttcattaatacgctgtggaacaccggcgcccgtctcaatgaaggactggccatacggcgaagggactttcatcttaatgaagccattccgcacctggtgctgcgcactgccaaacagcggcgcgccggcggcgggcgcccgaagaaaggcaaaagcccgaaccgggtgatacccctttctgacccggcctacgtcgatgagatgcgccggctgtttgcgagcacgaaagagcagtttgaggacgatccgatcaccggtgaacgccgtgcgctgccagtgtggaacgtcaccgaccggacggtgcgtaactggctgaaccgggcagttgatgccgcagagcgggacggcatacagttcagtaccggggttaatccccatgcgttccggcacagcttcgccatgcaccttctctatggtcacgtgcacccgaaagtgctgcagggcctgatgggtcacgagaagtttgagtcgaccgagatctatacgaagatatttgcactcgatgtggccgccagccagcagctgcgcttctcgctcgatacacaggacgcgctgcagctgctgcgcagacaacgttag

SEQ ID NO: 84548 - DNA, 1101 bp, Citrobacter koseri
atgcccctcactaaaaacagtttgcttgaagatcccccggaggctgaactcagtcaggatgttcaggcactgataaacaacggtctggactttcttgataaagcccgcgaagagatggagaactcaaagccgaagttctccatcgtcagtttctggacagctgttgaaatactgcttaaggtgcctcttgtccacgaacactggacactggtctgcagtaaaaagaatactcctaaaaaaagggcctacaaagaaggtgattttcagtcggtaacatacggtgaaaccacgtccatgctaagggacgttcttgaaaaaccgctcagtaaagaaactgatgacgccttcgaaaaagtcagaaagcaccgtaaccgcgtggtgcatttctatcatcctcatttcactgaggcagagatacagaccattcttgaagaacaggctaatgcctggtttgcgctgaaccgactgatgcgggatgaatggagtcaactcttcgctgcaaaccatcaatggaaacttgcttatgatgagacacgcctgatcagaggtaatcagttctatgctgctattcgtttcagacaggttaataccgaacttcaacgtctgacaaaaagtgggttgcttatcagtaaatgcagtgactgcagtcagatggcggcagtgcatgaagaagtcacaacaggttctgaagagcgtacacttctcagtgtacgttgcagggtctgcaacagcgcatcccggcactttctctttcagtgtccggaatgcagcgaacctgtttcattatctgagggggatgaagcctttacctgcgagcactgtaatgaagagtatgagcgttatgagctgctcgatgaagagaccttccgtagcatcgacgaatcaatgtactctgtcctgcccgcgggttgtaccaactgcgcctcgccagaaagtgtctgtcaatttggtgacgggtacctctgtacgctgtgcctctccttttatgatgagcttcatgagtgcaaatgctgtggacacgttagtgacagcgtatcggaactgagtcaattcacaggctgtgaattttgcgacggtgacgttcgttaccatgatgattag

SEQ ID NO: 84549 - DNA, 1254 bp, Citrobacter koseri
atgccaatgatggaatatattgaagttggtccttttactctggaaaaaaaccatacggggtatttccaggaacgcgatcgtgtgcgtttgatagccgaaggtgatggagatggagagtactggaactcatttataggataccgcgctaaggtttccactctgaagcgaagaatggaactgatgggctttgacagaacctcactggaacgagattttctttcttctctgcagctctggcagggaaccgttaaggatgagctcagctatctgaacagaacacaacacagttctgatgattcctattacacggtcagaaaagcctggcttgaaaaaattcaaccggcattagagaacacaactattgatgattggctgaacaggttagttcaggctgccaactggccacaaagatatcaagattattcagagcagctaaatcattggaacgaaactggcgaccagcttctttcccttatgaccagctgtgttgatgctgataaccaatggttaagttgctcgatgtataactttccctgttccagcgaggactatttcttatgtgcagtgctgcttgcctgcgatgaagagcagtactgtgagctcaatcttaacgagcacatctccaatggtgaatacgatgacttcactgatctggaagaactaaacgtcggtcagacacttccattccgtcatgcccggcagagcctgtctgatgtggtggctttgatttccgtgggccaggaaaacccggttcaggtacgcatgtgttattcaggtcttattaccgtgatggaggcctatctgtccgacatttttatccgggcagttaagcaggaaggggttaaaagaaaattcgttgagaactacgccccctatagtgatagcaaaaaatttcccctgggagaaattttcactcagttggatttactggagcgtaaaattgaagatgacctcaaggctctcacgttccacaacatcgaaaacatcaccaaactttatggaaaaatcctgctcatcaattttcctaaagatcttaaggacgagctttccagtgcggtaagcgttcgtcacgatattgttcacagaaatggtaaaaagtctgacggtactgaactcgttattacaagtgcagacgtcatgagactagaaaagactatgatggagctgctgtcttatgttgatgaccagatactcgacgcactgcagcaggcatttgaggaggattatgcgctagctccagggaaggagcattaa

SEQ ID NO: 84550 - DNA, 1350 bp, Citrobacter koseri
gtggacttagtctggaaagagaatccaagaggccaattttatcgccgtttaggttttgcggaacgtgaagccatactgcatgtgtttagtcatcagagaaaacccgcccagtccgatttagtgctcaccaagaaccttctggaagaaatggacaaaagagagcttctgcttctctgtgactgcgcagatccagtttcaggagaaccaggcccgtataactgcgaagtaataaaaacatcactgcgacacctttcaacatcccggcctcacagtgaagactgtccactgcaccgcctaaggaaagacagggatgacgatctttcccgacaagaaggtaagataagcccgcttaaccctataggttcgaaggactggttaccagaccgaaacgacaaagaaggttctgcaatcagagccatacccgtaaacgacaccaggagcagaagaaaacagcttaagcccgtaccggcactgggcagaaaacttctgactctgctgcaggccgcaggtctgaatcagcttgagttgacagcgaatgaacgtccgataggtcttgtgaaggctatagacgatataaaactgacacttgaaaccagcaccatgatgaacggtgttccgctttcagaactaatttcctgcaccccgtggctttctgtggaaaagatcacgctgatgctttcccacctggagaataaccctacgatagacgccaggaaaaaagagctgtgcgtgtatattgtcggcgtggccactgcggtcacaagggaggtggtaacattcagtgtccggggtaagcccattacgcaccagccagcagcccgagtgaagattaacggggaaacaacctataatgccggcagcagagcgccttactgggtcatattgcaatatcggcggggcagggatggtgtggtctactgtcatgaaggatatgcgcacgcagcatattcactggataatcccgtgccgatagacagtaacaaagaacgtgaaacgctgaaggccatcatcaatgcatgtcagtatgccggaagtacgacaaatcgccctgaagctatcagccttaccaagcccctgttttctatgaaaagcataaaggatgatacggaagaaattatccatccggattttatcctcaatgtcgtaccgaaaggcaaaagcaatgtctcaacattaatcatcgaaacgatgggttatgactctgaggaatacgttcagcgtaaaacagccactcacagctggatggcccaggaaggaacattattaactgacccaccaggctggccagagcctccaaagacaacgtttaacaggtatctcctgtcccacatatttaaagcagccaagtaa

SEQ ID NO: 84551 - DNA, 756 bp, Citrobacter koseri
atgacggaagttgcggtaataaaccataaaaaacgcaagaacagcccgcgaatcgttcagtcaaatgaactgactgaggcggcctacagtctttcacgcgaccagaagcgcatgctctatctgttcgtgaaccagatccgtaaatcagacggtactcttcaggagcatgatggcatctgtgagattcaggtggctcaatatgcggcaacattcggacttacatccgcagaggccagtaaagacatccgtcaggccctgaaaggttttgcgggaaaagaggtagtgttttaccgtccggaagaggattcgggtgacgaaaaaggttatgaatcattcccctggttcattaagcgcgctcacagtccgtcacgtgggctatacagtgtgcatatcaatccctaccttatccccttctttatcgggctgcagaaccgttttacgcagttcagactcagcgaaacaaaagagataacaaacccttatgccatgcgtttgtatgaatctctttgccaatacagaaaaccagatggttcaggtgtggtatctcttaaggtggaatggatcatggaacgataccagctaccgcaaagttaccagcgaatgcctgatttccgtcgtagattcctccaggcaagcgtcgaagaaattaacagcagaacaccgatgcgcctgtcttacatcgagaaaaagaaaggacgacaaaccacacacattgtcttttcattcagtgatataacatcaatatcatctgaataa

SEQ ID NO: 84552 - DNA, 1038 bp, Citrobacter koseri
atgtcggcgcgcgtaatgaattgcctggaggagctggcccctagagtggaacagtattcgattgatgagatgttcctcgatctgaccggcgtggagcactgcatggatctggaagacttcggccgccagctgcgccaacacgtgtatgactgtacccgcctgatcatcggcgttggagctggaccgacgaaaacgctagcaaaatcagcacaatgggcctcaaaagagtggaaacagtttcgtggtgtgctcgccctgacccgggggaatcctcagcgaacgcgtaaactgctttcactgcagccggtcgaagagatctggggcgttggaaatcgcattgcacgcaaactcaatgtactgggtatcaagaccgcgctcgatctggccctgacaaatccggccttcatccggaaaaatttctccgtagttctagagagaacggtgcgcgaactgaacggggaaagctgcatgtcgcttgaggaagccccaccaacaaaacaacagattgtctgcagtcgcagttttggcgaaaagatcacggagtacgattcgctccgccaagctatctgtcaatacgcagagcgggcctctgaaaaactgcgtaaagaacatcagtattgcctgcatatttccgttttcatcaaaacatctccgttcgccgttaaagagccttactacggcaatgtggccacggagaaactgcttacccccactcaggacactcgtgacatcattgcagccgccacgacggctctggagcgtatctggaaggatggacaccggtatgccaaagccggcgttatgctgaatgactttaccggctccggtgtttcgcagttgcagctgttcgacgaacgtccgccacgccctcatagcgccgagctgatgaaagtgctcgatggcattaatcattccggccttgggcatgtctggtttgctggacgagggattgcgccatcctggcagatgaaacgcgacatgctatccccagcgtacacaacccgctggaaagatatccccattgcacggatcagttaa

SEQ ID NO: 84553 - DNA, 2139 bp, Citrobacter koseri
atggatgttgaaatcaactactgcaataacatcgataacgcttgcattacactctctgaaaataaactaaacattaagttcgctccaaatggcacgggaaaaagcaccatatcccgtgccattttgcacagtgtttcccgtgatgccgatggtcttaacagtctgctaccttttaagtttcgagcagcaaatcccgacgattttcagcccagtgtaacgggtacagagcaaattcaggatgtaatgtgctttgatgaaaagtacgtatctcagttcacatttcagcctgatgaactgattagtaacagctttgacatctttatcaaaacagaagcctacaaccaaacggagcgagagatcgactctatggtaatggcaatccggcaggaattcagcggtaatgatgagcttgagctatttattacacatcttcaagagcttagcggtgcgttcaagctgacaagcaagggcttatctaaagcctctacggggatgaaggggttggcaggggggaacaagcttcagcatattccctccgggctagagccttatcagccatttattcagagtcctcgtaatgtagagtggattgagtggcagaccaaagggtatgaaaatttctgctcactctctgagggatgctgtcctttctgcacaggtgattctcacgaaaaagcagaacaaattagcaaagtaagcgctgaatatgacaaagcagtgatcaaaaatctggttggtatcatcacagtacttgataaattaggcgagtatttttccgaagccgcacgctcccgtctgagggaaataacgacgctacagggaggattggagaagaagcatgaagactatcttgttaccgtaaagcagcagacagaaaatcttctggccatgctcttaacattaaaaaccctgaacagttttacttttaacgacgccggaaatattcgtgcctctttagcctcttttcgtttggatgtgaagtatttttccgagctgcaatctgataaaactcttgcaacaattgggcgactgaacgcctcgttagatagcctcatttcccaggctggtttgctgcaggggcaaatcaacaagcagcgcgctggcatgcagcggctcattcagaaacacaagaaggatatcaacacttttctggcatatgcgggttaccgctatcaggtagatatctctggcgatggagaacagtgccgtcttaagcttcgccatgtcgactataccgactatctcagtggaggtagccaacatttgagctacggcgagcgtaatgccttttcgatcgttctttttatgtacgaatgcttggctcgtaagcccaacctgattattctcgatgatcctatctcttcgtttgataaaaacaaaaaatttgccatcctagaaatgttgttccgccgtgactcatctgagtgtttgaaaaaccagacggtactgatgcttacacatgacgttgagccaatcatcgatactctgaaatcggtgaagaagttgtttagtaaccaagttactgcatcctatttacgttatagcactggcacgataactgaattacctatccgcgaaagcgatattctgacgtttgcccaaatctgcaaagtggttctcgaatccgactgtgatgacctgatcaagctcatttatcttcgcaggcattatgaaatcatggacaatcgaggtgatgtttatcaggtactttctaacttgtttcaccgccgagaggaaccagtcgacactcgtctacctctgattgaaggaaaagggtacccgttgatggacccggagagcttccttaatggatgcagtataatcactaaaaatattattgggtttgattacatccatatgctgagcgtgctgaatgatcctgacaaaattctgtcgttatatcgaagctgcacgaacggctatgaaaaacttcaggtgtttcgactgctggaacctgaagccgataaccgtgtcattcgcaagtttgtgaatgaaacctatcatattgaaaacgagtttatctgccaactagaccccacacgattcgatcttatcccggaatacgttattgctgaatgtgacagactgctccttaatatcggggcgtcgaacgatgatgctgaactggaaacggcctga

SEQ ID NO: 84554 - DNA, 1434 bp, Citrobacter koseri
atgtctgaatttgaattactggcgcaggatctgcttgagaaagcagcggcggaagaacaactgcgacaggaaaatgataaaaagctgctcgggcaggtgctggaaatctatgaccagaagtacgtggctgaactgctcagaaaagttggtaaaaatgagtggagtcgcgaaactcttaatcgctggattaatggtaagtgctcacctaagtcgctgacgttagccgaagaggaacttctacgaaaaatgcttccggaagcgcctgcacatcaccctgactatgccttccggtttattgacctgtttgctggcattggaggtatacggaagggcttcgaaaccattggtggccagtgcgtttttaccagtgaatggaataaagaggctgtgcgcacatataaagccaactggtttaacgatgctcaggcacacactttcaatctcgatattcgggaagtcacgctcagtgataaacctgaagtacctgaaaacgatgcctatgcctacattaatgagcatgtgccggatcatgatgtacttctggcaggttttccctgtcaaccgtttagccttgcgggtgtaagcaagaaaaactcactcgggcgcgcgcatggtttcgaatgtgaggctcagggaacgcttttcttcgatgtggcgcgtattatccgcgcaaaaaaacctgccatctttgttcttgaaaacgttaaaaacctgaagagccatgacaagggtaaaacctttaaagtcatcatggataccctcgacgaactgggctatgaagttgcggatgcagctgagatgggcaaaaacgatcctaaagttatcgacggaaagcactttttacctcagcaccgagaacgtatcgttttagtcggtttccgtcgtgacctgaatattcaccagggctttaccctgcgcgatattagtcgtttttatccagaacagcgtccgtcatttggcgaacttctggaacccgttgttgacagcaaatatatactgacgccgaaactctgggagtatctctataactacgccaaaaagcacgcagctaagggtaacggattcggttttggcctcgttaatcctgaaaataaagaaagcattgcccgtacgctctctgcacgctatcacaaagacgggtctgaaattctgatagaccgtggctgggatatggccacaggtgaaacagacttcgcgaacgaagaaaatcaggcgcatcggccccgcaggctgactccgcgagagtgcgcgcgccttatgggttttgaaaaagcagatggcaggccttttcgcatccctgtgtcagacactcagtcgtacaggcagttcggtaactccgtagtggtgcccgtgtttgaagccgtagccaagctgcttgaaccttatatcctgaaagcggtttatgccgattcatgcaaggctgaacgaatctga

SEQ ID NO: 84555 - DNA, 1215 bp, Citrobacter koseri
atgcttatgtcggttttccacaactggctacttgagatcgcatgtgagaattacttcgtctacatcaaacgcctttccgccaatgataccggcgcaacaggtggtcaccaggtagggctttatatcccttcaggtatcgttgaaaaactgtttccgtctatcaaccatacccgcgaactgaacccttcggtttttatcaccgcacatgtgtcatcgcatgattgcccagacagcgaagcccgggcaatttattataacagccgtcattttggtaaaacccggaatgaaaaaaggattacccgctggggtagaggcagcccacttcaggatcctgaaaatacaggcgctctgacgctcctggctttcaggcttgatgagcaagggggggactgtaaggaagtaaatatttgggtatgcgccagcactgatgaagaggacgtcatcgagacggctattggtgaagttatacccggagcgcttatatccggccccgcaggacagattcttggcggactatctctacagcaagcgccagtaaatcataaatatattctacctgaagactggcacctgcgctttccgtcgggaagtgaaattattcagtatgcagccagccattatgtgaaaaattcccttgatccggatgagcaacttcttgaccgccggcgcgtggagtacgacatatttctgttggttgaggaactgcatgttctggatatcatccggaaaggatttggctctgtggatgaatttattgcgctggccaattctgtcagcaatcgccgtaaatccagagccgggaagtcgctggaactgcacctggagcatctattcattgagcacggcctgcgacactttgcgacgcaggccgtcacagaaggtaataaaaaacccgatttccttttcccttccgcaggggcttaccacgatactgagtttcccgtagaaaatctgcgcatgctggcagtcaagactacctgtaaggatcgctggcgtcagatactgaatgaggccgataaaattcatcaggtgcatctgtttacactccaggagggagtttctcaggctcaatatcgggagatgcgagagtcgggtgtcagactggtagtgccatcatctctgcacaaaaaatacccagaggcggtgagagctgagctaatgacgctaggtgcgtttattgctgagctgacagggctttacgcagatattccatag

SEQ ID NO: 84556 - DNA, 2127 bp, Citrobacter koseri
atgacaggcaagcgtgataaaggtttcatatacgcccccttttgccgtgcagattatgacctgcacgctggctttagttctgaggagaaagaagcgctaagtacaagccataaacgctcccgtaactatggcaggtccggttccctctcttccctgctcacccctctgctggatatcgccaacaacagtggcaccggctgtagacttacccggactgtaattatggcgatgcttactgaaatgcagaatgtaggacaaccctgctggaactggcggaaagaccagtggatttccctgtttgataaatatcgtcgcggtaaaccacttatgatggcatttgcatatcatctcggtccattcacgtcgccgcttcagatccctcatgaagacactctgtcgctttacgccagtgccatctacggcaacgcgattttccgggaccagctgaaccgcctgtcggaagcactgatatcactgggctattcccctcagcacctgcggcatgccgtttcctcccccttgggtctgctgatgctactcaatgataatcccaggcttgaagagatgaccacagaacttctctggcaagctcagcagtaccacgacaagcgcgtatcaagacacgtagggaaaatttctcatgggcttgccgcacttggcattattgcaaagccggtacgaatgcgtaactacaccgaatggcatgagaagccggtcgaaaatatcagccctgaatgggtcgcatggtgcagacgctggcgtgagacatctgtgcttcgtcccagaacccgtgaaaacctgtacagctttattcttcgctgcggcctctggctggcaaaggagcatcccgaggtgaaggttccgacagactggtctattgagacatgtgccagttttatcgctgctgtggggcggatgaaagtggatgagctgtctctggggactgaacatggactgcggaagtccaaacgctccggagagcccatgatgccacattcacgtgcacattttatctattcgctgcgacgatttatgagcgatttcgaactctggggatggggacgccttaatttcagccccgcccgtcaccttttcacgccggataccccactttttcgccgtggtgtaaatccgagagtgatagatgatcccgtctggctcaaactcatctgggccagtctgaacctgcgccatgaagacctgctcagtgaaattcactatcccctttccatgcttcaggcaatggctgttatctggacccatgcaggtttgcgacagaatgaactcctgcgcctgactacggaatgcgtcacgcctcagtcagaagacattatcagggaggatggtagtgtcgttcctgcaggaacactatgttatctaaatgttccggcaggaaagacatcgaaagcatttgttaaacccgtctctgtcattgtaaaaaaatatgtagacatatggttgaacgtccgccccgtggatcaggcaaaactgaatgatgatcgcaccggagaaaaagtccgttatctcttccagtatcgcggcaagccagcaggcagcgatgtgattaaccggacggtcatcccagtcctctgtgccagagcggggctgccggttgaagacagcggaggcaccataaccagccaccgtggacgggcttcagccctgactgcgcttgccagcgtaccacagggcatgtcgctgtatgaactgatgcagtggtcaggtcattcatcaccacagtcaaccctgcattacattcgcatccgccctacacagctggcagcgtcatttgtgaaggccgatcggatagcccatatgataagcgtactggtcgatcacgatccggaagcggtctcgcccactgggctggcaacctattatgaccttggtgcgtccttctgcatgaatccattctggagcagttgcccgcacagaatggcctgcattggttgcgattttaatctgctgaaagacagtgcgcgcggactgatgctggagagtaaaacatctatcaggcgttatctcgaagaggtcccactcacacctgatgagaaagccattgtagagcaggatattaaaaaagtagaacaggctcttgcaaaattaaccggtaagtccggaggataa

SEQ ID NO: 84557 - DNA, 1005 bp, Citrobacter koseri
atgctcaccactttattctgtactcccgccagttcacaggcagaacgatggttggggttattatccgatctcggcaggtcaccggcgacaattcatgcctaccgcggcgcacttactcacttctttcacttctgctgccagcgggaactgccccccgagcaggcaagctttgaagatatcgctgcgtacattcgcccccagttacccggcatgcctcagcctgcagccagtgcaacgcttcagcttcgcctttctgctatccgtctgtggtttgactatctgatttacatgggggtaattagccggaaccctttaccgcgagcaggcacaccccacatgccttcagcaggacacggtatggtccagcgaataacacgactgccacaaattccggatgacggccagtggtatcatctcttgggttatatatcagactgttcattgcgcgatcgcctgatgctagcgctggcgtatcatggtgcgctaagacgcactgaggtgacaacaataaccatagaggatatcgatcctgcccacaggcttatacggattcgcgccgaaaacactaaaggcaaacgcgaacgggtggtctgctacggcccggcgattacgccggtactggcagcacatctcaggaacctgaggcaaacgggtattactggtggagcactgttccgttcgttttctgacagaaattatggctcaccgctttcatactggagctggagtaaaacggttcgcgagtggtcagacaggaccagcatgccgtttctgaccacgcacacctttcgtcacctgcgactgacacatcttgcccgggcgggatggaagctgcatgagatagcaacctatgctggtcatcgtgatctacgcaccacgcagatatatatccatctttcaggcactgatcttgcggccagaatggcgatgactgttgcggagactgaccgaaaaatcgcagctatcatgtttggcccggagagcgagaatgacaggcaagcgtga

SEQ ID NO: 84558 - DNA, 132 bp, Citrobacter koseri
atgccggttgacaggtttgtctggccagtgtgtggtgttttctgcctgccggtgataatacgtttcctgctcctgctcctgctcctgctcctgctcctgcttatgattatgttccctgtctggtttcgctga

SEQ ID NO: 84559 - DNA, 441 bp, Citrobacter koseri
atgaaagttaaacacttatgtttttttgatttttgtttgttggtggcatcatttgtattttcagttgcgatgcttgattataattttactgatttgttgatgttgttaatgttccctcaaatattagccgttgtttctatggttcgctatgcttttgcaaagcatgtgttgaagttggccaaccgtagtgatgagatgcgaagtagtattgattttacttatctaaccattacttttttagtttcccttattctttgtttagtctgtattcatgggttttatgttccccttgatagtatagagtatctgggaaaaggtttatttttattaataagtttatcaattgcatctgctttatgtgtaattttggccggaatttaccttgtgttccctgttcaagctaaactggctgctggtttttacaaaaaaatcattaattaa

SEQ ID NO: 84560 - DNA, 2985 bp, Citrobacter koseri
atgccacggagacaaatactcagcagtgaagaaaaagaacgtttgctggttgtgccggatgatgacatccttcttacacgcatgtgttttttgagtgaacatgatctcgcgcttattaataaacaccgcagacccgaaaaccgcctgggatttgctgttttactctgttatttgcgggggccggggtttcctcccgataaaaatgcgtcccctcacggcgtggttatttcccggcttgcggctcatttgaaaattcagcctgatttgtgggccgagtatgcctcaagagaagtcacccgctgggagcatctggccgaactctaccgctatctggaattatcccccttcaaccgggcgctacaaaaaaactgcattcgccacctttatccccatgctatgcggacagacagaggctttttgcttgcggaggaaatgctctcctggctccaccttaataaggttattttcccttctgttgatgtcatcgagcgaactctggccgaagcaacaacgcttgcagacagggcggtattttctgcgctgacctcgcagcttgaaccgggacataaagcggcgctggaccgtctgctggtatctgagggtgagcaaccttcacggctggcctggatgctccagcctccgggaaaaattaatggtaagaatgtcctgcaacatatagaccggttaaatgcgatagagtcgctggcactgccagacggtattgcgctttccgttcaccagaaccggctcctgaaactcgcacgcgaaggcaggaaaatgagtagccgggacctggcaaaatttacggatgttcgacgttatgcctcgctggtttgtgtcatatcggaagccagggccacccttactgacgaaattattgatctgcacgagcgtattctgggcagtctgttcagcagggcaaaacgtacgcaggccgaacgactccagcaaacgggaaagctgattcagagtaagctgaagcaatacgttaccgtcgggcaggcattgcttgatgccagagagtccggagaagatccctgggccgcaatagaagacatccttccctggcaggaattcatcaacagcgtggaagagacgcggttcctgtcacgtaaggacaacttcgatccgttgcatctgatcacagaaaaatacagtacgctgcgtaaatacgccccccggatgctggccgcgttgcagttcattgcttcacccgccgcaatgcaactcagtgacgcgctggataccgtcagagagatgtatcgaaagcaactccgaaaagtaccgccttctgcgccaaccgggttcatcccggaaagctggagaaaagtggtgatcacgccctccggcattgatcgaaaatattacgagttttgcgtgctgaatgagctgaagggagccttacgttctggtgacatctgggtaaagggatctcgccgctaccggaatttcgatgattatctgatcccatctggagattttgaaaaatcacgcctgaataaccagttacctcttcctattccgaccgactgcaatgaatacatcgagagccgtatggcgcttctggcatcgcgtctggaggaagtgaatgcgatggcgctggccggtgatttgcccgatgttgatatatcggataaaggcgtgaaaattaccccgctggacaacagtgtcccttcagccgtatccccgtttgccgatctggtttatggcatgctgcctcaccctaaaattactgaaatgctggatgaagtggacggctggaccggttttacccgtcatttcacccatctcaaaaaccatcacgtcagacctaaagacagaaagttgttactgaccaccatcctggccgatggcatcaatcttgggctgacaaaaatggccgaatcctgtcctggaacgacaaaatcgtcacttgagggtattcaggcctggtacatcagggatgaaacttattcagctgcactggccgagttggttaatgcccagaagaagcggcctctggcgggattctggggcgatggaacaacctcctcgtctgatgggcaaaattttcgggtgggcagccacggacgttatgcgggtcaggtcaatctgaaatacggtcaggagccaggcgtgcagatttacacgcatatttcggatcagtacagcccgttttataccaaagtcatcagccgcgtgcgcgactctactcacgtacttgacggtttgctgtatcacgaaagcgatcttgaaatcacagagcattacaccgatacagcaggtttcactgagcatgttttcgctctgatgcatctgctcggattcgcttttgcgccaaggatccgggatcttcatgacaagcggctgtttattcatggtaaagccgagttgtatccgggacttcagtcactcatctctacaaccagtttgaatctaaaggacattgaaacccactggaatggggtgctgcgtctggcgagttctataaaacaggggacagtaaccgcatcactgatgatgaaaaagctggccagctatccgaaacaaaatggtctggcaaaagcgttgagggaaattggtcgcatcgagaggtcattgtttatgctggactggttccgggatccttcgctgcgtcggcgcgtacaggcagggctgaataaaggtgaggcccgcaatgcgcttgcgcgcgcagtctttatgcaccggctcggggaaatcagagatcggggactggaaaaccagagttaccgggccagtgggctgacgttgctgactgcgacgatctcactctggaatacgatatatatagaaagagccatagattctctgaagcggaaagggatcccattcaatgaccaactgatttctcatctgtccccgctgggatgggaacacatcaacctgagtggggattacgtctggcgaacaaacctcaagctgggacaggggaaataccgttcattacgctcagtagatagcagtctatataaaaaacaggcttag

SEQ ID NO: 84561 - DNA, 579 bp, Citrobacter koseri
atgtcacgtgtttttgcttactgccgggtttcgactctggaacagaacactgaaaaccagcgcagagaaattgagtcggcaggttttgccatcagaccccagcgactgattgaggagcaaatcagtggttcggttgctgccagcgaacgccccggatttatccgactgcttgatcgcatggaaaatggtgatgtgctgattgtcaccaagctggaccgtcttgggcgtaatgccatggacataagaaaaacagttgagcaactggcggcgtcagatattcgcgttcactgtctagccctgggcggggtggatctgaccagcccggcaggaaaaatgaccatgcaggtcatctctgctgtggcggaatttgaaagagatttgctgcttgagcgtacgcactctggtatcgcgcgagcaaaagcagctggaaaacggtttggacgtccttcagtactgaaggaagaacagcaacttacggtgattgcacggattaacgccggaataagtatcagcgccattgcgcgggaatttaatactacccggcaaaccatactccgggtaaaagcagggcagcaataa

SEQ ID NO: 84562 - DNA, 279 bp, Citrobacter koseri
atgagcggtaagcgttatcccgaagagtttaaaactgaagcagtcaaacaggttgttgatcgcggttattctgttgccagcgttgcaacacgtctcgatatcaccacccacagcctttacgcctggataaagaagtacggtccggattcttccactaataaagaacagtcagatgctcaggccgagatccgccgtctccagaaagagctgaaacgggttaccgacgaacgggacatattaaaaaaagccgcggcgtacttcgcaaagctgtccgactga

SEQ ID NO: 84563 - DNA, 192 bp, Citrobacter koseri
atgaaaaccagtattatcaacggctcggaagtgtctagattttccgtggcgattcatgtcagcggcgaaacggacgtgtacatcactgacgaactggagtggggcgaggctgacccggacgatgaggacagtttcccggacgtatccggcccggagtggattatcaacaacgtggcgcattttggcggctga

SEQ ID NO: 84564 - DNA, 348 bp, Citrobacter koseri
atggaattaaatctgaatacctggcttgttggcctgagtgtcgatgtcgatagcactgaaatgatggtgtattacctgatttccgcgacaggcctggcgcaggccgaagcgggcgtcatggaaatgggacgcacctggtggccatcgctgcaacgcgaggatgaccggcatcggtgggaatatacagcaggcgtggtctggttcaacagcatcattctactcgatgacgtggaaaacagcatcctgcgcgggctgaagttcctcgatgcgtggactgtgaccggttcaacgggtacgccggtactgcgtgacgagtgggggaatgactggcgggatatcacccgctga

SEQ ID NO: 84565 - DNA, 447 bp, Citrobacter koseri
atgaatttattgtgtgatagatgtaagaagaaatttatagcatctgaagagcaagaaaaatttatctctgattccagaagtaaagggatgaaatttgtcatgataaaatgtcctcattgctcaatgagttatccttttaatcctatgtcgccaaatacattgccacctacagagcagtctgttggtgatggtttgagatgccctaaagaaacgtgttccggcattatatcttatattgatgataccccttcgttttgggggtgtggtgaatgtgggaatgtatggtttaaaaaggatgatttatatggtgatattgaaagtataataaataaatatccttatagagcgtgcgtatataaaattgttgataatgaatatttccctgcggcagatgaagatatcccagcatcttatgatgaacaaataaaatcagaatggaataattaa

SEQ ID NO: 84566 - DNA, 591 bp, Citrobacter koseri
atgaactattataaactgggagttaatccagatagtggaaaatggaaaggttatatgaacccaggttcatttcttttagatgagaaaggaaatgaatttagtgatgtgaaactatcacgtcttcaaggggaatttagcgggactttatattttaatatattaaaagagggcgaagttcctcctgttatctcgatagggtctaggtttttagcatttaataaaaatgttttttgtgcagatgagtttgatcttgctggtattcagttaatacctcttataaacaaggaaaatgactttgaatatatgttaatgcatatatttaattatattgattgtgtggattgggatgggtcgaaaattgatcgttggccagaaaattacattccagaggattgggagtcgaagcgtggacgcttttttatcgagcctgttctctatagggaaaaaatatctaaaaatttagatgtctttcgtttgtatgactggggtggggcatttaatatagtgataactgaaacttttaaagaaaaattattatccgtgggatttgataatacacttcttgattttaaaatactatctcttaaatga

SEQ ID NO: 84567 - DNA, 3429 bp, Citrobacter koseri
atgtacaggaagaggggggggctggggtatggctggaaaacgctggctgacacccgactcattcaccatcaggaggaagattacttcgaactggtgctggcggacggcgcactgttttttgccgatatgccggaacaggcgggcaggctccatgcggtaaacagcctgccgggcggtgcgcaactctggtatgaagaggaaagtgaaggcgtccgccactggtatgccgaaacggaggagaaccgctggtggcgctttcgtcaggacagtacatcgccagcgtcggctctgaccccggacagactggaagacaataacggcaacggctggcgttttcgctatgaaaccggacgcatcaccctgacggaatacacgtcgcaggcgctgaccgggcgcagggtggaggctgactgcctgcaccagcgcattgtccgcgtcagtctgtgtgacagccatgccgacgagtggcagaacggcgatgaaacccggagcgacctgacgcagtacgactataccccggataatcagctggcaggccagaccgacagtagcggccatcgccgctattttacgtggcgggagcgggtttacatgcagtatcacgctgaccgtctcggccagcgctttcattatgaatacgatgatgagtggcgcgttatccacgcatggggcgatggcggctggtacgactaccgttttgcgtggaatgatttcagccacgagctggagatgaccaattcgctggggcatgccacgattatccgcttcagtgaagaccggcttccgctgtgtgaaatcgacccggaaggcggggcgacgttcttcctttatgacgaattcgggcagacggtcagcatcacctcgccggacagaagaaccctccgctttgaatatgatgaagcaggcaatatctgccgggaaatcgcgccggatgacagcgagttcgtcaccgtctggcaggcgttgcacatgaaagaagcccgcgacccggaaggcgcctgctggcggttcggccatgatgagcgcggcaatctgaccggtgtgacagacccggcaggcgtacaacagcagtatcactacgatgaactggggcagatggtgcgccgcgacacggccggacagggccatgagttgctggagtacgaccgtcttggttttgtcagtacgatgacggcgcgtaccgggatgaaaacagcttatctgcacgataaccggggcaatctgctgtcggaaactaacgcactgaaagagcagcggcactaccggtatgacggcgacgacaggctggttgaagcaaaactgccgtgccgtaacgccatccggctggagtacgatgccgaaggccagctggtgacttacgacgatggtcagcgcgttacccggctggactatacgcccaccggggaaatctccggttgtaccctgccggacggcagccgcaccggttacgaatatgacaccgaagaccagcttgtggcggtcattaaccagattaaccagcgctggcagatagtacgcgacagtctggggcgcattgtggaagagcgggactggcggggacagagcacgcgctatcagtggagcgccgacggtctgctgagtgccagaaccgcaccggacggcagtacgctgaactaccgccacgataaacaggggcgcatcaccgggcagtatggcaatgacacgctgctggcgcgctatgaatataaccggcgggggcaactgacggcctgcgataacccgtaccgtaaactgcgctggcgttacgacagcggtggacggctgacggaagaggtgcaggatgggttcagtatacgccacggttatacggcgtccggacagtatgcaggccgggagagcgactgtggcaaccgcgtggagttcggttacaacgacgcggggcagttaagccggatacagataaacgacgaaccggcgagtctgctggcgtatgacgcgctggggagactgcgtgaagagcagcttacgccggcgttgaaacgtgaactgagctataacgagaacggctggctgagcgcacagcgggtgagccgggaggccagaccgctgttcagcaccgagtggtattacgatttaaacggtaacgtgcggcagcgtaatgacagcgtgtcggggcgggaatttttcagtcatgacgtgatggacaggctggtccagcatacggacgtgctgggacggataacgcatttcgtgtacgacgcggcgggtaaccggttgcgggaagacatcagcggcagcggagacgagtggcagtgtcatggccgggtggaggaagagaggctggtcacgctggagcaccggtataaccgcaacggacagctggtggcgcgtaaacgccggacgccgacactctggtcgcagacggtggtcagtgaatcgctggagtgggacgtcagcggcaggctgacggcgctgcacagcgggaacgccagcacacagtacggttatgacggacttggtcgccgggtgtttaaaaaaacgaccagagcgggggaggataccgcgaatctgacctggttctggtgggacggggatgcgctggcgggagacgcgcaggataccgcgccggtggaggaaacgctgacggcggcgtgcgacatgcaaaggccgggcagcagtgcggcgcgggaggcgcggctgatgagtctggtgacagggcggacggtgcaggagtacgtgtattatccgcagagttttgagccgctggcgctgataaggtacgggcggcggtggaacgaaagggacggattcagcgagccggagaaacggatatatttttatcacaatgacgtgaacggcgcgccgctgaggctgacggatgagttcggaggtatggcgtggtcacagaaggcggggccatggggcgcgtggaatgagcagacaggttcggtgagaaacccgttgcgttttcagggtcagtattttgatgaagagagtggtttacattataaccggtatcggtattatgagcctgagagcgggcggtatatctcggcagaccccctgaagctgggagcgggactgaatctttacgcctatgcacctaacccgttaaactggatcgatccgcttgggctttcagcttgtgctccaacccatcatttagctacaaataaacattcaacttggtcggatcgtttcagagagttatttaagaaaaatgatcttggtaagtttaaaaatggtaagtggagaagggatgttctcaatgatcctttaaacaagattgatgttcctggacataaaggtcctcatcccgagggaatgcatcaagaaatttatgatcgtttgtctgctgcgagtgacagggggcaagatgcattcagaaaagaaattgaaaagctaagagtggaagctgtcactccgggaacttggcttaatgatatattaacgaaggttaataaataa

SEQ ID NO: 84568 - DNA, 789 bp, Citrobacter koseri
gtgggtatcaccgctagtaaacattttgacccaatgttaggaattgattttcactcctatgtcttgccgccagggatttggcctactccccatatttctctggtttttgatgtgatggattacgttccttttttgggaatgggggcaactgtaaaaatccacggtctgagacgtaccgttgctggtacagagggaaaagcatttcatattcttattggtgtgccgattcccccggtgaaaatcccaggtggcccccagaccgatgatgaactatttatggggagtaaaacagttattgttgatggtgatccgttgtcacgtcgtctgtcgccgacattgagctgtaatgtggttggcatcattccaccatttcgtctgcggcgggcaaaaaaaatgcctatcctctccctgacagcaccgctgacgataaatatggcgctgccccatcacgtttatgttggtggaaacgagaccatcagcatgtcaacaatactaaaaaagacggggctgactctctttaaacgtatcgggaaaaccaaggcttacaaaaagtttatgcggaaatttaaagcgttccgcaaaaatctttttaagaatatggaacccggcttcctcaaatgtaaggtgctgcgggccgagcctgttgatatccgtgacggcagcgtcaggctggagcagcgcgatttcctgctaccgggccgtgtaccactggactggatacgttactaccgttctgcggatgtacaggaagaggggggggctggggtatggctggaaaacgctggctga

SEQ ID NO: 84569 - DNA, 225 bp, Citrobacter koseri
atgaaaattaatgatggagctaagcgttttctacaagagtggtggaaaagtatgctttcttataatggggtatcttatttcaatatacaaaaatacatttccagtttgctgattgtactgctgatcggtggggtattttttggtgcaatctattgcttttatggcgatgaatacagccatgaaataaaaatttttctgcgaacgttgcgtcgagcacttttttaa

SEQ ID NO: 84570 - DNA, 1611 bp, Citrobacter koseri
atgcctggaaacaaaaatgctgttgagcgaaagctggcagaactggaaagcctctggctggaagccagtaatgacgagaatacccgtatctttatctggcgtacgcctgctgattcagatcgcctgatacatgtattttttgccttgcaggaagaaaggcaaaactattttacgacgcccgatctgttcattcgtttcaatacaccgtttgaaacccgttatggatattctcatgccctggaagaagagtttattgaacgggtgaatgtttcggcgtttcctgagcctcgctggcagcctggcagcctgctcccctgttaccgggaagacgcactgtgtacgttgctgagcgattttgcgcattaccatcaggactgcctgcgctatctggccgtgctcctgacgccttcctttgtcagccatgcggtttctggtcagcagtttatcgacgaactgtgccagcgaatgatcgctgaggcgtcccattttcgtctgcttctggttgatactcacgaatcccccgactgtcagtggctgctggaaaagtttccggaaaatacgcgccttctggcgccggatatcagtgaggatgaactgatgcgccagacgctaaatgagactcccacgtctgatggaaccgcaatgttgcgttttcgccagcttatgacagatacctttatttcattaaaaaagggcggtgcggcacaaaccgatcaattggcacaaaaagcgctggaactggcccgtcagcaggggtggggggagcaacaggtcattatgctcagtatggcagcaggcagctggctacaggaaaagaatgcgcagaatgccatcaaaaattatcgccttgcggtacagacctcggcggatttaccgtcaggctcccgccattccctgattacccagaatctgatgggagaaggcaacgcatggtttatggacaaaaactataaacaggcatcggatgcctatcaccgttccgcacaggaagcacaacacatcccttcactgctgctggtcatggaaggataccggatggcgggtttcagcctgatgccggaaacgcccccgtcagcagaggctgcgcaacattattactccgcgctgaaaacggggctatccatgagcgatgaagaacgggctcagtcgggatttatgcagattttccgcgacctgctcaactggctctctcctgaagccacaacccgaagtgaccgtttttccgaacggtaccggatggcgcaggcagaccttattcagcaggccgaagacgcagtgagtcaggccggacatcatgatattaccactgcggtagtgcagcacgataacgaactgacacaaaagatggaaaccctgtttcaggatacgctactggagcgggagcatatgctcagccaggaaaagccgctttatcagcaggtactgcgccttgcccgccagttcagccatgcattctgggctccgggcacagacattgcgcatccactggataagccggtagaaacatggtcgtttaaatctcctcttgtagtgttgaaaacaacgttttcagaagaggatatttatccactatttatgcagatcgtttcagacatacggagaatgaaataa

SEQ ID NO: 84571 - DNA, 2007 bp, Citrobacter koseri
atgcccgtatatggaacgcattttacgctggatgttgaaggtcaggaagacgaaacctttgccgtggtggaatttcatcatcaggaatccttctcgtcgctgtttacactgaacgtgaccgccgccagcaacaatccggctgtcccgctggatcagcttctggaaagtaacgccaccctgaccatctttcgggataatgtcagacagcgcagcatacggggcattgtcaccgcctgtgagcagggcgatagcggcaaacaccagacgctgtacaccttgcaaattcatcctcccttctggcgcagcgccctgcggcgcaacagccgcattttccagaataccgatattgaaggtatcgtttcgaccctgtttgatgaaatgctggtcacgcagtggcaatcccgtctgtccgccgatcatccgaagcgtgagttctgcgtccagtttatggaaaccgattatgacttcatcagtcgcctgctggccgaagagggaatattcatctgtgaagaagaaagcgatggcgcgcagcagcttatcctgggcgacagcgctgaaagcctgccggatattgaacccattaactaccatccggaacccggtgaggacacaaaactctaccacgttatgcagtttcgccgcagtgcacagatccgccctgcggcggtgaccacccaggattacactttcagggcaccttcatggccgggaagctttaaccatatgggggacagactggattctcagtatccgatttatgaaatctttgactatccggggcgctttaaggatgaggcccgtggtcaggcgtttacccgttatcagaccgagggctggcgcaataatgcggaaacggtctctggcgtaagcaattcgccaaagctgtgctccggcgtgcggtttgagcttaaagagcatccccgcgccgacctaaacgtacagtggcaggtcgtgagcagcgaattaatcggggagcagccgcaggcacagattggtcatgagggtgaaggtaccacgctgactaactattttcatgtgataccgggtaagcagacgtggcggcctcaacccctgcccaagccgcagatggacggcccccagacggcggttgtgaccggcccgccgggagaggaaattttctgcgatgagcacggccgggtacgggtgaagttcacctgggacaggtacaacccggcagacgacagcagctcctgctggatacgcgtttcgcaggcatgggccggggccggttttggtaatctcgccattccccgtgtcggacaggaggtcattgttgactttcttaacggcgaccctgaccagcccatcatcatgggccgaacttatcacgcggataacaaatctcccggcggactgcccggtaccaaaacccagatgacgctgcgttccaaaacttacaagggtggcggctacaacgaactgatgtttgaggacgcgaccgggcaggagctgttgtcgatgcatgcgcagaaggacatgcataccgtagtggaaaatgaccgcacaacagaggtcaaacacgacgatcataccactatcacccatgatcagacgcttgacgtcaacaatgagcaacataccacggtaaaaaaagattgtaccagaacagttaccgaaggtagccacatcgttacggtggaaaaaggcgagcagcatatacaggtcaataccggtcagcgctctctttttgtcgctaacggacacagtgtaacaataaaagacggtggggaaaccaatacggttcaggctggaggtcaaaacaacacgattacgggcgacaggttcctcactgtaaaagaaggtaatcagacgacagatattgaaggagagctgaaactgacagtcggcaatgccatcacgattacctgcggggaggcaaagcttgaaattaaaaacgatggttccgttacgctgaacggagtgaaattcacgtttattgcttcaggcgaagtgaaggtcgaaggtaaggaaatcacgttaaattga

SEQ ID NO: 84572 - DNA, 309 bp, Citrobacter koseri
atgaggatattttactatctttattattttttatgtctggcaaccatatggttcttatcttttcttgatgattccggtatgtttggtgatgatgtggtacatcacttttgcgatgttatttctgatgaaaatacagagagcatgagggctgtaacagtacctgtttcatttttactcatcctcccttttattgtgcattctgtcattaccgtaagaaagcaacggaattttatacaattaattctgacgtcaattatttttatattttggttttttctctttgttggtaagtacttaagatgctattag

SEQ ID NO: 84573 - DNA, 702 bp, Citrobacter koseri
atgggaaaaaataacattttctgtacaccaatagactcaacctttccaagatggaatggtgctgatattttggtctggaagttaatgaaagataatcctgatgaatataaaggtcggtcatatttatacttatataaagacgcttatattcgatatcataaagatcttatcatcaaatatgccaaagaggccggaatatctcctctgttactggctggaatcgcatggcaagaagctgggggaaaaccagaccgattaaaaccgtttgttttaaccttcagacaggctgttgattacttcaaggataaaaatgattactctaacagcgtttctgttggcatcattgcaatgcagatccgggctgcagcagaaacgttaagagtggatccaaaaacgctcacaagaaaaatgcaggtgcaactaagtcgttgcctgcagagtgatgactttaatataaaagtagttgctttgcatttaaaagatctgatcttgttcgactatccccacgctgacacagaaaatcttactcatgaacaaactattttagctggttctcgatataatcgtggtgtagaaagaaaaaaagatgattttgttaatgcaatatctgccgacgaacatgccactgagcgtgactacatctcttacggtttggcaataataaaacgagaagaacgtgtgaaaaaactaatgggaatttga

SEQ ID NO: 84574 - DNA, 1065 bp, Citrobacter koseri
atgcccgcatatggaacgcattttacgctggatgttgaaggtcaggaagacgaaacctttgccgtggtggagtttcatcatcaggaatccttctcgtcgctgtttacactgagcgtgaccgccgccagcaacaatccggctgtcccgctggatcagcttctggaaagtaacgtcaccctgaccatttttcgggataatgttatacagcgcagcatacggggcattgtcatcacctgtgaagaagaaaatggcggtgcgcagcagcttatcctgtgcgacagcgccgaaagcctgccggacagtgaatcgctgaactataacccttcacccggtgaagaaaccctgctctatcacgtgacgaagtttcgccgcagcgcacagatccgtcccgcatcggtcaccacgcaggattatactttcaagtctccctcatggccgggcaacttcagccatgaaggcgacagactgtatgtgcagtacccgatatatgaattttttgactatccggggcgtttcaaggatgaagcccacggacaggcgtttacccactatcagactgaaggtctgcgcaataatgcagaaaccgtgagcggcgttaccgactcgccgaaactgtgccccggcgtgcggtttgaacttaaagagcatcctcgtgccgacctgaacgtacaatggcaggtcgtcagcagcacgctgcgtggctcgcagccccaggcgctgattggttatgaaggtgcaggaacctcgctgagcaatgattttcaggtcatccccggtaagcagacgtggcgacccgcaccacagcctaagccgcagatgggcggcccccagacggcggttgtgaccggcccgccgggagaggaaattttctgcgatgagcacggtcgggggtgggggcgggtgaagttcacctgggacaggtacaacccggcagatgacagcagctcctgctgtatacgcgtttcgcaggtatgggccggagctggttttggtcatataggtagggaatttaaagataatagatacggcctgtcatcagagatgacacttgtttctgggcaataa

SEQ ID NO: 84575 - DNA, 498 bp, Citrobacter koseri
atgagcagcagtaaaagcgacggaagcgtcgccccgaaagagagaattaacgtccgctataccccaaagacgaatggtgaagtatcagaggttgagttgccgctgaatatactcattgttggcgacacaggtaaaatggatgatacgccgttagatgaacgcagtacggtttccattaataaaaacaattttaattcagttattgctgaagcgggcatcagtctgaattttaatgtcccaaacctgctcggcaataaacctgacgatgagcttaatgtccatatggacattaatgcgttggatgatttttctccagataacatcgccagacaagtccctgaaatgaagaagctgctggagctgcgtgaggcactggttgctctgaaggggccaatgggaaatctcccggcgtttcgtgcccagattcaggctttgctggatgatgaaaattcgcgcgaacagcttctcaacgaactgagtgtcatgaataaagattaa

SEQ ID NO: 84576 - DNA, 1485 bp, Citrobacter koseri
atgtctttacaggaacaggaattacccgttgcagaatcgctctctgcgccaccagcctcactgctggataccattatggcgcaggcgcgcattgagccggaatcagaaggttacgatgttgcccgtcagggtgttgccgcctttattgccagtatgctggaaagcggtgaccggcaggaacccgtcaacaaacttgccgtggacagtatgattgccgcgattgacgagaaactgagcagacagacggatgtcatcaatcatgatgagaattttcagaaactggaatcgttctggcgctcaataaaaacaaccgtcgatcgtaccgactttcgggaaaatattcagctccacgtactgcatgcaacgaaagaagagcttttggatgatttctcttttgccccggaaatcacacaatccgcgtattacaaacatgtttattccagtggttatggtgtgtttggtggtgaacccatcgccgcagtgattggtggttatgcgttcaataacactacgccggatatgaaactgctccgttatctcagcagcgtcggagcaatggcacatgcaccgtttatctcttccgtctctccaacattctttggcctgaagtcatacactgaattgcctcagattaaggatctttacgccgtatttgaaggcccggcttacgccaaatggcgttctttacgcgagtctgaagattcacggtatcttgcgctgacagcgccgcgttttctgcttcgcctgccctattctccgacggaaaaccccattaaatcgtttaactatcatgaagatgttaccggcagccatgaggattttctctggggaaataccgcatttttgctggcatccagcatgacagagagttttgcccggtatcgttggtgcccaaatattatcgggccgcaaaatggtggcgcggtgaaagatttgcccgtacatctgtttgaagcaatgggacaaattcaggcaaaaatcccgacagaagtattgatcactgaccgacgcgaattcgaacttgctgaggaagggtttattactctgacgatgcgtaaaggcagtgataacgcagcatttttctcagccaactcggtacagaaacctaagcgtttcccaaatacgcccgaaggtaaagccgcagaaaccaactacaagttgggcacacaattaccttatatgttcattatcaacaggttagctcactatattaaggtattgcaacgtgagcagattggttcatggaaagaacgttcagatctggagcgtgagctgaataactggatcaggcagtacgttgccgatcaggagaacccgccagctgatgttcgtagccgaaaacccctgcgagccgcaaaaatcgaagtgctggacgtcgagggcgaccccggttggtatcaggtggccatgtcagtccgacctcactttaagtacatgggcgcaagctttgagctttctctggtaggccgtctggataaggaataa

SEQ ID NO: 84577 - DNA, 426 bp, Citrobacter koseri
atgatcagggaacgtgaacgcaacagtatcgcaagtttgtttgatcgtctggatgaagcgacggggctgcgttcaccttccttcggtattcaggctgtccgggactcgattaagcgtaatctgaataacgtactgaatacccggcccggtagttgccagagcacaccggaaatggggatatccgatccgggaagtgaagagttgacacgtggaaactttcaggacgctcagatagaaaagatcaaagcctgcattgagctttacgaaccccggatcgctcaggtcgatgtagccataggcgatccggatgaaaatagtccgctggatctttgtttccaggtcacggcttttgttgatatcgaagggttaaagaacgtgctggaatttaatgtgcaccttagcagccagcattacaggatggattaa

SEQ ID NO: 84578 - DNA, 1830 bp, Citrobacter koseri
atgacaatggaagaacgctattttcgggaagagctggactatattcgtcagcttggaaaacttcaggcgaaggaaaaaccctatctggcacggttcctggcagaaaaaggcaccgatccggatgtggagcgtctgattgaaggatttgcatttttggcaagcacgacgcgtgcaaaaattgacgatgagtttcctgaactgacgcatagcctgattagcgcgctctgccctaactatctccgtccgaccccctcaatgaccattattgaatatacgccggacgtgggtactattaccacgcccgtcagggttgcccgcggtgagcaggtgaaaagccagtccgtgacgttgaacacagacgatgaactttacagtgacgacgaccgtgaactcccccctgcctgtacgttcacgatcagccgggacgtatggctgttgcctcttcgggtgaaatccgtagtaaacaacagtagtcacgcgctgggaactattgatattacctttgcctgtaatcccaggatcagtttagcgtcgctggatctgaataaactacgcttctggctgggcaatgatgataattacacccgctggcagctttatctgtggctgtgccgctataacagcggggccgaactggttattaacgatcaaaccctgtcattacccgatttcagcctgactccagtgggtttcagtaagcaggatgcgctgctgccttatcctaaaaatgtttacagcggctacaggattttacaggagtatctgtgctatccggacagtttcctcttttttgacgtcagcggcattcaggcgcttccggcagaactggcggcagaccatttcacccttcgtcttcacttttcacagccgctcccggttgacagcaaaattcgggaaaactcaatgcgcctgtactgtgcgccagcggttaacctgtttgtccatcatgcagaagcgatagcgttacaggatagccggattgagtacccgctatgtgccagccttaagcgcccggaatgctatgacatttttgccgtaaaacacgtttccagcaaactgcgcgctgtcagcaaaggccgttcggagatggtgacaagggaatatcccgaatttaacggttttgagcaccaggtagagtatgcccgccagcgggaggttatttattaccagcaccgtaaaaaaacgtcgctgtttcgtcagggatttgatcactctattgctttcgtgctggctgatggcaacaagccggaagactatttgttgaaagacgaggtggcgtcgatcggtctggtttgcaccagccgggaactgcccataaaactacagccgggggatgtctgtatcccggcgggtaaaaaaaccgctacggccccgtttcgtaatgtgactaaaccgtcaacgccactctggcctgtacaggacggtagccttcactggtcgctgctttcgtgtatgaacctgaattatctgtcgttactggatcttgatacgatgaagaagatcctgcatatcttcgatttgccgggtattcaccacccacagttggcaaggctgtcacaacaaaaactggacgcgatagaacgtattgatacccgacctgtcgatcatctgtttaagggagtgcccgttcgtggtcttgccaccacgctgtatatcaatccgcagccgtttgtctgcgaaggggagatttttctgctgggcacgatgctctcttttttcttttccttgtatgccagcgtcaacagttttcatgaactgagcattatcaatacctgtactcaggagagctatacatgggcggacagaaccggccagcatgctctgatgtag

SEQ ID NO: 84579 - DNA, 1059 bp, Citrobacter koseri
atgggcggacagaaccggccagcatgctctgatgtagatgcggctgagggtgtttacagtgaattttctgtcgatgatatcaattttcgtcgccagaatttttttgcgctggttgatgcgatttaccggtttacgggcaagcacaatgacgtctcgctggcgacagatcctgataaggatgctgtgcgctttgaagccgatacccatatttcattccccggcagtgatgtggtgaaggtgacacaaaacagtagcggtcagtatgtggtcaccgtggcgttttccggcctgcacggcagtcagtcgccgttaccgggctactatctggataagattgcgtgggaccgttttcagggtgaaagcgggatggcggattttttcgatctgttttctcaccggatgatccagttcatctggcacatctggcgtaagtatcgctggcatatctgttttaacaacggcggtacggatgagtttacgcaacgtatgtatgcccttgtcgggctcggcagccagagccagcgcgatcgtctggccattaatcacagcaagatgctggcgtatgccggagtgctggcgggtcccggtcgatcgccggaaataatctgcgatctggtttcccattgttttgaccttgatgatgtgatggtagagagctggcagttgcgtaaggtcgatattcagccctcacagcaaaaccgactgggaggttacctgcaacgggactggcaaaaaatgccgcgttccgtgctggggaagaatttaacgctgggtggacgcgtgccggatcgcagtggcaagtttttattgtgtatccggggattatcgcgcgagcgtttcctttcatttttacccaatggcgacagctttctgccattgaccatgtttgtggcatttattttacgcgatcagctggcatgggatctgcgactggaaatggccccggaccagattggcggcatgcgtctgggtgaggaaaaaacctcccgccttggctggaccacctttattggccagccagaagtatgccccagcgtcacgattcaggtccggacatag

SEQ ID NO: 84580 - DNA, 1272 bp, Citrobacter koseri
atgccagagcagaaccagcatcaacacactcagccagtactgacgctacaggtcatgaacggcaatgaactggaaagcggacgcgccgcaaaatgtgtgtttactccacagggcggtgatgtgggccatgccggtgaatgtcactggtcgcttcaggatcgcaggcagtccatcgccgaacgcgcctttattattcgctggcaggacggcacattctgcctgaaaagtcatgtcgctaatctggaaattaatcaggcacctattgcacaaaatgccggtctggtacacctgcgccagggggatgaacttcggatgaacagcctaatcctcaaggcgttcatcggtagcgtcacgcagtatgaagagcagatggcgacgccggaaaccattgttaccaacagcgatcgtctgacagatttgctggccactgaaggcctgccgaaatatgaggattccggcgtttaccgggaaattgcaccaaccattgtcaacggttttacacaggacccacttgccgcgctacaggctgaaagcctgacgacagtccaccaacataccggacataacccgttgtcgataaccccccctatgtccgatctggcggataacggagggctggataatcactttatggatttgccgcccgctgaagccgatgaactgccagatctggttgatatggcacggcagcatgttgctgtgacgccactgatgcggggacttgactgcgcgctgccattgcgtaattcacaggatgccagtgactttctggaagaaatggggcgagccatgcaggcaaccattaaaggattgcttaacctgcaacatcaaaaaaatagcctgtctgataaacatttacgcccgctggaagacaatccgctgcgtctgaatctggactatgaaacggcgctcagcgtgctgtttgccgaggggaaaagtccggtccatctctctgcgccagcggccattgctgaaagcctgcgtaacgttcgccaccatgaagaggccaataaggccgcgattgtcgaagcgctgcgcgtcatgctggacgccttctctcccgccagcctgatgcgtcgcttcgctctgtatcgccgcagtcatgaacagcgccaggaaatgaatgatacatgggcgtggcagatgtaccgcaactactacgatgagctggcctccagccgccagcaaggctttgagatgctttttaacgaggtctatgcgcaggtgtatgaccgtatgctacgcgagaaacagcgggagccggaagcatga

SEQ ID NO: 84581 - DNA, 531 bp, Citrobacter koseri
atgaaatggcgctgtctgtccggcgcaatactgctgttgctggccggaaccctgagcggttgtgaaaccatgaagaaggtttcgcaggtgatttccaacccggacattcaggtcggcagtctggcagaacagccttcggagttgactatcaccatgctgaccgaaccggacacaaatctcaatgacagtggagaagccgcccctgtggatgtccagttgatttacttaagtgacaactcaaaattgcaggcggctgattatgacttgattgccacgactccgctggatactgcgttggggaaaaactatctggatcatcaggactttaatctgctgccagacacgataaaaacgctgccgccagtaaagctggatgagaaaacgcgctttatcggtgttgtcgcttatttctctgacgaccagaccacacaatggaaacaaattgaacctgtagcgagtacaggccatcactatcgcctgctggtgcacgtgcgcgaaagcagcattgagatgaaaaaagaggaacaataa

SEQ ID NO: 84582 - DNA, 1341 bp, Citrobacter koseri
atggcgatgaaaaataaagtcatctggcaggaaggtctgttcattcagccgcagcattttcagcaacagcagcgtttcaatgattatcaactggccactcgcctgacatcaatggcgggttttgcatggggattcagcgaattatccattaaccaacagcatctggtacaggggaaaatcgtactggataaagctgtggggtgtatgccagacggtacggtattctccctgcccgatcaggacgtattgccggcaccatatcaacccgtagcgttcgatacagaagagagccggacgctgtatctggcgttgcccgtcaaccacgatgcgattaatgaaatcgccggacggcgtagcaccggacaggggaacgggcgttaccgcctgaactatacggatgtacgggaccagcacaccgacgaaggtaatgccatacagctggcgctgggacagctattgccgcatattgtcaccggcgcagaagatttaagttcatttaccacattgcccctgtgtcggatcctggctcgcaacacagacggttcactgctgcttgactcctcttttatcccaacctgccagaccatcaaggccagtcaggtactgacccgttttctggaagaagttcaggagactatcggtaaccgctccggggatctggcaaagcgtatcggctcccctgagcagagtggcattgctgacgtggcagaattcatgatgctacaaatgctaaaccgcaatctgggacgtttttctcatcgcaagcacctcagcgttttacatccggaaacgctgtatctcgatctggctgaacttctgggagaactgatgacgtttacgtcagcagcacgccttccctgtgagtatgatgtttataaacatcacgatttaaccacctcgttccacaggctgattgatgctgtgcgcagggaactcggtattgtactgcggccacgggcactgaacctgccgctgtcgaaaaacgagggaatttatcaggccacgatcaacgatacgcaactattgcaggatgccagttttgtactggcggtctacgcacagacacctcacgatcagcttctgcgtcagttcgttcaacagtctaaagtgtcgtcaccagacaaaattcgcaacatggtcagcgtgcaggtgccgggtatacagctcagaccgctatcctctgcacctcgtcagttgcctttccatgccaattatctctatttcagcctggataaaacaggcaaggaatgggctgacgtggctaccagtggtgcgattgccctccacgtgtcgggtaccttcccggcgctggatatgcaactttgggccgtgagagggtaa

SEQ ID NO: 84583 - DNA, 759 bp, Citrobacter koseri
atgagcgaattcccccccttcctttctgaaacagaagaggcagagcgacaataccggttgccatttcgcggccacagtctgaataacatgatcgacgctgcgactccgctactgggcatgacaatgcggctaaatggcatggaaaaccagccactgccggaatatctgttcagtcaggtcgttaccgacgtgcaggccgtcgagcagttgttacaggaacagggttatgagccgggcgtcatcatttcatttcgctatgtattgtgtacgtttattgatgaagtagcgctgggacacggctggtcaagccagaacgagtggataaaacagtcgctgctggtgcattttcataatgaaacgtggggcggcgagaaggtattcatcttactggaacgccttatccgcgaaccaaagcgttaccaggatttacttgagtttatgtatctgtgtttttcgctcggtttccgcggtcgctataaagtcagcaaccgacaaccgcaatctctgaatgaattcgagcagatatttcgtcgtttacatcatgccatccaccagttgcgtggagatgcgccgtttcccgtgttgcatcaggataagcaaggggctggaagtcgttatagtctgattaaacgactggaaattaagcacttactggcaggtggtctgggacttctggctctgacctggctgttctataccctgcggctcaatgcacagactcaggatattttgcaacagttaacgcatctgttgcgctaa

SEQ ID NO: 84584 - DNA, 2706 bp, Citrobacter koseri
atgattcatattgagttgtcttctctggttaaacgtcttaatccgtttacaaaacaggcgctggaaacggcggcctcagagtgtatgagccagcaggcggcggagatcaccgttgcacacgttttgatacaaatgctcgccatcccgtgcagtgacctgcgcacaattgctgaaaaggcggatatccgtcttgatgaactacgtcaggcgctgacggtagagtattacgccacgaccagaacggcagacagctatcctgctttttctccatttctggttgaatggttaaaggacggctggctgctggcatcagcagacatgcaggcgacagatctgcgcggaggcgctctgttactggccctgctacattcgccgttgcgttatgtgccgcctgctgctgcaaggctactaactgccattaaccgcgatctgttgcagcaggattttaccgcatggacaaaggagtctgccgaatcagtggtactgacagaccgtcagcccgatcggcgcacagggatggctggaggggaaagcctgctcgcccgttacgccaaaaatatgaccgctgatgcccgcaacggtaaactcgacccggtactgtgccgtgataatgaaatcgacctgatgatcgacatcctctgccgacgtcgcaaaaacaacccggtggttgtgggtgaagcaggcgtcggtaaaagcgcgctaatcgaaggactggcgctgcgcattgtcgcagatcaggtgccggacaaactgaaaaataccgatatcatgatgctggatctgggggcgttgcaggccggggcatcagtcaagggtgagtttgaaaagcgctttaaggggctgatgtctgaaattattcagtctcccgttcccgttattctgtttattgatgaagctcacatgttaattggcgcaggcaatcaacagggcgggctggatatctccaacctgctgaaaccggcgctggcgcgcggcgaactgaaaacgatcgcggccaccacgtggagcgaatacaaaaaatattttgagaaagacgcggcgctgtcgcgccggtttcagttagtcaaagtcagcgaaccgaatgcagccgaagccaccattattctgcgtggactatcggcggtgtatgagcagtcccacagcgtgctgattgacgacgaggcattacaggcagcagccagcttaagtgagcgctacctctccgggcgtcagttgccggacaaggccatcgacgtactggataccgcctgcgctcgcgtggcgatcaatttatcctccccacccagacaaatttccgcactggaaacgctgtgtcgccagtacgagaccgaaataagacaactggaacgggaacaacgtatcggcctgtttcataatgccgcctaccgtgatgaactgcatcagaagtatgaagccgcgaagcaagatcgtcaggaactggaagacgcatggcaacagcagcgcgagctggtacaacagattattacccttcgccatggtttactgggcgtcaacccacacgataacgcggattcatcttcggctataacagataatgcgccagcgacactaccagagaaacgtaaccacctgataaagctgatggcagagctggacgtcacgcacagcaagcagcgactggtctctcctcatgtggataaaacacaaatcgctgccgtgattgccgaatggactggagtaccgcttaaccggctctcacagaacgaaatgtcagtgattactgacttaccacagtggctgggtgacaccatcaaaggacaggaactggcgattaagcacctgcacaaacaccttctgacggcgagagccgatctgcgccgtccgggtcgcccgttgggcgcatttttactggccgggccaagtggcgtcggcaaaaccgaaaccgtgctgcaactggcggagctgttgtacggtgggcgtcagtaccttacaaccatcaacatgtcggagtttcaggaaaaacacaccgtctcgcggctgatcggctcacctccgggttatgtcggctatggcgagggtggcgtgctcaccgaagccatacggcagaaaccttattcagtagtgctgctcgatgaggtggaaaaagcgcatccggacgtactgaacctgttttatcaggcctttgataaaggcgaaatggcggacggagaaggcaggctgatcgactgtaaaaacatcgtgttctttctcacctccaacctcggttaccaggtgattgttgcacatgcaaacgatccgcaggcgatgcaggaagccctgtacccggttctggccgatttcttcaaacccgcattgctggcgcggatggaggtggtgccgtatctgccgctgtcgcgtgaaactctcaccaccattattgccgggaaactgacccggctggataacgtactgcgttcgcgctttaacgcagaagtggtaatttcgtcggaggtgactgacgagatcatgctgcgtgtcacgcgtgcagaaaatggcgcccgaatgctggagtccatcatcgatggcgacgttttacccccactttccctgctgctgttgcaaaaaatggcgtccgatacggctattgcgcagatatgcctgaccgttaaggacggcagatttatggcagaaatcacagatgcggaagattgcaacaccaccgatgtacccaagccggaatttgtcacagaggaagccgaagcgtga

SEQ ID NO: 84585 - DNA, 705 bp, Citrobacter koseri
atgaatcctcgattcgctgccagcctgtgggggttaaccctgttatccgccgtaacactggctcaggaaggtaccccggtgccggataccagggcagaactggtgcaggctatgcaagcctgccgcgcagaaccggccgcactggtacgtctggattgctacgatcgccagcttccacctgaccgtccggatttctccggcgcactggttaaagccagtgcgccgggagacgcatggcagcgcgccattgagcaggaaaagcagcgtactgaacacgatactgcatttctggtgacaaaaagtgagggggaaaacaccactgtcatcatcactacccccgccctcggcagcataccgcctcgaccggtgctgatgttcagctgtgtggacaatatcacccgaatgcaaatcgcgctgtcgcgcccctataagggtaacgatatcccaataacgttgcgtactgatactggtcagtttcatacccgctggtttatccgtgagaacggttatctactggaagccagccgtggccttaccggtattgacgagatcaaacagcttttcggcgcaaaaacgctgacgataaataccgacatggacggcgcgaccggacaactgacatttaccatttcaggtctgacacaaacccttgtaccgctgcgcgaagcctgtcattgggccgggcaggaaaggaaaggagaataa

SEQ ID NO: 84586 - DNA, 1404 bp, Citrobacter koseri
atggccgaatattccccggatgactggcttaaagccctgctggccgaattgccagacggaaagataagtcaggccgtcagcgacgataacgccctgtggatcaacattgaagataacgtttcccggctggggtcgctgactcacagtcagattgatatcgctgagattcgccgccaggcgctgacactgctggaaacggagagtaaagactttcgggtaatggtacacctgctgcgcacgttgcaacatggcggcaatgcagaagagttattactggcggcgaagctgttggtgcagtatgtacagcattactggcaacaggcatggccgaaaaaccagacgcataaaattcgcttcgcacagcaggtgattaagcggtttgaaacagcggcaggcagttttagtcgcagggcaagcgaaacgcagcgtagcgccatgtcgggagaactggcgtttcttgcaaaactatggcgtgacaatggatatccgacgctggcggaatcggccgacgctctgtttacactctaccaacgcgatatgagggagctgcctgtgtcccctgctgattctgtcgtccctgaactgacagcagaacgctccctgatatcgactgtcgccgtacaacaaaatgccccgactatcaacgtggaaagtcatgatgaaaaatcatggcgtgaaaccttactgaaagtggcgggtattttatgtgaacgccagccggataatcctctgggctatcgactgcgccgccatgccatatggcagaacatttccgccgcgccacaaaccgaaaacgatgggcgaaccccgatggccgcgttttcttccgatatcatgacagattatctggcaagagaaagcagctctgacagcacgttatggcagcaggtggaacaaagcttaattctggccccttactggttcgatggccacgccctgtctgcccgtattgcagaatgttatggctatcatgatgtcgctgaagccattaaaggcgaagtaaaccattttctacaacgcatccctgcgttgaatacgctgttgttcagtgaccggacgccatttttgtcagtgtcaacaaaacgctggcttgtcccggacaaaaccactttctccaacggaacaatggatctcaacgatgagacgcgactatcccggcagcatcttcatgagcagggtctggaagcaacgctacgatatctcaatgagttaccggaaggggagccacgagaccgcttttaccgtcagtatgttgctgcgcagatgatggaagaagccggaatggtacagcttgcaaaacagcactaccggacattactaaaaacggggtcgcacatgtcgttgtcggactgggaacctacactgctggcatgtctggaagaaaaactcacatcagcacagtga

SEQ ID NO: 84587 - DNA, 3531 bp, Citrobacter koseri
atgcctggttttctgaaagggctaaaacctacaattaaacccgctatgccccggataaaaatctccgccatgattctggtggtactggtctgggcgttatcactgctgtggatttggtggaaaggcccggagtggacaatttgggaacagcagccgtttgccccagtcatgaatcgtgcgctggcaactgccgtatgggtactggcagcgctgggctttgtgacatggcgggttatgaaacggctgtactggctggaaaaaacgcaaaaccagcagcgccagcaggaaaaagatccgttgagcgtggagatcaatcagcaacagcgctatctggatcgctggctgcttcgtttgcaacgtcacctcgatcggcgaaattatctctatcacctaccgtggtatatggttatcggcccacaacaaagcggtaaaagtacgctgttgcgtgaaggataccccgccgatgatatctggacgcccgaaaagctcaagggagaaccgggctgtccgtggcgtattgcgccgaaagtcggcgaagcggcagtgattttcgatattgatggtgtactgacagaacagggcggaaacaatgagtcggaacaaagcaccctgtatcgtcggttatggcaacactggctggagtggctggcgaaaaatcgcgaaagacagccgctgaacgggcttatcctgacgctggatgtggtagatttgttaacctcatctaaagcgcagcgcgaacggcaactggcagtattgcgccaacgtttgcaggaaatacgcattcacctgcactgtcatttacccgtctatgtggtgctcacccgtcttgatttgctgaacggttttgctgccctgtctggtctgatggagcgcagcgacagagaacgtattctgggggtcacgttcacacagggtgcgcaccgtgacgagcggtggtgcgaagaactcagccacttctggcagaactggatggcgcacttaaatcaggcgttgcccgatttgctgttgaaacagtcagagtttggtgaccgtgcttcactgttcagtttttcacgccaggttcaggggctgcacgatcatcttatcgtactgctgaaagggctactgtccggagaaaatatggacgtcatgctgcgtggcgtctggctgacctcatcatcacagcgtgggcaggtggacgatatttttgtccagtctgccgcccggcagtatcgactaggaacacatgcgctggcatcgtggccactggtggaaacagcgccttatttcacccgaatgttatttcccggagcgcttctggctgaaccgaatctggccagtgaaaatggactctggctgaaatattcccgccgcaggctgggctggtttactgccataggttctgtggcgatcgtcgcgatgatcgtcgggtggcatcactattaccgggtaaactggcagtccggcgtcacggtacttaaacaggcccggacgttcatggatataccgctaccacaggggatcgatgactatggtaacctgcaacttccccttttaaaccccatgcacgctgccacgctggcctacggggattaccgcgaccacaacagcctgacccacatggggctgtatcaggggatcaaaatcggccctcatgtggaaaaaacgtacctgcaactgcttgaacagcgatacctgcctgcattgttcaacggtctggtgaaggaaatgaataacgcgccgccggaaagcgaacaaaaactcgaagtgttgcgcgtgatccgtatgctggaagataaaatcggtcgcaacgacgcggtggtcaagcagtacatggcccgtcgctggagtgaccatttccacggacaacgggatatacaggtacaactgatgtcccaccttgactatgcgctggcgcacacagactggcacgctcagcgacttaacggtgatactgacgcgattagccgctttattccgtatgaaaaaccggttgtggctgcgcaaaaagaactcagcaaattgcccatttatcaacgagtttatcagagtctgaaaactcgggcgcagggcgtactgcctgctgatctgaatctgcgcgatcaaatcggcgcggggtttgacgggattttcgtggcggcaaatgaagaacagttgattgttccacaatttttaacccgctacggcctgcaaagttattttgtgaaacagcgtgacagcctcgttgatctgacagccatggacagctgggtgctgaatctgagccgtaacgtgacatacagtgatactgacagggaggaaatacagcgtcatatcacagaacagtacattagtgactatacggcaacatggcatgccggaatggataatatcagcgtgcgtgattacgaaaatctgactgatatcatcaatgcactggagcagattatcagcggcgagcagccatttcagcgagcactgacaacgctgcgtgacaacactcagatgcccccacctccggcgaatctgccggaaaaagcacgtgaaagcatgatggctgagagcgattatcagttgctgatgcgccttggccgcgagtttgcgccagaaaacagcgttctggtcgagcaaaaagacaaagccagtatgttacaggcggtctatcagcaactgaccgaactgcaccgttacctgctggctattcagaactcaccggtaccgggaaaatcagcgctaaaagcggtgcaactcaggcttgatcaaaacagtagcgatcctatttttgccaccagacagatggcaaaaacgctgcccgatccgctgaatcgttgggttggaaaacttgccgatcaggcatggcacgtagtcatggtggaagccgtgcatcacatggagcttgagtggaacgataaggttgtaaaaaccttcaatactcagctcgccgggcgttatccatttgacccgaaggcgaaacaggatacctcccttgacgcctttgaacggttcttcaaaccagacggcgtactggatggattctacaaagagaacctgaagctatttatggaaaacagcctgacgtggggagaagacggcaatattctgatacgcccggatatccggcatcagcttgaaaccgcgcagaaaatacgcagcatcttcttcagccaacagaacgggttaggaactcagtttgccgtggaaacggtgacgttgtcagccagtaagcgacgcagcgtgctaaacctggacggtcagttactggattacagccatggacgtaattttacggcacgagtggtgtggccaaacaccatgcgggaaggtaatgagagcaaacttacgctagtcggcacgggcagcgcggcgccccgcagtatcagcttcaccggcccgtgggcgcagttccggctgctgggagctggcgcgctaaccagcgtggatgacagcacctttaatgtacgcttcagcgttgacgggggttatatggagtaccgcgtacatgtggacagtgaatctaacccattcactggcgggttgttcagcggcttcagactgtcagaaaccctttattaa

SEQ ID NO: 84588 - DNA, 1341 bp, Citrobacter koseri
atgagagatattcagttaacacagacgatccgggcggggggcgatccgagggagcttcctgaattcagtgctatccgtgaagagatcaataaaacaagtcatccgtcgcagcctgaactgaactggacattagtggaatcactggctttaaccctctttaagaataatggtgtggatctgcatacggcgacctactacacgctcgcccgtacccgcattcacggtcttggtggtttctgcgaaggcgtggagttgctggctgcgctgattagccgcgaatgggataaattgtggccccagaatccacaggccaaaaccgaaatgctggactggttcaatacgcgtattggtaacattttgcgtcagcaattatcctattcacccgccgatctgccactgatgtatcgtgccgaacgggcattgcagataatctgtgacaaactgcaacaggttgaattgaagaagattcccagagtggaaaatctgctctattttgtacaaaacacccgtaaacgatttgagcagccaccgcaaaagagcaacgccacggtcccggtacaaactgcggtcaaaacattggtatatgcacctgagaacaccgatacgaggactgaagttcctcatttccctgttccggagatgacggttgaaattcatcaagatacggctggtaaatccgctaccgggaaagccgttaatagtaacctgaaagggtttattgcgggcattgtcttttccccgacggttgccgccgtgttctggtggtggcaagtgtaccccatgcaacagcaacttgctcacgtgaaagacaccgcacagggggaagcgacagtctggttgacatcacccaacctttcagactacagacgggatctgcaacaactgcttgatacttcatccctgcaatctctggaaaccggcatacagatgacccgaacagcagacggtcgctggccggaaagcctgcaacagcaacaggccactgcactatggcatgaaacgctgaaagcgcgcgcgcagcgcagtccccaactgaaaggctggcaacaaacccggcaggatttacgcgcttttgccgatctgattatgcaacgggaaaaagagggtctgaccctctcatacatcaagaacgtagtctggcaagccgaacggacgctgaatcaggaaacgccgctggaatccttactaacacagtaccagacggcgcgtactcaggggcagaatacgcaggcactggaaaaagagatcaacgaacgactggatggcgtgttaagccgctggcttttgctaaaaaataacgcaatgacggaaaacgcagccagtaatcgttctgaaaaataa

SEQ ID NO: 84589 - DNA, 480 bp, Citrobacter koseri
atggcaaacctcatttatctgacattaaacggccagcttcaggggctgatttcctccggatgttcgtctcaggcgtcaatcggcaataaagctcagaccatacatctggatcaaataatgatttatgaactatcgcacgggttaacccgtaaccagaacgtgaaccaccagactgtcgtcatcaaaaaaccggtagataaatcctcaccgctgctgaataaatccatcacggataatgaaacgttaacctgtaattttgaattttatcgcacaaatcgggctggcataaatgaactttactataaaataaaacttattgacgcaacgattaaggatatccggctatcgagtcccgattccctgaataaccctggagggcaaccgacggagacgattagttttacctataactccgtggagtgggagcactgcctagcgggaacaagcgcatacagcctgtggaatacacgtatatactaa

SEQ ID NO: 84590 - DNA, 762 bp, Citrobacter koseri
atgcagaaaaaccaaaaagacatagatgattttcttgccacatccagagaattgagaaatagcgcccagcaattatctcattactatatttaccatccagaaataaggatgggatttcttaacgaagaagaggcttttgttcaacacgttgaaaaagagatcgacctgaactgcttgtcctatgccggaggtaccatgctcctgaaggaggaaattgagaatctggcaaagcaaaaatttgcactgaatacgaatgcagcgaagttatatatcatcgcagagagagtaaaagaaaggaatagttttaccaccatcacgcttaaacaagtgggatttgtgagcgggggtttgcaaatttatggtggaggttcagtttgcgttgccactctgggactggcatgtgcaagctatggcgttcctctgatggctcatggtatgaataatatgtatgagaatggttattaccttctgtttcaggagaatacaactgggtatacaaaagatacttatcgatacatagcaaataaatttaattatagtaatgatgatgctgatatggtttataacctgatggatttagggctgtcaggctatacccttggacgaaaagtgctaaaacctgacgcatggaaattatatcgatacattcgctctgattatactcatggttggaaattaatgagcaatgctgaattaggagcggaattgattggtgatgcaaatacaatacttggtatgtattcaataaaaaaggaatattga

SEQ ID NO: 84591 - DNA, 327 bp, Citrobacter koseri
atgtatagctatagcaatgcttttccttttgaaattgtttattttattctatccctcttgttttcggtaatcattatctattggagactgcattttataagcgataactccagaacaaaattatattttctttcattgtttttaggtttcattcattactttgttgctgatcatggtatttccaccttattcaaaatactgggttcatctgcaatgtttacctttgatgaaacatttttgagaaatatggccgtgattttcttcctgattacgttaattctcacatttaatttattctggagaagtaacataaggcgattcaagtga

SEQ ID NO: 84592 - DNA, 744 bp, Citrobacter koseri
atgaaaaccccaaaaattgttgctgtacttggtatattgttttctcttttaaccggatgtaacagtgcatcaattgatgcaaagaaaaaacaggtttccactccgtccagtagaagtacgtctgcactgcatctgacagataaggatgtttttggtaatgaatcaacattgaatgtatcggaggaggatattcagaatgcactggaaggagaacgcttctctgtacctttgcactcatcgatcattcttgttcagtctggtagtcaggcaccggacgtcgctatgcagcaagaaatgagcaaatattataccgtatcaacatttgccggaattactgataaaaagaaaacaccgacatgtgataaagattcgcctgatgcagaaaatatgaattatatgcaggcgcttcgttatattgcggcgaaaggaaaacaaaaagccgttctggtttattggggccgactggaagctggaaaatatgatccagccattaaagaggttctctggtcagagtataagaatgaaaaactggcgggtacagggatcgttttacgttacttgttgcgatttgcgctggtggatgtcgccaccggggagtgggcaacgtattccccgacaaactatgagtacagcgaaccgttgcccacaacaggagtcggggatatcaccgaacaacaaattatgcagctcaggaaaaaaacctatgaacgagctgttgcggattttgtcagcagatataaatag

SEQ ID NO: 84593 - DNA, 828 bp, Citrobacter koseri
atgcctgtctgggtcaccattgatgaaatcgttgaaattattaatcagaataaaatcatggataaaaaagttaaaattagcaatatttatctctgtgcactatatggacatttaactctatcaatatattttcagtcaccaataaagcttcgcagggttgtttttagcgaaggcgatgtgcaatatgatgaagtaaatggagatattgttgaacgtctatgttatctgtgtcatcactgctttcaaaataacgacaatcttattctgaaaacagaagaaaataataccactccatctggatatattctcgacgcatccttgcaggagcaggagtatgcgaaattacaaacacttcttgccagcagccttgacttaccaccacaggtaacaggtatgcataatattcatcatggcgttcttgttaacgataatgggattatttatcagatttttgaaagctgttcatggaaagaaataatatccagacagattaaaagattttcagcagacactaccgtaactattcatgaagaaataaaaatcagcaacacaccaaaaatcggtatgggttatttccctgtgtatcgacttcctgatgatgcctgttttattattaaacgtaatactctagagcgttttattgaaaaatattatcctgctccagcaacgcaagaaacttcgcaaactcgtgtatcaacaccggtatcccgactgctgtggctggcttgcaaatacaacgacagtatcagtccattaatgaaacatcctacaaacttctgtctgtctttgaacaatgggcagttacagaaggtatttccgcaccactaa

SEQ ID NO: 84594 - DNA, 195 bp, Citrobacter koseri
atgaataagcagacagtcactacagatgacatgacgatccgtgattactttgcggctaaggctatggcagcaattgtgcgcagatgggacgggcattcgtttggtggcggaccggaatcaccacaatacaaagaattagccgaagatgcgtattacattgccgacgcaatgcttcgcgcccgggaggcttcatga

SEQ ID NO: 84595 - DNA, 204 bp, Citrobacter koseri
atgatgcaccactacggatacgttgaagttaatcgcggcgcagttcggcctggaatgttggttaagcacaaagacggcatgtggacggcatcagccaacaagcgcggaaagctctatcttcaccgcggttgtgagcgcaccttcaccagagagcttctagttgaggtttatcttgatggccgcggcggcggactgagtcattaa

SEQ ID NO: 84596 - DNA, 285 bp, Citrobacter koseri
atgaacgcatacctcacttacgaccgaatcgaagatcggtgctgggctgagcagcagctcaccgacgagaaagagaagtggctcgacgaccgggcgcagcaaatcatcgacatgatgccaaaagagccgtccggcctcttccacttcacgatcccgattgactccagcccatacgaaggacttcgcagcgataaagctggcgaggcctacaacgatttcatttcggcagttgcttacgcccaggcggaatacgactgggaacaccgtaccggctgcccgttttaa

SEQ ID NO: 84597 - DNA, 1053 bp, Citrobacter koseri
atgacgccagcagcttattacaacgaaatcgacccgttcgctgcgcaatggctgcgtaacctgatcgccggcggtcatatcgcgcccggtgaagtagatgaaaggagtattgaagatgtcacacctgacgacctgcgaggattcacgcagtgccacttctttgccggaattggcgtctggtctcattccctgcggctcgccggatggcctgacgataaaccagtctggacaggctcctgcccgtgccagcctttcagcgcggcaggcaaaggtgatgggtttgctgacgagcggcacctatggccccacttcttccatctcatcagcgagtgcagacctcagcatgtctttggcgaacaggttgcaagcggtaacgcaaacacatggttcgaccttgtacaagcagacctggaaggaatggaatacgccttcgggcttgtgccgtttgcggcagcgggcatcggtgctccgcacatcagagagcgggcctactgggtggcccacgcctgtagcgaatacgaatccgcaaccgggattgcagcatgtcgccggggtggcgcgattgacgggctggcagacgccagttgcgaacgactcaaccggatcgactcattgctacagcgggaagaatcaagacggaactccaaaggtttgtctgaagctaccgggaactgttctgctgacaggctggccaacaccgacaacgagcaactctcgatcaccatcagtagatgcagccatgaatatgtatcgacaggacggcagcaagacccagcagcgcttgcaggacttcgcagggattgccgggcccttgaggttaacggtttttggcgagatgcggactggctcttatgtcgagatggaaaatggcgtccagttgaacccggcacattcccgctggttgatggggctgccgcgcgcctgggacgagtcgagccctgggtggcaagagtggcaagcagcaaccgcgtcggaagactcaaaggctacggtaacgccataaacgcacaggctgcggctgaatttatccgggcctatatggagagtttatga

SEQ ID NO: 84598 - DNA, 219 bp, Citrobacter koseri
atgactccagaacaggaaaatgccatccgcgcacagggacgtaaatgcgtcgatgaaatccgccaggcacttaaagccagaccaaagccgaaatggaatgtggtagtgcctccgatcctgaaaaaacatcaccagaagattgcgcctatgggtatcagccttgaggcatttgtcagcagtataggcagaatgcaaggccgatatggagtggaatcatga

SEQ ID NO: 84599 - DNA, 222 bp, Citrobacter koseri
atggcagacatcatcgacaccgcagcagagattgaagagcttcagcgtaacgctgccctttccgctcaccggatcaaccgcaacgccgtatcagctgagcgttgtgaagaatgcgacgaaccaattcccgagccgcggcgcactgccgttccaggctgccagacgtgcgtaaattgcgccattgataacgaactgaagaataagcagagggggagacagtga

SEQ ID NO: 84600 - DNA, 705 bp, Citrobacter koseri
atgatttttaacggcgagatggtgcgcgcaattctcgacggcagaaagacgcagacgcgtcgaatcatgaaaaatcagcctgccggagattaccccgacacaccagccctgatcagaaatgtaggtggtggttttcagtggtacgggcattacggagaaagcagcatcttcaattgcccgttcgctgccgtcggcgatcgcatctgggtgcgcgaaacgtggggcgtagttagccacgaactggatgaagacggtcgcattcagctatggagccctgaccgacctgccacagctattcacgaaatgccgtttggtaatgggtactactctggtcacgctatttacgcagcagatggagagtttacttggggtgatgacgatggctatgaagatggccgttcgtgctggaaaccatctatccacatgcctcgcgcagcctgtcgcatcactctggaaattaccggcgtgcgggttgagcggttgaatagtatcagccaggaagatgcgcaagccgaaggcatggagcttacaggatggcggccgacatattctgacccagatagcggcggagaagtctggactccatatgacaactttgcgcagctgtgggaatcaatctacggcgaggagagttggaaggccaatccatgggtctgggtaatcgaatttaaggtggtgcccaatgttcaggataatccagcctaa

SEQ ID NO: 84601 - DNA, 240 bp, Citrobacter koseri
atggggaagatgacatttgtcgttgagtttgaggatggcactgagccacctgtacattccgctatggacattcacggtggacgattagtttcagcagcgttttatgattatcgtgatgatttacttagacctgagcagcgcgacgttgttcttatggcactgaataaattgtcctgcgaagaaattgaaacaagtctccacgctgaaattatctataaagcagaactgcttacctactga

SEQ ID NO: 84602 - DNA, 1905 bp, Citrobacter koseri
atgtcatggatttatcgcatttctatgagaatgaagttatttatcgcgttattccctctgctacttgcgctgatatggtttgccggttcaggcatgctcagccgcatcggtaccgaacgacagatggacactatcggtcagttaacaacgcttgcccgcagcacgggagacgttgttcatcaactgcaacgtgaacgtggaatgagcgccggttttatcggtgcgcgtgggcagcagttccgcgatgaaatcctcgtgcagcggaaattaactgacgacgcattggtaaagttaaaccaggcgttagcccggacggatacgaatttaatacagggcaatattgccgccacactgaaaatgtttaaagacaatattcagtccctcgacgccacccgtaatgcaataagcgcgctgaatatagaggcgtcaaagtcgacgcagttctatacgcagaccatctccgggttgctgagtttcgttggtggtataggtcagttaagcgcctccggcccaatggtgaatgagctggcagccttctatagcctgctgaatttaaaggagcaggccgggatcgagcgcgcactgctcaccaatgtcttctctgttgatcgctttagcgacggtcaattccgtatgctcagtgatgtggtgggtaaacaagaagcctggctgaccgccacccgccgctttagtagcgaagctcaggctgcagagctggataaagcccttgcgtcggccgaagtcacccgcgctcttgagctgagaacgattgccttgaataaagcgcaggaaggtggatttggcgttaaaccgacggactggtttactgcccagaccaaacgcattgagatacttcgccaggtagaaacccaggcggcggatgccctgctcgcacattcggcggcactggcccacaacgcacgtgttgactggcaatcctttctggcgatcagtctgattgccctgctcattgctattgcctttgccatgatagtggtgcgcagtattcaacaacaactaaccaacacactgaaaaccatcaatgagatggacggcgatttgacccgccgcctcgatgtaccgggtagcgacgagctctctgctcttaatcgcgcctacaatcaggcaatcgaaaacattcagcatatcgtgcaggaaattaaatcgggtgcgctgatactcagtaacgccagcagtgatattaccgacggtaaccaggatttggctcagcgtaccgatgagcaggctgcatccatcgttgaaaccgccgccagtatggaacagatatcgacggctatctcccagacggcccataacgccagcgaggcggagcgactgacccagtcgatggcaaatgatgtcatggatgcgacccgcgtttccaacgaggccagccagagcatggcggctatccgttcgtccagcgacaatattttccagattgtggcgtcaatcgatgagatctcgtttcaaaccaacttactggcgctaaacgccgcagttgaagccgcccgcgcgggggaactgggcaaaggtttcgccgttgtggcggcagaggtgcgtcatctctcccaacgctgtgccagagaggccagcctgattcgggagttggttaatcagaatatgaataacattggcgaaggggtgcaacgggtttcggcgtccgaggcggcactgaaagcggcagcggatacaaccgggcggatgaagcaatatgtcagtgatatcgcccgcgcagccaatgaacaatcgcttggcgtaacacaagtgcatcaggcactgaatcaactggagcaggtcactcagcaaaacgcggcgctggtttcccagatggcaaccgccagtcaaatgcttgacgcacagtcgaaatcgatgtccacgcttgttgaccgctttgtatcctga

SEQ ID NO: 84603 - DNA, 609 bp, Citrobacter koseri
ttgagaaaagatatacaagcgggctataaccatctgatgttagtgcgggctaaatcacaaaaacgagctgaagccctcttcgaaatttacaggactcatgcggatcttaacccggtattaatacatagcaaagttccaaaccaagctagaattttcgaagagattgtcctgaaaaaataccgaatcatcgtttgtgtggacatgctaggggaaggttttgatttgcctgaacttaaaatcgccgctattcatgatcagcacagaagccctgcagtcacattacagtttattggccggttaactagggttgataattctcttgggaacgcaaaatttgttgccaacattgcaaaccaaaagactgatcaccaaatgtcagagctctataaagagagtgctgactggggttctgtgatccgggatgttagtcaagaaaaagttagtaaggaaatagaaaaagagtcattcagtgcgcagttttcagatgagaaagacgcagatactatctttgggttgaatccgaatccaaagattagtgcaacagcctatcatctttcccccaagaactggatgccagaaagagcaaatgaaatgtcggttcaccattaa

SEQ ID NO: 84604 - DNA, 135 bp, Citrobacter koseri
atggatccactgatagagcaagtaagacccgaagtcgactatttagggtattcagaatgcaccgctaaaagctactgtgaacacttgcaaaaactgagtcgttacatcaacacacacaggctgatatacgactga

SEQ ID NO: 84605 - DNA, 1032 bp, Citrobacter koseri
atggctgatgagaataaagtagacaaactaattactcttgagagggttcttgggtcagaaatatcattccaaccattgcaaaaaggaaattacaatcatcctcaacaactatcaatttcatctccggaactgcactctgaattagttagatttttcggctcaccagagagagcattttttaccacaaacatggatgtgaacagactggtgaaatacggggatggttcgttctcttctatggtcaaaggagttaagggaattgctgggcatcaagggtttgatgctattgattcgattgaattagctaatgacctttttatgcatataggaaatgcattcaacaatgcagttgctaaaatatatgcaagctatgtagagaaaattaatcttgaagtaaacaatgtttatcaacaatttatacttaaagacttcagcaagataaaatcaatctcttttttcttaaaagaagtttactcggatatctacggcgctggatttaataaggagcaagctcaggcgaccttgacaaatgttcaacggtcaagaattgagctaagagagttagtatatagacacatggaaaatatccgttcaaacatcgctcccttgcaggggtttataccgatagacgatttagcaagcaattatttgagttgtaggtactgcatctcactttatacgattgcattggtttctgaaactatactatccaataggttagatgataatggatttaagtctcttaaaacaaaggtttcaaatactctggatgagtttaacgaattgactaatgaggtgaatcgtaatcttgaggctcgtttctatagcaaccaacaacaaattaataatcaaatgctttgggcttataatcacttagctgctcatcagaaaagcaatgagaataataatctcaacaattttgcaagtaatcatctctcgcaattttgtaaagataccgaactaagcaaaattgatgaaatctttgagtccagggataagctgttgtcgaatattgttatcactgaagaataa

SEQ ID NO: 84606 - DNA, 312 bp, Citrobacter koseri
gtgctaataaaactgggcaatctgcacggtaaagattacttgttccaatctcgggtcggctcttgccaacatatctcaacccggcaatacaatcgcatttttcatggatgggcagcaaagcttggtcttgatgattcgctgtacggcacacactccatgagaagaacaaaaccttgcctgatctacgagaaaaccaagaatctccgggtgatccaacttctgttgggccataagaaactggaaagcacagtccgttatctgggcattgaagttgatgatgcgttagagatctctgaatcgattgaagtctaa

SEQ ID NO: 84607 - DNA, 1101 bp, Citrobacter koseri
atgcgtaaaatatttataatcctacctcttatgtcttgtacttatgcgaatgcagatgattgtgaaagcatcgttgcattatcaagagttgttcaaacaacaacacaggataagggaacagttgaagataatgctagttatttttgtagcgaatatagtaaaggaatcagcacttcaaatgatacgaaatttggagcggcttttaaattcttatcagctagttttggaaattcaaatgctactgttactgatgttgcgagtaaatactgctcggccggaaaaggttttaaagaaagaaatgatgcatatagacaatatatagaatccattgctcctggagcatatgaatcctatcagcaatgcattaagatgaaaaatgatactaaattcaatgttgatagtgtactaccaaaggaattttcaatgtcaatagggtttgcatcttcagaccttcacaaccaaaatgcatctcttgtctattcaacatctgatggcgtaacttgtgcatggaatgattcgaaaactaaatccaccgttgttccatcaggtgctacaacatttcttgaatgcaaacgatctaatcaaactcaaaaatcctatgtgaaagtgataagaactgatactgctacttatttacctctaactctaaactggcaagcttataatgaccaaggacttcctgttgatacattatctgcatttgatggtagattgaaaaagattgaaatagaaatctcgcaacaacagaaagacagtgttattggatttatgtctagcaactgtccatcaggttggattcctgtaccaaatgcacaagggcggtttctaagaggcattgatagttctggaacaacaataatcgaccctgcgggaaaacgtgttccaggtagtattcaagaagatatgatcgcaaaacatacgcatacttaccaatctgggtttcatacaggtcaatcaaacaatggtacaggtgctgacccaaataagaaaaatccacaattagttaataccgatgaaggtaaaacacaggatggagaattgggtccagaaacaaggccgaaaaatatggcagttctgttctgcactaaattattaaattga

SEQ ID NO: 84608 - DNA, 3240 bp, Citrobacter koseri
atggctgaaagagaacaagaaaaaggggtggcgccatcaaaattcatgcgcgaactgcgtcctgaattttactcggataccagcgatcgcacagcatatcagctcgatgcctcggcacttgagtaccacctcgatagtattacatcgcgtaaccagacccatgatttcgagatattttgtcgcaagttgtgcgaacgcacgatctgcccaaacttgaagcctgctaccggtccggagggaggaggggacagcaaagctgattcagaaactattccgattgccgacgagattgctactctcacgtatgtgggggacgcaaatgctgcacaggagcgttgggcattcgctttcagtgctaagagaaagtgggcggagaaagttcgcaatgacgttgcaggcattgtggctacgcagcgtggctatcagaaagtttattgtgtaacagcgcagttcgctcgggcgaaggatcgcgcccgcgtcgaggatgaactttcgaaacagtacggtgtgaccatcactattcttgaccggagttggattgttgatcaggtcgtcagtaatgatcgtaaggacctagcctttaattaccttggtgtagggcaggaggttgcaggctcaaggcgtctggggcccacagattactcccgctcacagcaacttgaagacatcgagaaaacgctcggcaatccggaggcattttctgggatgaaaatgcaacgagttacggaatctctggtggcagctaagttgtcgcgtaatttagagctcccacgaatcgagacagatggtcggtttgctcgtgcaattcgactcgctgaacaagatggaacttatcgccagaagttggaagcgcactacgagtccatctggaccgccttttggtggttcgatgacatcgcgtatttgaacggaaggtacgacgagtttgcgaatctggtgagcgacacggatcacgccataaaccttgagtttctttgtaatctagtacaattgctattcaactcggtcattcatcagcatttgacggtcgaagaggctaggcttgaagagcgagcatctagattgaccgagaggttaaagctaattgctgagaataaagaacgtccaaataatgccttggaggccctgtcgtcgttactcgtcatagaagtcaatcaggcgatacttaaacaagatactgaaaaactgagttcgctatggccgcagttctcggatgtcgtcaagcgtgcgagaggtctcggtgagttttctgctgagcgtttgactaaaatgattgaggtgttcgggctcgtcgccggtaaggacagtagttatgtccaactggttgatgaggtagcagcgtttgtttctgaacgtaccggtgaggctcagggggcgttagtgcttctcaagcgagcgcaacaactcgatttcgaagataacttcgaaatcattcgtttgttgggcaaagccgcgcggcaactcactaaaaaagaatatgccgattctctgatcgaagcgctgcaactgctcacgtttgcttatcgtagtgccggattgctctgggctgcgcgggctacatgcatttttgcaatggcttcgatgttcatcgaagccgaggaggacagtgacctttcggcttcgatcgtacccatggttatggccctcgcttggattgctgtcgaacttcggcatcttccagacgctctcgaagctgttcggttagttcgaggttgtacggcgatgcttccgctcgacgactcatcaaaagatcgtatcgcgaagcgacttacggagttagatcttatcctggcgagccaaatcctaaatttcacagcggaagaacttcaacacgttgtgcgattacctgacgttcttggtggactcggtctgcaacagagtcgaaactcgctgatttacgcgctcggccatgaagccgaacttcgtcgggagggatcaataccgcaagaagagacgccagagaaggtggccgagttatttactttgcttgctagccaaccggtatctagcaaccagcatggtcctgtcatctttaacgaggcagactcgcagtgccttgtctcaagagttcagggcattcgtgtggcagtctttcacccgtgctccgatgccttagttcttgctgcagaagcagtaataggatccgttgaagcattttttgcaaccgcaatcgaaagcggcgccgtagcgcatacagagaacttcactatatcacttcaagatagttctgaagtgctggcacctgactacacgatcaatactgatgaaatgacggcgatagttcgctggccgactgggctcaaaccagctacatttgcccggcaggccgacatccagaaaatgctgattggattggctgctgagatttttgctgccacttgctacgtggaggatatgcgaaaaacgatcgaacatctcttcagcaatgaggcggtgcttgatcgcattagcatggtcgtaattgtcggcaatagtcggcaacgcgtattcaaggaagggctatcgaagctcagtgattggacgcagatggcgatatcggagttcactcttgagtcgtcgcgtcccgtaatcatccgccgcttattagacacggttgaggatcaggaaagatgctcgacggtaggaaaacgaagttccccaaccctaacaagtgatcatcgcgatctgggtgttcgctcagttatagatgttcatctttgggatcaagctggttggaatggaactgcttttactcattgggggccctcgtatcctccagcgattgcgctcatgtttaagcacgaggatgccgcgaggaagattttttcacgttggcgtcaacgtctaggaacggtcgataagcaggacgaaatttacctggcgattctgcgtggaatatccgttgacgaaccggcgcattaccgtgttcttatcacttctaggctttctaatgatgagggcgaaacgtcaggcaagaccttcatgatggcatcacgtatgcaaaccatgcatgcagaaaccgatgtcaacctgatccgctttcttaatatttacaggcagtcacgcgcgtatttgcttcttcctgcgatatttaatggacgggctgagccgaagtttattccagagctagcaatcctaaagcgggagcttagtgtaaagaacgctatcgaggtgaacgagcatgacgttgaggtgatggctcttggggcagaagagtattgccgtcggttcggaacgtctgggcctggcaacagaagttag

SEQ ID NO: 84609 - DNA, 3501 bp, Citrobacter koseri
ttggagacgactgaagaattaagcaccttcctgacggccgctacagttgacggtattctcgggcgcctcctctatcgcggtgcagcttggtcgttgatgcgcaagaatggcgtattgccgcaaaacgctccgccgcttggcgcaaccatcgaaacagatcttgccgagcacggttttgccctgcttcgaggcgcaatggcactgcgggctcaggctggggcttcggaactcactggcaaggcctttgagcgcgcagccaacgccttcgaagccctcgtgcgtaatggtgatccagagtcgcctgatcgcggattccgccgcaccattgctgctgcagcctaccatctagccggcttctcggccgtcgccttttcaatcttcaacgagatagaggaagaccttaacgtctcacccggcgaaatagcgatccgacacctgatactgcgcgatctcgatcaacttcgcggcttcgttcgcgagtggttggatgatggggctcacggcgatgagcagatcgcggcggccctgcagggcggagacgctgacgtcgacgaagtactgtcgacaattctcaatacgacgatctgccgtgccctggcatttttcgacttcgcgcttgagacgggcgaggttgagtcgttcgaagccgcgcgagggctccttaccaccgctgtcgggcttgccgacaacgctgagaacgtcccgctgtggtggatctcgaacctctgccgtcacctgatcgacgacttgtggcaacactcactacaccagaatttgccgactgagccacccgagggtgcggaggaaaaatatcccgacctgcggcggttgtttatatcttccctttacgcccgcaagacctcagaagtggagctatggccatcgcagcgcgaagccgcccagcgctccacagacgtcacggacgatctggtcgtcgccctgccgaccagcgcgggcaaaacacgggtggcagagattgccgcgttaatgaccctatcctccgcacgccgggtgctaatcgtcacaccgctgcgcgctctttcggcccagaccgaacgatctttcaggaagaccttcgcgcccctagggtttggtgtctcttctctctacggcgccagcggcctttcggccggtgatgaagacgccctccgcacacgggagatcatcattgcgacgcccgaaaaactcgacttcgcgctgagaagcgaccagacgttgattgacgatgtcggcctgatcgtcctcgacgaaggccacatgatcggtcctagtgagcgcgaaatccgctatgagacgctcgtgcagcgtctacttcggcgcacggatgcggtagagcgccgaatagtttgcctttccgcgatcctgccaagcggcgacgaactcgacgaccttaccgcatggattcgttccgacgaacccggggagcctgtgcgttccgactggcgcccaacgcgccagagattcggcgcgcttacctggcgaggtaaggacgcgttgctacggctcgatctagacgacgatggccccttccttgacaaattcgtcgcggaaaaaccagcgctcgggaaggagaagaagccctatccacgcaagaactcgcacctcgctctgttcgcggcatgggagttcgcgagccagggcaagcgcaccttgatcttctctacccaagcaaactgggtcgagagctacggcaaacaagtcgtggacctctgcaagcgcggctatctggattcgttgctggaagacgaggctccaatcgcccgcgccctagaagtcggcaaggaatggttgggcgaggatcaccctgccgtggccagcctgaaggtgggcgttgccattcatcacggccgactgccgagcccgttcctacgcgaactggaactgcttctatccgaaggagcgctaaaggtcattgtcgcttcgccgacgctctcgcagggcctcaatctcaacgctgccgtgctgcttgtgcccgcgctatatcgcgcctcagagaagatcaaaggcgaggagttcgcgaacgtggccggccgcgccggacgtgcattcgtcgatgtcgaggggctgatcgtccatgtcatgttcgacaaaatcaaatggcgaaagaaagaatggagggaactggtcgcctctgccaaggccaggacgcttaaaagcggccttattcagatcgttgccgaaatccttgagcgtctatcacgcgagggcgtcttggatatagatgacgcctgggaatatctcgccaacgcccgcgaggcttggaggtcacctgacgaagaagcagtggtagcagaacgactggcagccgcagtggaatacgacgcttccaccgacgatgaagacgagacggatgacgaggaggaaaccatcgacgaggagcccctgtctcagctcgtcgaacgcctcgacgccaccgtattcggtctgatcgaagccctagacgctgatcgcgccgatctacctaaacttctagacgaggcgctcagggggtcactctgggctcgccaaattgctcgggaggacgaggatgtcgcttccctgcaccggaaggtattcgaagcacgcgctgctctcatctggaaagctaccaccacccctacgcgacgcgggcatttcgcgatgggagtagggctcgaagctggcctcctcatcgacgctatggcggacgagttggccgaactcatcgacaaggcagacagtgcagcgttgagcggcgacatcaacgaactcgccgatgctctcggcggactcggcgaacgcctgctgttcatgcggcctttcatccctgacaaggcgaacacgctgccgccgaactggaaagctatcctacgtagttgggtgtccggggaagaagtctccaagatcggtccgcagaacatgcgggcggtcgaagatgccttcacctatcggctagtctgggcgctagaagccgtccgcacccggcgcatgtccttcggctggtcgccggatacggtggcgggcgctgctgcggctgcggtcgaaaccggtgtcccccagttcatgatggcgatgctgatccgcgcaggcctgccgtcacggcgcgcggcaatggcggccatcgaagatgctgaaccagtcttcgtcacgcccgcagaaatgcgggcctggcttgaatccgacgagattacggccaaaaccgacgtaggcgactggccaacacccgacacctccgcgttatgggcccgcttccgaaccgaagctctcagcggaggcatccagaaatggtccgtcgaacgctataagcgcctactcgataccgagtcctccccgcccgctggcctctatagaatcctcaccgacgaaggggacgcgcggacttggctggcaacccccgactaccagcggatcgccgtcttcaagaagccagcggttgatcccaagcccagtctattctcgggacagttgccgggcaaaacccggctcgtggatgctctacgcgtcggccgcggaaagttgcgttggccgactgccgacgtctaa

SEQ ID NO: 84610 - DNA, 777 bp, Citrobacter koseri
gtggggctatatgagaagtggtgtgagtccattaaagaaaatgacggacgcaagtactactggacgtatgtcgagaaagacggcggccgcgatgatatccgcgaggaccttgctgaaaccattcgctcgcactatgaccgacttgaacgcatcgccgatgacgtagggcgactaggatacaaggttgcagccaagatcctcagcgaggcaatgcctaatacacccaagggacgctctggcgacctcggcgaaattcttgcaactgaactagtggaggaagaaatcggtctgcgggtacccgtgcgccggctccgctacaaggatggccgtaacatggccatgcgcggcgatgacttcatcggtgcgggctaccaagacaataagctctggctgctaaaaggtgaagctaaaagtaaccagaagcttggcaaaaccacggttaccgccgcgcgcaaggtcctcgaccgcgacaatggccgctgcacgcctgactcgctgctgttcgtcgccaatcgcctgctggagagcaacgacgctggcaataacgcactgggtcgcgaccttcgtgacgaagtgggtcttaagtctatgccagccgattgcatcgaccacatgctcttcaccgtgtcgggtaacggccctcacgcttccctgaaagagaaccttgaagccgctggagtcaacagggaccattacgtcgtgaacattcacgtcgaagaccatcaggatttcattgcggcaatgtacctagaggcggaagatcttggagacgactga

SEQ ID NO: 84611 - DNA, 177 bp, Citrobacter koseri
atgtcagagattaatccacacgatgccgcgcagactttgtcccaggagcgggaaacgctgcactacttggtctggtgttggcacgcggagcgtataactgtgctgtatggcattagtacagggttactggcaaaacgatgcagcgaaatgcagatacccaagccgcttgccgggtga

SEQ ID NO: 84612 - DNA, 702 bp, Citrobacter koseri
gtgaatgggaaattaaaagcattaatctatatagttgtatgtgcaactattttttttgtattttttgctattatatcattgtatcagacgattgatgataaaaaactttatgaaaaaagtttttgcctaagtagccaatgcctagataatttcgcaaaagaagtttcagggattactttatacttccaagcgtttggttggctaatgacgacttttgtgactgtttttggtgtgattatcgctttgatgacttattattcaggaattaaaaatagtaataatagtaactatactgctcatcttacaatgtttcgagagttttccagtgctgaactttgcaaaagaaccagtatttaccctgaaggtataaacctatttcgttggtataaggtaatgttcccaaaagcaaaagacggggatatttcagtatcaaataattacttggttataatcaacaaaattcaggatgttattaatgaggcaaatgcacacattactgatgaaaataaagattacaaatataaaactcatcaaagaaaaatgatagcagtgcttgatgagataggcatacacattagcaatggtccaaaaaatacttttatcgatatagaggggcaggtttttgattatattgacactgtgaatctatcattcagtcataaggttgttgagctaagcaaaattaaaagaagatacatttaa

SEQ ID NO: 84613 - DNA, 1221 bp, Citrobacter koseri
atgggtagaccgtacgtaactttgtttggtgaaattatggacaaattcaagccatacagtaaatcaaaagcccctatttcatcacttcagaagcttgctcaaactttatccatcccggttgatgaactgaatgaaattgcggcactaacggaagatgagaaatacgtaagaaaggaacttccaaaagcagatggaagcaaaagagtcgtctactcccttcatccaaagatgagattgttacaatctcgaatgaacaagagaattttcaaagaattagtgatcttccccccatttctctttggttctgtacctagtaaaaatgatggtgcaaattccaatatcaaacgcgattatgtatcttgtgcaaaggctcattgtggagctaaaacagtattaaaagtagatataagtaatttcttcgataatattcataaagatttggttcgtgatgtatttaataatgtattgaacattcgagacgaagcattggaatatgtcacaaatttatgttgtaagggcgattttgtagttcagggagcattaacatcaagttatatagcaactctttgcctttacgaacaagaaggtgacatttatcaaagagcgaaaaggaaaaatctagtctacacccgtttagttgacgatattaccgtatcgtcccaaattaatggttatgatttcacgcaaatattaagtcatattgaaaacatgctttccactcatgatttgcctgtaaacaaacgtaagactaaaatatttcattgttcatcagaaccgataaaaatacatggattgagagtggattacaaatctccacgactacctagcgatgaagtgaaacgcattagggcatccctacataatctcaaaaaacttgctgtaaaaaacaataccaaaacaagcatcgcatacagaaaagaatttaacagatgcatgggccgcataaataagctcggacgagtcggccatggcaaatatgagttatttaaagaacagctattggcgattaaaccaatgccatcaccacgagatattgcaatagttgagactgctgtaagtagtctcgaaatttcatgttcaaaaggcaatgataacaaacattggtataagagaaaatataaccttacattatataaattaattatccttactcgttcgaaagcatttgatggaattgtagacgtgtttaaagaacgtttaaagaaggtaaggccagcgtga

SEQ ID NO: 84614 - DNA, 501 bp, Citrobacter koseri
atgaaattatctaaattctctgagctagtagcccgtatctggtcgaacctactgacgcaacgtcgcgacccggaaattacgatcatcgtccactcgcctggcagcatcggcgctactccatccgttgaggtcgagtccattcaggctggcttcgactgggacgccgggcaggtgttgatttacccggcacaacctctgaccacgctgacacctgaacaggtggcggacatcaccgctagcgtacgcaaaggccagtcctggcatgcctatgaatcgtacaaaaagcacaaatcccagttggagaatgctgcgattgagcatgcgaagctgcttacccagcgtgatgatctgttggctgcactggtattttctcgcgaggtgtttcacgcgatgagcatgcaggccagaaccaaaggcgaccagcagtatttcactgacctcttggccgaagggaatactatcgacatagccatcgccagcgccaaaggcggtgcaatatga

SEQ ID NO: 84615 - DNA, 489 bp, Citrobacter koseri
atgagtaaagagttattgaaacaagccataaagaacttaaaaataagtgacatacatttacgctcacttgatgttaaagtgtctgacacagaaagctttgtaactattaaaaatcataaaaaagtaactcagtcttataaatcaatggttaagatagaagaggtaaagttatcatcagatgcagcagatcggttgttgtatatctttagatacgctataggcgttagattagttaaagaagaagatggtgacgatgtaaatgcccaagctctagtttcaattgaagcagaatttgatgcatgttatttcgcgcaatgcgaacttgaaaaaccggtccttgaagcattttcatttaacaatgtaggctataatgtttggccatattggcgtgaaatagtgcaaggatcatgttcaaaattgggaataaacccaatccgtgttcctttttataaactacaaagtcgccctcagaaagaaaatgaatcctag

SEQ ID NO: 84616 - DNA, 459 bp, Citrobacter koseri
atgaaaaatgaaagtctgtttttttcacaagaagaaatggatagttacgaacaccagcgtatgtatgctggagaggaacttacatttgatattactgaagatattctcatcgcaatggaagacaaaggtataactaaaacccagctggctgaaagattaggtaagtcaaaagcatacgttagccaaattctcagtggttccaggaacatgacactcagaacgctctcagatatatgctttgctatgggcattaaaccagttgttgagttcacagagaatgaagttgaaataatctctgaacagacaatttcctttgcttctccggagagttttcatactgattgggaactttcttcagacgtttggtgccaagatcagcagtctaaagaggatttttcagcaaatcataacgttctttatcgccaagataaaagatattggcaaaaggtagctgcatga

SEQ ID NO: 84617 - DNA, 465 bp, Citrobacter koseri
atgactaataaccagttaacaggcctcggcgcggatcatcctgttaacggcccgcttacaaccgagcggctgggccacgttcgtgacgtgttacagcgtaatcttcaatactcaaacggcggaagtatggattacatcaccgcagatgctgtgaaagcgattgatgaattgctggaagtgcgaaatgcggagcctgtggcatggtcggcaaaggatgtgagaaatggtgaccagtcgctatacagcctgattgatgatgtgaatgcggcactgtcagataaccaatggcttgaaattacgccgctctacgccgccgcgccagcgccggtagagccattgaccgatgaacagatcgacgatgtgctcgattctcgcggcaatattttatatgtcattgccgacaaaagggagcgcctgcgtatgtttgcgcgtgaaatcctccgcgctgcaatgggggtgaaatag

SEQ ID NO: 84618 - DNA, 1863 bp, Citrobacter koseri
gtgagaaatagcgaaatcattgttgataactttgctggtggcggcggtgcctccactggaattgagatggcgactggccgcagcgtggacattgcgattaaccacgatccgaatgccgttgcgatgcacacgacaaatcacccgaacgcgttgcattattgcgaatctgtttacgatgtcaggccgaaggtcgcgactgccgggcgtccggtggcgctggcgtggttctcgccggattgccgtcacttttcaaaagccaaaggtgcgaagccggtagagaaagcgatccggggtctggcctgggtagttctgcgctgggggctggatgtaaaacctcgtgtgatgaaactggagaacgtcgaagaatttaaaacgtggggccctttgctcgctggtgaaatgaggccagacccggcccgtgctggagaaacctttgaggcattcattggtatgctgactactggcatccgggctgaccacccggcactggcggagtgctgtgaatttctgggtattcctcttgatagtgaagacgccgcgaagctgatcaaagggctgggctacatcgtcgagtatcgcgagttgcgcgcctgcgactacggcgcgccgacgattagaaagcgattctttatggttatgcgttgtgacgggaaaccgattgtgtggcctgagccaacacatggtgacccgaaatcaccggctgtccaggctggtaagctggcgccgtggcgtactgctgctgagtgcatcgactggtcaatcccggcaccttcgatcttcgatcgcaaaaagccgctggcagaaaatacactaaaacgcatcgcgcgcggcattcagcgatttgttatcgacagtgcgtcgccgttcatcgtgaagtgcaaccacaccagcagccgttcaaggtatgattgtttccgtgggcagccactgggcgaaccgctacagacgatcacgaaaactcctggttacgctatcgcagtgccacggttgacgccgttcttggctggcaatggcggcagtgcatatcaggctaagccgcgcccgctggataaaccaactcacaccatactgaaacaatcccgggcatgtgtcgttgcgccggttatcgcccgtcaatttggtgccagtatcggccaccgtgcagacgaaccaagtgcgacgattactgctggcggtggagggaaatcacagcttgtaacctcaacgttgatccagatgggctacggagagagaccgggacaagctccccgcgttctacagatcgaaaaccctctggggacagttactgctggtggtaacaaattcgctgttgtggctgcgaatcttattaagcattacggcgggaattatcaaggggcaggcataggactgagtgaacccactcattcagttacgacagttgatcaccacgctgttgtaacatcccatctgattcatttgcgagggttctgcaaagacggtcagaagatggatcaaccggtgccaacgattaccgccggaggccagcatgttggggaggtgaaaaccactctggcagttgagcactacgacgaacagcgcgcgcagcagacgttggcgttcctgcgtgaatattgcggcgaagactgtaccggactggtggatatcgacgggatcacataccggattgttgacatcggaatgcgcatgctgcaaccgcacgagctttaccgcgcgcagggcttcccggactggtacatcatcgatcgggattatcgcggcgtgaagtatgccaaggataagcaggttgcccgctgcggtaatgccgtgccgccacagttcgccgaggctctggtaagggccaatttacccgaactttgccagccgaaagaaatggcagcgtaa

SEQ ID NO: 84619 - DNA, 126 bp, Citrobacter koseri
atgaaaaaagtctctgaactggtgatatgggttctgtttttttccacccttgccgggattggattaacggctggcatggtctgttttttcggcacagccagactgatcgtgagggttatttcatga

SEQ ID NO: 84620 - DNA, 201 bp, Citrobacter koseri
atgaaaactccagtcgaaatgcttgaaatcattgccgctggtatttgtgagagcacctcgttacttggggttatttatcgcatcaacgaattaccaccagaagctgattgtgcaatcgcatgtttaatccgctcaatgcagaaaacgaatgaaactgcatatggttatattgaacaactcagcagcaaaggcggtgaataa

SEQ ID NO: 84621 - DNA, 192 bp, Citrobacter koseri
atgaaatcattcaaaggtctttctttgcatccacatgatgctttcaaaaatatcggcgtttttattgaagccgcaggacttcttgcagtcgtaactgacgaggaatatcaggaattaagtgatgtcatactcgattttgctcgcaagtatgcgagagtcacccaggatattgaacaggagaaactaaaatga

SEQ ID NO: 84622 - DNA, 420 bp, Citrobacter koseri
atgaatattcaatcagcaattagtaagtgcgacatagctcgcgcgattcttttggctctaatctcgtataagaagacagccagcgccgacgcagatgtgatccagtctctatctttcgcggtagaagcgtacttggatgacgctaaagaggcatgtgaaaatcaagcacaacccacaccgctctacgcccacaatgacgacagactgcttttaggtgaccgcatccagcttgcccgcgagaacctcggacttagcgaggcagatctcgcacgccaactcaacacctacagcgatcatgttactgactgggagagcgggatcaccgaaccaccggcaagcatgattattccactggcgaatgtactcaaatgtgatccgatctggttgctgaccggaaagaccccggaggtggcagaatga

SEQ ID NO: 84623 - DNA, 657 bp, Citrobacter koseri
atgaaaacaatgagcgatcgaatccgcgaaaggcggaaggaattgaagttgacccaacaagcactggcagaaatgaccggtgtaagtcgcgtaactgttactggttgggagagtgacggctatcaacccaatggggtaaatattattgcgctttgcgaggctttaaattgcgatccggcatggctagttgctggcgttggggaagccgggacaccacaacaaccaaaacaccgcattcctacccaagtaaaagaaatccccctaatctcttgggttcaggctgggacatggactgaaacagcgccaggagcaaggaaggatgaagctgaggaatggatttatactacggcgactgtgtcagatgaggcttttgctttgagggttcgcggggattctatgaccaactctacaggtcccttatctatacctgagggctccattgttgttgttgatccacacataaatgatatcagcagcattaacggaaagatggttgttgcctacattgatggcggtattgaggcaacgttaaaaaaattcgttgatgactggcctaacagatatttggttccattaaaccctaactacaaacccattgaatgcacagaacgatgccggatagtgggtcaagtaaagcaggtcataactaacttttaa

SEQ ID NO: 84624 - DNA, 264 bp, Citrobacter koseri
atgtttgatatcttacattttgtcattatggttttacaggatactcatgtgaacaagtccgtagcgattaaatattttggtggagtatgcaaggttgcaaaggccttagatcttcgtcactcatcagtctctcaatggcctgaactcatccccaaaggcgcagccctcgaactggagaagctcaccaacggtgctctcaagtgcgatctgagcttgtacaaaggtcgcaagcgcaagaacaagcatggttcgacagaggtgtga

SEQ ID NO: 84625 - DNA, 324 bp, Citrobacter koseri
atggaaaacccgatcgctaaacttgcgcttaactactggtacaaagtgcttatcgctggtggattctttgtgttcctggttaacggaagcgggttgctcagtgcatacccaaccgccgcaaccggatttatctctctcggctgtgctttgtggggtattggtgagtggatcaatcacccttacaaggaaatcctgattcccggcgtctttggtcgccccagtggtaagctctccggatacccgagatcggcaagcccggcgggagtcacatttgatatagttggtgccgttctcatcaccctgggtatcgttaaactgttctag

SEQ ID NO: 84626 - DNA, 885 bp, Citrobacter koseri
atgaaaaacaataccaataaacatccgaacgtttcaagcattaatgttgaaagcctgcctgttattgcaggcgttgaaatcacgacggattccgccgggcgatttaacctgaacgctttgcacaaggcgagcggagcgggtgaggataaatctccgagccaatggttacgccgaaaaagcacgaaagaactcattgaagagcttaagcgtaatttattgaaagagaaccagaatgtaaatttacactctgctcaaaaaccaatcgacaccgtgaatggcggcattgcgccgggcacgttcgcccacgaactgctggccatcgagtacgccgggtggatctcaccgtcgtttcgtttgcgggttaaccagacctttctcgacttccgtaccggcaagctggcgccagtcagcagcagtctgccagacttcaacgacccggcgaccgctgcgcgcgcatgggcggacgagtatgaagcgaagaacaaagctatcggatacgttcaccgtcaggcgcagtacatcgaacacctggaaaacctgttccaaccgggaatgtccccttgccagttctgtaagcaactgaacggtgtcaatgtccagcaggttaacgcgtttctggctgatcataactggctttacgacgaccagccaaaggccagtcgtccactatggcgggttcatcactatgcgcgtgatcaatacctcaccgaacggccagggcaggtggaacaggacgacggtgagatgcgcgacaccttcaagccaatcctgctgcgcaaaggcgcggtatggatttatcggcactatctcaaaggtgctctgccgatgaaaaagagctggaacggggaatttacccacgacaaagaattagcaggtgcagcatga

SEQ ID NO: 84627 - DNA, 486 bp, Citrobacter koseri
atgctaaaaaatcttaatgtaacaggcatactcgtttcaacgctgaacattgtagcctccttttgcttctcggtgttcttgaccggaagtttgactaataacacagatgctttgaatcttgtggcaaatgtattttccatattgtcaggatttcttttactcgtaattacaatgtcaggtgaaaactcaacattaatgagcaatataagtgtgcttgacgcagaaaatcaagaaagaagatttttaatgcgttttaataaatactacgctctgttcttgctttacattcttacactagcattaatttttattttttatattatcacaaaagataaaacaaacacatcaccaacactcacaatgataaaatctgtaattggacactccattgcattccttacatgtttctcattcatccagtcgactttcatacctctaaaaatcaaagagctattcaaagaaaaacgagagctaaataaaaaataa

SEQ ID NO: 84628 - DNA, 822 bp, Citrobacter koseri
atgaacttttctaataccaagaaagacggtctcacgaagaaatgcttagtgagagcttttaaagtaaacacagcatctactgatatcctctttgaccaaatcctaaaatcgaatggctttaaggtcggtactgtaattaagatcagcacagagaaacatctaatgctgaaggcatttgagactgataataactgccattatcttcacgtagccctttacaaccccaaggctcaagtatctattacacctctcaaaaaagcggctagtgacttacttgacgtagaaaatcttgatgaccttcatgcatttttaatagttaaagataatcgcattgcatcattaatgcaaatttcaactaattggtgtgaagttaaaattgcgaaaatcttcaaagaatttggcatttcagtaacaccgacagcaattttacaaaaaaacgtcattcagaaaatcaaagacgataaattaaaagcattgcaccttaatatcgacgtcgaagagtcagattttgttaagactcctggattattagaatcaatcttccaaaaagaacctaaagttaaagcaaaaggaatttctggtcacttaaccattgacgccaaaggtaatgctgaattagctcaatctattgagaacgatcctgcaaactgggttgatgacctagatagcgatttttatattgaaactaaaaagggtgataagttctacagtgatgatttaaaactaacaaaaacctactttactgtgccatatggttcaaaatccataaatgcgaaatatgcaaaagaaatcctggaggattttgtagcaaaagagctataa

SEQ ID NO: 84629 - DNA, 477 bp, Citrobacter koseri
atgcgcacccaactgcatgcagtatcaacgactaccggggcgggtgaattgttcgcgcagctcccgatcaacatcgtcatcaggcatgtggttaacagtctgctgtacatcactggcctctctggtcacttctgcctgtcgctctgctgccgccaccgatgctgcggcgttctcttcggtgcgctgcttgtctgctttggcttctgctttgctggtgccgcgcgcatgtccgaaaccaaaagcgcctgcaattgcggccagcacagcaacagccaggccaataatcatttcaagtcccatatgacctcacaccagcgcggcttgtgctttggcgtaacgttcacggcggtctttaatgccgttctgcccaccgttgatgatctgcgtgacgcgctccacatcacccgaatacaggagacaaccgcgcatcgtgaagtaccatgctgccgaacgggccgcatgttgctcttgcgttag

SEQ ID NO: 84630 - DNA, 804 bp, Citrobacter koseri
atgcggacatctattgagcttttaaatcgggcaagcctcaaatcagtgctttcgaggccaagcgaaggacaaatggctttaactcttctgtgcttggttgaatggcctgataggatccagcggcaatgttatgtgaaaatcttcgcagagtcgcaaggtttaggagttttcaatgaaattcttgggtatttactaacaaaagctgaggagctgcccgttgctccaaaggctggcgttctggtcctcccagaagagttgaaaaaagaaatttcaattcctgttgcgcctgtggcttttttaaccagtaaggttaacggtaattcacccagcagcttttataatttagggcaactcttacagtttgaaagcttatgtaaagtgattgacggatgggaaaaattgccacaaacaattgcatttgatgaatgggttgccaaccaagaccgtaacttaggaaatgtaataattgattctaatttttcagtcactttgattgatcatagcaacatgcctgtagacttggtctggtccgcttcgatgctggataaagaaatcgaaccaagaaatgttttaagtgattttttccgcaaaactccgaatcttccacaaaaaatggaaatcatcagaggcgctaataagcaaacttctagtttgaatttggttcgggaagaaattatgttctgggcagaacgcttgttgaatgaagaacagcgtgaaacgctcatgctttttttagagcatagagcaaaattttctaatgccaggcttagtaaaaaatatgggcttttggcaggtgttgcatga

SEQ ID NO: 84631 - DNA, 870 bp, Citrobacter koseri
atgattaattttgaaagcttaataaatgaatcgtcagaaaagccagaaacatctggtgaatggtttactatccaatggatgcctgatttagctactggtgagaagttaaatattggtgtttgctatcgagataactccggtaactcctatgtccaggttttagattatttcgaacgtatcaattgtctttattctcaatcagcagtattacatctacgcttggcatgtgaagttgctaaagaagcagtaatgttaaatcaacatgttgacagtacatgcattaacgggatttctttcattccgaagggttttgcacagggtaaatctgttgacgacattcttagctcattgttctctaatgtggttcccttagctgtacgtaaatctaaacctaaagaaagagcttattatccaataagtagagagcggttatacaatattatggatgaccacttgaaaaaaactcttgattatgaagagtattttgggatggtccaaccaacaccagtaaaacgggtaagtttggggaaccaaattcagtcattatttttaccgtatacggcaggtcgttctattggcacaattgcatcagcggcgtatgctgacgaaaatacagcaaaatgtcatctgtatgacgcgcagcgagatatatcattagctctaggtaacttccaagagtacaactctggtgcggtgtttattctctctccaaataacgatttgaaggttgagaagagagatcaagttgatttagaaattgataaattttgttggtatttaaaaacgttatctgtttatacagaagttgatagcgagcctttatttttagctgacaaggctgcgtattggtataaaaagaaagctgcatag

SEQ ID NO: 84632 - DNA, 246 bp, Citrobacter koseri
gtggcgtccttttttggaaatttgactatgcacaaaactggcattcctaacggaagcgatacctcttccggaacttaccgctgcgacgactgtggtcacgtaataaccaagccatccaatacctctctccaggtatgtccgaacagcaataagaaagacttcccaactaagcacactaaattcacttggacttcgctgagtggccagggtgatgctgaaaccgatccttatccaaacggcaagtaa

SEQ ID NO: 84633 - DNA, 1644 bp, Citrobacter koseri
gtgaactacgccattgataagttcaccgggacactgatattagcagctcgagcaacgaaatatgctcgatatgtttgcccagtttgtgaaaagggtgttagcctccgtaaggggaaggttgtccccccatattttgctcatttgcccggccatggtacgtcagactgtgaaaattttgttcccggacattccttcattgccgaaactattaaaactatttcaaagcgatgtatggagttacgcttattgattcctgtcggaagtaatagtcgagaatggtcattagagctagtgttgccaacctgtaatttatgtagagcaaagataacgttagatgttggaggcagaagccaaacgcttgatatgaggagtatggtaaagagtcgccagattggtgctgaattatcagtgaaatcttaccgtattgtttcatatagtggtgaaccagatccaaaatttgttacagaagttgaaagagaatgccctggtttaccttctgttggggctgcagttttcaccgctttagggcgtggggcatcgaagggatttccacgagcacgagagttaagatgtactgaaacgtttgcctttctttggaggctccctgttgctccagattttcctgatgaattagaaataaaaagtttagctagcaaactgggatggaatttagctcttgttacaattcctgaaaccctttccgtggagagtatttcatggctaaaatcttttacacaccttcctgttgtccctgctagagcatctattacagcaatttggccattcctaaaccaaaacacaagtattaatcaggtcgaatgtgttcattctgacacaatattgttgtcagcaaatatggtatcaacatcatcacaaaatgttggaccaactatgtacgcacaaggttcctctttattactctcagcggtaggtgttgaaaaatcacctgcattcttcattcttaatccaggggaaagtaagttcgttggtgtttctggctcaattgagcaggacgtaaacttatttttttctttttattcaaaaaaggatgctcccagaaaatacccttcaatagatttggtttttactaaggaaaataaagagaagaccatagtttcactacatcaaagaaaatgtgttgaagttatgatggaagcccgaaggctcggccataaattagaatatatgtctatgccttctggtgttgaaggagtggcgagaattcaagggcaaactgagagtagtgttattaagctggtttctaatgatgacattgcagttcatgatgagagcatgcggttactctctcctgaagcattatctaaattatcggattgcttagcaaactcaaaatatcatgtagaaatagattttttaggactgggtaaaatatttttacctagttcttctgcgttgtcattggatgaaggggaatttattgaattatctcctgatcttcgctctcggatattaagttttatacttcaaatgcgtctcataacccctggttttagtttaaataatgattttttattagttaaaaaattcgtggggttgcagccggaaccacacttattaccgcattatagagcattggtaaaagaagttaagaccaatggatttgaatttaaccgcttgagataa

SEQ ID NO: 84634 - DNA, 1215 bp, Citrobacter koseri
atgcacaaagatccctctataatagttaatgtcaatcttcgcgaagccaaacttaaaaagaaggttcgtgagcatttacaatccttgggttttacaagatctgattcaggagcgctccaggccccgggaaataccaaagatgtaatacgggctcttcatagtgctcaacgagctgagcggatctttgcaaaccaaaagtttataacgctaagagcagcaaagcttatgaaatttttcgcatccggcaatgaggtcattccggataagatttcaccggtacttgaacgcgtaaagtcaggaacctggcaaggagatctctttaggttagcagcattaacttggtccgtacctgtttcaagcggatttggaaggcgtcttcggtatcttgtatgggatgaaagtaatgggaaattgatagggttgatcgcaattggtgaccctgtgttcaaccttgcagttcgagataatttgattgggtgggatacccatgacagaagttcccggcttgttaatttgatggatgcatacgtcctcggcgctcttcccccttataatgccctgcttggaggaaaactaattgcttgcctgcttcgtagccgcgatctttatgatgactttgcaaaggtctatggtgataccgttggggtaatatctcaaaaaaagaaacaagcacgtcttttggctattacaacaacatcgtctatggggcgctcatcggtatataaccgtttaaagctggatggaattcagtatttaaaatcaattggatatacaggcggttgggggcattttcatatacctgatagcttgttcattgaattacgtgattacttacgtgatatggatcacgcttatgcagatcattatatgtttggaaatgggcctaactggcgtttacgtacaactaaggcagctttaaatgcattaggttttagggataatttgatgaagcatggaattcaacgtgaagttttcatcagtcagctagcagaaaatgcaactagtattctgcaaacaggcaaaggtgaaccggatctaacctctttgctttctgctaaagagattgctgagtgtgcgatggcgcgatggatggttccgcgatcaatacgcaatccagaatatcggctttggaaagcaagagatctatttgattttattagtaatgattcgctaaacttacaccagtttgatgagaaagcgaaaacagttggctaa

SEQ ID NO: 84635 - DNA, 681 bp, Citrobacter koseri
atggcgaagaatacaggaatatgtaaaaacaaaaattgtcacagccctatatcagagcatggagatgcaaacacaaagcgttactgcgaaaaacattatgaattatgcaaagaaaaaacaaagaagatattcgaatcacgcattagtaaaatagcagacaacttcatatcatctaaaaaacttacaaaagtgcagaggttaattgataataataaagtaagagaggagatcgtcagaaaaaaagtaaaatacgaatggatatcacagagcattagaagaaaaagtaatttcaacgatatactgaaatcaagggagtggaaaaatacgcagaaactgatgaaagggaaagtcattttgtgcagcaagaaagaattaaaaaaatacattcaaaatgcgtgccagatatatttactgaaactattatacagcaggaagtatcttgataaaaataacacacaccaaagatacattatatctccaaaaggcgaggcaaacccaataataacattaaacctcgaagttgcttactcattcaatccattttctaatgttagcacaagtagcaatgatattattttaattcctacgagaatcaggaaatccttcgccctaaaaaaacgttacttaaaaacaagcttacccacgctaaaaatcacagccataaaaacaacaattccataa

SEQ ID NO: 84636 - DNA, 891 bp, Citrobacter koseri
atgtccaatatcctcaaacctcagcatgatccatgcaatattctgcgcaacagtcttagactgctgcctccgcaagcaactgaaagaatcctgttccaccttagtaaaaccatccactacgaacctgtgatcggcattatgggtaagactggctcaggcaagagttctctctgtaatgcgctgtttcagcagcctgtttgcctgactcatgatttaaccgcctgtactcgtgagccgcagcgccttgaactaacagtgggtgaacgcggtatgacgctggttgatttacctggtgtaggtgaaacacctgaatacgatgaagaatatcagtccctctatcgcagtttactgaacgagcttgatctgattatctgggtgctgcgtgccgacgatcgtgccagaacgacagatatcgatacatatcgtgcattgattgaatatggggctgagccatctcgttttctgtttgttttgacgcaagccgatcgtgtcactccgctacctgccaccagcatgtcattgccttcaccagagcaggtgatatcgctggcgatacttagctcgcaggcggcaggacaattcccctcttcatttccgataatggctgtttcatcgcacaccggctacaacctgccagcacttgttgagctgatggtgcatgccttgccgggacaggccagtagtgctgtttatcgtcagttaaagtcagagcataagacagaaaaagctgaaatcgctgtccgtcaggcttttggtgatatcgccgggacagcattcgatacggtatttaaccccgaggtgtattctcctggctgggccgttttactcaggcggcttcgtcggaaattagtccgtctcgctgagcgtctatgggacaggatctttggttga

SEQ ID NO: 84637 - DNA, 690 bp, Citrobacter koseri
atggaatcgccaacatcagactcgcgtcatgatcggatggctgtcagactttcagtcattatcagtcgtttgttgagtggtgaggcgctggtactgaaatccttgtctgaggagtttggcgtctctgaacgcactcttcgcagggatctgcatcagcgcctgatacatcttgatatacgcaatgatgatggtgtttaccggctaagtgagagcaggctgcgcgatcgttctcccggtgcgctctcatttatccgggcatcgggtatcgcccggatacttcccattcaggataagcagttgatgaatatgctgattgatgagagcagggtgtccccttgccttatctggcacgcccccttaaaacctcatgtcacgtttcccgagtttttcatccgtctggttcaggcaatttgtcaaagccagcaaatctcagtgcttgctgatggacatcggtacctctcactggagccttaccgactcatttactacggagaagagtggtatctggttgcatgccagtccagtgaaatccgtgtgtttgcactgactactatcggtgcagtcacagtggcttcagaaaagttcattcaaagggatgatatcagcagcctgatctccggtgagggctttatcactgcgctaccgcattttccgtttattaacgatgtcatcaacaccttccggcagtaa

SEQ ID NO: 84638 - DNA, 546 bp, Citrobacter koseri
atgaataaatgcttttcaaaaaagagaatactgcttgcaggcatactcagtcttgcagcttttaatgccactgcagcctggacggtaaacggtacgttctgtcaggcgaacagtgatgacgggcgtgtgatagttcgggttaaaccctcgaccgtcggtttgattgaaatgaagccccaatgcaatgggcgcggtgcttttggactgaccggcagtaattttggtgttaacgatacagtgtatccctccagcgtgatgtgtaatgcccagacgcagttctacacagtgcaaacgacgatggcgaccaaagacatccggtcgatcattaaatcattcagtaaatctgactcggtttctgtgaacacctttggcggtgctttttcagtaaatacggtggatttttctaaagcatgtgcttccattatcgaacaacaggttgcagaaaatgacccgcaggagacattaaagcgggatatgaaacggatgggctatgagcaggggcctgatggtcaatggcataaacgcagcctgacggcaacacagtag

SEQ ID NO: 84639 - DNA, 339 bp, Citrobacter koseri
atgaaatataaaatggttacaggtatggcgctggcaatgatgctctttacatcaccagcagtgcatgctgcgcttaaccagcaggatcaactgtcagcgctggaaactgctgagaagatctatgatgccatgctgggtagcggtgcagcagcggatgcccgctgggagacaccgaaacagttaaaagatatcagtgacccggttatacccggtaataaactccatgtacttgaatacacggtgatggaccctgctaacggggcttatcagcgtattcatgttttggttaatgtcgatggtggtgtagctggcgctgaaattatctatgctggtcgctag

SEQ ID NO: 84640 - DNA, 474 bp, Citrobacter koseri
atgtctgaactgaatttgccttcggtcttcccgatgaatgagcaacgtaccatccgtcgtgccctgcgattactggagaaatatcagcggcagcccggtgagtcgttccttgccgctagcttcgcgagaaattggttacagctctatttggcaaagcaggagcgcgaagtcttcgttgttatctatctcgataatcaacatcgtctgctggagcatgaaacgctcttcctcggcacgattaaccatactgaaatccatcctcgcgaaattgtgaaatctgcactgcgccataatgctgctgcggtgatcgtctctcataaccacccatctggcattaccgatgccagtaaagctgacagagcaattacgtccaggattatagcggcgctgggtctggtcgatgtccggctactggatcatttcatcattggtgatggggacgctttgtcgtttgctgagcatggatggctataa

SEQ ID NO: 84641 - DNA, 351 bp, Citrobacter koseri
atgtcgaataagacactgacagtgaatgacgatactattgagccctggtggggcttgagtcgtaacgtcatcccttgttttggtgctcgtctggtccaggaaggtaaccgcctgcattacctggctgaccgcgccagcataacaggccagttcaatgaagcggatttactccatcttgaccaggcattcccggtactgctgaagcaggcggagctcatgctcaccagcggcgagctgaatccgagacaccagcattgcgtcaagctctatgcaaaggggctaacctgcgaagctgatacgctgggctcctgcggttacgtttatatcgccatttaccccacgcaacgctaa

SEQ ID NO: 84642 - DNA, 342 bp, Citrobacter koseri
atgaatactttacctgcaataaaccagcgggctgctcagtcatgcccatcgcctgtggttgtctggcaacatctgcttactcgtttactggaacaacattacggactggcattgaacgacacaccgttcagtgatgagtctgtcattctggaacatattgaggccggtatcacactcgctgatgccgttacctttttagtggaaaagtatgaattggttcgtatcgaccacagggcgtttggctggcaggaatcatctccatacctgcgagctgtagacattctgcgagcacgtcgggacatggagttgttacgaggccgcactcacactacagaaaagtga

SEQ ID NO: 84643 - DNA, 693 bp, Citrobacter koseri
atggctcgtctgacaaaaccgcttacggatacagagataaaaaacgccaggcctaaagaagcggactacacgctacatgatggtgatggcctacaactgctgatcaaaaccagcgggaaaaaagtctggcaatatcgttattttcggccttttaaccaaaaacgagcaaaattgacttttgggccttatcccgaagtcaccttggctgatgcccgacaacgccgccacgaagcccggacccttctgaccaaagatatcgatccttacacacaccaacaatccctgcgcaggcaggcgctggaagctcaatccaatacctttaagattgttgccgaacagtggctacagttaaaaaagagcagcatcaccgccgactatgcctcagacatctggcgttccctcgaaaaagatattttccctgccatcggagaaataagtattacagacattaaagcacccacgctggtaaaggctatccagccagtacaatccaggggcgcgctggaaacagtcaggcgcttatgtcagcggattaatgaggtgatgatttatgccatgaatgttggcctgatcgataccgctcccagcgttaacatcagcaaggcattcgaaaaaccgcagaaaaaacagttgtacctcgccatcaatccccaaatccgccatcagaaaggcacttcccagctccgccactaa

SEQ ID NO: 84644 - DNA, 1059 bp, Citrobacter koseri
atgagggttatagattttttttgtggatgtggcggagctagtaaaggctttgaactggcagggtttgaggttgctctcggtattgattttgatgaaaatgcagctagtagctataaagcgaacttccccaacacaaagttcattcgggatgacatcaggaacgtcaaagtaaaagacgttgctaagctagtaccagatctgaagagttctgagctggtcttttgtgcctgtgccccatgtcaaccattttcttctcaaaacaaaattcgtaactcaagtgataaacgaagaacgttattgggtgagaccaaaagatttataagagcatttcgaccagcttttatttttattgaaaatgtacccggcattcaaagcatcaaaatagaagaaaatggaccattctctgattttttgaattttattagtagattcggttaccagtatgattataaggttgtctccagtgaattttatggagtacctcagcaaagaaaacgacttgttgtgttagcaagactaaatgacaaaccaatattcccttcttactcgcatggagttgataatattcctttcgctacagtaagagactatattggaagtctgcctaaattacaagcaggtgagtcagatagtaatgacctactacatgcggcggctgttatccaacccatcaacattaagagactacagcatacaccagaaggtggtgacagaagagattggcctgatgaactatggttgaattgccacagaaaatatgatggccacacggacgtctatggtcggatgagctgggataagccatgtaaaactttgactacaaaatgtacgagcatttccaacggtcgttttgggcatccggatacaactcaaaaccgtgcaatcactttcagagaagcagcttgtcttcaaacattcccaaaagattttcattttcttggtagtaatgtatctaaatcaaaacaaatagggaatgcagtacctgtattgttggcacagcgagttgctgaatcaatattagagcaggcaaaacctaatagggaggatgggggttgttaa

SEQ ID NO: 84645 - DNA, 2958 bp, Citrobacter koseri
atgctgggtagacaacagattgcagggattccaactgcattaagcgagttgttcaaaaatgcccatgatgcatatgctgacaacgtagaagtagattatataagaaaaaaaaacctacttatactgcgagataacggcttgggaatgagccgagatgattttgaagaaagatggctaacaattggcacagatagtaaattcattgatgaagacagtattggtgcaccgactacagacgacaaaaagaagaaacgccctattatgggtgaaaaaggaattggacgtttagctattgcggcaattggacctcaggtattagtaattacacgctctcgcaaaaatgatatattaggaaatatcgttgtatcttttgtaaattggacgttattttccttaccaaagcttaatttagaagatattgacatacctattattgagttaaattatgatgagtctttgaataaaaagcatatcgataacttaatttcacaagcattgaaaaatgttaataacttaacggggaagatttctcaaaataaaattgagcagcttattaaacaaatagaatactttgattatgatcctgagttctggtccatcgctcttgataatttagataaacaacttaatctaatcccttcacgccctcacttaaatttagaaaatgaaagtgggacacattttattatagcgcctgttgatgatatattatctgacgaagttgaaggatttgataccaagaaacgtactgatcaagcctctcgtttagagaaagcgttacttggttttacaaatacgatgtacgagcattcgcaagtacctattattgcccgttttcgtgatcatacactacatggcgaatgtattgataggataagtgagtcagttttctttacaccagaagagttttcgattgcagatcaccattttaatggcaattttaatgaattcggccaattcgaaggaaccataaaaatttatggagaagagaaatctattgtagtgccgtgggcagaaaataataacaaagaggttttatgtggtccatttaatctcaatcttgcttatattcatggtacacaaagagatagtaagttatcgcctgaaatctggcaagatttaagagataagacagataagtttggtgggctttacatttatcgagatggaatccgaattctaccatatggtgattctgattttgatttccttcgtatagaacaacgcagatctaagagcttaaaagagtatttcttttcttatcgcagaatgtttggcgctatcgaactgactaaagaatttaactatgaacttaaagaaaaagcaggtcgagaaggttttattgaaaataaagcctacaaacaactaaaagcaatccttgaaaatttctttatctcaattgcatcagactttttcaatgataaaagtgaacttgcagctacctttattgaaacaagagcacgccaacagcgtgaatacgaactattaaagaaaagagaaaaacttaagaccactaaaagaaaaaattttgaagcagcacttaacaaatttttcaccaagcttgatgaaggaaagttagactcttcaattctccagtcaaataataaactagacactctctttaataatttcaatcaaaatacggattcaatagatgatcttgccttctctgttgagtcagtagtaaataatgattttggcaagttgattaatgatatagaaataaataaacctactggcattggccttaataaaaacttagctgaccaatgggatttatatcaagtaagaaaaaatgaacttatcaataagattagtaatgttaagaacagcgcaaataaaatattagttagtttcgaagagaaatatggtgataggactgggctaagaagaagattcaatgactcgttagtaaatcaagatgagtatcaaagaaaactattgaatgaagcttttaataaggccacgtctattcttgaagatttgcaacaacaagtaaaaaaaatgattacccataacagggaagttgcaaaaaaaaatacagatgaagtattcaatgcgttcaactccacaagtttccagggtgttacagtagaacaactttatcgtattaaaaatgaactagaaacaaagattgataattcctcttcaatggtaattgaaaatattaatctgattaccgaaagattattgacagcaaaagaagattcagagcaaaatataacgtcatcatcagaacttgtttctgttctggagtcagaatatgagcatataaaagaacaaaatgataggaatcttcatttagcgcaaataggaatggctgtaggaattattaaccacgaattcaatcataatattctttctattcgtcgcggcctcaatgaaatgcaagttttcgctaaccgcagtgaaaatttcagagcaatatatgatcgtgtacgttctggcttcgatcatcttgatgcatatcttaaaacatttacaccattgactaggtcgcagtcaagaagacggacgactataacagggaaagctcttagtgaatttatagagtcggtatttgatgaccgatttaagaaagaagaggttcgcataagttacacatctagttttattaaccaaagtattcaagcttatacatcaacaatatattccgtattcattaatttaatagataatgcgatctattgggtatcgaaaggctcggcggataaaagtataactcttgatgcttccaaaaatggtttcaaaataatggatagtggtccaggtattcctactatcgaccatgagaatgtttttgaattcggttttgggcgccgtattggtggacaaggaatggggttatatatcgctcgacaaacattacagcgtgatggttttgatattactcttgaatcttatcaacctaacactggtgccgtttttattatagaaccgatacaagataaagaataa

SEQ ID NO: 84646 - DNA, 1725 bp, Citrobacter koseri
ttggaaaattcaaatttcttcgcatcttctaaagaaatagtaagtagatttcttaataacgttatcgctgttgacgatcaattatcctttggaaaagcaattaccacaatagatagttctgttaatgatgactttgcagagtttgatgcagctagtaatgacgttagtgggttaggtgtcgtaccacaaaccccactcataccagccccaatggataacccactgaattatcaagatttatctattgcattctcagataaaggaataaattgctgcgcttttaaacctgatccatcgagagatgtaaatatccccaacgcatcaaaccgaataatgacaggttccaaacatacagacattactattttagactggcaaatggattcgcagtttaaaaacaatcaagatagtcaggagcgcgatggtacactggctatagcaagcattgaaaaaatattacaacatgataaagagcaacaaggtcggttacgacttatcgtaatttatacgggttcaccagaacttacagggattacaaaattagtttcagatcatttgaattcaaaaggttattctaatgcctttgaaagtacaaaaatcacatttaatgatgacgtttttaaattttgtcatatcgaagtcatagaaaaaatggttgatgctgctcaattagttgacaaagtaataacattatttacaaaattaactattggattactttccaatgcaactctctccgctataggagaattaagagaaaaaacacatcacatattacacacattcaataaacagcttgatcctgcttacttatcccatgttgttggccttttctcttcacctcaagtgagagaaaaagctcatgaagttgcttttgactacgctacagacattatttcagaagaaataaaatccaaccttcaaattagtcaatcaataacaaataatttaaacttaactagaattcatgattgggtagattatattaatagtgagaaccgagatgatttattccaagttaaaattaatgatgggaataacatttccatcacatccgacagaatcaaaagacttttatccacagaatcagaagatgctctattaaataccttatcagaagcacctgtcattatgaaacgtaatggtgagacaattgaaaaatttaagaaggctaaaatacagattagcctaaatggcgttgaatatctccctcatgaaaacttgagcgcaattgagtgcaaacgtagagatttaaaatcattaaccgactcatccccacttccgactataaaacaaggctctatcgttaaaaaaagtgacactgaattttatatgtgtatgcaaccactttgcgatagcgttcgtatacagagccctactaatttcatttttataaaaatagacaggatgactgcggccaaccctaaatttactcatgtgttacgaagtgcagatgatacttttatgaagtttaaaattaaacccggctctaaggacatccacatattcaaactcattccagatatgaccactagctcaataaaagtaattagaagggataacagacttgttgtttgttacattaaagatgatgagcaacaagctgaattatcatggattggtgaatttaaaaatagtgtagcccaatctatcgctaatagtctcgcctctaatatatctagagttgggttagatacaaatgaatggctgagattgagttgttaa

SEQ ID NO: 84647 - DNA, 234 bp, Citrobacter koseri
atgacaacaacaaatgaattagcagaaaacaataaaacggacgttacgtcattactggatgaccaattggtggacatggtgttcatcacgagatttacaggaatgacggataagtggttctaccggttgatttctgaggcacgctttcctgcccccatcaaactgggccgcagctcgcgttggcgtaaaagccaagttgaggcgtggctgctggaaaggatgaaactctcttag

SEQ ID NO: 84648 - DNA, 624 bp, Citrobacter koseri
atgtacacatcagataaatacactcaaaacctgtttctaacagcgattctaaagaatcatatcaatgaaatgataaacaggtactcgtgcttacgggcattacgtattgatttattttataagcgtaactccttccgttttcagcgttccgattatcgacaactggaatatgaagtacgggttctgatgcaggaaatgatgaaacaaaaaggcgttatcgggtatttctgggtaattgaatggacaatagatcatggctggcattcgcatgtagcgttctggttagatgaccacatcacacaaaccacctggccagcggctgaaaaagtctctggcatctggaaatcgataaccgaacaagaaggtggcgttcacctctgcaaattcaaagaaaactaccaggccgatatcaatatcccggtttgctataacgatccatacagtattgagaatatccatcgggttctcggttatctggctaaagaagaacagaaagatggattttacctctatggctgtagtgaagttcctcctcgccctgcatccgggcgtcctcgggcacatcagccaaatctgcaggaccagttaccgcagcataactggctagagcaacagctcgtttga

SEQ ID NO: 84649 - DNA, 414 bp, Citrobacter koseri
atgacgctcttttttacccgtattccttacgcagtcacccttacagatggtgaactggttgatgagaattactcaggccacgacccgctggtatgtgaattctgcggtgtcccgatggaacggatcattggccccgatgactctcaacattaccagcatgtcctgcacggtcagtcagcagcaataaaagccatgtactgtaagtatcgacattatcccactggagggttacagccctaccaaacactgaaaccaccgggtgaatcaccaaagatcccaccgtgggttgcgaaaacaataccttcccgaacgatgactcgtaaatggcgatgcgtattgtgcaatcaccgttattacggcagtaaacagtgcccaaactgtggtgactggacatgcactctcgccgcacactaa

SEQ ID NO: 84650 - DNA, 225 bp, Citrobacter koseri
atgaaacaaaagccggtaaaaaatgcgctgataatgtttggatcagcgtatctcgttaacgcagaggagatatcaccgatatttgggaagttctactgtttccactgcacgagtccgatgatttacgtttgtgccaatgaatcgcagaaagaacatttcgtacatgatttgacagcattaacctatcaagctgatgatatctgtccttacctgattcctgactga

SEQ ID NO: 84651 - DNA, 546 bp, Citrobacter koseri
atgtttcggaatatactaaagtcgttcgtcatacttttactcatagggatgatcagcgcggggttttggtatggacaaaatatttcgtttgcccagcagtccccactttttgaagctcttcgcacaacagcatctatcatatttgctgttgtaggagcatggatggcaatcatctatccggaaagattacgcttcacattcaaaccaaacagtagtgaaaacacttccatgccagtgaatatgggaaaattactacatcctgctgtaaactcaacatttattttgtgtattgtcctctttgttggagttttagcgccagtagttaagcaaatcccctatttacttccttataaagaacctctgcgaggtttgtcgtttagtctgctcatgattctcacattttggcaaatatggacggttattttaacgttggttcctgctgatatgatcaaaaataaagtggatcatgaaaacgcaaaagctacaggccgcaagagttttttttcgcaaactcaaaaagtcagtgataaacgtaataattcctaa

SEQ ID NO: 84652 - DNA, 1050 bp, Citrobacter koseri
atgagcgagtcggttaaacttagtttttatcgagtacatgaatgtggttactactcatggggtaataatactcctgtttttggctcacttcaggagctcctgacagatcttcacctttggtgtacggataagagtatagaaaacacaaaactttatgagccacaagtaggtagtgattatatggccacttacttgttggatatcaatagattaggcgatgattggctagttactacctggaatgaagttccatcaaccgaagcgggagttgcttctgtgatgagggattcaagtgttactgcgcccgatgtagttatgaaccagatacaagataattctattcctggttacgccacctatttttggattttacctagttatggcttatttgccagtttgcggttcaaaaataggactcaaacagggcaacctccgttcaggaaatatattgaacaagctctttcattgatatcttcttatgtgagatatggtgaggatgaagaagacggttccagacgggtgattggctatgcaccaaccggagaggatttaatgagtccaagtccttctccacgttttaagacatctctggcatatgatgttggtaatcgagagtacattagagaaaatgctaatcgagttaacaaaattattcgtaaagagacattgaggttaaaccatgctgatgaacgacagtggtggcagtcagctttaagccgccttggcattagtagtggtaacgattaccggagaatggatgaagtgaatgttaggtatgagttgcgtccggacttttttggtttacaagatattgattcaatgatgcaggagtgggatgattctgagcatgtgcgttcagaatgggatgattatggctttacgtttaaaggtaatgccgctaaggtccattggttgagccatagtacattgacagcatctgctgaactaaatgttatctgggataataacgaagtcgtcaatggggaatcgttattatcagttttaaccgctggtaaggctgtgcttctacaacaaatacgcgaggagtaa

SEQ ID NO: 84653 - DNA, 3018 bp, Citrobacter koseri
atggcccgtgctgaatttgatcgtgattgtgatagcaatctggctcaagcttttgatgatgatttcagcccccaggagtcaccgtcacgatataaaatggcgttgcttaaacttttatgcagcaactactattctctttctggaacaacagttggttttgttgaaccatcgcagcttaaatcaaagaaaatgtgggaagctgtgcaggccaagaagctcaatattgagagcaaggatgttcatgctttagctgttgcttggattgataccttactcactgaatttgcttttgatgaatctattgattcgacactacgaaccaaagcggctggattctataaacccaactggggtagtaaaggacggtttggaaaagctcttagaaaaacactgatacttcatccagctatgggggagctttctgtggaagttttggaggatatttttcgtactcatctgacattaggaaaagatggtgtttactttcttactccaaatgcacttcgcctgaaaatcgatctcttgcatgtttggaagcaatgtaatgactgcacagcactaatgccatttgctttagagcattctacttgtcttgcttgtggtagtaacaatgtcaaaactgtcgatccgtcggaaagcagctatattaatgcacgaaaaggattctggcgttcgccggtagaagaggttttggtttcaaattcgcggcttctgaaccttagtgttgaagaacataccgctcaactatcacatagagatagggccagcgttcatgctactacagaactctacgaactgagattccaagatgttcttattaacgataacgacaagcccattgatgtacttagttgtacgacgacgatggaagtgggggttgatattgggtctctggttgctgttgctttaagaaacgtccctccgcaacgagaaaattatcagcaacgtgctgggcgagcaggccgccgtggtgcatctgtttcaacggtggttacatattctcaaaatggccctcacgatagttattatttccttaatcctgaacacattgttgcaggttctcctcgtacaccggaagtgaaggtaaataatccaaaaatagccagaaggcacgttcattcttttttagttcagacttttttccacgagttaatggaacaagggatttataatcccgtagaaaaaacgtccatgcttgagaaggcacttggtactacacgagagttttttcatggggcaaaagatactggcctaaatctcgatggttttgataattgggttaaaaaccgtattctatctaccaatggtgatttgagaacaagtgttgcagcatggcttccttctgttcttgaaactggaggactttctgctagcgattggtttgctaaggtagcagaggagtttttaaatacactccatgggctggctgaaattgttccacaacctgtcgttctagttgatgaggaaaatgaagatgatgatcagacctctagtggaatgaaatttgaacaagaagaattgctcgaattcttgttttaccatggtttattaccaagttatgcatttcctacaagcctctgtagtttcttggtcgaaaaaatagcaaagaatactagaggttcttttgaggtacgaacagtacaacagcctcagcagtcaatttctcaggctctgagtgaatatgccccagggcgtttgattgttattgataggaaaacctatcgctcaggcggcgttttttctaatgcattgaaaggagaactaaaccgggcacgaaaacttttcaataatcctaaaaagtttattcattgcgataagtgctcttttgtccgcgatcctcataataatcagaatagcgaaaatatttgtccgatctgtggtggcattttaaaagaagaaataatgattcagcccgaagtctttggacctgaaaaggctagggaacttaatgaggacgacagagagcaagaaatcacctatgcaacagcggcacaatatccacaacctgttgatcctgaggattttaagttcaataaaggtggtgctcatattgtttttactcacgcaatagatcagaaactggtgacggtgaaccgaggaaagaatgaaggggaatccagcggtttttcagtatgttgcgaatgtggtgcagcctccgtttatgattcctactcaccggcaaggggggcacatgaaagaccgtataaatatatatctactaaggaaacgccgcgcttatgctcgggcgaatataaacgcgtttttctcggacatgatttccgtacagatttgctcttattacgaataactgttggatctccgcttgtaactgacacttcaaatgctatcgttctacgaatgtatgaagatgcattatattcaatagcggaagcacttaggcttgcagctagtcgccataaacaactagatcttgatcctgctgagtttggctctggtttcaggattttacccactataggggaagatactcagacattagatcttttcctatatgatactttgtccggcggtgcgggttacgcggaagtagctgcagcgaatctggatgacattcttactgcaacactcgcattattagaaggttgtgagtgcgacacatcctgtacagattgtctcaatcattttcacaaccagcatatacaaagccgtctcgataggaaactaggtgcatctttacttcgttatgctctgtacggaatggttcctcattgtgcttcacctgatattcaggtggaaaaattgtctcaattaagggcaagtctggaattggatggtttccaatgcctaattaagggaactcaagaggcacctatggttgtgagcttgaatggccgttctgttgcagtgggaagttaccctggtcttattgatcgaaccgactttcaacacgatgtatataaggctaagaagactaatgatcatatagcctttaatgaataccttcttcgttcaaatctgccacaagcacatcaaaatgttaggaaattgttgcgctga

SEQ ID NO: 84654 - DNA, 1059 bp, Citrobacter koseri
  misc_feature (143)..(152): n is a, c, g, or t
atggaatggaagtcagtatcacgagacaaagcacgggatatgatatcaactgcattaaattgccgattttctgatgaagggttgagaatttcagtagtttcagaatgcttaaggagcgtattacatcaatattctatatccgnnnnnnnnnnatccgaaacagaagaagctaggcaaactgtaacctcgcttcggctcactagtgcagtaaggcgaaagttggtgcctttgtggccagacattgcagatattgatgatgctatacatccaggtattatgtctatattggacagtttggccgaattgggtgacatgattaagttagaaggtggtaattggctaactgctcccccacatgcggtacgcactgaccataagatggctatttttcttggtggagagccttcctgttcattttcaacgggcgtggtagctaaatctgctggaagagttcgcttggtcgagcaagaagtttgtactggcagcgttgaaatctgggatgcaaatgagtggattggtgctccagcagaaggcaatgaagaatggtcatcaaagctactatctagaacgatttccggctttatcgacgcgcctagcgatatgagtgaaacgactgcgtatgtgcggggaaaatggatccatttgtcagaacttccttttaataataagcaaatctacttatgtaggatgtccattgataatctcttttcctattatttaggagaagttgaggatggacggctatgtagaatgaattcgttagaatcgtctgatgatgtcagaagattacgtttttttcttgatacaaaagataattgcccgctaaaggtccgtatcaaaatatctaatgggttagcaagactaagattaacccggagattaccaagacgagaatctaaggtactcttgctaggctggagagaaactggttttgaaaatgaacattcaggaataacacgccatgtattccctgaggaaatgttacccatagtgcgtagcgcttttgaggggcttggaattatttggattaacgaatctacgcgacggaatggaatatga

SEQ ID NO: 84655 - DNA, 477 bp, Citrobacter koseri
  misc_feature (369)..(378): n is a, c, g, or t
atggatgacatttctgagcatgaaaaactgattaaaagtatggttaatgaaattgcagaattaaaaaatgcatttactatgttgtgtgatagtgaaagaaagaataacgagtcagataatgtcaatgaattaaaaaaactctctgaacgaatagatacacttgaaataaacacatctcaagctagcgcggtgggcatggccaataaacttacaaaattccatgaaatagctcaccatgaaaattatgaatatctttcatcctatgaagatatatctaatataatttctttaaatttacaggctgttggtttaacaaaaaattcagcagaaacattggctagattgacattagctaccttcgtttcaggnnnnnnnnnngttctttggcagatattgtcgcggatgcaattgccactgctattggtgcaccacgttatcacgtatggagaattccagttggtattatttccgacatag

SEQ ID NO: 84656 - DNA, 258 bp, Citrobacter koseri
atggaagtttgggtaaaaatgtacgaagttgatcgccggcaggtgctgattgaaaaagtgtctggtgatgatggtgaaccgggaattgtctgtcgctggaaaaccgacgcgaattgtgatgtttctacggaactgagcgttttcttcactatgtcagatgatgccaaaaacagagagttgcgtgaccgggcatttgaaaaggcaggtgaagaatggattaagcatgtattcaatgctccgttccactttccgctctga

SEQ ID NO: 84657 - DNA, 1680 bp, Citrobacter koseri
atgaaaccgataaaacgcctgtacctgtcaactgatgaggtacatcttgctgatgccagcctggtgctggaactgaacagctgcggccgggggtttattacggccgaaactgaccaggactataccggcaagctggtacgtcttgatgtcgggtataccgaccttcttttgcggtggtttacgggatatgtggaacgatcacagccggcagataacggctttcagcggctttttgttcgtgagctggttggcgtgtttgaacgtctgtggccatgttcacttcagcacccgacactgcgtagcgtcgccggctggctggaagagaacagcggccttacggtgacggtacccgatgccgattacgctgataaaccgatcccccactttacccacagcggcagcgggtatcagctgctgaataatctgggtaaagcctttggtatcacggattacatctggtaccagttgcctgatggcgggctgtatgtgggaggcgcggaaaagtcactctttgccggcaagccggtggatattccggccgaattcagccagggggctgctggcggcaataccatgacattaccggttgtccagagcctgcggccgggggttgaaatgaacggcgagcgtgtaacaaaggttcacctgactaatgacacgatggccgttacctggacgccgcgtaaccgggcaacaggccagccattgcagaaatcgccagtacagcggcagattgaaagccatttcccggagctggcgtccgggttgcatttgccaaagttcgcccgcgtcattgcaccgacagaagctgttaaaagcgggaatttttcagatccgttccgtccgcgctatgccgtggacgtgcagctgcttgacgcagacggaaagcccgacgcacagacgccagtgtattctgctgttccacttccggtaccgatggccggtaatgattccggcatgtatcagttcccaccggaaggaacgctggtagaagtggcgtttaccgatgggcgcccggataaaccttttatccgccagactgtgccggatggtaccagcctgcctgatatcaaacccggcgagcagctccagcagcagcgggctgaagtctcccagcgcgtgacacaggcaggggactgggtacgacagactgatcagacaatcagcgaaacatcgatggccagaaccattaaggccgatactgaaagcagggagctggtaagccgcgaaacgcaaattcaggctacggataaaaccagcgttatcggaacatccacgctgatggccggagccattcagcaggtcagcaccggcaagtttagccaggcgattcagggtagccggctggccactatcggcggcagtgatgaaatggccgtagccgaaaacgtcaccgttacgatcggaaagaacctgacggagcagattggccagattcgaaaaagcgttgcggccgtacaacagcagattatcgcaccagtggtgtggatcggttccggcagtattaacgtggcacagctgatgctggatacacttgatgtggtaaagcaactggctgaactgacagccagccacacgcacagcaacacaggcgcaccaacgaacgccggagacattcgcagcaccggcacgcaagccgacacgctgaacgataaatactcccccgtaatcggtaagtaa

SEQ ID NO: 84658 - DNA, 1959 bp, Citrobacter koseri
gtgagaaatagcgaaatcattgttgataactttgctggtggcggcggtgcctccactggaattgagatggcgactggccgcagcgtggacattgcgattaaccacgatccgaatgccgttgcgatgcacacgacaaatcacccgaacacgttgcattattgcgaatctgtttacgatgtcaggccgaagatagcgaccgcggggcgtccggtggcgctggcgtggttctcgccggattgccgtcacttttcaaaagccaaaggtgcgaagccggtagagaaagcgatccggggtctggcctgggtagttctgcgctgggggctggatgttaagccccgagtgatgaaactagagaacgtcgaagagttcaaaacgtgggggccgctgctcgccggggaaatgcgtccggatcctgcccgcgcaggcgaaacttttgaggcattcattggcatgctgaccactggcatttcagcggatcatcctgcgttggcggaatgctgtgaatttctgaatatttcgttggacagcgaggaagctgcgcgactggtgaaaggcctgggctatgccgttgagtatcgcgatctgcgtgcctgcgattatggtgcgccgacgatcagaaagcgtttcttcatggttatgcgttgtgatggtaagccgattgtctggccggaaccaacgcacggggatccgaagtcaccagcggttcaggctggcaagctgttgccgtggcgcaccgctgcggagtgtatcgactggtccatccctgcaccgtcgatcttcgaccgcaaaaagccactggcagtgaatacgctcaagcgcatcgcgcgcggcattcagcgtttcgttatcgaaagcgcctcgccgtttatcgtgaagtgcaaccacaccagcagccgttcaagttatgattgtttccgtgggcagccactggaagaccccctgcaaacgatcacgaaaaagcatggttacgctattgcagtgccacggttgacgccgttcttggctggcaatggcggcagtgcatatcaggccaagccgcgcccgctggataaacctgctcacacaattctgaagcaatcccgcgcatgtgttgttgcgccagttatcgcccgacagtttggtgccagcatcggccaccgcgcagatgagccgagcgcaacaattaccgcaggcggtggcggcaagtctcagttagttgtcccaacactcattcaaactggatacggtgaaagacccggtcaacatccgcgagtacccgggcttgataaaccacttggcactgtcgttgctggcggctgtaagcatgcggttgtgggggcctttctcgcaaagcactatggcggcaactatacggggccgggcgtcgggctggatgagccgactcactcagttacgacggttgatcatcatgcggttgttgcggcacatctaatggtgaacaacaccgggcatcctggcggctccgtggactctccagcgcataccgttacaacaggaaatcaccatgctgtagtgacttctcatcttgtgcatttgcgagggttctgcaaagacggtcaaaaaatggatcagccggtgccaacgattaccgctggcggccagcatgtgggggaagtgaaaaccactctggcagttgagcactacgacgaacagcgcgcgcagcagacgttggcgttcctgcgtgaatattgcggcgaggactgtaccgggcttgtggaaatcgacgggatcacataccggattgttgacatcggaatgcgtatgctgcaaccgcatgagctttaccgcgcgcagggcttcccggggtggtacatcattgaccgggactatcgcggcgtgaagtatgcgaaggataagcaggtagctcgttgcggtaatgccgtgccgccgccgttcgccgaagccctggtaagggccaatttacccgaactttgccagccgaaagaaatggcagcgtaa

SEQ ID NO: 84659 - DNA, 768 bp, Citrobacter koseri
atgaaagaaatttggaaaccattccccgatgagcgacttatcggcgcttatgaggtgtcaagttttggaagaatcagatccctggacagaactattgttaattcaaatggagtatcacggctttataagggcgtcacactaaagcaagtgatagataagcacgggtattatcgagtcacaccaaaacttagagatcctcgccgctcgttaaacttcatcgtttcgcgtgttgtagcggaggcattctgtaaaaaacctgacggttgcgatgtggttaatcacattgatggaaacaaactaaataaccattctgataaccttgaatggacaacagttaaaggtaatacgcagcattcttatgccaacggacttcaaaagggacgtaaaggcatgaatcaccatatgtgcaagctaagtgacgatgatgttagaaaaataatatacaggctgtctattggtcattcccagaacgctatcgcaagagattacggtgtcgatcaaacggcgattatgtttataaactccgggcagcgttggagccacataaccgtagatgggttaacaacgccatacaacaaactcttccctaaaaagatgacagaacaaactgcacgggaaataattcgacgccttattacaggtgaaagtcagccatccattgctaaatcgttaggcattcttcagtccactattagcaagataaacgttgggaaaacctggtcgaaaatcaagattgatggtttcacaactccttataaccgacgataa

SEQ ID NO: 84660 - DNA, 309 bp, Citrobacter koseri
atgaatgatataattcaagatgtatcactacccaaccaaaatcgacttaaagttgtacagcctcacgaaaccgcagatgactacggtggcggaggcggcggagatggaggcaatatgattcagcgcataaaagatcttgaaagcaatgtggcaacaatcaaaaccgacttggcggtagttaggtctaattacgcaacaaaatcagacgtaagcgatgccaaattcagcataatcgtatgggttgttagctcaattttcttggctcaactactgccagtcatcatagccgcaattaagtctgcctcatga

SEQ ID NO: 84661 - DNA, 405 bp, Citrobacter koseri
atgagcaaagaaaaagtagcgtttttatacccaagccacaaggacagtcaacatgactccgcaactgcccttcttgtttatgatactccggcattcccctttaccttggatattagttttcatgcttactttcttggattttcgcatgataaagcttattggattacatacgagatctataaagatgaggacaatataagcagcccaatttcggagaaaggtctttggcttagagctaagggcaagcctggggatgaagatctttctgccgcagcagggcttaagctaaaagactgccaattcaaagagcctgggcactacttcatacaggcgactatctatcttgacaagatcgcggtacataaaaataaagcttactttaaagtggatttgatcgatgaatga

SEQ ID NO: 84662 - DNA, 174 bp, Citrobacter koseri
atgggaaatgtaagttattcagggcgtaaaagtgagagtttccaactgcggcttcctgaacaaatgaaagaagagatccgccgcctggcagaaatggacggtatctcgattaactctgcgattgtgcagcggttggctaaaagcttgcgtgaggacatggctaatggccattaa

SEQ ID NO: 84663 - DNA, 816 bp, Citrobacter koseri
atggcgagtataacaactggaaatctggctatcaacgtcccattctacggttctgctctgtacgtgatcaaccataatggcgagccgtacacaccgatgaagccaatcgttgaaggcatggggatggactggaaaagtcagtttattaagataaagcagcgtttttctaaaggtatggtggaaatcaccatacccaccgctggcggtactcaaaagatgatttgccttgcccttcgaaaactggccgcctggctgaacactatcagccctaacaaagttcggtcagagatccgcgaccgggtgatccgttatcaggaagagtgcgacgacgttctttacgaatactggacaaaggggaagacggttaacctgcacaaaaccgaaacaacggctgacgatcgcaccccattacgcggtctggttaaccgcatcatgggcaaaacgggtattcactaccagccgctttataagatggttcaccgtgagttcggcgttaaccacattgacgagttgacggcaaagcaggtggcggaggctatggagtatcttgcagggaaagtcctggaaggtgaatttctaccgaaagggcagagcctgacctcacttccttctgcaatgccccagcaggggccgggtagagtgctgttgcatctggatgaaaaaggagtggttcaaggttcatacccgttatatgaagatcaggttgtcatgtcgttcgatgccttcgttagctatttcaggaaaaagggctggatagtagctcctaaggatgaggttatgagtagtcttgcgggggcagtgctgaaaattcagtaa

SEQ ID NO: 84664 - DNA, 516 bp, Citrobacter koseri
atggcggagttcattcgccagcattctgcttcaggccagctggtggctcgcgcgcttttcctgcaaccgccgtattcagtggaggaagaggcgttaacgccgctgctgaagacgctgcttcagagcgagacgggggcggatatcgcctgcgtgcagggtgctcaggatgattattactactcgacgcaaaccatgaccgctaactatgccgacatgtgcgtgcaggtggtggagaacgatatttgccgggctatcgcacaggcggtgcgttttgattgccagacctatccgcgaccctacaaggtcgccatgctggaacaaccgccataccgctttgcgccgcagcaaatagagacagcccttgccgcgatcgacacgcacccggattacgcggatattcgccgtgtggcgtcgtccaacgatgtgccgtatctgtttagcgaacgttttatgagctacggcaaggcatatggcttatgcgaatggcttgaggttgagcagtttcagaatccctga

SEQ ID NO: 84665 - DNA, 747 bp, Citrobacter koseri
atgaataaaaaatccatatggaagctaattattatattagcgatcccgtgtattattggcttaattcccgcgccagccggtctgagtgaactcgcctgggttctctttggcatctatcttgcggcaatcgtggggctggtgataaaaccgtttcccgaacccgttgtattattgattgccgtcgcggcatcgatggtcgtggtcggaaatttaagtgaaggggcgtttaaaacgaccagcgtgctcagcggttatgcctctggaacgacgtggctggtattttctgcgtttacgttaagcgccgcgtttgtcactactggccttggcaaacgcattgcatatattctgattggtaagattgggaataccacgctggggctgggctacgttacggtttttctcgatctggttctctctccggcaacgccgtcaaacacggcgcgcgcaggcggcattgttttacctatcatcaacagtgtggccgtcgcgctgggttcagagcctgaaaaaagcccccgtcgtgtcggtcattacttaatgatgtccgtgtatatggtcacgaaaacgaccagttatatgttttttaccgcaatggcagggaacatactggcgctgaaaatgatcaacgatatttgccatctgcaattaagctggggggggatgggcgctggcagcaatggtgccgggtatcattatgttactggtgacgccgctggtgatttataccatgtacccaccagaaattaa

SEQ ID NO: 84666 - DNA, 831 bp, Citrobacter koseri
atgaactatcaggtaatcgccctagatctggatggcactttattgacgccagaaaaaactattttaccagcctcattaactgccctacagaatgcccgtaaatcaggggcaaaggttgtcatagttaccggacggcactttgtagcaatccatcctttttatcaggcattagctttggatacaccagctatatgttgcaatggtgctttattgtacgattacaacgaaaaaagagttattgcctcagacccattacaaacagagcaagctactcaattagtaaacctacttgatagttacaatgttcatagtctgatgtatgccgatgatgccatgttttatcaaaatccaactggacatattacccgtacagaaaattgggctaaatctcttccagagtcacaacgtccagtattcaaacaagtatcctctcttcgagaagcatcgcaaaatgttgatgctatctggaaattcgccctaactgattctgatactgaaaagctacatagctttggtcagattgtagagcacgagcttggtcttgcttgtgaatggtcttggcacgatcaggtagacatagcacaaaccggaaacagtaaaggtaaacgcttggcacaatgggtagaatcacaaggtttatctatgagccaagtaatagcctttggcgataatttcaacgatttaagcatgttgaagaatgctggcttgggtgttgctatgggtaacgctgttgatgaagttaaagccagtgctgatttagtaataggtactaatactgaatctggcattgctgaggtagttaaccagtactttgtcagtgtacccgcataa

SEQ ID NO: 84667 - DNA, 1089 bp, Citrobacter koseri
gtggtactaaaaactactaccgtgaacggaaaatcgctaacagggaatattacgttaactaaatctgatgttggattaggtaatgttactaatgatgctcaattgaagattgccagtaatttatctgatgttgctaacgttgataccgcacgttctaatttgaatgttgacagacttaaacaactttcaaatcaaacgcagatcacaaacgcatctggtgatggctggctttatgcaggtgaatcgggattatgggggtacagggggagtgatgctacttggaaaccactcggaattccgcagggtggcacgggtgctggtaattctactgacgcttccctaaacctaaactattatggaaattttggttctcattttaatactacttctggtgatatgaataccttaacaggctctggtaatacttcaggaggtgaaacatattctattgctatcgctaccggtgataataatgttgctaactggcctttaaatacttctggcactagtagggcatatggttggggagcaatgatgtgttttactcatgcaaggagtggaggtagaacacaaatttacgttcctgatgatgctgcaaatttatatttcagacatagatacggaaatgtgtggaaaaattgggtggcggtatggactaacaggaacactaccgtcgacagcaatggatttattaaaaatgcatcaccaattgttaaattatatagtgatggttcttcagtgctcaatgatgaatcggaaggtgttaccagtgaacgtattgatacgggtatatatcatgtttacggtacaaaaggattaaacaccgacggatggactattgaaattccacaagatattaatggtaatcgtctatgttttgttaatactgattatgatgaagaagatgatattttagtgattaatacttatacacgtaaatttgattatgaaactgcaatgattgttgcgggtgaagctatagatattccaacagatcgctggatagatttgcgagtggaaatgcctgtagattcaatctggaatcaaaagacaaaagataacgaacaaggttatcaggataatgaataa

SEQ ID NO: 84668 - DNA, 177 bp, Citrobacter koseri
atgacgcccgcacagttccggcgctggttttcctcactgcctgaaaaataccagcgcgtagcccgttccatatacgacgacgcccgcaagacgggaacacacaccgcttccagcctgctactcattcgcacgctggtagagggccgaatcaaatttgatgagagatttccaaaatga

SEQ ID NO: 84669 - DNA, 210 bp, Citrobacter koseri
atgacgaaatctgagtttgaagctggcacgtgggaattaaaaaccctgctgctgggtgcgctaacccgcaggctcaaggaagacgaaacgggcgaggctcgcatggccgctgccgagttgtcgtcctgcgtgaacttcctcaagcaaaacgccgccgatgcgccagacgcatctttcaacagcgtgttcccggaggacgatgacgaatga

SEQ ID NO: 84670 - DNA, 564 bp, Citrobacter koseri
atgaaatttggatacgcacgtgttagcagtgccgaccagagccttgagcgccagatggctgcactggaagggctatgcgatgagatagtgactgacaaggtctctggcaaggatacgcaacgcgatggattacagagcctcctgttgcgtctgcgggacggtgacatggtgctggtgaagtccgttgaccgtctggctaggaacacgaaagagttgcttgagctgctggagaatctgactgagcgcggggtgtctgttcagtttctggataacagcatgacgtttgaagccgggaaccctaccacgaaattcatgattacgatgctggccgctgttgctgagctggagcgtggtttcatccgtcaacgccagaccgaggggattgcaatcgctaaagctgctggtcgcttcaaggggagcacgaagaatgccgacctgcgggagaaggtgaagaagctgctggatagtggcctgtctgctgagaacatcgctaaggtggctggatgcggccgtgctaccgtttttcgcatcaagcgagagctggccgccagcgttacggagtga

SEQ ID NO: 84671 - DNA, 477 bp, Citrobacter koseri
atgcccgacttgaaaaattgcacgcttatggttgcccctccctcaacgattaaggcttcgacttcccccgtgcgcctctcccagccgaaggctgggcgggctgtgtatcgattcgcatctgttctggccgtctggccgtccatttgttaccgcgctgttggggctgctggcctgcctctctttgcctgtgtgatattgcaagggggagggggtgccctacctgccatctgctcttcctcactgccgcacgacgctgctcttctttgctgtagcttgttctgcctgccgcacgatgctacgccagcggctggccgtgttgctgggtgctgtgccttatcggggtatctgtcgggtagaccctgtgagtcactgctgttgtgccgggttacgccgtatcatttcgctgttgacacggaggctattgataccgtacttttcacctcacctgaaagatacttgatgatgtggagggattga

SEQ ID NO: 84672 - DNA, 2445 bp, Citrobacter koseri
atgtatagaggggcggggggggcagaggtagcccttttaatacgccgcctctgtgctcggttggatatacctagggaacgcatgcgctgcattcttaccagtgctagcttggggtccattgaggatggagaacgttttgcccaagacttaactggcttatcaccaacctcttcgaggaaatttcgaattattgagggtacaagggaatcgcgtcctggctcgcaaactgttaccagtaaagaagctaacgcattggctgaattcgacctaaattcatttcagtgcgtagctgaggatcttgaatctgcacatgcagcaatagaatctcttgccgaacggatgggctggcaaaagccaataataaaagatcatagtgcattacgtaattggttgtttgataatttgactggtttcggtcctattgaaacgcttattgaaatagtttcaggtaaagctgttaagctaaatatcctgagtgaaaacctttttccggactctccaaaagaaattgcagagcgtgcgacagatgcattactcgcattgggttgctatgctcagaggacttccgatggcagagtgctaattccgacccgcatgcatctttttcatcgaggattaccaggtctttatgcctgtatagatcccgattgtaatcaacgtttaggcaaccacagcgggccaactatacttggccgcctgtatacgaaaccattggatcaatgtaaatgcgcttcaaaagggcgaatctacgaattacttacccatcgtgactgcggtgcggcttttattcgtggatacgttagttccgaaatggactttgtatggcaccaaccgaacggaccattatcagaggatggggatatcgatcttgttcccattgagatattagtcgagggaacacctcatttacatagtgattaccaggacagatggctacatatagcaacgggactcctttctaaacagtgtcaagacgaggattctggttatcgcaaagtttttatacctgaccgagttaagtctggatcagaaattacatttgatgaatgccccgtttgtacgcgtaagacaagaagtgatcagaatgaaccttctaaaatcatggatcatgttacaaaaggggaggcaccttttacaacgttagtacgtacacagatgtctcaccagccagctagtcgtcctattgatggcaaacatcccaatggggggaaaaaagtacttattttttctgatggccgacaaaaagcagctaggctagcacgtgatattcctagagatattgagcttgatttgtttcggcagtccattgctctcgcctgttctaaactgaaagatatcaaacgggaacccaaaccaacatcaatactttaccttgctttcctatcagtcctttctgaacacgacttgcttatttttgatggggaagattcccgaaaagttgtaatggcccgtgctgaatttgatcgtgattgtgatagcaatctggctcaagcttttgatgatgatttcagcccccaggagtcaccgtcacgatataaaatggcgttgcttaaacttttatgcagcaactactattctctttctggaacaacagttggttttgttgaaccatcgcagcttaaatcaaagaaaatgtgggaagctgtgcaggccaagaagctcaatattgagagcaaggatgttcatgctttagctgttgcttggattgataccttactcactgaatttgcttttgatgaatctattgattcgacactacgaaccaaagcggctggattctataaacccaactggggtagtaaaggacggtttggaaaagctcttagaaaaacactgatacttcatccagctatgggggagctttctgtggaagttttggaggatatttttcgtactcatctgacattaggaaaagatggtgtttactttcttactccaaatgcacttcgcctgaaaatcgatctcttgcatgtttggaagcaatgtaatgactgcacagcactaatgccatttgctttagagcattctacttgtcttgcttgtggtagtaacaatgtcaaaactgtcgatccgtcggaaagcagctatattaatgcacgaaaaggattctggcgttcgccggtagaagaggttttggtttcaaattcgcggcttctgaaccttagtgttgaagaacataccgctcaactatcacatagagatagggccagcgttcatgctactacagaactctacgaactgagattccaagatgttcttattaacgataacgacaagcccattgatgtacttagttgtacgacgacgatggaagtgggggttgatattgggtctctggttgctgttgctttaagaaacgtcccagcaacgtgctgggcgagcaggccgccgtggtgcatctgtttcaacggtggttacatattctcaaaatggccctcacgatag

SEQ ID NO: 84673 - DNA, 477 bp, Citrobacter koseri
atgagagtcaagttaacgcctccatcttcaccatttatccgatacccaccatttctatactgtaatattgaagacttattacctctattccatctagcacaaatggaatatataagaatccataaaaaagaagaatcacatatctttataaaattaaaaaagatgcccaccattaactggatttaccttgaggcatttgcactaataagttttcatgctttgatggctagaaatggaaaagatatattaaaaaaagcatcatcatggattaaaaatgagtcttcaaatgatatccaacaattttacataattaaaaagcaaattgaagaagattttaaaaacacattcaatgtagatatgtccgaacaacctgaattcattaagatttataattcatgtttcagtgaaaatgtggtcgagctccaccccacttcaaaaacaataacctcgataagaaaaaacatatttaaaaaataa

SEQ ID NO: 84674 - DNA, 1812 bp, Citrobacter koseri
atgaaaaaatgttttatctatcatcgcgttagctcagaacaacagctaagcggtacgggtatacagcgacaagccgacaatctacaggcatatgtagaacgtacaaacctacttgctgaaatggaagatccagaggctaccataatcagcgatcaaggggtatcggcgttcaaggggctgaacatgtcagaaggggagttaggccgatggatggaacaagtacgggcgggtatgtgggatgattcacatttagtactggaatcaattgatagatttagtaggcaaaacccattcacggtagtagcgtacttatctgaactggtgaaccataacattactatccatgatgtatcgttgaatatgctaatcaatcgtactaatagtgctatgttgccaatagttactatgagtgctcaacgtgcctatgaagagtcaaagatcaagagtgaccgtatacgtgatggttggcggcgaaagcgtgagaatgctttcaacaatggtactattgttactaacaaacgcccacaatggattgatgtacaggatgataagtatgtactgaatgataaagtagctattgtgcgtgaaatatttcgcttgtatcaaactggaataggtacaccaactatagctaaagtacttaacgcaaaaggtgatgattggctttttgaatctggtaggttgtggcgtggtgaatcagtacataagattctaaagaacaaacgtgttacaggtactatctttattagcgaaattattcgtgattataatagtacttctaatccagttgatcagaaaacttatgaaatggatgtttaccccattgctataccaaaagaggaatttgatttagtacagcagttgatgagaacacgtagaccaaataacggtagaattactactagtaaagaaactgaagaactaaagaaaagtaatatctttaattcagtatgccgttgtgctcgttgtggtgaggcgatgtatcataatgtagtactagctaaccgtgattcaaaaaagaatggaaaattcacagaggaatatagatacatccgttgtataggtgaacgtgatggactttgtgacaacaaggcactacgttatgaagtagtagaacaattcgtgattgagcatatcaaggggatggacttcacacagatccttaaacccaatgagaccaatccagagattgaattagtacggcaacgcatagaagaagagaaagcacacatacaggaatatgaactaggtattgaacgtttaaaaaatcagggtaagaaagttccatttgatgtactaacagagttacaggaatcacgcgataagttaaaggaactggtagaacgtcaaagtaccttcacagaagtacaagtagatactgattacctaaaaaccgtagaaccttcggtactatttgaccaaaccaatatagaggttagatcaagaatcgaacgggaactatctaaggtcatagatactatccaattatacagaacgggtaagcactatgtgattactttgaagtaccgcaatgttgatgtacttaaacatgtactattcgttgaagcaaagaaagtacctgtactaatctcaggcgttgctattgaacgtatgggtagtactgtagcgtattctacgccatcctttagtattgttatggtagatggtaattcacctcgtttaatcaacatagagggagaaccattaagtattatcgactactcattactattaaactatgtagatgctgtagatagggatgatgtagtaggggtttggatgcgtaatatgtttaatacccttacggcttga

SEQ ID NO: 84675 - DNA, 153 bp, Citrobacter koseri
atggaaaagaaaaataaagatattccagtatctatccgtatcacggaagaacaagctgaagcaattcaaaagatgttagttgatactggcaaggcaaagaaccgatccgcaggtattcagtacttgattactcaaatgatgataaaaggataa

SEQ ID NO: 84676 - DNA, 2070 bp, Citrobacter koseri
atggatgaagaactatttctaccacgattggtagaccgcaaagcattacgagaagaagcagacaaattacgtgaagccattctaaacggtacagtaattgatagagtactagcaaacgcacttagagaagaaatgaaccaaggttcaaagtataacggggaatggacactagaacctaaccagtacataagcagtgtctttaataagatggatctatcaagtggtgtaaaccttgtaaattcatcggttggcactggtaaaacaacacagtttatacaagaagctaatccagagactaaccagaaagcgagagccaaaccaggttacatagtattagtaccattaacgtctatacgtttatcctttgaaggtgataatgatgtattcagtaccggtatttgtacttggaaccaaatcgaaacaatcctaaagcacagcaataaagaatactttgcggataaaactctagtgatagatgaggttcacggattctttctagattatggttataaggcaaatgtgataaaccgtcttattgcgtcattcccacttttcaaaagtgttattatgatgtctggcactgctactcctaatgacttttcaggaattgaattcaataaagtttacaaaatcaataaaccttctgaagctcgtaaagtaatcagtaccgtagtttcaacaagggtacaggatcttgtactgaaccatttgaattcaagtaaacgcaaaaccatagtattgctaaatgacaaagcacagtgtgaagcattgaatcaaatgtgtacccgtactggcttagtagtgaatgctgataagaaaagtaatgatgatgttgtagaactatatgtaagtggtcaaatgaaggttgaagtactttatggtacttatagtatcgttgaaggtctatcaatagaaaacaagttagaagaagttgatatagtcattgttggtgatgaacatcccgcacgtattgaacaattcacaaaccgtttccgtaagatctccaaactaaagaatgttacgtactatgtgaaccgtagggaggtagttgaagttggtatcttcaatcgtgctgaagtagttgctgatgctaaagtgatgaaagaacttctacaaactacatatgaagcacttcaaacagaggaagctaagtactcattcactagccagtaccgtaaagatattgcgggtagtatggtgtacttccatgaaggaaagtttgacgtatcgtttacaggtattgattacgcatactctgaacataaaacacgtgagtatgctaatgatttttcattactttctgctgaactaaagaactatggtttcatcgttcaacctctacgatttgaagatggcgatggtgaaaataacgcagtcattaccgatactgccaaaagactaaaagaagaggctgtggaggccgagaactcgatcatagaagagtacctatctgatgccattaatggcacggtgaagcccgtagaagaggctacagagctttatacggccatcgatcagagtgtacaaaaactactggcacgtgggctacataaggatgattttgaatcacttattagagggttcattgaagatcgtagcttcttctatcgtgctcacgtggacgcagactactacccaacaggtagcacgatccgtgaaatgattgtgaacatggtagccggtagaactaagctagacgcttttgtgatccgtgatatagcagatgccattatccaaaaggtacttaaagagtactttgcgggtaatacagagttgatgttgaaacatccaatgtggtcaaaatgcgtaacgatcaccagtactggcttagagagcagttcatctaagggagctaagtcaatcgttgagcgttacatcactttaggtaatggcaaggtagagagcgtgaagggagtgaaggttagactttgtgaagtagtacacctatcactaacgggcttgcgatttactagaccagctttcacaccagctatacccgttaccggacacgtggaatcaaggcagtctcttgaagggatcaaggcaaaactaaagcagttacgcatgtaa

SEQ ID NO: 84677 - DNA, 384 bp, Citrobacter koseri
atgaaagaacaattcatatatatgtgtaatgtacgcaataaacacactaaagaatgtagcgtaaaacttggatatacttcaaacatactagaacgtatcaaacagctagaacgatctaatattcattatgaatactctgacttccgtttgttcaagcatgaatcaaaaatcattggatacttgtttgatgagcagaggatacatgtaagaaatcgaaagtatctagcaggtatcagccgtgaagtaatgccagtaggttatacagaatgctatgaatggggctaccaatatgatctagtgaatcagctaacatatcttggttatagttgtgtttatgatgaaagtacatatcaacctccacaaacaccaatgttccaatggtaa

SEQ ID NO: 84678 - DNA, 330 bp, Citrobacter koseri
atggacattgaaacaattgaatacctatttgggaaggaataccgtattagtactgacaaccagctaacgagcattcttctgaaggttgggggtacgctgtacttatggtgcgatgagtacactatggtgaagaacgtagagcatgacattcacatgatgtactcggacttctttggtctacgattcatgaacaacgaagatgcttatggtaaagtactattacgcgacatgtttctaccaggtatgcgtactaaccataaccttagtacctatcagtacgcaaacactgaaactaatcatagaacatacacccgacatttaattttgtaa

SEQ ID NO: 84679 - DNA, 795 bp, Citrobacter koseri
atggtagcggcaagccgagagctatcaattaaaaacggtattgttaaaaagtatgttgctactaattcagcaggtgtaacgggtgctgatggcttgtacatacgcccttgttctcacagttctgatgatgatgcagttaatcaggaaattaataagcaattagaagatgcgttttataaatgggctgaagatccaaaagcgttttcacgttgcggtacattagatatcagtactttccaacgtctggttgaacgtacacgtagtatagatggtgattgctttgtaagaattcatagtggtaacgatggtatgccgcaagtagagatcattgattcaatgcgtattgctacatatgacaaccagttattaccgtcaggtaactttatcagtaatggaattgaatatgatgttggtagtaatcgcccggttgcatactggattactaaatataacccaattacatatcagtacttaatcggtgaacgtgaacgagtaccagcagatgagatactacatctattccagcaggactacccgacacaacagcgtggtattccagatgtacacgcagggactgataaactcaaagaacttgaggaatttatgagtgctgcaattacttcccgtaaagtggctgcgtcagcaatggcatttattacaaatccagattctgatgatatagatttagttaagggtgatgatatttcatattatgaacaggattatttgaatccagcagctattgtagaactacaggctggtcataaaaactgtcaaccccactcagactactga

SEQ ID NO: 84680 - DNA, 273 bp, Citrobacter koseri
atgataaataatagtgcattaagtaatttaaattttagtgactttgacaaacttacacacgcccaatatgtaccaactcgtcaaatttctttagatccatataaagatcttcaaacagaagttttggcaattcaaaacggaattaagagtaaagcaatggttattagtgaaatgggttatgacccggcggtagtcatggaagaaatagaaaaggaaaaaatggaaaatggaattaaaacaaactcaacaagtgagggcgatcaacttaagtaa

SEQ ID NO: 84681 - DNA, 129 bp, Citrobacter koseri
atgataaatttatggaaggtaaagacaacctttcagaaattacaaatacagaagaagcaagaactaatcttgaagtgtattcaaaaagtgaaactgatagccttactgattccgtacaaactaatttag

SEQ ID NO: 84682 - DNA, 888 bp, Citrobacter koseri
atgacctgtgtggtcaggaggcatcaagaaaaagcgaggccggtttttaccagcggctggattacactgctgaccacgcagcacgcgggaagccaggctgagccggaggcgaaaaacacagactttaaaccggaagatgaaaacgccattcggtggatatacgagccggggagctttacgccgctggcgcgttatgagaaagggcaactgcactatgccatcacagatacggttggccgcattcaggagctgctgaccgaagacggcacgattgtctggcggggtaaacagcaattctggggccggaaagaaagtgcgaacgacgataaccactcatgcagactgcgctttccggggcagtatgaggatgcggagtcagggctgtactataaccggttcaggtactatgattgcgagacagggcagtatttgtgtgcagacccgatagggctggcggggggactgaatctttatcagtatgcacctaatccactgtcatggatcgatccgcttgggttattaagatgtggtctgactggtaatgaggttggcgatgcttcgaatctgcctgttataaaacctggttctaaagagtggaaacaggctgttgatacgatgaggaataatggcagtagtaaacctaattttagggttgcagataagagtactgcagaaagtctattgaaagactccaaacctaaaatcccggagtatccagagtattttggaagtaaaaattatcctgataaaactggttttgaacatcatcctaatgagtctcatactataaatgcgccagagaataacctgccacatataaaatggtcggattacggttcaggtaagaaggctcctggtagcggaaaaggacatattttttatgactga

SEQ ID NO: 84683 - DNA, 177 bp, Citrobacter koseri
atgagcctgaatatgttctggtttttacctacccacggtgacgggcattatctgggaaccgaagcaggctcgcgcccggtcgatcacggttacctgcaacaaatcgcgcaaacggcggaccgcctgggctttacaggcgtattgatcccaaccgggcgttcctgcgaagacgcctag

SEQ ID NO: 84684 - DNA, 204 bp, Citrobacter koseri
atggaaaatcaagctcgtctcatccgtttaccagaagtcatgaagaaaactggatttggtaaagcgtggatctataggcttatcagcaagggatgttttcctcaaccagtaaaaattggtcttcgtgcagtagcctttgtagagagcgaagtagataactggattcatgaaacgattagttattcgagaaataaagtttcttag

SEQ ID NO: 84685 - DNA, 672 bp, Citrobacter koseri
atgagcagccccatcacgaaacactgcaatgaagaagttaacattgacccgttaagtcgccgagaaacgaaagctgagatgacaacatccaaattcgagttgttcggcgaaacctacatgttcgttgagaccttttctgcaactgtcattagtctcctcccaatcactgaccaagtttgggttaaaacgaatactggggatgagacacagattccagcctttggtatcgcatttagaaaatctcacaaaatgtgtaaatacgagcttcgccagtatagagttgatggttcatttagtgtcttcaaagatgctctcattgttaatgcaaccactggtgaatacgaagtcaacttagatagaaagacagttattatcccggcgtttctcaccgtacttttccctaacacttcgatggcattttattatagggcgatgcctgttcctaattttttttcgaccatatttatcttgctttgttgcattgcagttttttcattttttgtgttgccatggggttttaaatctggatatgtttttgatgaacacaaatatatgtggctaacctattttgcttcacggtttggaagctttacctgcattaaatggataaagagaagaagccaaaagtttgataacgcactcagaggaattattaagtcaataaaattttaa

SEQ ID NO: 84686 - DNA, 1269 bp, Citrobacter koseri
atgaagggaatgcaaaagatccgcagaggtaagaattttatcgggatcgtcctctatacgttaaaaccagattctcatcatagggtagctcctgtagtgatcgggggaaatatggatggatgtgcagcgaaagatctgatcactgaattcaatctaacaaaaacgcttcgccctgatgtggataaacctgtttggcacaattcgcttcgtttaccaaagggcgaagtgctaaccgatgctcagtggtccgctatagctgatgactatatgaagcgcatcggcttctcggaaacgcatctcagatgctacgtgttgcatgacgatgcggtcggtcaacacatccacattatcgccagccgcatagaccgtattacaggcaaactctatctcggcaaaaatgaaaacctgattagtacacgcattatccaacagcttgaacatgactattcgctactaagaaccaaaggccctaaaacaaaagcatcttcagcattgccctgccctaaactaaaacgaaaaaaaacgcgaaatgaagcgatgcaagaggaaaggacaggtgaacaatgcccaaaaaccatcatccagaacgctttagagacgttagtttctaaaagagtatcgaccactgagtttgtccaacagctttttgaacaaaatattaatgcattacccaatatcacatctacaggtaaaatgaatggtttctcattcgaatacgccgggattgctttcaaagcttcgcaattaggtaagtgtttttcatggtcgaccttgcagggtaaactcgattatagaccggagcgcgataacggctttctgtttgacctaaaagcaagtatcactaaagcgaatgcaaacgaaatcttaaaggaaaacgttagaaactccttcggagcatttattattgataggcatgcaggtaaagacggaagtgctgtcgcttatgtagaagagaggtgttcctcggaagctttagcagggagtaataaagcgataacaactaaatccgtaaaagagatgcctaatcaaagctacgaggtctcagcattcagatggatggaaaccataccttaccttgatacgatttatcgtctgctgaaacaacttaaaatcccaattcttagacgccccgcaaagcaccaagtcatcactgaagcgatgaagatagaaatccatcccatcaatcccaaaaacactcttaaggtgcctttacttgacggcaatttagtgccaccaaggcaacattaccaccttacatgtagattttag

SEQ ID NO: 84687 - DNA, 438 bp, Citrobacter koseri
atggtcggtaataataattttaataagaccattataaatacgcgagcttcctgtagaagctcttgcgaaacgaagctttcacacaagcaaattcgtaatcattgcgtcagtgtcaggcttaatgataaagagctgacgcttctaaatgaaaaacgtggccagcatcgcaaaggggaatggcttcgtttatctttgattaatacgcttccagttgtagttcccgcaattaatatagaagcttggagatctttatctgacctttcactgaaactaaataagattattacccaccttgataacaaaagcccaggaagccagctgacacagacggaactctttgctgtgaagcgacaaattgcagatcttcgcttacatctcatcaccgccgacttatggggagactccgatgaagggaatgcaaaagatccgcagaggtaa

SEQ ID NO: 84688 - DNA, 1725 bp, Citrobacter koseri
ttgcctcactatacattaaatgatgttcatgtgtgtccgttttttgaaacaatctgctttattatagcatccacttttatatgtgataagcaatcattaaaaggaatagaaatggttactaaaaaaaagatgataacgttaaatattttcttggccgaaaagaaatattcaaaaaatgattttacttttttcttatcaaaagcatgtaaagagtatcctataacaggaatcaagggaatgacgggggcttgcttcattaaagagaaaaaagaaaacgcccctaaatggaaggattttatagaaggcattgtaggtcagaaagttgatgacctaataacaaaatcgagttctgctgctttattagttaaaagtaaaggaagaatctttgcgattacatttggttatggtcggtgtttaattgaacaatcttacttcgtgtctgattttggaataaaatcagcattgaatatgttgcgacacgactcactgaggagtgtcgatacatttacaattgatgactcaccagttcagcgtaaatcgcaagcctcttctaatatagagatatcaatgttcggattagatatcacaaaagatattttacgctctgtaacgggattacctcttaaagatgttcctttcaattatgtttgtggaggtgataataacctatcagtaaaaatagagatggcaccagacgatatcccagtttatgcaaatgaatgccttaagcgttatactgacacttgttatttggaacaattttcttgggttgacaatttaaaacgtgtaaaagtttcacagagaattgaatcacttgataatgagttgattgcagacattaagaaaaaaaacattaaacgaattaacatagttatcccagaagtgtttgatgaagcagaaattgattcgtttacatttacacggagcaaaagctccccttcgcactatatagataaagatatatatttcaatggattagatatagcttctgttgatatagaaaaaattaaaagggataagctttttacttatgacagtcaaggctctgaagttaaatctttctctatatataaatgtttaaattacgaaaaaacaatcaacaaaaaaaattatatactattcttaggacattggttcgaagttgacaaggaatttgtcgatgatattgaaactgatctaaaagctattccaatccataaagactcatttcctaaagttataaaaagcaaagatccaaaaaccaataaagataaattcgaaaccgagggtgattataacgaaagaattagcaaatctaagggttatcttcttttagataaaaaacttgtaaaaagtagaaagacaacaacagctattgaattatgcgatttagcagatttaaataataaaatcttaatacatgctaaacaacggaatggtggttcgtcaggattaagccatttattttcacaagctaatgtggcagcagaattgatgctcagcgatcaagagtttaggaaatccgcaagagatgttcttgaaaaaaactttggtgcaaaagctatggatctcatcccaattgacaatattaaaagcagtgaatacgagatagtactattaatgcttggggctaatagcaaaactgttctgaaggaccttcctttctttagtaaagtgaatttaataaatacgttctcaagcttaaggcaaagaggctataagatttcagttgcaggtactttataa

SEQ ID NO: 84689 - DNA, 1068 bp, Citrobacter koseri
atgtttaaggccatcgatttattttgtggaggtggtggcctaactgaagggctcaagcaagcaaattttgaggtcatatctgctgtagaaaacaatatttcagcagctgaaacgtttaaagcaaataacaaaaaatgccatttatttcaagaagatatcagattcatctcaagtcaagaaataatggataaagtagggattaaaagcggagaactttctctgctggctggttgccctccatgccaaggattttcatcattaactaaaaattataatcctaaggataaaaggaatagtcttatttcagaagtaagtaggttggttaaaggattaatgccaaaagcgattatgattgagaatgttcctggtttgatgactaaaggaagtgattttttagataatttcataaacgatcttcaatccctaggatataaggtagattataaagtattacaggttgcagactatggagttccccaagatagaaaacggtttgttctgcttgctggccatggttttacaataaaaataccagaagcaacccattcacgagacggaagggatgggacattaccctggaatacagtaaaaatggcttttgaagggttagatgctcctgtacctcacattgaagctgtgaaaaatggtggtccaagattatttaactggcatgttattcgaactttaacacctattaatattgaaagacttaagcatgtcaaaccaggcggtccaagatatgatataccagatcatcttcgtcctgactgccataaaggtaaaaataagggatactctaatgtttatggaagaatggacttcaatagtgtatctccaacaattacttgtggatgcacagtcctaagcaaaggaagattcggtcatccaacagagttaagaactatttcagttagagaggctgcacgtcttcaaacatttccggatcattttgatattgcaacatcatttatagacgatgcttgtcggataattggcaatgctcttccatgcgaatttgcgaaaataatgagcaatgcctgttatgaagctttgataaataaagactga

SEQ ID NO: 84690 - DNA, 2082 bp, Citrobacter koseri
atgagcgacatggaaaaacttaaattaagatatagtcataatattatagaacatttaggcttaaaattatatcaaaataaacctactaatgttattgccgagttaatatcgaattcttgggatgctgacgcccaaaatgtatggattgaaatagctcaagataaagtttccattacagatgatggatgcggtatgtcttacacagagttgatgaatgattatttaatcatagggaaaaagaaacgaagtaaagataacattaccgaaaaaactgcacgtcaacggaatatgatgggtagaaaaggcataggtaaacttgcgccttttggtattgccaaaaagttaacattgataacaataagtaaagaagaaaaactctataattggattcagcttgatctatccaaaatgttgtctgaagaaaatgatgattctcccaatgattccattatttatgaaccaactatattggctgataatatcccaatagaaaaaattgatacagctttgaagttagaatataaaaaaatattagataaattaaaagagtcaggaacggctataattctcgaagatttatcgcttaaaaaaatcatttcttctgaaaaattaaaagaatcagttggacagcgtttcaccgttacgctattaagtgatgattttaacgtctatattaacgagacaaaagttagtgaaaaagaagccctacctaatttctataaaaggtatccagaaagtggctatgaagatcaaaccttgaccattaatggtcaagatcgccaagtccgttattgggtaggctttgtggagtctgctgagtggccacaagatcaggctggcgtgggcatctatgcccatggcaagttagcacaagatcgcccctttgtatttggattgaaaggtagagagatctggacacgttatatgtatggtgtaatagaagcagactggttagatgaacttgaggaagatgtagtatcaaccgacaggacaagtgttaactggatgcatgaagataccctgcagatgtatgaatggggagctgggttagtaagaaaatggattagtgattatcaaaaattccaaaaagaaaataacaaagggaaagttattgaaaaaataaataaactacctacagacttaagagttacggaggtagaaagaaaagctatttccgacatagtatgtagtatgagtccaaaagtacagaaagatgaaacattacagaatgaagttatatcaaaactaacttcagcatggactcatgcaccaagccatatgattattcaatcactatggaataaagtaaaagacttggaggatgagcaagaatttattaaattgattgatcaaatcaatgatcatttagttcctgaatcaatgtcattatccgttatggtttcacaaagaatttatgcgctcactaaactggaacgtttgagtaaaacaggaacagagcctcaattgcaatctttacttgagcaatttccatggatattgggttcagataaaggaaaagtacatgcaaatcaaacgatgaaagagattgctaagaaagcagcacaggaagggaaattagcagcccatggttttacagctaaaagtgtttcagaacaaccggattcaggcactagaccagatttcacaattttttctgatacaaacgagaataatataatattgattgaattaaaaagtcctttattagatcttgaaaggattcacttaaaccaactcaatacgtatatgggatggtttgaggataattatgatgcgaaagtttacggctatttaattggtagaaaccctaacgcttggcgagaaaaaaaccataataaaaatattgaagtgctctcctggcatgatatttgtgtcagatcaagaaaggactacattgaattacttgcagcaatgttatatggcgtatcggaacattatgatgatgcgagaattaaaagagctgttgaattcggcggctcagaatcaatcgaattactaaaaaaaatggcaaaagcgcaatccccattaaaagatttatttgaccgatttgatcataaaacaggaggagcattagatgtttaa

SEQ ID NO: 84691 - DNA, 747 bp, Citrobacter koseri
atggcaagagataagcctttaaaattggccgctattgttcagagtggatttacagaaaggttagatgcagacagagcttatgctgatgtcttaatgaaaaaccctctcaacattcatgaatggagaacgacatggacaaatacttcagcatatgatctacaatacctattagattttatcccagacaaaataagaatttcgagtaaaaagaaaagtgttatacatgggctgggccgcaacgttaacttgttcgaagatttaagaattattgcttataaagaagtattaagttttaaaaaaagtaaaaactatcgttgttttttttatgatatgctatcaaaagcgactttacttaataatcatagcaaccctcataacccattatctcatgaagagacaaaacaaatttgtagcagtatttgtaaatggacatggcgtaatttttcaattcagaaattttcgataatacaatcaataagagcaaaaattattatgataattcatggaaaattaatcaaagcaaaagacttagctaaggctgcaggtgtatctcgttcaacagtgattaaatattacggcattagccgtgagaattacgaaagggtagcaactgaaagaagaaagcttgcttttgaactaagatcatcaggtttaaaatggaaagaagttgctgaaaaaatgaacacgacaaaatatagcgcaattgcatattatagacgatatgtagcattagcgaaaaacaaatga

SEQ ID NO: 84692 - DNA, 723 bp, Citrobacter koseri
gtgaagctggaagatttagttcagaatcaaaatgaaacaattgatttactctataatgaatatgattcaattatggaagatattaaatcttccggccttgataatgaaaaaattaataagctgcatgatgctgggttaaagctattcaatttcatggatggatgctatgcggcattagatgctgcggaagaaagtttaaccaatgaaaaaacgacgcaactagctgatttggcggggcttttctgtgatgcgcttgaagagacgatcccgaatcattattcaataatgtgtgcgtattatggtgataattataagccaagtaaacatgcttttgctgggatgcaacaactaatagttcaagtaaagaataaaaaggaaattaaggaattaaaagaaaaatgtatagacaatggcctacctgtgaaagggtttgataaaaaaagaagattcagaatgacaaaaacacatgaacgtatctattctgccatacttggaattttaagtattaccgttatggtaacacttctgtttttcctagagatcgatgactcatcaaagagcaaatacattatattaagtgttgtggtttctcttttaggtggaattggtgctcgattactatcaggcgctttaaactttaaaataaaagatactacagcaactgctggttatgctgcatttgttattatatttttgatattgcagggagtcagggttttttaa

SEQ ID NO: 84693 - DNA, 270 bp, Citrobacter koseri
atgtctaaattagtagaagagttgaaaacagcacttgcttttgatcacaataagatcatcacaggagagctaacagaagagcaagctctaaaaattgctaatgacctgcatcaattaggaagaaagccaacagatcaagaagtttatgatgtaattaaaaaatactataatggagaattattaagctccgctaatgaaagtcgagatcaagcaagaactaacactttgcagcaaacaattttaaaaatgattcaaagtcagaaaaaataa

SEQ ID NO: 84694 - DNA, 717 bp, Citrobacter koseri
gtgagccgtctggggccgaaagcctttgaacagtgcgcgggcttcctgcgcatcaaccacggcgataacccgctggatgcctctaccgttcacccggaagcctacccggtggtcgagcgtattcttgccgccacccaacaggcgctgaaagcgctgatgggcaacagcagcgagctacgcaatttgaaagcggtggatttcaccgacgacaaattcggcgtgccaaccgttaccgacatcatcaaagagctggaaaaaccgggccgcgacccgcgtccagagttcaaaaccgcgcagtttgctgatggcgtagaaaccatgaacgatctgcaaccgggcatgattctggaaggcgccgtgaccaacgtcactaactttggcgcgtttgtggatattggcgtacatcaggacggtctggtgcacatctcttccctgtcgaataagttcgtcgaagatccacacaccgtggtgaaagcgggcgacatcgtgaaggtgaaagtgctggaggttgacctgcaacgtaagcgcatcgcgctgaccatgcgtctggacgagcagccgggtgaaaccaacgcccgtcgcggcggcggcaacgatcgcgcccagggcaaccgcccggcggcaaaagcggcgaagccgcgtggtcgtgatgcgcagccggcgggcaacagcgccatgatggacgcgctggcggccgcaatgggtaaaaaacgctaa

SEQ ID NO: 84695 - DNA, 216 bp, Citrobacter koseri
atgtcattcgaaaaacacgacagcccgttgtatttccggtctgcgcgggaggctatgcgccttgagcaggcgggagagtacgaccgggcagcgaaggtatgggccaaagccaaccgggaatcacgcaatccggtaaaccagcagtggagcgataaccgctctgatttctgcatcatgcagaacatccgcagcaagcgaaaggaggtggatgaatga

SEQ ID NO: 84696 - DNA, 213 bp, Citrobacter koseri
atgaaatttatctacatggtgatggatggtcgtgcgcagttcgatatcgaccgtgcaaccgtcctcgaatgctgcggcaacaaacaaccttcgtggcgttccatgcgcaaggactggggcgaacaaggagcagtgctggttcgctttcgtctggtaccaaacactaacggcgaagtcgctaccgaccccgaagtcgtcggcgtcatcaactga

SEQ ID NO: 84697 - DNA, 222 bp, Citrobacter koseri
atgaaaatgacattactttttgcttccctgctggcgctcagttgcaccgccagcgccgcgccatttccggtattgactgacgccgcgccggaaaaagcaggatttaatattgaacggcttaacgcgctggataactggatagcgcaacaggttgatgccggttatccgagcgttaacctgctcattattaaagacagtcatattgtttatcgtaaggcctag

SEQ ID NO: 84698 - DNA, 552 bp, Citrobacter koseri
atgcgactttttggttacgcacgagtttcaaccagtcagcagtcccttgatattcagatcagggcgctcaaagatgcaggggtaaaagctaaccgcatctttaccgacaaggcatccggcagttcaacagatcgggaagggctggatttgttgcggatgaaggtagaggaaggagatgtcattctggtgaagaaactcgaccgccttggccgcgacactgccgatatgatccaactgataaaagaatttgacgcccagggtgttgctatccgattcatggatgatgggatcagcaccgatggcgaaatgggaaaaatggtggtcactattctgtctgcggtgtcgcaggccgaacgacagaggatacttgagcgcacgaatgaaggcaggcaggaagcaaaacggaagggcatcaggttcggtcgcaaacgagttgtagacaggaggaaagtcttggaactctacagtgaaggtatgggagcgacagaaatttcacgccaagtaagtgttgcacgatctacggtatataaaattctttctgaagagagatga

SEQ ID NO: 84699 - DNA, 210 bp, Citrobacter koseri
atggaattaaaagctagtgaattcggtgtagttctgtcagttgatgctcttaaactgtcccgacagtctccattaggaattggtatcggcggcggtggcggtggcggtggcggcggaagtagtggtggccagggcggtggttgtggcggttgcagcaacggttgtagtggtggaaacggtggcagcggtggaagtggctcgcatatctga

SEQ ID NO: 84700 - DNA, 855 bp, Citrobacter koseri
atgttgaatattctgccatttgagataatttccagaaatacaaaaaccttgctcatcacctacatttcttcggtggacatttcccatgagggaatgaaaaaaatcctagagagcctgcatacccaacggggtattattcctgaatcctaccttgacgaactactggattatgagtctattgacaaagacaaaggcaaagagtttcttgtaacaactggcgtgataaacaaaactaaagcatcgtctctctgggaacattcggtcataataagcgatgttccgcaccttttcagggacgtagaggaccaatggaaagcggatggaattctagtttctcatgtccaggatgtacgagaactggattttaatttacccgactcgacgttgatctggttgcactttgaaaaatatgacccagagattatccagtcagtgtacactaaattcgagaaaaataatggcgttgcattcatacaaagctactacctcaaagaatcgttcagaatagatggtgtatattcgccagtacttggaacaccttgtcatttttgccacattgagagatggctgaacagggaagaaaaaagcttcaggcgcaatgaaatgtcttgggcaaatctgcttaagttaatgaaaaaacaaaaaatgtcgctgccagctctggctttaagtgagtcagaacgagggttcagccagcatttgattaaacggcggcttcaggaactggttggcacctcactcgttaaaagtcatgtagataccttcatgtcatctgtgagtacagatttaattacctgcgttctgagtaaagagccggtaattcactggcaggcttgtggttgcgtggagagataa

SEQ ID NO: 84701 - DNA, 807 bp, Citrobacter koseri
atgtcaaaacatgaactctctttggttgaagtaacacattacactgaccctgaagttctggataatgtaaaggattttcatattagagggaattttgcctcccttcccgaattctctgaacgaacttttgtttcagcagtaccgacggcccatcttgataaatttgaaaataaagaagttcttttcaaaccgggcttcagttcagcagtgaacatctccccctcacttcacttcagcagggaaagatgtccatccggaattggcttttgcgacagaaatagatgttctgttcacactattgaaaagctgctcgttaatgcgttcagttctcctgatccagcctccgtcaggcggccttacccttcaggtggtgctcagtacccagttgaggtttttttatgccgattgtctgaaaacacggaaaactggcagaccggaactaacgtttatcactacctgccactaagtcgggcattagaaccggtcgctgcgtgtgatacccaggagctttaccgaagcttgtccggtggagatgcagaacgtctcggtagaccccattttgcacttgtctattgcgtcatttttgaaaaagctttattcaagtaccggtacagaggttacaggatggccttaatggaagcaggttcgatgtatcagaatgcgggattggttgcagatcaaattgggctaagaaaccgcgtatgggcgggatttactgattcatacgtagcaaaaaccatgaatgttgaccagaggactgccgcaccgctgattgttcaattttttggagatgtcatcgatgattaa

SEQ ID NO: 84702 - DNA, 1188 bp, Citrobacter koseri
atgattaatgtctacagtcacctgatgtccgcatggccagccacaatggtcatgagcccaaagttgaacagaaaaatgcccaccttttctcaggtatgggactacgagagaattacaccagccagtgcagctggtgaaacactgaagtcaatacagggagccataggtgaatactttgaacgccgccatttttttaatgagatcgtagctggcagtgaaaaaacattatacgaaatgatggatccgccagccgcagatgcttttacagaagcgtttgttcagacttcttcgctgacagaggatgcggtcagaacccacagattcaagactactcgcgccttcaatctgtttagcctggagaaacaagaaatcccagcggtcattattgctctcgacaatataacagctgctgatgacctgaaattttaccctgacagagatacatgcggatgtagctttcatggtaatttaaacgatgctatggacggtgccctgtgcgagtttatggaaagacagtcgttactgctttactggttacagggaaaagcaaacactgaaatttctggagacgtcataacagggatcaactatatagatgaaattttagtagccctcagagctgaaggtgagctcagaattttcgatatcaccctccccggagcgccaggacacgcagtactgacgctttatggtacaacaaataaatgtagtcagataaaatatagtaccgggttatcttatgccggtagtctgaaaaaagccctgtgtaaatctgtaacggaactatggcaatcatatatatgtatgcacaatttccttattggtggctataccgatgaggatatcattgacagctatcagcgccattttatgtcatgcaacaaatatgagaccttcactgatttgtgcgaaaacaccaggctgcggcataaggatgtcatattgtctcttgaaaacaatacattagaagatgatttacttagctacctagaaaaaatatctagtaatatttttgtttactatgcgagagaaagaattagcgaccatcttgtctggtatgcaaaaatagtaagtcctgattttttccttcatatgaacggttcaggagcactaaattttaacaataaactatactgtgccggaaacggtattaaacaaagagaatctaaaatggttccatttccataa

SEQ ID NO: 84703 - DNA, 651 bp, Citrobacter koseri
atgtctccaaccgtgttgttcttttttctgcatttcaatgaaattgaacagcatttcggtgatacattatggctgaggcatcagatatcgtggttcgtaggatatatttcattttctgttgttctttttaattactgtctgtatctgacaggcagaagagaaagtggttttattgctaccttcgtccacagtatagagggccgtttgttgtttattcgttctcaattgatggcttctcttatcatgtcagttatgtatgtgttattttttattacagtcgtattcattggattccaggcgcggccagactatcagacggttatattaattttaaaaactatatgcataaatgtgatgatgatgatttcactgacgtttatggcatcattccgtgtgactttccagacagccagcactatctattccgtgttgataacggtgtgtatggttttagggatcgtatcattaaaatataacgatggactagtttactggattaatatcataaatccgattgccatatactccacacttctccagccaggcattgagttatcgtacatcactattttagtctatggcctcatgtttatcataagtctgatttcagcgctgaccttcaaaacagaaccagtgtggagttctcaatga

SEQ ID NO: 84704 - DNA, 729 bp, Citrobacter koseri
atgaccataccacttttagaaataaactcccttagcttttcatacaaaggccatcctcctgtattcaataatctgtcgcttgaaatagagcagggaggactgataggtctgcttggtgaaaatggggccgggaaaactaccctctttaacataataaaagggggaagcgacaattatgaaggttctgtcaaacgttacttcactggtggtgaaatggtaagtctgcctcaagtgataaatctttccgggacgcttagaaatgaggaggtttttgatctaatttgctgttttaataaattgaccaaaaagcaggcgtgggcagaacttaacagtaagtggaatgatgatttttttatccggtatgaaaaaataagacataaaagaacctatacggtaagttatggtgaaaaacgatggcttataatatccctgatgttaactctctgtaaggatgcccgtttctttttgctggatgaaccaacggttggtattgacattcaatacagaatgatgttgtgggatcttattaacgaaattgccgctaatgggaaaactatttttttctcaacacatatatttgatgaacttaccagagggtgtattccattctacatgttgtctaggaatggtattaagcactatactgatatggataatttcatgcatgtgaacaacgaaaatacgccagaaaaggcttttatcaaagaaattatgggagctgagggttga

SEQ ID NO: 84705 - DNA, 561 bp, Citrobacter koseri
atggagattaatggtaaaaaaataacaaaaagacaactgaatgaagcgaaaatatcgaatgctagctactataattgtatttttgaacgtattcaactagacaatataaaccttcgcgattgtgagtttgaaaattgcctgtttataaactgctcattaaaaaccttgagtctcgatttttttaaacttattgattgtgagtttaaaaattgtttactgcagggtgtgaacgtctctgatattatgttcccctgtacgttttctcttgataattgcgaaatgagatttattgacttagtcggtttgcgattgcagaaatcaagctttttatttacaaagttcagagattgtttatttgaagaaactgatctccgtaaatctgatttcaccgggtcggaattttataataccgagttcaggcattgtgatttatctcgctgtgacttttcattgactgatggccttgatataaatcatgaaataaataaggtttcttctatgaaaatccctcaggatgccggttttaaaatccttaaaaggatgggggttattatttcatga

SEQ ID NO: 84706 - DNA, 198 bp, Citrobacter koseri
atggatgataaacatttgaaagatactaatggctctgttctgttaagtaattcgtgtgtggatgataaaaactctgggttgtatattccagaaggaattgcttattcaaaatcattgattgcctacaaccctacaggtgaagcgttacaaactcaatttttaactggctggatgggaaggagttgtaatgaacattaa

SEQ ID NO: 84707 - DNA, 408 bp, Citrobacter koseri
ttgagtctgacattaccattaatgtatttcaagacaggtgcagatctcagcaaaatcacacattatgaagtgcactatcaggacggctttgttcagcaggcatggttgcaaccagaaatacaactatttgttgtgtgtatcgctaagaaaaaaggctctcgtcgcgagattaaaggtggaatggccgttcttaccagtatttcggccagcgatggcgcggaactggcaaaagcgctggataacgttatgcgccagtctgatgagttgcggccactggcagggaaagacgaaaacgtctttatcccggccagaattggaatttctggtgaagcaccgccaacagagcaagaacttctaagtgtcttttaccagcaatgcctgaaacatggctcatggggcagtgcctga

SEQ ID NO: 84708 - DNA, 648 bp, Citrobacter koseri
atgactgctaacgagctgcaaaatcaatttgatgaggcgatagatttctttcagttaatagagaagcttagcagtgttaaactagctgtaacggatgatgattacctcaatttgaatcgtgcctacttcagaatttgcactaatttctacagatcctttatatctctgatcgggagcggtaacccgtttcctgcaattgtcattctacgttctattttggaaatctacacaaagggtgtctatttagagtacatagaaaaacctaaaggcacagatgttaaggccttgatttgtggagataaagattttccaagttttttcaaaatggcatcagacctcgacaagtatggcaaagatgaaaagaatggcttagaaggtatgtttaagcagttcacaaagcaggatctggcacagtacgaaaagttttccctcttcactcatggtcgcggtgaatttgtacaaacctttatgaaatctgacaatgtcagattacaacctgcgcctgttagcgatttaattcaaactgctagggggttgtatgaaacgttttctttgttttacttcggacttcaaaaacaggcagatgcgtatctcaaactgcgcgataagatacaaaaatcagcactatataccaaacgagatatctag

SEQ ID NO: 84709 - DNA, 696 bp, Citrobacter koseri
gtgaacgaatacaagataaagcatcacaaactaatcaggtcggtattgaataatttcaatgccgactttttttttagtaactccatttattttggaggtggtacccgaattgctctagaaatagatgagtatagggaatctatcgatgttgattttttatgcccgaatatggaatcttatcgtgctgtaaggcaggaagttacttccgattcgcttgggcgcttagtgaagaaagaatttaattatgcacgagaaatcaagtttgatcgatacggtgtgcgaacgttcataatggaagaacagacacctatcaagcttgagatagttagctttgataactacgatttagtcgctgatacgcgtgaattgtttcctgtcccttttatagatcatgaaagctgtttttatactaaattgctagcaaattcagatagatgcttacaggcacaatgtaaggacatttttgatattttggcaatgtatgacgcgtggggaggcataccacaaagtgcaatattaaaagcccaaaaacattatggttcttctgttttaaaagatttaatccgctcgcttaaagatatacaaatcaaaaaagagcattattacggccttgccgaaggcatgttaattcagcctgagtttgctcaaaaacttattgatgatattgcccctcagattttagaagagatatcttag

SEQ ID NO: 84710 - DNA, 207 bp, Citrobacter koseri
atgggtgaaattattcgaggcaactatccagaactggacaaagtgctgtgggattttcacactcagaaaattcctgcaaatctagcttttcgtatgtacgaggagcgttggaattttgttgatgaaaaacatataggacagaacgaacgccagttgatcgatgccttaactgattattacggtaacggtgtgttcatggctgcataa

SEQ ID NO: 84711 - DNA, 447 bp, Citrobacter koseri
atggcgctcaaggcgtgcggctttctcacgctccagtcgcgcctgtctggcctcaaaacgcgctttcgcttcagccgcgcgtttttcttcttgcgcgatcgcgtaaatctccgctttttcctgacggaaatactgcacaagcggaatactgctggggcatacccaggcgcaagcaccgcactcaatgcagtcggcaatgttatgcgcggtggctttatcgtgctgttggcctttgctgaaccagtacaactgctggggcaacaaatcggcgggacaggcatcggcacaggcgctacagcggatacaaccttgctcttccggcgtttcgcccatttccgtagcggaaggcgcgagaaggcagttagtgatcttcacgacgggaacatcaagccagggcagggtaaagcccatcagcgggccgcccataatcaccatttgatcggctga

SEQ ID NO: 84712 - DNA, 162 bp, Citrobacter koseri
atggacgggcagcatgcggccgcgaccacgggtcagcggctggcctcgcaggacgcgatcgcccacgttaacgcacagctcgccctcagcgccaatatgctgcttaagaggaatgataaagcgcggcgccagtggaacctgtcgcagaggcgtaccgtttga

SEQ ID NO: 84713 - DNA, 1161 bp, Citrobacter koseri
atgcgcatagagtactttggaaacatagccattttcctgtctgctttttttatcatgtggattcttgcatcaagaaacaagcttccacatttaacatcaagcgatggtagacggtatctatttttagatggattaagaggtatagcggcgatatccgttatcaacacgcatatatggcgtttagctcattatggctttactttcgaaggatacaacgctcaactccaatataatcatttttttggctctatcggcgtccagatctttttttgtataacaggatttcttttctttgaccagattataaagaagaaagcaatttttgactgggataagttttttaaagccagaattaaaagattagtcccaatatacattgtggcaattgcattatgcgtcattatgtttttgtgcttcgataccactcggacattaagaactcttgattattacaaaatcataagattgtttttctttggtttttatggtgcgggaactggggatagtatcggtggggcaaatccggcaatgtatactactgttatatggactttatcctttgaatgggcgttctatttattcatgccaatattatgcattattgtcaagaacaaatcattatttgtattgtgtttatttttttcattactactcgcatccacaggattcagtgcaggttctgaattgctttggcctttgttcgctaccggaggcgttgccgcatacgtatttaataaaggaatcgtagctaaaggattggcatcccatgctttgctagttgtcgccgctgcactcgttgctctgtacttttactcaggacagaaaagactatttgtgatgaatagttacttaatagtcagtgccatttttatattgcttattatcgcaagaaataaaatatttgaatgtaaggtttttgtatatctcggagaagtaagctacagcttgtatttactgcatgttctcgttattaacatcatatcattagtatcattcaagatgtttggtaaggtaacgatttcagaatggaaggtggttgctatttatgcgctatcatcggcaatatgcgcgtacatctcttatttatcatttaaatatattgaatatcagtttattaaacgcaaaataacaacgcatactggagtggaagcagcccgttaa

SEQ ID NO: 84714 - DNA, 2061 bp, Citrobacter koseri
atggctaattcatatcagaatatccctgttcctaccccaacacagaaccccgtaccgagcgcggatatccgcgaccatgtgtttgccggttctaaacttgatgagttcgtgacatcacttgcgattcagtatatcgaccgctttggtaaggttcattacacaattgaaggccttaagaaacttgttctacagcagatatataatcttggttttaatccggtaggcacgttccaggatggtgctactctcgtttccgccggtgacatcatccaggatgaaacaacaggcgcatggtatcgctgggatgatctcgcgacgttaccgaaaacagttccttccggctctactccagattcatccggcggtacaggtgtcggaaaatggctggctgtagatgtcagcgatgtcctgcgccgcgagctggcgttgccaaccggtgcagaacagatcggttatggtgacgtgacggttgccgagcggctgtcttatgatgtctacattactaacgctgatccaaccggcagcaccagtgcagtagccgcaatacaggctgctattgatgccaacaagggtaagcgactcgttctcccggctggcgactatctgatcgacgacacgattttcattccacgaaacacgcaactgtgcggagtggcaccaattccaacgatgtttcatgacatggtgcataacaacgcaatcgtggatctgattgctgagaacggctatacgaaacttcatctacgcggagagccaacgaagcgaatcctcaccgatgttgttcacggagctgacgatccggcgtacagcatggggatcgttttcgctgaatccggtgccgtgttggataacattgcagtcattggctggcgtaaacgtacagacgggacttatgagccgccatcattgacggcgccgaatgacgcgggggcagtcccgtgttttgacattccggtattcaacgcatcagtaatgagcgtgagaatgcacgacactatgatcgctggttatataccagaaggcagcgcttgctattggattgatgcttctcgcggcgagcaacgaaatggtagtggaaatgattttaacgttgatgatcgcattaaatctgtcggccctaacgactctcgtcagatagattgttgcttctggtggtttcaccccaatacaccatcaacttctgatgcaagaaattattatggtttaaaagttcagggacatgatgatgacatacgtaatcttacgcgatatcccagcgagagtgccgctgataacgctggggctgcaaactggatttggggcggcccagggacaagcgatcacaaattccgtggaagtgtaattaaaggaattagccttgactgcactattaagtcttatgttggtgatgaccgcttaaattataataaagcaactatcgttggcggtgccaatggatatcccggcgcatggcaaaaccttactggtgctggtgggaaattcagtttttctgactgcgtcatcaggcacggtgacattaatcttaaacgagttgcacaagtatggcttgcaaatacgtacggcgaggctggttatttctatatgaccaaccttactggatacgtaacaatatctgatggatttatagggcaaggtgttcaggacgtcactataaataacccagatggtacaaccccgacaacttacaataggatcaattccccactttataaagcagttaacgcagggaatgatgacaggtttggattgatccactcaagcggggcgcataactactacaggccgcatattgatggtgttttgtcacttgggtttgacgatggttcaacaagaagaaggttttcttctgtatattcaaataatattcaaactgaattgttaacttcatcatcaaacagaaacaacgttggttttgtgaagccgccaagattgccaaactacactacatcaggtttgccgactcttgtagcatcagattatggcagcttggtattcaacaccacaacaaaccgtgttgctgtatggacatcagcgggatggcgttctttgcaagaggtctag

SEQ ID NO: 84715 - DNA, 318 bp, Citrobacter koseri
atgacagagcgagtgaagaaggcgagcgataaccgtttatcgttcatgtgcccagggtgcggtagtcgccatgtggtgcaagttggcattggcaatagtccgcgatggggatggaatggaagcgttgataagccgacgctgactccaagcgttttggttactggcttcatgcccagcgatgatccggatgagtttgacgacgctacgaaagacaagccgtttacttgccattcatttgtgacagatgggcagattcaatatctgaatgacagcacacacagcatggcaggcatgacggtgccgctgccagagctttga

SEQ ID NO: 84716 - DNA, 402 bp, Citrobacter koseri
atgattaccacagaacaggccaaagaatatctgaagtcagtcggtatcacgctacctgatttcatcttagaggcgctcgtagagcaggccaatagcattcaggaatgccttgatgagcactactcaccagctacagcgctactgattcagtcatacctgttgggcatgatggctctggggcagggtgacaagtacgtgtccagccacaccgcgcctagcggggcgtcagaatcattccgctatcagtcgttctcagatcgctggaaggggtcgttaaatctcctgagaggtctggataagtatggctgtgctaactccctgatccctgccgaccctaccgccgccccggcatttgctggtatctggatcgggaagggcggctgcatgtgcggggataagtga

SEQ ID NO: 84717 - DNA, 294 bp, Citrobacter koseri
atggctaaatacaaagttgtgcgcccatggttcggcgtgaaggttggcgacgtggtggagttgaaagaacttcacccggcgctgaagtccaacgttcggctgatgaaaggcgaggctggcggtgagcttaccccgtctacacctgatgctggaactgataatcgctcacgcaaagaagttatccaggatcgtctgactgagctgggaatcgagtttaaaggcaatctcggagctgaaaaactcagtgatctgttgccggatggcgaactcgttaaacttttccctgctgaataa

SEQ ID NO: 84718 - DNA, 1077 bp, Citrobacter koseri
atgtacttctctaaagagacgctggcgactaactcccgcctcggcgggcactggaacgagctgtgggcaaaccgcgacatgtggaacctgcagaacgattccattattgcggctaaccgcgcaatcatgacgcctgacatgctggcctgtaacgccgttggcggtttctcacgcgacttctgggctgagattgacaaccaggtgctgcagctgcgcgatcaggaagtcggtatggacatcgtgaacgacctgatcggcgttcagacggtgctgccggtaggtaaaacagccaagctgtataacgtggtaggcgacatcgctgacgacgtgtcagtaagcatcgatggccaggcgccgttctccttcgaccacactgactacgcgagcgacggcgacccgattccggtgttcactgctggctacggtgttaactggcgtcatgctgctggccttaactctgttggcattgatctggtgctggattcgcagatggcgaagatgcgcaagttcaaccagaagcgcgtcaactactacctcaacggcgattcaaaaattcaggttcagtcctaccctgcgcagggcattaagaaccaccgtaacaccaagaagattaacctcggatctggtgctggtggtgcgaatatcgatctgaccactgctgacatggccgcgctcttcgcgttcttcggtaaaggcgcattcggtactgccgcccgcacgaacaaagtcgccgcatacgatgtgatgtgggtttccccggaaatctgggcaaacctggcgcagccgtacgtggtgaatggcgttgtaagcggcactgtattgcaggcagttctgcctttcgctccggtgaaagaaatccgcatgagcttcgcgctgaccggtaacgagtttattgcgtacgttcgtcgtcgtgatgtgatctccccactggtgggtatggctgtaggcgttgttccgctgccgcgcccactgcctaacgttaactacaacttccagatcatgtctgctgaaggtctgcaaattaccgcagacgatcagggcctgtccggcgtcctctacggcgctgatttggactaa

SEQ ID NO: 84719 - DNA, 450 bp, Citrobacter koseri
atgccacgttatcgtcgcgttaatatcgacggtcagtctctgtacaagaccgaaactcgcaccacggcagctgcactgcttccgggcaccgccgcaaccataaactcttccgataaattcgctcaggccaccgcgctaaccggccgcctgtacatcattgatgtcggttaccaccaggggctgaccatcactgaagcaatccctgccggtgattcagctgttggcaactacgtcgaagaagggcgtgagctggcgttgcgttgcctgcctggtgcttacaagaaagacagcccgattaagctggggacggctggtcagttcacccttgccacctccgacactgattcagtgatcggctacagccaggatgaatataccatcgcggccagcactaccgacttcattcgcgtgcgcatgcgcgttggcactgtcgccgcagctggcgcgtaa

SEQ ID NO: 84720 - DNA, 1323 bp, Citrobacter koseri
atgaaattccaggtaaaccacgaagcaaagcgtccaattccggcgccgaaaaatggtgagcatattcaggtcaacatcaccacaaaggtgaatagccagtctatccggcgcgaaacatacaacgggcgtgagcatctggtgcttccgagttacacgctgccggcgaacgtcgtcatgaatggcgggctgtacacgcaggaagaaatcgacgcccattatcaggggctggaaggcactctggcgccgctggggcatcctcaggttaacggtcagtttgtgtctgcattctccccggaagggattaacgcagggcatatcggcgcgtggaaccgcaacgttaagaaatccggtaatcgcatctacctcgaaaagtgggttgatgtggctcgcgctggcgaatcggaaggcggcaaagaactgcttgagcgcgttgccgcgattgaacgtggtgatgacgtacctcccattcataccagcgtagccgctttcctcgaccaacttgagccgaacgaacagcagcgcgctacaggggctgagtgggtggcgaagattcacggcatggaccacgacgcgatcctgctgcacgaagttggagccgcaacacccgagcaaggtgttggcctgatggtcaatgccgatctggctcagccgcttaaggtgaattccggcgcgctggttggcgaatcataccgggagcgcgaacagcgtctcgatcgcgcagctaaagcgaagtttgcggcgggcgcggatgaatacgcctggatagctgacttcactgactcgcaagcggtaatcatccgcaacggcggcaccgctgaggtgtttggctacaagtctgatggcggcgttatcaccttcgacgataccggcaccgcagtagcacgccaggagtcgtgggtggcagtcgtcgctaacaaattcaaagctctattcacaccgcaggaacagcctgcaccaaaccacaaaacggagggcgacatgcctttaaccaaagaagaactggaacaaatcggcagcatgatcggccaggctgttgcgaccaatactgaagcggctattaagcctctcgcggaaaaggttgatgcgctacaggccaaccagatgcaactcgctgacaccctgaccgccaactcacgcgctgaagagaaagccaaacgtgatgcggttgccaaggtccatggcgacatcgtggctaacgcgctgtctggcgaagctctggacgcgatgttcaagtcgctgggcgaagctgcgccgctgggcaacaacaatgctcagcagcacaaagaaaccggcgcacctgccgctgacgaacacttcaagtaa

SEQ ID NO: 84721 - DNA, 927 bp, Citrobacter koseri
atggcgacgaaaaagacgaagccaccgattctgccgcgtaactaccaggatccgactggagccgatgcgctggaacgccgggcaatgaaagacttcgccaggcggatgaataagattggcaaagcgtacaaatccgcactcgacaaaataccttcctccctctcagtaaacgccagatacgaataccagctaaacccaacgctgctctccatcattctgaatgatgccagttacctggttgatcaggtgctgcttgaaggtggcgattacgacctgtggttttacgagtacatcgatctggcttcggagaaggggaccgggcagtcgttctataaccttagtcagcaatccccggtgtatgcagcagggcgtgagtcgctggcgtccatcctcgcaagcgacccgtaccagcaacgcatggcgctggtgcatgcccgtatgtttgaggaaatgaaggggctgactgctgaagttaagcgcgacatggcgcgcgtgctgactgatggggtggggcgcgggcttaacccgctggatattgcccgcaacctgacagaccagaccggcatcgagaaacgccgggccaaccggatagcgcgaaccgaagtgactacagcgctgcgccgggccaagtgggatgaagaccaagaggcgaattacctcttcggcctgaaaacgctgctggttcacatctcggcgctgtcaccgaccacccgacatacccacgcagtgcgccacgcccacctctacaccaacgaagaggttcgtgactggtacagcaaagatggcaactccatcaactgcaaatgcagccagcagtcggtgctggtggatgcggacggcaagccggaatacccggacaccatcacgaaactgaaacaggaatataaatcgatgcaggcgcgcggttacgcctgggcggagaaataa

SEQ ID NO: 84722 - DNA, 432 bp, Citrobacter koseri
atgaatttacagcagcttgtttcaaacttgaaaagttacagccatagacttacttcagcgaatatggatcttcatgaaaccattgctcgagagatgcataacaggaattcaatgagcgatcacgtcaaagtgagtctcgacgaaaataagtgcttacgcattgaattccctgatttgaaatttgaggcgttaagccgtgtcagactggttgtctgtgataacaatattttcgcagaaacagagttttacatcaccaatggtgactccgagacaagtctctactcgtattacctcagtcaaacagaagagctgagctttgatgacccaaaaggagactcctcacaggacattgaccattatgacaatgtcgcttttgacgtgctcaacagactggttcagtctgcaataaccaaaaaaatcatttcgctttga

SEQ ID NO: 84723 - DNA, 270 bp, Citrobacter koseri
atgggtattgaaacgattatcgggctggcagctgcggtgatagctgccatcgctggcgcttttggcctgggccacattcgcggcaccaacaaagctgaggccaaagtagaccagcagcgcaccgaagagaacgccgcggctacggttgctgcagcagaacggcgggtggaagtaacgaaagaggccagtaatgtacagcagactgttaaccatatgcctggcgacgatgttgatcgcgagctgcgggacaactggacccgaaagggttga

SEQ ID NO: 84724 - DNA, 144 bp, Citrobacter koseri
atgagcaagccagccaaagaaaacaacactacttttgcgtggatgaggccaacccgaaaattatcagaagcagagcggaaggaattacgcgatgcaatcagtggttatgttggccgccgtaaagcagaaggagcggcccaatga

SEQ ID NO: 84725 - DNA, 471 bp, Citrobacter koseri
atgagcgtgaaacgttatgacgtaatgagttacagcctggatgtggacggaaatttaggcccatttgtgaaatacgaagactacgccgcacttgaagccagatgcgcggcgctggctgcggagaatgcggggctgaaggctatcagcgtgaaactttataactacggctatctgaatggccaccatcatacagttgagggctatttcacagatattcatcgcagtgatatcgataactatcacagtgacatcgttgaagaaattatcgatgaagaaaccccggctaccgacgctttcctggctgaagtgcgggcgcagggtgtggagatgtttgcagccagtcttggtagcccatatgtagagcgtggcgaggaatgctatcaagatggatacacgcatgccattgaaagaatcaaatgccgtaaagctcccgagttcgcagcccaacttcgcaaaggagtgcagccatga

SEQ ID NO: 84726 - DNA, 468 bp, Citrobacter koseri
atggcgtatccaacgttagctgtggctaatgccttcattgaaaaagcgttagccaatgaattatccgaactgacgcctatgaaacttcaaaaattgatgttttatgctcagtcatggcatctgaagatttacgatgaacctttgatagatgattttttctccaaatggcagtatggtccggtaataccatcgctgtaccatgaggttaaaagctatggttcttcacaaatcaatagcctgataagtaatctaatgcatactccgcaaggcgtcatgattgctacaccaaatgtaccaaggcaagacaccaaaacacgtcaattgattgataaaattgttagtgtttatggaccacttcgtgggactcagttatcttacctgactcatcaaccaggtacggcttggtcaagaacggaaggttatagctcagtcattggcaataaccttctcaaagagtgtattgagtag

SEQ ID NO: 84727 - DNA, 381 bp, Citrobacter koseri
atggctcagcgctcttcactcgaagatattagtctcccgggatcggtcgatgcgatcccggattcagcatccgtcactgacgagcaagcctctcccgaaaagcacccggcattagtacttcaggaagtcgaggaccgcattgcagatcgtgtactgcgcgagaagtttggagacaaggcatataaagttgttagaaagaccttatatggatggtgctggcttcttgcaatctatgctgcattaaaattccgctttcaagtggaaatattttcagacaacgtgcttatagctataacttccgcagtgacgctaaatgttttcgcagcattccttggtgtgatacgaggcctcttcccggcgacaaagccaactaaggattag

SEQ ID NO: 84728 - DNA, 201 bp, Citrobacter koseri
atgaacgagcaactggcaaacgaactgatagcggcactgcgggaacagaccgtagcacagaaaaaacagacggaagcaataaacagtctggctgaatcaaatatggcgctgtgtgatgtcatcattcagtctctggctgatgagatggacacgccgcatgagccacaaacttatctcagcgggaaatccgtaaggggttga

SEQ ID NO: 84729 - DNA, 627 bp, Citrobacter koseri
atgaaccaatcacaatttcagaaggcggctggcatcagcgccgggttagctgcgcgctggtttcagcatatcgacgcggcaatgaaagaatacggcattactaaacctgatgatcaggcaatgttcattgcccagtccgggcatgagagcgccggattcacccggcttgtggagagtttcaactacagcatttccgggctcaccggattcattcgtgccgggcgcattactcctgaccaggccagtgcgcttggccggaaaacctacgagaaggcgctaccactggaacgccagcgcgctattgcaaatctggtctatagcaaccgattcggaaataaagctgctggtgatggttggaaatatcgcgggcgtggaattatcgggatcaccttcttggacaattacatggagtgcggtaatgcgctgaagctggatttagtaagcacccctgagttgcttgaaaaagactttaacgcggcccgcagcgcggcgtggttcttcgcaagtaaaggctgtatgaagtacaccggcgacctggtgcgcgtcacgcagatcatcaatggtgggcagaacggcattaaagaccgccgtgaacgttacgccaaagcgaaagccgcgctggtctga

SEQ ID NO: 84730 - DNA, 456 bp, Citrobacter koseri
atgaattacgagttttttgagcgtttaaaccgactgataccggggtctgtgaaaattgaccgcgagaattccacggtgacgctaactggatggaagttagaagaatttaatgcatccagccaaaagcaggacagcaccaagcagatcgaaaaaaagacctgcgggtttaacggttctcatcctgaaggtgaagactcgttccctaaacacattttcttggtagatggccgttttaagagggtgattaatccactcgcctattccgacagcgacacatccgagtgccataaggcctgtagcacctgccggataagcaggaaacatcccggcgccagcgagaaggaagacaaaacttccgagggcgataaggactttgtaccaggcgttaagagcaagctgcgacagtgggttttgcaagttttccgattcctgttcatgccaattcgaaaatcttaa

SEQ ID NO: 84731 - DNA, 141 bp, Citrobacter koseri
atgaaaattactcgcgagtatatttcaaccatcaacagcgaacagaccgaaaccaatcaccacccaaccggctcttcgttgaacggcagaagctatgccgtagcgctctttaacaatcagcaaagtcggaacagcacatga

SEQ ID NO: 84732 - DNA, 537 bp, Citrobacter koseri
atgagcaacatcgacaaacacgcattacgtgaagcagccaatgcggcaaacgcagcatcatggggatgttggaagtcttacaagccacacaaaggagcgcgaggctatgaggtgaaagttggcgtgaaagcggtagcgcaacattgcctcaaggttgattcagttttcatcgccgcagccaatcctgccaccgtgctggcgctgctggatgagctggaagccagagataagcaggttgctgagttagttactggccgtctgaacctccagtggctattgaacgtctatgtccacgcatacgaagaggccaaagaacagattgctaaggacgttgagataaaagccagactatgccgtgaaagtaacagattgtttgacaggttacgtgccgcagagaagcgcatagcagaccagcaaggaatcatcctgtcagcacgtcaatttatcagtgaatacgcagcgagtggtgatgttggtgctgatgagttcgtgaaggtaatcgaccgcgccgctggcattggcgttaagggggagtga

SEQ ID NO: 84733 - DNA, 1263 bp, Citrobacter koseri
atggcaaaactgacagacttacaaatcagagcatggataaaatcgggtgaacattttgctggtcgctctgatgggggtgggttgtatttatgcttcccagaaaattactcagtacccttttggcgtttgcgttatcgttttgcgggcaaacagcgatcgctggtcataggcacctacaccgagttgtcactcgctaaagcacgagcaaaagctaaagaacagtcagcacgggttgcattgggttatgacgttgcgggggaaaagcaagaacgcaaagctgaagcgctgaggaagatggaggaggaaaagcacgcgctacgtgtttcagaactggcggcagaatactttgaacgtcagatcctcaatcggtggaagcatccagacatcctacgtcgtcgcatagataaggacattaatccggcaatcggtcgcctcagaatcgaagaggttaaagccagggatattgatgacatgctgcaaaaaatagttcagcgtggtgcacctacagtcgccaacgatgtgctcagatggactcgccgtatcttcgattacggaataagacggcatatgctagaaacgaatcctactagttcttttgaaattgatgatgctggtgggcaggaaaaaagtagggaacgctggctaagccgagaagaacttgtgcgattcttacaggcaatgccaatgacaaaaggtttctcacgtcagaacgagcttacgatgaagcttctgctggtgttctgctgccgtaagatggagctttgtggtgcacgctgggaggagttcgatctcaatgaagcagtttggcgcttacccgctgaacgagttaagaatggtgatgcgattgatatacctatcccggcagtagctcttgaatggctgaaagaactgcaccagatgtcctgcaatagccagtgggtacttcctgcgagaaagatgcagcaccggatgatacctcacattcaggaaagcacactccctgtagcattgagcaaggtgaagggtaagctccccgacgtgcctaattttactattcatgattttcgacgtaccgcgcgatcgcatctggcggcgttaggtattgatccggtagttgcagagcgttgcctgaatcacagaatcaaaggcgttgaggggatttataaccgttatcagtattttgatgagaggaagcaagcgcttgagctttgggctgacttgcttgtttccttagaaagaggcgagggttataacgtgatgccattgagaaaagtcatatcgtga

SEQ ID NO: 84734 - DNA, 1623 bp, Citrobacter koseri
atggcggccagtggggatctcagtatcactgtcagtgaggcaaatggaaaagtgaatgtattcaccgttccgtacacctctatgcccattttgcttcgcaaaggtcggatgaagtatggtctgacgctggcacgttttcgtggcatgagtagtcggtatggtgatccattgtttatgcaaggaacactggtgtggggcggcccgggaggtacaacgttttatggtggtgcacagtattcaccggattacctggccgttcagtccggtgcaggtattgatatgggacggccgggggcgctttccgtcgatataacacatgccaacagcactctcgcaaatggaaaggattatcgcggtcagtcagtgcgttttttatattcacgtatatttaatgatacaggcacccgacttcgtctgacgggatatcggtactcgacaaaaggtttccatactctggaagaaacagcactcaggaagatgagaggacgtctgtatgaccatgacgaactggatcggtatggtcggccggtaacggatacccactctgattattacgacctgaccaacagcaaacgtgcccgttttgaagccagtatatcccagcctgtatggcgctatggctcagtgtggttgtctggtgtcaggcagacttactggaagagtaaccagagccgtgattctgttcagattggatacagcggtacggttggttctgttaattattcaataaactacgggtatacccgccagaagaatgctgctgtgccttcctggactgaccgtacgatagggctgtctctttcgcttccactgggaagattactttcgcctgactccgggaataacaacacatatgcttcgttttacgggagtcgtgatgggaaaggccggaacagccagatggcagggctgagtggcacgctgctcgaagaaaacaacctcaactggagcgtatcacagaacctgagtggtcaacggaatggttctggtaacgccagcctggcctataggggggcatacggtaataccggtataggatacagctacggaaatgattttcagcagtttagttatagcatgtccggtggtgcaatcctgcatcgcaacgggctgacgatcggacaaccatccggtgaaacagctgtgcttatttcctcccgtggtgtgcagggcgtcagtattcagaacgaaccgggtgtcagaacagactggagaggctataccatcaagccctacactacatcctaccgcgaaaaccgtgtttctgttgacagtaaatcactggacgatcacacggatattgttgatgccggtacagccagaataatcccgacaaagggggcagtggttcgtgttgattttaatgtccgccgtggctatcgcatattatttacgctgacacgtaatggcaaaccacttccttttggttctgttgtcacagggggcagcacaagtggtttggtcggcgatgacgggcaggtttatctgtctggaatgcctgaaagtggtgaagttcaggtgagctggagtaaagatgtgaatcagtcatgtgtggtcagctatcatttgactgaaaagttactcgcctcacccgttgcccgcgttgacggaatatgtcgatga

SEQ ID NO: 84735 - DNA, 2427 bp, Citrobacter koseri
atgagaagcatatatttaaaagaaaagcatttagctggctcaatgcaagctactgatagatttttatgcctaacaaatattcttcgctccatgctccaaactgtttccatagctgcgctagagctagctaaaagtgaaacaattacagatgaccttgatatttcagacgctgtcgaaagatttaaaaagcctgcggatggaatgcctgttgatataattgacaagctaacaccacatctacgagcccatattgactcaagattatttcatggatggtacgagcgagagtatgattctggtaaaacactgtcaatactgttacaagaatgggttgcattcagaaataagaagcctgcacatggggttctagatagagcttcaatgtttgaatggacagaaaaaacagacacactaataagtttgtgccttgaagtattttcatcaattatacctagcattgatgacaatgaactttatattgacattccatcaggaaagttgcgattagacttcccattgatgtttggcggagaggcaatagtaattagcgaagtaaaccagagacaagggaactggaagctcaaattacaaccattaaattatgaatcatccgaaataaaggtattatcactcaatgaagataatatctttaatagtttcaatgaaaacagcaatgaaaatcataaaattattgaagttgaatgcttgggtaaagaatatattgttgaacataatatacctattagacaaactgagacatttgaaggtagacaaaaagaagtccagcatctagtagaatggcttaatgataatgactccagaagatgcttggtttatggtgatggaggttatgggaagactacgttagttttagaagcacttaatcgtttattagaaggtgatttagatgttgaaaaaaacttcccttcattaatatgcttttatacagccaaaatgactcgatggacagaaaatggtttagagcgtttcagcacgatccaacctgtgatggatgagtgtataagagagataattaagttttacagcccgacattagatcgtcaatggtatacagcaagcggtttaagcctaataagcaaagcagagcaatttctgactgagaaaaaaatatcaagaaacgatttgcttttaataattgacaattcagaaacgctaagtgatagcccacaaaaaaatgcagagcttgcggactttctgaaacaagcgggaaaaaagattggtcgcttgatcataacatcaagacgacaagaaaatgttgaagtcgagcctatattagttgaaggcttagacgaaaatgactcaattaggctcctaaatagattggcagaagtctatgatgcacaaccaattattcaagcaggagaaaaaaaacttagaaccacagcaaacaaattaatgaataagccattattgcttgaggcattagtagtatatatatctcgaagcaaaatttcaattgatgcagctgttgaaaacattttccgaaagtcaaacgaagacctacttgaatttctttacgaagatgcctgggatcgccttaatgatgttcaaaaaaaattattttatataatagtatctatttctagcccattaaatagcacagctataagccgagcttgtcaactagtagaaattcaacattcgacttttttagatagtttaaaagaaacgcattttgcatccacactagattatggaagtcactacgaacttgagttagtagaattagcaaaacgctttttcgaaaaaaagatatcagaattagatacagctaaaaaaagagaaattaatgatttagttaataatgttgataagtacacgcaagaaaggataaaaatcgaacaggaatatagagaggatcgagtttctgaagcatttagaagtgaatttagtaaagttgcaaaggttgcagtagacaatcatgactatgctaaagcactagaatactataaatttgctatagaagacgatcccttcaactctgctttacacgatcgtttctcatggttcctttctaataaaatgaacgacctacctgaagcgcttaaatatgcgcttaaagcaattgaactcaataatgagaattgtgatgctttggtcaatgtagctctaatacactataggcaaaacaacatccctgaaggggataaatatatcgataaggccgaatcacttggtagagcaaagtcattttgtttattaagaaaagcaattgccagatatcatttaatctcaaaagatatcagcaaagatgaaaaaaaccttatacttaatgaggttgagagattactaaagcttgcagataagaatttctcaccagaaataccttatgcgatgaaaacaaaaaaaaccattgataaattcaaagagcttatcttaagaaagaaattcgcattaaggaagtaa

SEQ ID NO: 84736 - DNA, 933 bp, Citrobacter koseri
atgactagtcgcccgcagatgattattaatgttcttcaggctaatcctgatgaacaattcacagctcgccagcttgcccaaaagatcatagatcactatggtgcagagcttgccgacaagcgtcaaaaccctcgttttgccagcgatgaagatttcttgagtcaaatagcagctgaagtcggtgggagcagaaccgttcaggcaaaagcaatgtgtccccaggttatgacgcgtgacaagcctcggcctagactattttactggggtaaggaaatttataatggtgtgcaacaagagtcatctttggatttcgctccgactccatctgctgagacggtaagtttttctgagcatgccctttacccgcttttgattgaatacctttctgaagaagaagaattgctttgtcgtcgtatcgatgaaaagcgttcaagcaacaacaaaggcctaggtgcaaaccattggctttatcccgatattgttgcattgcagcctctcgataagggttgggatactgtagtgcaaaactgcgtacgccacagcgaagggcgtttaacccgtttatggtcgtttgaagtaaaacgccaactcaaccgtagcaatgttcgagaatgtttcttccaggcagtgagcaattcaagttgggcccactttggctatctggttgcgaccgaaatcaatgaagataagcagcgtggcgtagaaagagagctgcagatgttgtgtgcattgcatggtattggcgtgatccttcttaatccgcaagatcccggtaatagccaaactctgattcctgcacgagagcgaacaagtattgattggcaatccgtcaaccgcttggtggtagagaacaaagattttaaagagtttatcgatctggtttccgattatctccagacaggaaaaatacacaaagcgctctggaatagataa

SEQ ID NO: 84737 - DNA, 786 bp, Citrobacter koseri
  misc_feature (771)..(780): n is a, c, g, or t
atgttcaaaacatggaatgatttagaaagttatacacaatacgtttattcgaccttgcttaatccaagagataatggagtagacgtcagtcgtaatattaaactcaaaggattaaaaggtgaatatcaaatagatgtattttatcagtttgaacatgcaggcgtcttacatcgtgtagcgatagagtgcaaatatcataatcgtcctcttgatcgtgatactattatgccgttttgtaataaaatcactgatattgggaacattataggagttatagtcagtaagtctggttaccagagaggcgcaaaagaatacgcagaaaaacatggcattactttactaacaactgaagacttaccaaaatttaatatattagttgctgattacttaataaactcagctttacctacaaaagattggattggagaacctttctggattttgatggaaagagaggaagataatgtttcaggctcatattataaattcgcacaaaaacataatggaagagatgtaatacccttatttttttcaaaacgtgaagcaatcgactttctaaacgaatatgagcaggcaactatttttgcaatacggggtgttccgcaacattacttgaagcgatttattggaatgacagaacgtttaaatcctttatttttcttgatgcttcctgctttgacagaagagcaagctaagggttttttaattgaatcagatgaattaaagaaaaaatatctattatcagaaatatcacctgaggaatataaagannnnnnnnnncgttga

SEQ ID NO: 84738 - DNA, 927 bp, Citrobacter koseri
atggcaagagatataatgatggattatccgctccccgcctactggcaggactttgaaagactgacatgcgaattgtgccgcgcgctatgggacgatccaggcacacagcggcatggaagagctgggcaggctcagggaggaattgatatatctggccgtgataataatcataatggtcagagagttgtggttcagtgtaaaaaaagggtgtggaaaactgtagcttcaaatgaaacaccagctagctctctaacaattcaagaaatcgatgatgaaataaaagaattcattaattcagggaaaattgctgatcgttatattatagcaattactgggttgagggataaatcacttcagaatcatattgactccataaatgactctaaagttaatacttttgaagtaaatatctggttctgggatgaatatagtgaatggttaagtgaaaaccctaaaatagaagcaaaatattatcacgatattgttaagtttcgcagtgaatatagctctgaagaattgttctgtgaaatgcttcattctgcttttgatcgacctgcctttcatactgaattctattgtgaaaacaatatagacaactttttgcaggcacttgagagtattcaacaagcattaactacaggaaatcttgtaaaccgagaggggcatgtacaaaatcaagttcgtatacccgataaaagaaaattacctcttgaatatcaacaattgaagaaaaaaattcaaaatctaagggattatactacgcaggaggtacgtacaggcgctatcacacagcagaatgagtggttaatcattagtaatagtgtcattataggaaagatgaatgcatttagaatagagatcatacatctattaaacaatattctagaccactatgggtttgaacatttttcattagaagcctattaa

SEQ ID NO: 84739 - DNA, 3120 bp, Citrobacter koseri
atggttgattgcactaagccaattgctgaatccaataatttcatcattctggataaatatagcccggaatggaagattaccgagagctaccaaagtgaaggtgatctggagcgtgagctgattcaggatttagttaaccagggctatgaatacctgccaaccctgaacaacaccaaggctatgctcgccaatgtcaggaaacagttgcaaggccttaacaatgtggagttcctggaggctgaatggcgtcgctttgtagaaacctggatggacaagcccagcgatggcgttgtcgaaaaggcccgcaaaattcatgatgattatgttcatgatttcgtcttcgacgatggccgcattcagaatatctatctgctggataaaaaaaacatccttcgcaataaggtgcaggtcatcaagcagtttgaacaagcaggcacgcacgccaatcgctacgatgtcaccattctggtcaatggcctgccgctggtacaaattgaattgaaaaaacgcggtgtcgctatacgtgaagccttcaatcagatacaccgttacagcaaggaaagctttaacagtgacaattctctgtttaaatacctgcaactgtttgttatatccaacggcaccgatactcgttactttgccaataccaccaagcgggataaaaacagttttgatttctccatgaactgggcgaagtccgataacacgctgataaaagacctgaaggactttactgccacgtttttccagaagcataccttgctcaatgttctgtttaactacagcgtgtttgacagtagccagacgctgctggtaatgcgcccctatcagattgctgccaccgagcgaatcctgtggaaaattaacagttccttaaccgcgaagaactggtcaaagccagaaagcggggggtttatctggcacaccaccggatcaggtaaaaccctgaccagctttaaggccgctcgtctggcaacggaactgagctttattgataaagttttctttgtggtcgacaggaaagacctcgattaccagaccataaaggagtaccagcgtttctcgccggacagcgtcaatggttctgacaatactgcaggccttaaaaggaatctggataaagacgataacaaaattatcgtcactactattcagaaactgaataacctgatgaaggcggaagcggacttgcccgtctatcagcagcaggtggtgtttatttttgatgaatgtcaccgcagtcagtttggtgaagcacagaagaacttaaaaaagaaattcaaacgtttttaccagttcggttttaccggcacgcccattttcccgcaaaacgcattagggtcggaaacgaccgccagcgtgtttggccgtgagttgcattcttacgtaattaccgatgccattcgtgatgaaaaggtgctgaagtttaaggtggactataacgatgtccgcccccagtttaaggcgctggaaaccgaaaccgacgagaaaaaactcagcgccgcggaaaaccagcaggctttccttcacccactgcgcatccaggaaatcacacagtacatcctgaataacttccgccagaaaacacatcgcactttccctggtgccagaggttttaatgccatgctggcagtaagtagcgtggatgcggcaaaagcgtattacgcgacgtttaaagacctacaggcagaggtggctaataaatcagccagctataaaccgttgcgggtagcaactatcttctcttttgcggctaatgaagaacaaaatgctatcggtgacattactgatgaaagctttgataccagtgcaatgaatagcagcgccaaagagtttctggatacagccattgatgactataacacttactttaaaacaaatttcagcactgacagcaacggttttcaaaactattaccgtgatttagccctgcgagttaaaaatcaggacatcgacctgctcattgtggtgggaatgtttttaaccggttttgacgcgccgacgctgaacactctgttcgtcgataaaaacctgcgttatcacggtttaatgcaggcattctcccgcactaaccgtatctttgatgctacaaagaccttcggcaatattgtgactttcagagatctggaacgcgcaaccattgatgccatcacgctgtttggggataaaaataccaaaaacgtggtgcttgagaaaagttacaaagagtacatggagggctttaccgatatcgtgacaggtgaggtcaagcgcggctttatggatattgttacgacattggaacatcagttccctgatccggccagcattgatagcgagaaggggaaaaaggccttcgttaaattgtttggcgaatacctgcgggctgaaaatatcctgcaaaactacgacgaatttgccatgctgaaagatctgcaaaaagttgatatcagcgatcccgatgccgtcgaaatattcaagacagtgcattatcttgacgatgaaaattttgccgaactacagacaattcgtctccccacagaacgtaagattcaggactatcgttcagcctacaatgatatccgtgactggcaacgtcgcgagaaagtggctaacgacaaggataagtcaaccattgactggaatgatgtcgtgtttgaaatcgacctgttgaaatctcaggaaattaacctagattatattcttggtctgatttttgaacataacaggcagaagaaaggtaaagaggcattgactgaagaggttcgacggttaatccgttcaagcttgggtaacagggccaaagaaggtctgattgttgactttattcagcagactaaccttgatgacatgccggacaaagccagcatcattgatgcattcttcatttttgctcagcgtgagcagctacgtgaagctgaagcgttgataaaagaagaaaacctcaatgaagaggcagcgaagcgctatatccgtacatcgttaaaacgcgaatatgccaccgaaaatggtactgagttaaacgagactttaccaaagcttagtccgctaaacccacagtacaaaacgaaaaaacaaaacgttttccagaaaattggtgagtttgttgagaagtttaaaggggtaggtggacaaatttag

SEQ ID NO: 84740 - DNA, 1200 bp, Citrobacter koseri
atgagcaagacactcctggaaatagcccaacagctgagtacgcctaagaaagtcaagaaaactgtctctgaaaaaacgaaggaagttgaagagaccaggcccgtgccaaaggtgcagttaatttatgctttcaatggcacgggaaagacgcgtctttcccgggatttcaagcaactgattacgtccaaagttcatgacggagaaggtgaagacgaagctgaacagtccgagttgtcgcacaaaaaaatcctctattacaatgccttcaccgaggacttgttctattgggataacgatctgcaagaagacgcagaaccgaagctgaaggtgcagcctaactcctatacaaactggctgcttacattgctaaaagatttgggacaggatggcaatatcgtccgttatttccagcgctatgcgaacgacaagctaacaccccacttcaatacagattttaccgaagtcgctttttccatggagcgcggcaatgatgagcgttccgcccatatcaagttatccaaaggtgaagaaagcaacttcatctggagtgtattttacaccctattggatcaagtcgtcacaattctcaatgtcgccgatccggatgcgcgtgagacccaagaatttgatcaacttgaatatgtattcattgatgatcccgtcagctctcttgatgataaccatttgattgaactggcggttaatcttgcgggactgatcaaatccagtgaatccgatttaaagtacattatcacgacacatagcccaatattttataatgtacttttcaatgaattgaacggtaaaacttgctacatgttggaaagttttgaggatggcacatttgccctcacagaaaaacatggcgactctaacaagagtttctcctaccatctccatctaaagcaaacgatcgaacaggcaatcgcaagcaacaacgttgaaaggtatcactttacgttactacgcaatctttatgagaaaacggccagctttctgggctaccctaaatggtctgaactcttgcctgacgacaagcagctttatctgagcagaatcatcaatttcaccagccacagcacgctatcgaatgaagccgttgcggagccaacgccagcggagaaagcgactgtcaaactgttgctcgatcacttgaagaacaactgtggcttctggcagcaggaacaaaaaaatggttga

SEQ ID NO: 84741 - DNA, 1197 bp, Citrobacter koseri
atgagcgagatgagctatctggaaaaactgctagatggggctgaagttgaatggaagcatttgggggatgtggctcgcatcaaaaatggtaaggatcacaagtcgctaggtgatggcgaatttccggtttacggttccggtggaatcatgcgatatgcagacaccttcgcctataataagtcttcagtcttaattccgagaaagggctcgcttggtaatctattttttgttgatgttccgttctggaccgttgacaccatcttttatacggaaattgatgaagcacaaattcgcccaaagtatctttactatttcttgacgacggtaggtcttggcgaaatgaaccaagcaggtggcgtgccaagccagacacaatcagttttaaacaagctgaaaatccctatcccctgcccggacaatccgaaaaaatcccttaccatccaggctgaaatcgtccggattctggataaatttactgcccttactgctgagctgactgctgagctgactgctgagcttagcatgcgtaaaaagcagtacaactactatcgcgaccaattgctgagttttgatgatggtgaggttaagcatctaccgatggggcaagaaggtataggagagttcatccgtggaggtagttttcagaaaaaagactttacggaaacaggttttggatgtgttcactatggacaaatctatacctactatgggacatatactgataagacaaaaacatacatttcagcggcgctcgctaaaaaatgtcgaaaggcccagcctggaaatctgattatagcaacaacaagtgaaaatgatgaggatgtctgtaaggctgttgcttggttaggaaaaagtgatattgccgttagcagtgatgcttgtatctacaagcataatttaaatccaaaatatgtgtcttattttttccaaaccgagcaatttcagagtcaaaaaagacagtacatcactggtgcaaaagttaggcgggttaatgcagacaatcttgctaagattttaattcccgtgccttcaatacaagagcaggagcgtatcgtatctatcctcgataaatttgatacattaacaaactccatcactgaaggccttccccgcgaaattgagttgcgccagaagcagtacgaatattaccgggacatgctatttagcttcccgagaccggaagttgcagaggcgtga

SEQ ID NO: 84742 - DNA, 531 bp, Citrobacter koseri
ttgaactggcatacggatagtatgatcaaccggtatgcttgcctgcgggctattcgaatagacctgttctacaaaattggaacgcctagatatgcacaacctggacaccaccaactggaactggatatccaatttttaatgaaaaacatgatgagtctgcgagctgtagttggttatttctgggtcatagagtggactcaggatcaccgctaccacgcccacgcagtcttctggttagatggtaatcggacccagataacctatccatgggctgcgaaagcgggagagctatggagcaaaatcacagacagggagggctggcaccaccgttgtgagtacaaggaacactatcgagcaaatatcaatatccctgttcactacaacgatcctggaagtattaccaacatacggcaggtactcgcctgtatgacaaaaatccaacagaaggaggggttgctactccatggctgcaatgaagtacctgagcgtccactgacaggtcgtccacggcttccccagcgactcaactga

SEQ ID NO: 84743 - DNA, 306 bp, Citrobacter koseri
atgcttgaaggtgttctgctttccgaatgtgtccgtttaaaacaacgttcactggcaaataagctcaccagcctgtttcagcagtttagagggactgagcttcgtctaaagcttgtctggttgtgctggtacgatttgatgttggggaattgtcttgctgattggattgagagcctaaagttcaaaacaagcgaggaggtaaataactgggttaatgaccggcaggctgagaaccacatgcttaccagcatgatggatgagtacgtctgttttgcctaccgcactgtactcgacccgctgatttga

SEQ ID NO: 84744 - DNA, 684 bp, Citrobacter koseri
atgaaaacacaacatgatcattatgaccgcctgtccgtcaggttatcggtcattatcagccggttactggctggccaatccttggagctcaaagcactggcaaatgagtttggtgtttcagagcgcactctacagcgggattttcagcagcgtctaatccatttggatcttgaacatttcagtggctgctatcgacttatgcggcgaacgggtcgagagcatttacctaatacctttgcgtttattcttaactctggcatttcggggatcattccggcccagaaccgcagactaatccggctgattaccagcagttctggcggctctccatgtcttattgggcatggagggctgccatcgccaatcacccagactacctgctttctggagctggccgaagctatccgtgactaccgggccgtcacgctattagtcaatggtaagagttacgaaggagtggctccccgccgcctgatcttccagtccagaaactggttccttgtggctactcgagcgagaaagctacaggtgtttcgcatggaagacgttaacgctgtgactgttcttgacacttcttttcgcagaaagcctgaacttgatgcactcaccgccagtgaggagtttatttcggctcttcctcactttcgtttcatcagcgacgttattcacaccttcagagagtaa

SEQ ID NO: 84745 - DNA, 294 bp, Citrobacter koseri
atggatgacccggtgaagggcgaaggccggatgattactgatgccaatggcatcaccagaagagaaggggggatttcaggaatatggagcaatatttttaatgagagtaatgggataaaagccgacagcccgccgcttatacctgatatcagggatattctcgatgttttccctcagtcactgcgggaaaacctggttaacaaaatcagtgaagctatcgactatgaacctgttattggtgttatgggaaagaccggcgcaggtaaatcaagtgtgtgtaatgcgctattctag

SEQ ID NO: 84746 - DNA, 468 bp, Citrobacter koseri
gtgtgtgaggtcagtgacgttgaagcctgtacgcgtgaggcccaggaattgcgcatacgcttcggcaaacgttcgctgaagatcattgatattcctggtgtcggtgagaatgctttacgggataaagagtacgaagatctttaccgtactttgcttccctcactggatctcatcctctgggtgataaaaggcgatgatcgagctttttctgcagatgagcatttctacaataatgtcctgctccctgcaggtggtggtgagcgcgttttgttcgtcctcaaccaggttgataaaatcgagcccttccgtgagtgggatacatacctgcatcagccgtccccagcacagcgcatcaacatcgaaaagaaagaatcttacattactgaacgttttggctttacgcgatatccggtaatccctatctccgccgatgaggctacaacatccttcgtctggtggaagcgatga

SEQ ID NO: 84747 - DNA, 270 bp, Citrobacter koseri
atgtgcgcttcacacctgctcaaccgctggcttcacggtgccagcactaccggagaacaggagatggtccaggtcagtctggagcaaatccagccgttttccctcaatccccgcgtcacccgcaaccccggctatgacgtactgaaagcgtcaattcttgcccgcgggctggataacccgccggtgttgacccatcgcctcggtgatgaaaaagatatgctcgccagcggcgggaatacgcgcctcgccatcctcaatgaactgtggtag

SEQ ID NO: 84748 - DNA, 3063 bp, Citrobacter koseri
atgactacacatactggtacgttttctgtaggtgatctggttacatcgtcattattcaacggaatcgctaaaattgtgagcattatctctgcagaacgtgcagagatcgcttggttctactctcctttagaagaggaggttgaccgtcaggagatagatatacgcgcattgacgactgcgacgttatatgaagagtgcactgtttatttccgttctcctgaaagcggcatctggtgtagaggtcgttatggcggatcacgcccgggcaataagcacttactgatcatccgtacgggtgatcacgcggttgttgacttagcggagatattttaccccaactatgggcaggaccaggaaatgaacccggcccattttcttgcggcacgctcaaatgacgctccctatttctatcccttaagagagcgttttgttagtgcgtggatcaaacagcgtgctgcatgccgctcaatgtcgtcgttaatcagcagtcgggtggagattgagcctcatcagatagccgttgtgcgccgaattcttcaggacctgaaccccaagtacctgttggctgatgaagtaggactgggcaaaaccatcgaagcggggctggtcatccgcgaacatattcttgagtgtaatcgcaacgctagggttttggtggtcgtgccgcaggcgttaaaaggtcagtggaatcaggaattgatcgggcgctttgcgttaggtgaagtgatgatgggtggggggcggacgcagcaaatcagactttgcaaccatgaagaaattgccgatccttcgttgctgacatggaatccgacactgattgtagtggatgaagctcaccaactcgcacgtagcgcttgggctgacgatactgataatcacgttctatatactgcgttggtaatgctatgtcatcaaacaggtatcgtgttgttactctccgggacaccgatgcatggcaacgaactcaatttcctcgcgatgttgcattgcctcaataaagaggcttggccactagatccggcaggctgtgaacattttatccaacgtgtggcagagcgtgaggcccttggtgggatctataccgccctccagcctgaaaacgacaatgggattatcgagaattgtcttgatgagttatcagctaatttttctgatgatgaggagcttcagcgcttaattgatgaggtgcgaccgctagttgactttatcgctgatgaagaaggggaagagcgtagtgaaaaaattttgatgcttcgtcattggttaggtgagcattatcgtttatttcatcgactgttacgtaatcgtcgcgaagagccttctcttgccttgcttttccctgggttatcggggctgaagattgctcactggagcgtcgaacctgaagatgtcaccttggacgaactccttgaggattggcgcgccagtgtaagagcctctcctgataagtatcgccatattaccaccgacaatttaagtggctgggtggatgctctatttaccagtcccctgacattttcacgtcgggctcgcttagccttggaacagggaagtgcaagtgtagatgagcaaaattatcttgaacaagcgctggcaattgccaaacaagagcaacgtcaaaaagacgagcaattgctgctagccctcaatgcatggtttgcgacccacaaacagggaaaagctgtcatattctgtagtgaagaaactgaatctgctcatcttttcactaagctggaactacagtctacctggaaaatcgtacgtcatgcaccggaaaagtatgctcttaataaccattggcaagtactgatatgtgacagacgtggggaggatggacttaaccttcatggcaaagaacgtctggccgtacattacagcctcagccgcgatttcaaccgctttgagcaacgtctagggcgcttcaatcgctattccagaagcttaaagggcctcaaacctgtagaaagcctcgtcatcctgccaggacgacagggactgtcatcagagtggatcaggcttttagaccaaggcattaatctgttcagacaaagcgtagctagcctgcaatttgtgttggacgagcagattgaggccatgtggcggcgttattttgagggcggtcttgccgtcatcagttcgactatcgattcccttgggggagaaaaagggttcgtagctgttgagcgtaaaaaagtgtttgagcaggagaacctgctttctatggagcaagaggtcattgcttcacgcgcattctctaaggcattgctggaatcggaagatgatgctgaacagcgtgcgctggacatgttgcaatggatcactaaagcgctccattttaatcagcaaatggaggaggataaatccggatttcgtttgcgcttcgagcgcgatgaatttaagggacgcacgctcgttgatattcaaacttttatcgacaactgtttgcttgggttagatttctcagagggttatccaccttcgacagccatcatgaccctgtcgcgttcccaggccagcgtgcacaaaaacacttatcctttccgctacggccaacctttcgtagacaccgtctggcaacttatgcaaagcgatcctcgtggtacgacgatggcaatcctgcgcatgatgaaaacgattaaattaccttctccacagttttatttccattttcaatggataagcatggctaacttggttggcgataataaattagttgctcagcgtcagggtgacgagcgttttaccccgcggctggaaaccttctggcttgatgcaaatggccgtgatgttgatgaaaaaagtattgctttactggaaagacagtacgataaaaaagggaatgcactttatgaggatatgaacctgcgaactgatgtctggccacagatgacccgctggtttgatcccgaagcctggaaaactacggtgctggagctaacagaaaaagcgaagcagcgccagcaaattcgctacccttcgagtgatgagttgcctattaggcatcaattgatgggagttaaggcgatcattttgtgcagcaaagagactttccaggtggagtaa

SEQ ID NO: 84749 - DNA, 2481 bp, Citrobacter koseri
atggaattccaatggaggcaactccgtgagctactcgcggtggacgagtgccagggcaatagttctgaaattcaacaggatggagaccaattcttttatcgtctctggcgatgtctgaacgatgcaggggcggggaccgcagatcgattacatggctattatgacgcattacagtgcgcccgtgctcatggacttcttccgttgcgtttgccgctcaaggaggttatttctccagaggatttaatgcgtgcagggttaaggcgcaaccgagattatccgggcgaagtttttttagatgagagagcgtcacaactctcatcagagtggcaacccgtgtggcgtaaggataaaagacgtctgcttcaaacaccgccacttgatacgctgctaccaaccctactgaacgatactaaatacactcactacacctcttttgggcaacaactcgctgtacgtacggtgctgacgagtgagaaaaatagtttgttgtttattaacctgccgacgggggcaggtaagacgttcattatccattctctgatgctgacagcacccgcaagccaactgacgctggtaattgttccgactatcagccttgctattgagcaggctcagcgtgctcagtccatgttacagcaggcaaatgctgaccatggtggagaatacacctggcactccgggcaaacacttgaggtgcgagaagcgcttaaggcccgtattaaagccggtgagcaaaggttactgttttgttctccagaggctgcatccagtggttcgttgttattgctgctattctcgctggcaaagcggaaaatgattggtgccctggttgtggacgaagcccatcttatcgatcaatggggtgcggagtttcgtccggaattccaacttcttgcgccgttggtgaaatcattggtggaagtgagtaaggctagcattcgcactgtgctgctttccgcaacctggggtcaggcgacgctcaatacgcttaaagaactctttgccggtgataatcttcaaaggatcgttgaagttaacggctgtttcctgcgaccagaacctatgtggtacgttagcaaagcgtatgatcgtgatgatcatcgtcggcaggtggaagatgctattgcaacgctacctcggccgttgatcctttacgtttcaacagttgaggacgccataggctggcatcagcatttgcgtaaatcaggctataagcgttgcggattgattcacggtaaagtatctccacgccagagagaaaagcagattgccgattggactgaggataaccttgatattatggttgcgacctctgcatttggcgtcgggatggacaaaaacaacgtacgcgcggtactgcatgctgctgttccggaaaacatcgatcgtttgtatcaggagagcgggcgtggtgggcgtgacggttatgcttcattggcacaactgatttaccgggacgatcaggtctctctggctcgtcatcttaaccgcgataacctaatcggtgcgaaaaaagggtttctgcgttggcaaaaaatgcatcaaaaccgggaatcggaatcacctggtcatttctccgtttatctggataccaagcacgacggcatcaaaattgattctcgagcaaatgtcgcgtggaactggcgtacactccttatgctccaacgtgctggcttcttgagcctgcgttttgcggcaccggatctcgagcagtttgcctcagacaataaggacgatgcggcggtagaacagtactttaaccattacttcagccatatcggtgtcgaactccatcgtgaaggtcatcttgatgagttggagtggaatggcactttaaaagaacttcgctccagggagttacgtgcccgacaaaaagggtttcaggtgcttgaagattggttgaatcatctggaaaagccgctttgtggcatccttgagtcattctacacgcttgatggttacgcccctgagttggcttgtggtggttgcccaggttgccgatcgcaggcgttaccagcgtatacacctaccttgggcttgaatgcatatttgatttctgccgaagaaggcgagcgtatcgggagcgatatgcgtatttattatccaccagcacgttcttctgctttgttgcttcgtcagtgggttgactggatctcacgtttgctggtcgcaaatgagattcaggccatccgcgcaagttcgaatgtactgtcgcaattaagccaacaactctacaagagagttccattctggtgcgcgctttcatatgacgacccctcgaccaactggaatgagttggtgcttgtcctgcccggggagtctcttccagagttggatccattcagtgacattaaacgaatcatcgtggctccggaaacgctcctcgaacaaaacgttcggggaaggttgtggtgggagagtgatcccaaagcccgcacgttggatcaatttataaggagtttaagccgtggcaataattaa

SEQ ID NO: 84750 - DNA, 903 bp, Citrobacter koseri
gtggcaataattaataacgctcaagatggcagccaaattcgtttactctgtatgatagatcggtttctgaatcgccgtggggataagtttattatgcaggaagacttggtcgaataccttcgacctttcgcactacctaatagcgctactggtgcggaccgcctacctgataatttggaattttggcttgaagaagggctatggaagcaaaccgaggctggtatttctcgtaaatctcctttttcaactgagagtaatttaccaagtcgtgttttgcgcactttaatagataactgcactgacgagactttattaaatgaaactcgtggacaaccctttctactgagtgtgacttctttattagcacaggataagttcacttttgtcgggaaaagtatccttaccaaagaaacggtacctggtgcggtaggtgcgatacttaaagattctaataatgaggggttacgtcgtcagcttaatctttccaatgaggcgtctactttccttgaattcgcttttttcctcggttttgttgagccatttatggatggatatctggttgatcctacgcgagctattgagggtgttctcgatagggtgctggagaatcgcggcagtttccctgcaattgacttcatttcccggcttgcagaagtcctacctatgatcgatggaggaagttaccgtcagcaggtagaaccgatcattacagctgataattgggcacctaaagaacctctacatttgagcgcctctctaagccaggcgctggtgcgccttgagttggcaatgacccttaagtatgagattcgggctgacgaccatcaggctctattgttaactgggccagacggtaaaaaccgacggataagcactgttagccttggggaacttttaaaatga

SEQ ID NO: 84751 - DNA, 3138 bp, Citrobacter koseri
atgaaaatgatggaatattggccatctttaccgaacatcagacagtgtattcgtaccgaggcggaagaactctcggaccataccttgctggccgttcatgagcctgcacgaatcttacgaatgaataccgacggcagtccgttggcgtatgaaaccgaagagcaactgctaaaacactttctggaagtccagcgcccactgccaatcatcggtaatacaggagtagggaagtcccatatcatccgttggttggatgcgaacctacgtctgcgccctgaattcaaaaataagcagtggcatattgtccgcatacctaaaagtgcaagcctaagagaagtacttgaacttttactgaaagggcttgagggtgaaatttttgatgaagcgcgtgaggatatcaataaggtcagcgataaacgctcacctaaagaaatcgctgaatggctcttaatgttgatggggcaggagcttcgtgatcttcatgcgcgttctagcgctgattatgagcagcttaagcaagaagcggcacaagcaaacccggagcaacagaatgcattgcgcaagaagtcctcggagttaaagaaaatcaatattcatgccgcagaaaatgccctcccgacgctgatcaacgacgcctatttcaaacagttcttactaaaagaagaacagtgcctgtaccgttttgccagccgtctaatcagtggcgcaaacagcgatgaattggaggaaggtgaacagcaactaaaagccagcgatcttgatttccaaattcatttaagtgatttgagccttccgacgcgttcgtatatcagtcgaacccgacttaatacgtatgaaccaggtcggcaggaagccgctgatattctgaatctggtgcttggtaaagcggcacaaaccctttttaatcaactgtttaatttccgtgggcgcagcttttctgatcttttcctacagattagaaaagcactgcacgaacggggaatgactttgatggtgctggtggaagatatgtctctgatcaccgccattgaagatgtgcttatcgacagcctggagcgtgaggggattcgcgatggtgaagaggtgctttgtccggtttgctcggcctttgcaacaactgaaggttatcagggatataaccgtcgccgccaggggatgcgtgaccgtgcaaaaggcgaatggcggatcgaagaagttgtgggtgaacgttcagaaacgcgccagcgcatcgtcgacttttgcagtcgttatatcaatgccgcgcgttttggtgataagtctctgcgcgaattctggaataatcgcagcagtgatacaaactgggtgccaaattgggagcatcatacggaaactattgaggagagcgaagcttttggctatagctctctcgggtatgcactttatccctttaataaacgtgcaatttatgctttggctgatgttcactgtagcgatggcaataagggcataaaattcaatcctaggatcatcattaataaaatcctgttgaatattctgtctaactatcgggttatggcagaagaaggacagtttccgcccgtgcaacttgatggtatcaccgcaccccatggtctacgaacttggttgcgtcgtaaaacattggcagagcaggatcgcgctgaatccgtcgctgctatttggggatatccggcagacaatggcccggcgcttgctagcgcattgcctccttctgttgcacgttgctttggcctcgatgatttagcaaacgaactcatgtcgactgagaaaggtgagatcaattcaggttatgtcacctcggtagaaagcaaagtcgaacctgtccgcatgaaaacggcggagccaatcttagttcaacaaaaaacggtcgaagctgtcgatcccctcgaagcacgtatcattcaactggaaaacagcgtatccgactggatacttaaagaagttttactcgatcaggatacagcgaaatacatccgtaacgcactggcaatgatttatgaccagcatgcccatgttgactggttcggagcaaagtctaagcctgatatttgcagtgggaggtttgtgaatatcaacatacccaatgcgcatggacaccgactgaagcaggtagtgagtttcatcactgaggctgagtatcagaaacggtcagtctgggttaccgaggtatcgcttgcccttgcacgtttcggtttctacatggacagaaaaaatggcccagattggacctatccgaacgctcctgaagactatctcgttatacaatcttttgctaatcgttgggtgccctatgcccttaccgaacttctgcgcagcaagagagaaaatcaggggatgatgctggctgaacaactgcagttggcacgagcccttggtattatcaaaccgaatgcgacctccaaagaggtactgaatcgattacttatgaacaaagaggcgttgatccgccagcataaatctgctgccacagagagcattgccaaactgcgtgctgacgctcttgagaagtgggaggaggtgaagtcgcaatggttaaatctctatgccccaaacgatcatgcgttggaaggcgatattgtgcagaaaatggtgctggaggcgatgaagcaaccggcagatagcagaatagagcaggcagcgaacagaacggtgagagagattgcgtcaacgttgaccgaggtcacgtatttctctgattgcgagaatagtgatgctttcgctctacttattgacgatgccgtatcgttgttagaagagttacgtgaagagggcgactatccgattaatgctgagttggactgtagtgcgttgcaggctgaactgaaatccttaaaagaaggaagtacatgggcaatgatccttaaattgcgagatattacgcagaaagaagatcctcttgcgttatggcaggtactttgtggactggatgggggcttactcaagcgttttacggacacgctgcagcggtggcaaaaggtttgtaagcaaatatttagtgcgattacggggtacaatcaagataaaggtggtcaccgaatcagtgagtgtcgcgtgcaaatcgatagtgttctgatggagatgacgcaggatcttcagatcctcaaagagaatgccggaggctgtgatgaacacgcttaa

SEQ ID NO: 84752 - DNA, 744 bp, Citrobacter koseri
atgaacacgcttaagcagcaactcacccagattcgcaaggagtttcaagtgaagaagcaggtgaagaaagaagataatgtttacgaaaaataccgacaagttcgcgacgatttgtacaacgtttcttcatctttaaaagtgacgacaacccagcttgatgtcatttctcgtctgccttctccgttgtcgcaaatcacacttgatgatcatgaaaaagcggcgatttataacgctgaaatcggcttgaaagcatttgtggaaaaattccagcatatggccgatgaggttcagcaaaaagggggactaggcgagacgcttagtgcgttgatgtccgtccagtcgaaatttgcagagaaaattaacagcaactggcggacattcatcaacgatcttgaaagcaaacagatgctggaatcagtcttccttgaacagcaaaaaacgctgggactcgatcgtctttacaacgattaccgaacggctctggaggccttcaatcgtcagaaaatgatggggccagccaatcccgttgtgattaaaaaactgcagcagtattgtgatgaaatggtccagctaaaaggtcaaatggattttaaagcgccagcctctgtcctaaattttttccaggcgcttaataatagtaatcgcgctccattgacactgctgactcccgaagtcctcgcttggttaacagaaaaagaaatgctgaactcattcaacgtgatgcgtaaaggtttactgggatga

SEQ ID NO: 84753 - DNA, 4539 bp, Citrobacter koseri
atgagtgaaattactactgatgtacttcatcacatacttgatactcttgaagcacaggaaaatgccttactggtctggggggatactgggggatttttcagcgaggaagaactgattgcgcacatcagaaaagaattaggcacatggtttaagcgcgctcctactaatgatgaatgtgataaaaccctgctggggttgctggatactgccatgctgctacaggttccacatgttagcggcataccggtgtggcgaacccgaatgggggaaacagtacatctcttgcgtaacctccggcaatggatgtcccacaagtcgcttgaagaaagtaaaacgctggtctctgactaccgttttattcgtcgtccgcgcagttatcccgagcgtattgcagaaccagaaacgttgattgccgactggaagacgagtctgaaactgagtgcgcgcatgtgtgagatcatgcgacaagccctggcatctgataaaccgtttcgcctggcacagtttcaggtggactcaaccgaacgtatcatacagtgctggcgcaagcatcagggatataatgagaccgccagtgctactatcgtttgcgcaggtacggggagcggaaaaactctgtctttttatcttcctgcgctgaccagtctcgcggatgaaatctgccgtgattcttcgcgtaaggttcgtattctggcgatctatccgcgtaccgaactgttgaaggatcagttcgccgaaacctttgcccagtgccgtaagctggataagtatatgcaggaaaatgcgggacggaagatccgtattgctgcattttttggcgatacaccagtgaaggtggagtggagtaagaaagacgtcaaaggcaaatcaggccttccctttggcctgatgaaatgtcagcagccccatccgaaggatcatcagcagcaatgcggtggcgtactggagtggcggcgtgatgatatctttgctcttaatgaagttctgacctgtacccagtgccagcatcaactggatgacagtgaaattatacttactcgtaattcccagcaggccaaggacaacgggccagatattctgtttaccaccacggaaatgctcaatctccaaatgaactctggctggagcaaccatttgtttggcgtgggtgaagggcagggaccgacgctagtcctgttggacgaagttcatacctacaccggcactaccggggcgcaaacggcgctgcttttacgccgctggatgcagcgtacggactgcttgccgcatttcgtggggctatccgcaaccctagcggatgcacagaatttctttgctaacctggtgggagccccagaggaagaggtggctctgatcgagccagattctgagggcatgatcgaagagggggcggaatatctgcttgcgctgcgaggcgatccggtttctgaaacggcattactgtctaccaccattcaggccactatgctgatatctcgtatgttggacagcgaagcgggtaagtccgaagggacgtggggcaggaaaacctttatttttaccgataccctcgacggcaataatcgtctttatcacgatctcagcgatgcagagggctggaaaacgactattcctcctcatatcgatcgtccacctctggcggcgctgcgtaatccttatgattccagaagtgaggaatacttaaagaccgaactgggacagaactggaaagcggcgatggacataggccatgaccttggccggaataaagtgatttcacgcacatcgagccaagacaccggggtcaatgctcaggcagatgtggttgtggcaacttcgtcgcttgaggtggggtataacgatcctctggtcggtgccgtcttgcagcataaagcgccgaatgatgtggcttcttatctgcagcgtaagggccgcgccgggcgtccacgtggtatgcgtccttggatgctggtggtgctgtcagaattcgggcgcgaccgggtagcattccagcgctacgaagaactgatgagtcctgagattaaacgccggggattaccgctgggtaaccaacatgtgcagaaaatgcaagcggcgatggcaacgcttgactggatcagtaagacaggcaacttcaaagatgtttcctacatgctcaggaaaccggaacgcgatcggcagaagtttaagcgttattacaccccgcttattaatctcattgaagaggtgttgaatggggggagaaagcagaacgaattggctcgttatctgcaggatgcgttgcagttgtctgaaagcacaattcagagcatcctctggagcccaccgcgctcgattatgctcgagtttctcccaactattctgcgcaacttgacaacctgttggtcagtgaacggtgttgagtgggcagccctgcgatccccacaggttgacggagagggagaacagtacaaaacgagttcccccgtaccggattttattccgcaaaacctcttcagtgaactgaacttgccggagttggatatacgtctgatgcgtggtcgcgataatgttgaacaatgggaaacactttcattctggcaagggatgagagagtttgcgccggggagactgtcaaaacgttatgcgattaagtcgaatagtagtaccgattggttggtgcctgaaacttatgtaccagcagctactgatgggcggcagtgtgttgattttcctgtaactgaggcatttggcgacaattggcaggtggagtgtgaagttgaatatcaaggggagatgatcaaagtcattaaacccgcgaaggtgctaacttcacgtgcggatatccgtaaattgacggataaaagcaacgctcagttgcagtgggctctgagcttaatcaatccgaatgttgcccgaccagatgtagtgccaaaaggagcttggaaaaagactctttgcgatgtcacattttttaaccatcagcacatgactccgctggagttagttcgtttttctacagcatcgcaggcatcgcttcgtttccagaatcgcgatcgtgcccatgtcgaatttagctgggtgaatgacggtgaaaatgttggggtcggtagtcgacagtgggtcgatgccatgcgactgcgttttcgtctccccaatgagaaagtcctcggccttctactacaggacgatatccagcgcggtctgcgcccggtttacttccagcatcgagtgagacaactcccgacatttgagttcgatagctttagtgctgattgggtggttgagtgtttcatgacgctgctggctgaaacgctagtgacgagcaaccacgctaacgtaacctccgccttgcaggtaatggggactgcggaagggatggccagacttgtcgacatccccgccagtctgttccagccagattctgacaatgttaatggtagcgatcaggctctgcaactcaacctacgggaactgctaattatcccggaactccagcagtcgctgctggattgtgctgaaacgctctggaaaccagtggacgaaatcgatggatttgttgaatggtcgcgtcaggtactggcggatacactggcggcaggtgtgcagcaaacgttgagtatgcaccttccggatgtcgatgagcgggctgtagtgactgattctttttggtcgaaagatgcccattctggggatgaaatattggaaatatggctttgtgaaatagagtctggtggcagcggaatcctgatccgactgcagcaaaaatgggtggaagatccggttaacttcctgaatgtactggtgcgaaccctgtctgccagtgattatgagcagatcgattatgatctgcgtatggtattggcactgctgcaaaccgatgaggaactgcgccaggctgtgagatcagtgcgtgaagctaccaatatggacactcgccgggaggcgaataaaaatctgcatatgatgctttcacgccgtggtttccgtctgtctcacagttttaccacggtgctctattcgcgtttgctgcggtctggtagtggggatgatactgatgcgcaacttcatcaactgctaaccgaatggatctcacttgaagcgcgctcaggcatcgaattcacactgaacacgatggcacacgcgctagcagttcgatctcgtggggagaatacagatccggcgattatctttggattacagtgcaggcaccaaaatttgctatggccgcgtggttatacaattcgtcaggcggagctcggtttctacaatatgttctgctcgcgtacggtggtgacagagcgcttgcttgcaggggctttattcagcgaatttgttgaaaagattcctctcgatcagccgggctggttatcatcgttacacgttgcgttgcgtcagaacgggcgtgcggagttaaacttgcttcgcgagcaactaaacctccttcatcaggtcattaccacagtacagctggagcctgtcgactatcttgggctcttgctctatccgcgattgggagaagtgagacgtgagcaagataagctgattttgcgtattgaactggcggagatggtgcaatga

SEQ ID NO: 84754 - DNA, 546 bp, Citrobacter koseri
atgatgatgaaagccaaccagcgccagattttcctccatggtgcaactgggcagagagtcctgagagaggtgcttagtgcccagttggtgggattgattctgcaaccagagccgatctggttggtatctccatgggtaagcaattttacgcttcttgataatcgtgctggaaactgggacagcattgatcctgcttggggagggcgtgaggtagactttgtggagctattagcctgtgcagtcaataacggcgcgcaactatctttggttacccgaaatgtaccactcagccgcaccttcgtgaaagcgcttgagcaccagctaaacaagaatgcggattatcgtcttgaatggcgcgagcacctgcataccaaaggtttgctgacgcagcatttctttctcaaaggttccatgaatttcacgtggagtggtgtgaaccggaacgaagagtgtgtggaattgagcagcgatccacacatgatcggtgatgcaatggcggcattcgaggagcaatatcaatttagtggatcacaggaagcgttctga

SEQ ID NO: 84755 - DNA, 2172 bp, Citrobacter koseri
atgcaggcagactggctggaaaaattttacgccgatgatagacatctggatttcaggaaagcgatgcgtggtgagtacaaactttcacaaatcaatgccctgatccaaaaagctcatgcgcaaaaaatgccctgcattatcccttcggctcgtagtgggaggacggtgttttatggactagcacaaaacggacgtagcctcgatgaactacgacgagtgctgacggcggcccttggctctgctgacactaatgctgatattcgcactctgtatcgctcaactgatccgggagagttactactgcttgagcgttccccggaagggatactggccttccattttttacctgtcacggcgtcgacagcaaaagataaagctgaattgcaggacaaacggaggaaacgagtttttgccatgttgcaaacagtgatggatctttaccatcaacggccagtcttacatacgctggtcagtcggcaaactgggcgcatactgcgcgatttttatactgcctgccatgcccgcgatggcaaagccgctgaggagtatctgcaggagttacgaggaaatcaggcgctatcaccgctgaacctgcagttccttgagcttcagggcatggcagcctctgcaaaatgggaagcgattctgactcacccgcggctggatgtattgctgaaggggcgagtacctgaacgtatccagcgcctgcttctacgttctaccgggcattacctgatgaatgcgattcaagaggcaaactttccggcaacttcaaaagcggatgcccgaagactagcgcttgatatgctgccgctctataaaaccaaaccggcgtttgcacatcacgaaagctttctttctgactggaagctatgggcaatgggagcagcgctgctgggaatcaaggagtggcaaaaggctacccccattttgcatcaggattggcttcagcaggtagagcattgggtcactgaagcagttgtactgcctgtaatagtgaaggaggctgaacagaaactaatccaggctccagtggttacattgctcagcgttgatgatgcaatagcattgttacttgaagcttttacagcggatgttgaacgcgagaacgagatttacgctcaaatgattaccatgccggaagcgacgaaacaggcgcttcaggtaacaccgaaacattgggaagcttggctggcgcttaaaaaacggtgtgaaccagaggattatggctggagtcgttggcttctcgacgttcagcaggccaaagataatcaacagtatgaattgttgcgtcaacaattgacgatgcagtatatggactggttgccttccacgtttaatgagcaacaatggttggggctgctcagccagcaaccggtgggtatgctcggccaggcattgcgtgatgtattaccgaacatgctgcaatggctcattgagtatgacatcaacgtctcgtcttctttatggtctgaatggttgatgctgcttgctctagagggggttagttcagtagaggatgtccgcttaggtggtattatcctcgatgcactactctctggtaccttcagccataaggaatatcacgacgctcttgaagccatcgagatgctgtgtgcgaaaaatgaatcatcacaaacgctggaatatgcgcttgatatcgcagagattttgttcgatcgtgtgtgtggtgatgatgctcgtagattacagtattgggttaacatccaggagatgttggtgcgtcgctgggagcgactggataccagtatgcaacttctggcgcgcatggttgaacggctttatctgggacagaatgcaggcaatactttcccgacagaaaacacgccagcaggtgtggcttctccgttacatcgcgatctcagcgggaaaaaactggtgatttacagtctcacggaaagcgcggcgcggcgtggtaaagacgctttgataaaactgtatccggaactgtcaattgagctcaacaatgatcatgttgccactgatgcattgatgaatgccgccagaaaagcggactattttatctttgctagtagcagctcaaagcatcaggcattttatgcggtggctagttgtcgcaaggatattatttatcctgcgggcaagggagcctcaagtatggttgcagcttttattcgtgagctggcctga

SEQ ID NO: 84756 - DNA, 255 bp, Citrobacter koseri
atgccgcaaaagactcctacaagtgtagcaagttatatctatcaacttgcgaagaaacataatattacggctatccgtgacaatataagcaatattgcaattattattaccgctctttctggcgatgacataaaattggatgatgttgagcaattacttgttaaccttaaaagaaaaggctttctgactaaagctgaaatgatgcaacttgaagggcgttacttacgtgagaaaaaatatttccgtacggagtaa

SEQ ID NO: 84757 - DNA, 129 bp, Citrobacter koseri
atgctcgactgcccggaactgagtgagcgcgcagcctggttgctgcaggaacagcgcgacgagtacaaatccgcacacaccaagattaactctatcgccaaaacctcatacaaagggaaacctttttag

SEQ ID NO: 84758 - DNA, 225 bp, Citrobacter koseri
atggtctttatccataccaccgttctgcgcgatgacgacaactacagcgccgcgtcgaaagagaaatacgaccaggtgcgcgcgcgccagcagcagcgtatggaggagaaaaaaatgggcatcctggagccgggcgataacgccattctgcccgcgttcccgtcgcccgtaaaaaccagcactgctgcgccagccacggcgtcgcgcaatccgtttaaagagtaa

SEQ ID NO: 84759 - DNA, 1461 bp, Citrobacter koseri
atgtttttcaaatcaatttcattaataatagatgataaagctaatgatggtaattttatagccgcttatttgaacaggaattttgtacctaacattttttattgctacgattcagataaagattggtcaggtttcgaagcaaaaatctcaggtataagaacaatatttcaagatttatcattgatatcaagttcaagtcctactacaactgattttgatgcagcggcagaaactatagaaaacattttggacgaaaataatgggccgtggttgcttatcacatggtctacatgggcggaaagcgaaagtgaaacagatttcccaaggcaattatttgagcatttgcaacaagaactaccagcttcactgcgaccatttgattacataacaataaacaaatcattgttcacgccaggacatgatcataacccagtatcatctccaaatgattcttcgctagctcaattacatgaaattattgaagaaaaaatatcgcaaagacatgggctgaagtatttgatagggtgggagcagaccgttaaaaaagcggtgcattcggctctgggtgaattaacaaatatcgcatcaggacatgagcaaagtaatgaagtattgcataaaatactcgagaacattgccgcgtccgctactgggaaaagctcatgtactgctgctttgaatgcaggaacaagcgaaactctaagcgacattatcaaagataaaatagaaaatcaaattccaaacaatattaatgatttcgagcgagtaatgcaaagtgctagtgataaccgtgatttagatatggcggggttatctagttggaaggaatcaataaacagagctatccattttgatatgtctgagaaagtaaagcaataccataagcccggtaatatatataatattaacgaaagggttattaactctggtattgaatcttttccggaaaacatccaagatgttaatgcattatctaaattcaaaaggaaaaacttcttttgtttcttagataatgaacggtccgtgaaaagagacgttagcgaacgttctaacttaatttgtcttgatattacccctccgtgtgatcacgcgaataataaagctgagtggaacaaatatattgtagggatcattttaaaaaatgatgatgataaattctgtagattagttaaaagtattaatactgacaatggactagtacgggtcagagaagatgatggtatcagattaattaatgatagcttaattttactaccacgatatgcgcatgacgatggttcggacaatgcatatagagttgtattaaatgccaaactaactttttccatacctgtatgttcttgtgacgaagcattaggtgaattacaattaatgagggctagagaaaatatcctatcagacataagaagttggtttattcggcaggcaactcgtccgggaattgttgaattaagaggctaa

SEQ ID NO: 84760 - DNA, 1998 bp, Citrobacter koseri
atgtcagtaaccgagtctaaagcaaaaacccccgcgaaaaccagcaaaaaagcagtcaaacctgctgaagccgcagcccttaaggcggcgcttgaggccgctcagattgaaatggtgccgctgtcggcgctggtcaaatccccgctgaacgtccgtaccatcccgtatccggtggagagcgtacgcgacctggctgacaccattcttgctatcggcctgatccagaatcttgtggtccactcgttgccgggtggcctgtcaggcgtggcggcaggtggtcgtcgtctcgcagccctgcaactgctgctgagtgaaaagcgcatcgatgccgggtatatggtcatcgtcaagcgcgtcagtgacgaactggcggtggtggcctcgatggtggagaacaaccagcgagtggcaatgcatccggcagagcagatcagcgggttccgcacgttgtctgagcaggggaagactccggcgcagattggtgaccagctggggtatagctcgcgtcacgtccagcggatgctgaaactggcgaaccttgcaccggaacttatcgccctgctggcagagaacaagctcgacgtggagcagtgtcaggcgctgagtctggagaacgatcccgttcgtcaggtagagatttaccagcgcgtgaaggcgcagcacagctatgcccctgcgcacatgcttaaacgcgctgtcactgataccgaaatcagcgtgaaccactcacgcttcgtgtttatcgggcgtgagatgtatgagtctgcaggtggcgtggtacgtgaggatttgttcagcgcccaggagggtgacggtacggcagacggtgtgctggttgagcgactggtgcaggagaagctggagtccgccgcactggcaatcgaactgcaggaagggtggtcatggtcactggcccgggagggagcggtcagaaactacggtgacgaccgcgaacattatctgctgttaccagagccggaagcacagtacaccactgacgagcagcaacgtcttgatgaactgtatgccactcaggaggccacggaaacgtttgaagatgaagccgcgattcaggtgctgattgacgaaattgaatatgcggcatcgatccgggcgtggacaccggagcagaaatcagcctgtggcgtagtggtcagcctgtatgacggtgagctttgtgtccagcgaggggtgcagaagaagcctcagaacgagacgaaagaagggcagggagagaatggcagtagcggctccctccatgtggtcagcagcaagccggatgtgacggaggggatcagcgccccgctgctcaaaaagatgtcttcagaaagaacgctggcagtacaggccgccctggtacagcagcccgaaaaagcggtggccctgatggtatggcgactgtgcagttgtgttttcgattactgcaataccacccgtcatccgttcgtgatgcgtcttgaggtgcatcacagtgggctgaccagcgaagcgccgaccggaaagagtggtcaggcatggctgagtctgatgcaggagaaagcccgtctggaggcgctgttgccggagggctggaagaaggatttcaccaccttctttacgctcgacggacagactttgatgagtctgatggtgttctgcacggcctgttcggtggacggggtgcagacccggacaatggggcataccacacagagcgacctcgatggcgtggaaacggcgctcgggttccaccttcgcgactggtggcagccaacggcagaaaacttcctcggtctgctcagtaagaaccagattgtggaggcgctgaaagatgccggactgtcaggcgctgcgtcagatgccgggaacatgaagaagggagatgccgccagccatgctgaacaatggctctccggtacgcgctgggttcctgcctggatgcggtcacctgatgcgcaacctgacgtcgctgagggtgaggcgacagactctgatgaccatacggcacacgcagcctga

SEQ ID NO: 84761 - DNA, 729 bp, Citrobacter koseri
atgatcccggcgaatttgtcactgatacccctgagtcatgagcgtcgtgctgcaatgcaggccatcgcggaggtggagaagaaatatgagcgtggcgttcatattgctgagtttgcctatgcccatgccttcttccgcatcctgaacggcagcaaacgtgtcaccgtaaaagatattggctggttttctccggggatgacagcacagaacctgcgggggaaaaagcaggcctggctggcagcgattgatcggctgattgaaagccgtggcgcatgttgctggttacccctgtcggtgtcggacggctggcgactgttcccggaaacgaagtttcagatgtcagagcgtcgtcgcaggcaaaatgaactgtgcgctgaaaaatacacccgccagcgccggaaagaggcgtgccagcgggaatccgcgtaccaggcgctggcgggacaggcggaaatagacctggcttttcataccccggaaacagtcagcagctggagcgctcgctggtcgggtactgaactgcgccagtgcgatcttgaggacatgttctggcgctggagcgagcgttttccgtcacttgagccaatggagcgctggatgatggcgaaccagcctttctggagtgtgatggtcgaatctgatgccctcgcaaaagaaagcccggaatctgtccggcaactggagcgctggatggtacccaacaagctgatgcatcaggaggcacgctga

SEQ ID NO: 84762 - DNA, 234 bp, Citrobacter koseri
atgagaaacaatccctgcaaaacagagcttaaggttgcccgaagccagcgtaaccggctacgtaccattgagaaaaaactgactgaaatgtccagtgagtgggacggactcagcggctggctggagacagaaagtgaccggctggccagagaggtcggtcagcatctgcaggcactggaagaacaacttcaggaatgggctgacgggagtggctaccgggaggatgacgaatga

SEQ ID NO: 84763 - DNA, 306 bp, Citrobacter koseri
atgattattgacgaaaaaagactttttttcatggctttgcttaagggaagtgttcgtctggttgccatattagccttgctgatagtgataatcacgccaataggtatggtttatgaatattttgatttttatccacaaattttgaatgaatttgaatatcatgattatccggaaaactatttcatacgatgcttcctgactggattcatgagcctgcctttattaatgggcatctgtattgcaacgtttgtgttttttcatctcctcggttttatagttttactgctcggaggctactatgactaa

SEQ ID NO: 84764 - DNA, 222 bp, Citrobacter koseri
atgactaaaaaaaatgaggtggttgaactactggagcatgagcttcgctggttttaccgggcaccggtaatgattgctgttgcaggcatcattttagccattattgcactgattaaaggtgaccatttttaccttatcacgggcggaattatcttcctggctggtctgggagtgcagtggattcttggattcaaccatttcatatggatgcggaaaaaataa

SEQ ID NO: 84765 - DNA, 375 bp, Citrobacter koseri
atgagatactggatactggttattctgctaaacggtttatttgcactggtcatgcactttgccgcgccggaaatgttcggaagtactgagcattatgtcggcgctgggatctgcgctctgatagcgatggttatcacctggcgcgatcctcctgggatgctggacaacgtgctcttgtttctctttaagtggggaattgtggcttctggactggcgttttttatctggggtatcggatacaagctggaattctggggggatcataaccccgatgaagtattcagcagcgcggtcgacaccatcttgccgaatctggcggtgctgagcggtgttctgattctggtcagtggctgggtgttctggaggcgaaggtaa

SEQ ID NO: 84766 - DNA, 375 bp, Citrobacter koseri
atgaacacacagaacgtcaacgtcaaaaccgccaccaaagaatcttccgaaagatgggtgaaaagcacggccctgcggactgatggctttgtacgcaatatccacgcccgtaatccgttcgatgttatccgcgcggacgtggtgctggcgcgtattgagaaagaggcggggcgctgctgcggaatgcattttgagctgtatcaggcccgtgtgcttggcgatgcgctggattatctggacgccctgccactgaaagatcgcccggcattgatgggcgcggcagcaaaacgcggctacatcctgacatttgcagaagaagaacacgcgctggaagcaaaggatgcgctgatgagcgaactggcagcaaacgaataa

SEQ ID NO: 84767 - DNA, 834 bp, Citrobacter koseri
atgtcacaactgaactttgccgatgtctttaatatggccagagagagcgctggcagtaaaattagtgtccaggacgcgcagccaggtagcgaatcatatccctctgttcagcgcctgatgagtgcgcagtacagccgcagccgctttatcagcgtgtttaaatccacaggccgccagctggggcgctgggaggtgttcagtgattttttgtcactcgccgccagtgaactggatatggctaggataagaacgccggagagtatggagcactgccggaaaatctgtgcgcggtacgaggcgtcagacattgcgaacatgcaggagatgttctgcctgatggtaagtgcgctggaggcgaaattccacgatttcctcggcgccattttcatggagcttgaactcggtgataactttcgcgggcagtattttaccccgtattcagtacagtgcctgatggcgaggatgctgatgcccggtgtccaggacactgtacgccgggaagggatagccacggtcagtgacccggcctgtggtgccgccgggatgctgattgcgtatgcggagtgcctgcttgaggctgatatcaatccttccatgcacatgttcggcagctgcatcgatatcgatcctgtggcggcagatatggcttttatccagttgtcactgctgggtattgcggcggaagtggtgacgggtaatacgctcacgatgcagtttaaccgggtgaggtatacccccgtgtattaccttaatgactttgagaaacggttggctgacctgcgcaggttcagggccatgcgggactttatgcgcggattacaggaggccgcgtaa

SEQ ID NO: 84768 - DNA, 306 bp, Citrobacter koseri
atgaatgttgtcagtaatgaaagttacgccgtcggaatgatgcaaattcactcgcagaatttttctcatctggctcagtatggtatcacgcctggtaatctttacagagatccctgcatgaatatctatactggagcttattatctcgcaattgcttttaagcgctggggatactcctggcgggcagtcggtgcttataacgcaggttttcgtgaaaccgaggaacaggaaaggaaacgccagaagtacgcacaggaaattcaggcaatttatgtgggcatcaaaaaaaatgcgccaccagagtga

SEQ ID NO: 84769 - DNA, 216 bp, Citrobacter koseri
atgcgagtatgtaaggttgttaaacaagagtatactcgcgagtacactctatctaacaagctgaatttattaaaatactctaataagagtatgccctgcactctgattagagtgtcattagagtatgattatactcttcatcacggcgtttattctaaaatgctgcataaaaatatctgcaaccgcatgtttttaaagacttatcatgcaagatga

SEQ ID NO: 84770 - DNA, 387 bp, Citrobacter koseri
atgccacgtatacaaacttttgtcagcaatcaggttcgtgaagaaattgaatctctggttacagaaaggaggcaggaaggcgcaacggaacatgatgccactgtatcgtcagttacttcaatgctcgttgaactcggcctcagagtataccggattcagagagagaaaaaggaaggtggctttaatcagatggagtataacaagatcatgttggataacatggccagagtccgggcaatgtgttcagagataatgaagatgggcgcactaagtcatgaagttataagcaatggtaactttgataatgaagtcatcaaaagatccatagcaaaatttgcagaagaccaggtaagtattttctttcctgaagaggaagaagcggactaa

SEQ ID NO: 84771 - DNA, 264 bp, Citrobacter koseri
atggttatcatcgatcctatctttatggaagaattacgcaaggtttttcccagagttagtgataataagattgaaattgtcacctattttgtatacggaatgacctgcaaggatatcgcttaccacaaaggggtcagccaccaggctgtatccaaggtgctgcgagagttctgtgaaatgtacaacatatcgaaactggacatggtcaaggctgtatatgcagtacgtcttgaactttataagcatctaaaacctgctatgtaa

SEQ ID NO: 84772 - DNA, 177 bp, Citrobacter koseri
atggaggacaaaagcaaaatttttttaccagtgggaaggtatgtaaatatgtttttggacatgacgacgtatgaacaactcaagctgcaggctggtaaagcacgtcggactattgctaaagaggccaggcatattattgagcagcattttgagtctgacgagaaagacaaacagtag

SEQ ID NO: 84773 - DNA, 222 bp, Citrobacter koseri
atggaaagcagaaaagtcaatgtgatggttgtgggaaaaaccggcagtggtaaaaccgcgacactcagtcaggtcacccggattttcctggcgaagtctgacgtcagccagatcaaggcgctttatagcgttgagaacggagagaggatggcggaggctatccgtcagaactgcaacatctggtatccaccgaagccaggggatgaaggtcaacaaaagtga

SEQ ID NO: 84774 - DNA, 444 bp, Citrobacter koseri
atgaatgcttctttattacttttgcgtgatttcagcgacctgaccagaccggagttaattgcacggttgaagcacctgaagatccttcaggcacgggtggagtacacacatgacaatttttctcctcgtcagctaagggcctttaccctggccaccctgatgctgttcatgggctacgtgttaacggattccatccttttcagtggagtaaccggcctgataaccctcatcggtgtacagcgttattcccggctacccatgacatggcacgcacagctcaaagacggtatttcccggttcgagagtcttcgaagctcgccgcttcgtcagatgaatgaagccgatgcccattatgactggcattacgcctcttattgtctggctgctgaaattcagcttattcactcagcgctttcgcagccagccagacccttcagtgcataa

SEQ ID NO: 84775 - DNA, 600 bp, Citrobacter koseri
atgaaacaaatcacacttttgctggcagggtgcgccctgctgttatccggttgtgccggtgtcaaaagcagtttcgactgcgatgccacaacgtctgatacctgtatgaccatgacgaaggctaatcagctggcccgggacaaggcggcaaagcaggcgggaaggccggctgcgggcggactgccttccctggttaatctcccggccacctctgcggcggctgttccgtctgcatcccgttccgttgtcagtcccgcttccggcggacaggtcaccagcaacacgtccgtagtatcagctggcaccccgacaggcataaacacgaacgccgcagcgtcaacactgacgccccgtccggttgccgtaacgccggtgacacctgtttcacgctcaaatgtgtccgtagtcactccggcactctcatgccagagcgtgcgctgtgacaatcccggctccgtgcatccacaacgcagtcaggaccagatagccacggtctggattgcgccctgggtggacagcgataacgccttccatcagcccggtcgggtgtcctttgtggtcagtcctgccgactgggttcttccggcccgggtaaattaa

SEQ ID NO: 84776 - DNA, 369 bp, Citrobacter koseri
atgtttgtgagcaaaaaaaagcatgagcttgtactcgcccgctatgaaatggccgcctcccgcgccgaccaggcggaacaggttctcgcacaactttacagtatggcgctgaaatatggcgggctttacaagtgcattctcgaatgccgtgaagcggcaatagccctgactcaacctggtcgggaaagcacaaaactgaccacggagcgactggcctttatcgacagaagattaagcgatttgctgcctttcctgacgcaacatatgccggacggagaaaggctgatgtggaacgacatgctgatcggtcgttctgctgcaatggcttatggcccgatagcccaacagccggaggaggaaaccctgtga

SEQ ID NO: 84777 - DNA, 618 bp, Citrobacter koseri
gtgagcaaatcactgatttttctgcttgctctgttgaccacagggctggctcaagccacagaacacacggaaaatcgccagtttatccatgagcaacttcaactggatcgtcagcgcttcaactcactccagacccctgagttcctgaagcaggcccgtccggtggcaccgcaggagcagtcgttcctcgacgcgcaggcacagcagttccggcaatccatgcagcccggggagcgccccgttgatgcggcgctggtatttgtttcattctcgatgccacctgatgaactgaaacagcgcgtacaggacgcggcagcgctgaatataccggtggttatccgggggatggtgaacggcgacatgcgggccacggcgaatgctgtcgccggtctggtgaaagagagcaataccggtggcgtgcagatagacccgaccacctttcgtaaatacaacatttccgccgtcccggtactgattgtcgcctgcggtaatcagggcgataaagtagaccgtcttcagggcgatctcacactgcatcaggcattgaagcgagtggcagaagaaggtgactgcgcgcagaccgctaaaagcctgctgggcgaggaggagggcgaatga

SEQ ID NO: 84778 - DNA, 1830 bp, Citrobacter koseri
atgaaaaggatactccctttactggtggctacggcatcggtctttatggtgcaaccgctcctcgctaacgagcagtttaatcagggaatgcagcagggtaaggcgagcaaagggcagggtgctgatgccattcagggttttaagcctgcggaggttatccccggctacacgacctcccccgcagagagcggatattacggaggggtgacctcatcgggtgtggatatgacatcaccgggttctgccgcgatgaacagttctgaggccggaaaagccatcacagaatccatccttaataccccgccagacaacaaaccttcactggatgcgccatttattgccgaaggactggcgatgaaggacaaggcagaaactattactggcggtggatttgacggatgtgtggaccagccagccagttttaccgagatcaccacacatcagtgtctgcgagatacgaagattgaacagtactgcacgcgcaccgcgaccattgttggcgactggaaagaaacgaccgagattaaaacctacaccctgaccgctttcagctttagccgttccggaaagcagattgttttcagtgtggcggctcctgaggcgggcgtcatacacagcgcgagtctgaacgtgaccacacaaaattatctctggaactcccgcgtcagctttatgaataccacgttcaatctgacctggaataacaccattgcgctggggggcgcgacagggatgacgctgaccagcggacaggttctcagcgggacaagctgcagcgggaacggcagttgtaccggttcgctggatgacatcatttttaaagagctgaccggtggaaacacacgtttcacgctgacgctggtgatgcaggtgaaaagtcgggagtgggtgccgcgggtggagtggtcggaaagctgcccgttcagcaagtctgaaggcgctatgaccggctctcagtgtgtggagccaggcggcgtcaggaccgtcgttgtggagggaaaaacctacagcatccaccaggactgctggaaatggcaggacacgtacctcacccagaccgagacagaaggaacctgcggggagtacatgaaggactcggcctgtacggtgacgcgcagccagtgtgcggataccgtggatggtttttgtgtgagccagctggtcacatactcctgtgagcgtaaaaaagaaggtaacggtcagatctgcggcggagagtttttctgtaaagacggcagctgtgcgcagggccagaccggaaccagcaatatgtttggtcaggccgtctctgctctcgccgccgttgccgcagcgggcgaagacgtggctgaactgaacggcgagaacgtccgcgcctttaccggagaagggaagtcctgcaagaaatttgcggcgggatttaacaactgctgcaaggattccggctggggccaggacgtggggttgtccagctgcagcagcgatgaaaaagcgctgggcaaggccaaagagaaaaaactgacggtctatgtcggggaatactgcagtaaaaaggtcctcggtgtctgcctcgagaaaaagcgcggctactgccagtttgattcaaaactggcccgtattgttcaggagcagggacgtcgagaccagctgggcgttggcttcggcagcggaaagtctccggactgtcgtggcatcacggtggatgaactgcagcgccttgattttggggtgatgaacttcagtgatttttacagcgatctcgatgccggcagtgaaattccggaagaccaggcgttgctgaaaaaagcccaggacatcattgcagagaaaatgaaggagaacgcgccatga

SEQ ID NO: 84779 - DNA, 612 bp, Citrobacter koseri
atgcttgttactgtattacggaccgccatcctgatggcggcgatactgtccggctgcctgcacgccgggacactggatgatatccgtgcgctggaagccggaaaaacgggccggagcgcacccgcgatggattcgctcagtctgccagataacagggcgacaacaaccacagaccgtgctgttcagaatacgtcacctgtctggtatccgttgagcgatggcagaaaagttaacctgcaggactggaaggtggtgctgttcatgcagtcgacctgccagtactgccgccagtttgcgccagtcctgaaagccttttcccggcagaccggtcttgacgtgttccccgtcagtcttgacgggaagggcgatgccgaattccccgatgttctgccggcaacgccggatgtgatggtggaatatttccagagcggcctgccggtggccacgccaaccacttttctgaccaacgtcaacacgatggaaacctggccgctgctgcagggggccgcaggggctggagaattccgcacccgcctcgatgaagtactccggatggcgctggatcgccaggctgggaaacctcttacatcaccttctcagggacaacgatga

SEQ ID NO: 84780 - DNA, 2850 bp, Citrobacter koseri
atggccgttgatacgatttacaccgttgccggtggagcgtggtttcaggatacgctcaatggcgtggcggcattttttaacagcagggccggggattcactgattgcgatggccaccgccgtgtcggtgattgtcggggcggcaacctatatccggacgcgcaatattatggacctggtcaaatgggccgggttttatgttctggtgattgccgttctggtcggggacaagcggaacgtgcagattattgacctgtctgagcctgcggccatctatcaggtggataatgttccaaccggccttgcagcccctgccagcctgatcacccgtatcggtgccggaatggcgcaggtttacgattttgtgtttgcccgcccggacgcgctgacctacagcaaaaccgggatgctgttcggcgctcaactggcggcggggagcagtgatttccggttctcggagccggaaattcagcgcatgttctctgattacgtccacaactgcgtggtgggtgacattatgctgaacaacaagtacagcattggcgatctgatgaattctacagacccctacgcgctgatattcagtaaaccgagtccgctgcgtggtctgtatgacaaaaaccgcaattttctgacctgcgagcaggccacaaccaaaataaacacggattcgagtgatatcagtgggcggaatatgtccccgtttctccagcaggtgcttaaccggatgcacggtttcacgaaccaggtatttggtccgacaaacggtgccagtacggcactgttcaccgaaatgctgggcgacagctataactatttccacggcaactcgttgacctccaccgaaatcatccgcaagaatgtggtgatgaatgggctgcgcagtggtctggaaagtttttcagcgcagaatggcgatacggccggactggtgaacaccgcaacgcagacctcgatggcaaaaatgcgtctgtcgcaggcgaccagtgcgtccatcgccgccaacacgctgccggtgatgcacagcgtgctgctgggcatgacaatggcgctgttcccggtgctgattgttctggccgtggtgagttccctgtcctggaccattatcaaaggctatatctacaccattgcctatctgcagatgtggcccattctgttctccatcctgaatcatgcgatgaatttctacctgcagggcaaactcaacgggacggcggtgacgctggccacgtttgaccaggtgcagaatacctattccgatattggcactacagctggctggctggcgctgtccatcccgtttatcgcctgggggatggtgaaaggtctgggacaggtggtgtcgcaggcggggaactatctgggacagaccctgcagtctgcctctacacaatcgtcgtctcaggccgttgacggcaactggtcctataacaacatgacgaccgggaatgtacagggtaacaagtgggacaccaactacagccatcgtgaaggtcatatgaccagccagctggagagcggggcgaccaggacgcttacctcttcagggcagaatgtatttgatacgacgggggcaatgtcgaaattgcctgtcagcctgaatggcgccgaagtcacgagcagcagcctgacccaacaggcaagagagtcggaacaacgtgcacaaaccgcacttagcggatatcagagcgggcgagccagtagctggagtcagttacaacagtttgccagccagcgtgggaacagcgattcgctagtacagggttcagatcacagcagtggcagcaattctagctcaggtattaataaaatgctcacagctacagagggttacgcaaaagctaataacgtcagcacccaggaagcgtataaccaacttatggataaagctacaagaggaactataacagcaggaagtaaagcaagtgtgggaggtaaattatttggaaccggaattgaagcccatacaggagtagaatttagtggtaatagcggttcgtcgcatggtaccaatgaaactaattcacaaacaaatgatttcagaaatgatagatcctcacaatttgctaatgatttcagacagggcttagatatggtaaccagcagccggataactgccggtggaacccataccgacgctgcatcagcaaataaagtagaacagttggcggcaacgctttcagatacccaaaacagctaccaacagtactctgacagtatgactcgcagccatgaatacagcgaaatggcggcatatgttcagagtaacagtgctcagatcaacagtaatttcgaccagcaatttgcaaactatgtgatgcaaaaatcaggtaatgctgaagcagttttgagtgacacatcatcttcggaagttgcagcagagcggcagaaattggctcaatcatttgtacaggataagatgttacctcaaattcaggctgaatatcatggacataaagctaatcttggtagtggaatgagtcagactgcatcagtaccaggagaggaaagtgtcactaatcactggaatcaaaactcagatgttattcgtgatcacgaaaatgctgccggaataaaaaataatgtacaacaaacagttgaacagagatattctgatgccagaactcagttaaatgatgacagtcaagaaatagctggggaaaaagaaaagattcaggatgtgagaaagagtctacagtcagagcagtcaacggctgttgaagaacatagaaagggatttgaaaatgaaaaagcttcacagaaatcactggctggactaaataatgatgacttaactaagatggctcaggatgcacaagataaaggaacaacctattatggtaagaagtaa

SEQ ID NO: 84781 - DNA, 732 bp, Citrobacter koseri
atggtaagaagtaaatatagtttaagtctactgattttacccttgagctttgctatagcctgggggcgagcaacatacagctatatttcatacgactggatatacattcttccttcactggcgcttttttgtcttatagggtatttcctgttgtggtcacagcgattgaggagatttctgttaaagaatgagtctttggaaatgtatttaaagtattttgtggattgcaaaataaaactgtcggctttgattttgttgtctttcactctattggcagagttgtctcccttgatttactatcccatttattgtgcttttggcatgttcttttctatcttggcattcatgaagtataaaggcagagatgcgattgcaataaaaaatctgttgttaaatagtgagagtagcaagaaggatgaagtatgttttcagatactcagtgggggatatattaagaaaattgcgcatgctaattcagttaatgttgacggaaatgagttatgtaaagtgcaatcatttaattcctcatatgtaaaggatttgtatccagttgattgcagcgcaaacatgagaaaacatagtagtgccccggatatggttggaagggataatattatggatgatagttcttactctttggcaggagtaaacccgtcaacaggtctttacatgactggagggagtttggactcaggaggcaaccattttggtaatccagaaaaaatggattga

SEQ ID NO: 84782 - DNA, 390 bp, Citrobacter koseri
atgaaagtctggagtctgattttattgtcggtggtttttcttgtcggcttctctaaattttcagaagcaaatgagcagtctgacgggatgactattcaaaattataatttaattaaaaaagaagcactagatgaagggaaggaacagaatctcattcttaatacttctatgcaggcaatgtgggaagggattgtatttacgaatgcattagctcaaatgaaatcaggtaacccgcttatatgcactaagaatgaaattaacagtgggaaggatttatcaagggttgttgatggttacatcaaacagagccctgataaagtaaatccaaatgatagacttgctcttgttgcgattttagcattaaatgagttctatccttgtagtaattaa

SEQ ID NO: 84783 - DNA, 2178 bp, Citrobacter koseri
atgagcctgaatcctcgtgacttaacgcagggcggtcaggtcgctttcatgcgcctgaaaatgttcctgcaaataaataacctgatttcttattacgttattatggggacggttttatttggcatcgccgtcctgctgatgcgaatgagtattcagaatctgaccaacggcattatttactggtttgtccgggtaatgtcgccctttactgaaaaaatggtcagtcagcctgtctataccatccgttattacgaacataacctgcagtacagcgccagacaggtactaagcgacagttacaccatgtactgcggccaactgctgaaacaggaactggttattgccgggtgtgctgcgctgctggtcgcctttttggccacattcgctgtgtactggtatctcggtcgtactggtcgtaagcagagcgaggatgaaatcattggtggccgcgtccttagtgagtcaccaaaagatgtcgcccggatgatgaaaaaacgcggagaagcatccgatattcgtatcgatgacctgccgctgaagctggattctgaaatccagaacttcgccatgcacgggacagtgggatcgggtaagtcccagctgatgcgcaagattttgaagcaactgcgcgagcgtggtgaccttgtcattatctacgacaagggctgcacctttgttgaggatttctatgatgaatcccgggatgaagtgcttaatgctatggatgcccgctgccctaactgggatctgtgggaagaatgccgcacgatatctgaactggagaacgcaagtagtacacttatcccggccagcagcggtgaagatcctttctggcagggtagtgcacgcaccatctttgcggaaggtgcagagcgcatgcgcaaggacgaagaccgcagctataacaaattcctgcgcacgttgctggccattcaacttgatcagttgaggacattccttgccggtacgcctgcatccactctggttgacggtaagattgaaaaaacagctatctccattcgcagtgtgctgaccaactacgtcaaggcgatgcgttatcttcagggtatcgaccgcccgggacgagagaaattcaccatccgtgaatggatgaagggccaggccgataaatcgaagaatggctggttgttcatcacctctgatgagcagtatcacgagtccctcaaaccgcttataacgatgtggctcagtattgctgccactagtttgctggcgatgggggaaaaccggcagcgtcgtgtctggtttgtatacgatgaaattccgtcattgaataagctggtcactctaccccgcatcattgctgaaggtcgtaaatttggcggctgttttattctgggctttcagaacgaggctcagatggaagaaatctacggcccgaaagcggcagcggggctttttgacctgctgaataccaagttcttcttccgctcaccgagcgcccagattgcgaagtttgtggaggaggatattggggaaacccgccgtctgaagttcagtgaacagaccagctttggtcatgaacaggtgcgtgacgggatttcttttggcaaggaagaagagcgtgtcagcatcgtcagctactcggatgtacagtcccttaacgacctgcagtgttatgtcaccctgccgggaagctacccggtagtgaagctgacaatgaagtatgaagcgatgcctaaagtggctgactccctgctgttgcgggacgtgcagaccagtctcgaccagactattgaggacgagctggtacgccgtacagaggaggaacgccgcaacctggatgggttgtttaaccccgtgaagccggcagatgaaaacccactcctggagacaacaccacaaaccaacatccaaccgaagacatcaccatccatagctcctgcaacggccacggtgaatatcacttcttctaccgatgcaactgctggcagccctgtcactaccggagggacggaacgggatattgaacaggatttaccacaggatattccaccgggcctgaacagtgacggtgaagtggtggatttcgcagcgtatgaggcctgggctcaatcctcacatcagacccgcgatgtgacccgcagggaagaggtcaacatcaatcatgcgacagataaagcgcatgactttgatgacgacagggaggtgttctga

SEQ ID NO: 84784 - DNA, 243 bp, Citrobacter koseri
atgtcgcagatcgataatgcagtaacttcctcatcgaaacgagcttaccgaaagggtacgcctcttagtgtaagtgagaggaaaatgcgttcggtatcccgtaaaagggagactcataaacctgtaaatgtgttcatccagaattctcacaaagataaactagacgcattttgtcaggagaatgggttaactcaggcagaagcgatagagctgctcataaaacgagaattgttaggtgagtag

SEQ ID NO: 84785 - DNA, 864 bp, Citrobacter koseri
gtgactgacactcagatcctgttctctcattaccgacaggtccgaaacccgaatccggaatttaccccacgtgagggcaagaagacactgccgttctgtcgtaagctgatggcgaaagccgaaggcttcacgtcccgttttgatttttccgtccatgtggctttcgtgcggtcgctgggtaagcgtcatcgcatgccgccagtgctgcgtcgccgtgccattgatgcgctgctgcagggactgtgcttccactatgacccgctggccaaccgtgtacaacgctccatcactaatctggccatcgagtgcggtctggccacagaatcaaaaagcggtaatctgtccatcacccgtgctacccgggcgctgaagtttatgtcggagctggggctgattacctaccagacggaatatgacccgcagattggctgtaatatcccgaccgacatcactttcacgccggcactgttctccgcgctcgacgtctctgacgtagcggtggtggccgcccgccgcagccgcgtcgaatgggaaaataagctgcgtctgaagcagaacttgaagccgctggagatggacgaactgatagcgaaagcgtggcgctttgtgcgcgaacgtttccgcagctaccagtccgaacgtaaacagcatggtctaaaacgcgcccgtgcccggcgtgatgcggacagaacccgtaaggacatagagacactggtgaaacagcagctgacgcgggaatacgcgtccggacgatttaccggcggtctggatgccatgaagcgggagctgcagcggcgcgtgaaagagcgcatgctgatgtcgcggggcaacaactacacgcgactggccaccgtccccatataa

SEQ ID NO: 84786 - DNA, 2973 bp, Citrobacter koseri
atgccacgccgctcaatcctgtccgccaccgagcgcgaaagcctgctggcactgccagatgccaaagacgaactgatacggcactacacgttcaacgaaaccgacctgtcggtgatccgtcagcgtcgcggcgccgcgaatcgattgggcttcgctgtgcagctttgctacttgcgattccctggcacctttttgggcgtcgatgagcctccgtttccgcccctgttgcgcatggtggccgcgcaactcaagatgccagtggaaagttggagcgagtacggccagcgcgaacagacacggcgggagcacttggtcgagctgcaaacggtttttgggttcaagcccttcaccatgagccactatcggcaagccgtgcatacattgaccgagctggccttgcagaccgacaaaggcatcgtgctggcgagcgcacttgtcgagaatctgcggcggcagagcatcatcctgcccgccatgaatgccatcgagcgcgcaagcgccgaggccatcacccgtgccaaccgacgcatttacgcggcgctgaccgattctttgttatcaccccaccgtcagcgcctggacgaacttctcaagcgcaaggacggcagtaaagtgacgtggctggcatggctgcgccagtcgcctgccaaaccgaactctcgccacatgctcgaacatattgagcgcctgaaatcctggcaagcacttgatctgcccgcaggcatcgagcggcaggttcaccagaaccgcctgctcaaaatcgctcgtgaaggtggccagatgacgcctgctgatctggcaaagttcgaggtgcaacgacgctatgccacgctggtagcgctggccatcgaaggcatggccaccgtcaccgatgaaatcatcgaccttcacgatcgcatcatcggcaagctgttcaacgcggccaagaacaagcatcagcagcagttccaggcttccggcaaggcgatcaacgacaaggtgcggatgtatgggcgcatcggtcaagcgttgattgaggccaagcaaagcggcagcgatccgttcgccgccatcgaggccgttatgccctgggacaccttcgccgccagcgtcaccgaagcgcaaacattggcgcggcctgccgactttgatttcctgcaccacatcggtgaaagctatgccacgctacgccgctacgcgccgcagttcctgggcgtgctcaaattgcgggctgcgcccgccgccaagggtgtgctcgatgccatcgacatgctgcgcggcatgaacagcgacagcgcgcgcaaggtgcccgccgatgcgccaaccgcattcatcaagccgcgctgggcaaagctggttctgaccgacgacggcatcgaccggcgttactacgagttatgcgccctgtcggagctgaagaacgcgctgcgctccggtgatgtctgggtgcagggttctcgccagttcaaggacttcgacgaatacctggtgccggtcgagaagttcgccactttgaagctggccagcgaattgccgctggcagtggccaccgactgcgaccaatacctgcatgaccggttggaattgttggaggcgcaactcgccacagtcaaccgcatggctgcggccaacgacttaccggatgccatcatcaccaccgcgtcaggcctgaagatcacgccgctggacgcggcagtaccagacgccgcgcaagccatgatcgaccagacagctatgctgctgccgcacctcaaaatcaccgagttgctgatggaggtcgatgaatggacgggcttcacccgccacttcacacacctgaagaccagcgacacggccaaggacaaaaccttgctgttgacgacgatcctggccgacgcgatcaacctgggtctgaccaaaatggccgagtcctgccctggcaccacctacgccaagctgtcttggctgcaagcctggcacatccgcgatgaaacctattcgacggcgctggccgagctggtgaatgcgcagtttcggcaacccttcgccggcaactggggtgacggcaccacgtcatcgtcggacggccagaacttcagaaccggcagcaaagcagaaagcactggtcatatcaacccgaagtatggaagcagtccaggacggactttctacacccatatctccgaccagtacgcgcccttcagtgccaaggtggtcaacgtgggcattcgtgattcaacttacgtgcttgatggcctgctgtaccacgagtcggacttgcgcatcgaggaacactacaccgacacggcaggcttcaccgatcacgtgtttggcttgatgcatttgctgggatttcgcttcgcgccgcgtatccgtgacttgggcgaaaccaagctattcatccccaagggcgatgccgcctatgacgcgctcaagccgatgattagcagcgacaggctgaacatcaagcaaatacgcgcccattgggatgaaattctgcggctggccacctccatcaagcaaggcacggtaacggcttcgctgatgctgcgcaaactcggcagctacccgcgccagaacggcttggccgtggcgttgcgcgagctggggcgcatcgagcgcacgctgttcattttggattggctgcaaagcgtggagctgcgccgccgcgtccatgcggggctgaataagggcgaggcgcgcaacgcgctggccagggcggtcttcttctaccgattgggtgaaatccgcgaccgcagttttgagcagcagcgctaccgggccagcggcctcaatctggtgacggcggccatcgtgttgtggaacacggtatatctggagcgtgccaccagtgctttgcgtggcaacggcacggcgctggacgacacattgttgcaatatctgtcgccgctggggtgggagcacatcaacctgaccggcgattacctatggcgcagcagcgccaaggtcggtgcggggaagtttaggccattgcgaccgctgccaccggcttag

SEQ ID NO: 84787 - DNA, 1080 bp, Citrobacter koseri
atgaaactcaacaaacgcaacatagatttttgttgttcactggatattgggatgaataccaaagatcaaaagttaaaaatgagagctgataaactcagtgttgtaagcagtttccataacagtgaagaaagaaagattacttataaaagactaaaaaaaatgagacaaaaggaatttaaaaaataccgtgttcaatacattcgaaacatagaaaaaaagccctacagaaaagcattattgattagaggaaagaagaaaaactcaccagtgttgttacgtatcgattactcgccaataaatcgtaatacaggagggatacgtttagattttcgcccccaacatatggccccccaaaaaatagatcatttgttatcgtggataagttgtcgattaggaggaatattttaccaactcctagaacgagcctggattacgcaaattgatgtagctctcgatgtctacaactgcaagttagatgattacttatggggtttagaccgtgcaggtaaaacagcatacttcgataaagaaaatggtttgccggggttaaggattggtagttgccgttccctattacatatccttttttatgggaaagtgaatgctctgagtggtggaaagcttgtatacagggaaagaactaaattcattaacatcaattttgatgagtatcaacaattcttgcgtattgaggcccggtacaggccaaacgctacacctaccagcaaaaacggtaatgctttgaagttggcagaccttttagagatgagaaatcccttcgagcgactcagggtctactcgaaagatttgggggatgagctactgggaagagggtttctctgtacgttgccacacgctcccagcatcgctgaaatgaagcgctacatgctggcagctatgcaatgctcacgcttgcctcgcaaagtcgatagactcattgcagagtacgagatagagctgttcgataaacatacagtctggacgcagtggtcacgctgcgttgctcaattaagcggcattttcagtatagcgtctgttttctgtgtacatagacgtgtacataatgaaaagcctgagtag

SEQ ID NO: 84788 - DNA, 618 bp, Citrobacter koseri
atggcgtcaaaacatagagaattgaatgagtttgagtttttgatagctaaggtggctgaggaagcagcacaggttggcgaatcagaagattttgacgaatctgaagagattgatgattctgaagatgttgatgagtctttaaaagctcggcgtaaagcttatattgaatatcaaaatgcacgcaaaaaaaaattgaagacattaggtgagcatcagatccaggttcgtctcgatgatgaaacctatgaaaggctgtgtgacttgagcgaagtgctagggtataaaagacccaaggatagaatgcgcaatcttgtagaaatgtattcgacaatttttaaatatttattaagaactagcgatgagagtttcggatataaaccaagcactagtcgatcaatcaagatattaggtatctataaatatgttgatcatcttaaaaatgaacaacaattgccaaaggatgttattctcgctgagctaaaaaagaagggaaaaaaaattcctataagcaaaattggaagtaagcaagttctatcaggtaatgaaaagtttcttgagcgattatttgataaaaataaaatccttaaactgcttaaagaaatggatggtgagatataa

SEQ ID NO: 84789 - DNA, 378 bp, Citrobacter koseri
gtggctcagttatcttcagatagtgcagacaagcaggtaggccaacgcatccagatgcgccgaaaggaattgggaatgactgctcagcacttagctgaactcgttgacatctcccatcagcaactctctcgctatgaacgcgggactaacaagattaacgttgcacatcttgttaacatagcgactaagctcaatacaccaattagttggttttttatagattgcttctcaacattagatagtgagtcaaagaaagaacaagattttgtgcccgtaaaagatgctgatttgaagagccgtttagatctaatatggcctcgattaactcatgaacaaaggcgagtattaattatgctcttagatgaatatacgaaatga

SEQ ID NO: 84790 - DNA, 597 bp, Citrobacter koseri
atggtgttaataatgagaaaacagaaaatattgattatagaatcgcgtagcgatctagatatttataatgaaagaaatgaagggagtacattaaagagcattttggagttgcaaggtatatatgcaagaaatattgaagttgtgaatagaaacatgctagctaaagcattaagagtagctcaaagggaacatattaaatatgtgcatatcagtgctcatggcaccaggcatggttttattttaactgatgagggggttattacatggaaggattttgatcaaatagcatggccaattttgcgcggaaaatgtatttgcttttcaagctgttctgttggtaatggagtgtcagagttatttgaacttcataagtcattttgcaatgcggtggttgcaccaactagagatattacttggggcgaggggcttgttgcatattcggcattctatcatcgtgctcaattattggggaagtcatcttaccaagatgttcgggtaatgaatagcattgtaggtgccaatacatttaagcttattcaatcgccatatttatcttcaacctacacattagacggtttaataaaacccagtatgtag

SEQ ID NO: 84791 - DNA, 216 bp, Citrobacter koseri
atgaaccactatgagaagggccgccatgtcccggatattgatacgcttcggcgaatggctgatgaactggaagtccctctgaactatttcttctgtgatgatcagaatacagctgagctggcattgcttatttcaaaaatgactgaggcggaacaagttagcttgattgaacggctaaaagaatcattaaagattaatgatgatggtcaaagttag

SEQ ID NO: 84792 - DNA, 477 bp, Citrobacter koseri
atgtttgtatgggaagcagaagaaataaacaaagatcaagaagatgcaattaatgcacttggtagcgtattgcttatagcatgccccggaagtggtaaaacgaggacattgacctataaaatagctttagagctttcaaagcttagtgatgataaaaagtatgttcttgcaataacttatacccataaagctgctgatgaaattaaagagcgaattgagttattaggggtagatacatctcgcttatggattggaacaatccattcattttgctatgaatggttactaaaaccgtactcgatttatcatgaaaatcttagtgacggttttaaaatactgaacacctatgattctgaagagttgattacaactatctgctcaaattacaagaatgaaaaaataagtttttatgactgtaaccattactacacttcaaaaggattacagttatccgggctgtctcttatacacatctga

SEQ ID NO: 84793 - DNA, 180 bp, Citrobacter koseri
atgattcgtctgatgaaagtgccaaaaagctattatatgtcattggttctagagccagaaaaaatttacatcttatttctgagagagggagaaaaagtagatataagcagtacgagtcaacaaaaattctatctgggacaagatacatttatgggcaagatcccttttaaaaataattaa

SEQ ID NO: 84794 - DNA, 132 bp, Citrobacter koseri; identical to SEQ ID NO: 76263

SEQ ID NO: 84795 - DNA, 342 bp, Citrobacter koseri; identical to SEQ ID NO: 27125

SEQ ID NO: 84796 - DNA, 1650 bp, Citrobacter koseri; identical to SEQ ID NO: 27126

SEQ ID NO: 84797 - DNA, 621 bp, Citrobacter koseri; identical to SEQ ID NO: 27127

SEQ ID NO: 84798 - DNA, 591 bp, Citrobacter koseri; identical to SEQ ID NO: 27128

SEQ ID NO: 84799 - DNA, 282 bp, Citrobacter koseri; identical to SEQ ID NO: 27129

SEQ ID NO: 84800 - DNA, 1266 bp, Citrobacter koseri; identical to SEQ ID NO: 27130

SEQ ID NO: 84801 - DNA, 714 bp, Citrobacter koseri; identical to SEQ ID NO: 27131

SEQ ID NO: 84802 - DNA, 528 bp, Citrobacter koseri; identical to SEQ ID NO: 27132

SEQ ID NO: 84803 - DNA, 663 bp, Citrobacter koseri
atgcgtatgaaaattctcccgatatgtcttgccctgacctcactgctgttggggggctgtgcagataaaccctcccggcctgcggaaccggtggctgacaccgcgatcccggtcagcatcggtcatgttcagccggtactctcggatatttatccgtcagccccggaggtggtgcgttatgatcgttaccggttggttgatatttcgccttcacaggcacagcgttacccgctggaacaaattgttcacctacgtattcctgcgtccgtctccccgacagtcggagatgcgctgcattatgccctgcgtgattccggatatcgtctgtgcacgtccgatggacaggcgaaccgtctttaccgtctgccgttacccgctgttcagtatcagatggggccggttcgcctgaatgtggcgttacagatccttgccggtccggcctggcagttgttggtggatgatgtgcaacgggaagtctgttaccaacttcgtccggaatacacgccgtctgagccggctgttagtgcagcttccccctcatccgctgctttgaccgcgccactttctgcgggcagtacgccattgccagtgcctccggtgctgaatacctctgccggacatggcggtgtgaataaggttcatcgcggaggatggctgaaatga

SEQ ID NO: 84804 - DNA, 720 bp, Citrobacter koseri
atgagtgctcctgctaaatcttacgctgtccggaccgtgattatcggaggccaggtattgtttgccggtctgtgcgtggcagctgtgctggcgttgctgaatattgctgatacgcaggagaaacagttgtcactgcttgaccagcgattacaggcggttgagatgacgatggctgatcctgtcacgcatgacgggatgaatgcgcaactggatgtgattcgtcaggagctggcgacgctgaaacaggacgcggcatcacagcgcgacaccctcagaacggtaacagagaagctggccgttgccagcaaatcggatgagcagattacgctgttatcggacgggctggaaaaacggctggcgcaactggaaacccgacaggcacagtgggcactggcgttacatcagttgcaggaacagcgtcagccggtgcaaaaaacggtcaatcctccggttgtcagggtaaaaaacaccacgccggagacttcccgtcccggggcttctgtccgtccatcccggaccgtgccgtttcagttaaccgccattgaacagcggggcggtcgtcgtctggcagctctggcacctgtggatatccgtcaactggggcaggtgcaattagtgccggtcggtgggcggtatcagggctgggaaatgaccgacattcagactgaccgtgtgacattacgttatcaggggcgcacggtgacattgcgcctgccataa

SEQ ID NO: 84805 - DNA, 198 bp, Citrobacter koseri; identical to SEQ ID NO: 27134

SEQ ID NO: 84806 - DNA, 606 bp, Citrobacter koseri
atgacactgacaatcactcaaaaatccgggcattttgcctggtgcgcactgattgcgctgcatctggcagaacaagacggacaggtcaaatccgagatgcaaaaaaacttgtttttaatccgctggctggcaacggctaaaaaacaacaccgttttgaccgggcagtcacggcagatattgactggttactgcgacagggacggacactgggtgcccgcgccaaactaccacaaagactggattatctgtaccgctcctgcaccggtacgttaaatgaccagagtgatctgttccgcctcacttatgcgtttgaatccgccaaagaagccggtttttcctaccagatattaaataataaagcctggcacggacggcatgccctgataccggataacacccgcaatgccctttatctgttcaatgtcgcgctggatgccgcttttgatagtaacggtaaacagatagcccagttgccggtaaaaatcagcggagatatcgccggatttactgcattactcaaatcctgtggctggcaactcaaccctgcacaggaaacagcgatgccctttttatattcgctgacggcgaacaacgaaaatgactga

SEQ ID NO: 84807 - DNA, 1794 bp, Citrobacter koseri
atgaaaactgcggaatacaaattagcgggtttagtcgtggttgtcagcctttctttattctctggaatgggggttgccggggatggtaatgaacgaaatacccatcaccggtttgacccttcaaaaaatattaactgcggtagtaatggatattatgaaacgggttcatggcgatgtgtgaatgaggggttgaattatttaaacaacaaaacaaaagccttttcggctgaaaagttcactgaaattaaagaagaagcgattaagtctgggttagatgcggcgaataaagctatacaagacgcgaatgattttaccggtaaaaaagtatcagagagcaatgcacggactgacagcttaatcagcaaagagcagaaagcacggacagacgcattgaatacagagaaaactgttcgcgaacaggcggatattaacaccctcaaaaatgcaaaccaatataccgacttaaaaatccaggaaaataacgagttactttcagcggatattgagcaagccagaagtgactttgatgacaatcttaaaacaacaaaagcagcgttagaaaacaacatttctgatgttaatcggtcattaacaaacagtgttaatcgggcgaaaaaatatttatccgataatctggataaaacccgtcatgacctgagtgccagtattattgccagtcagaatgacagtcatcttcgcactgacagattgatcagcagagagcagaaagcacgtattgacgcattaaatgcagaaaaactggctcgggaacaaggtgatgccaataccctgacatcagctaatcaatatactgataaaaaagtatcagagagcaatacacggactgacagcttaatcagcaaagagcagaaagcacggacagacgtattgaatgcagagaaactggctcgggaacaaggtgatgccaataccctgacatcagctaatcaatacactgataaaaaagtatcagagagcaatacacggactgacagcttaatcagcaaagagcagaaagcacggacagacgcattgaatacagagaaaactgttcgcgaacaggcggatattaacaccctcaaaaatgcaaaccaatataccgacttaaaaatccaggaaaataacgagttactttcagcggatattgagcaagccagaagtgactttgatgacaatcttaaaacaacaaaagcagcgttagaaaacaacatttctgatgttaatcggtcattaacaaacagtgttaatcgggcgaaaaaatatttatccgataatctggataaaacccgtcatgacctgagtgccagtattattgccagtcagaatgacagtcatcttcgcactgacagattgatcagcagagagcagaaagcacgtattgacgcattaaatgcagaaaaaactgcccgtgaacagggggatgttaccacgctcaataatgcaaacaaatacaccgatcatcgtattcgctcattaggtttaaatgtttctgatgcgttaaatgattttcaacaaaaaacagatcagaaatttgctcatctcgataacaaaattggccgtgtggaaaaacgggccaatgccgggattgccggggtgaccgcgatttccaccattccgtatgtgaacagtgagcgtttttcgttcgggatggcgatggggcattaccgcgatgcacaggcgattgccaccgggatgcagtataagccaacggccagtacgaatgtccgcctgaatgcgtcatggaataccggtggcgataccagtattggtgccgggtttgcggtgggctggtag

SEQ ID NO: 84808 - DNA, 399 bp, Citrobacter koseri; identical to SEQ ID NO: 27145

SEQ ID NO: 84809 - DNA, 381 bp, Citrobacter koseri; identical to SEQ ID NO: 27197

SEQ ID NO: 84810 - DNA, 561 bp, Citrobacter koseri; identical to SEQ ID NO: 27196

SEQ ID NO: 84811 - DNA, 405 bp, Citrobacter koseri; identical to SEQ ID NO: 28994

SEQ ID NO: 84812 - DNA, 474 bp, Citrobacter koseri; identical to SEQ ID NO: 27210

SEQ ID NO: 84813 - DNA, 273 bp, Citrobacter koseri
atggtcacagttaaccttcattgcccccgttgccagtctgttcaggtttaccgtcacgggaagaacccaaaaggacatgatcgatttcgctgccgtgactgtcatcgagtgtttcagctcacttaccgttacgaggcccgtaaaccgggagttaaagaccaaatcactgaaatggctttcaacggtgccggagttcacgatactgcccgtacgctgaaaatcggcattaatactgtcatccggactttaaaaaactctcgccacgaagaataa

SEQ ID NO: 84814 - DNA, 396 bp, Citrobacter koseri
atggcactcatctgcgaacttgatgagcaatggagttttgtcggcagtaaagcgcgacagcactggctctggtacgcgtacaacacgaaaacaggtggcgttctggcctacacttttggcccccggactgatgaaacctgtcgtgaattgctggcgctgcttgccccttttaccatcggtatgttgaccactgacgaatggggtagttacaccagagagttaccgaaggagaagcatctgactggtaagatttttactcagcgcattgagcgcaacaatctgaccctgagaacccgaatcaaacgtctggcccgcagaactatctgtttctcgcgctctgtagaacttcatgaaaaagtcatcggtgcctttatcgaaaaatatatgctctactaa

SEQ ID NO: 84815 - DNA, 279 bp, Citrobacter koseri
gtgccttcacaagtaatattagtaattacagatcatttacagtggtcagaatataccaatgatcatctatatcaattacaagaaaaaatcaataaatatattgagtttattgaaagtggagaaatgttggaaaaatatccagatgttttgggcaaggagattatgtttaaaatttactttaaatatagtattccgaatgaatgcatcgaatttataaatagagttagagaaattttgttgcctattaaaattcagctagcatatgaagaaaaaagctaa

SEQ ID NO: 84816 - DNA, 489 bp, Citrobacter koseri
atgaaccagaatgttttttattgtaaggaatggtcgattggatataaggagccaattgatttgtatagtgaaaataaagctcgaaaaaaacatgaatctggtgagctctacacagtactcattggttcagatgtaaaacctgcatactttattaatataactaaaaatgctgggtggatgagtgttggttttttggatcaggagttaagagagtatttattctatagttttaaagtgattaatgataacaaactatttctctctatggccgttcaccgtgagtttgctgaaaatgaaggtgccggaatattgaacgtatcaagtggcacaacttatatttttaatgaagacggtaatactattgtcagagaagaacagtttaatccttataaactggatgaaagtcagacaatggttgatatatcaggtaattacgaagaatttcccgagtttggtaaatacgatcttctgatacgaaaagaaaggtaa

SEQ ID NO: 84817 - DNA, 1524 bp, Citrobacter koseri
ttgataatcagcgaaatgcaacgcaagcttgccacatgggcagccaccgatccgtccctacggattcaacggctgctgcgtctgataacacaaccagaatggctggctgaagcggcgcggatcacgctttcatcaaagggggcccatacccccggcgttgatggcgtgaacaaaacaatgctacaggccagactggctgttgagctgcaaatcctcagggatgaattactctcaggccactaccagcccttgcccgccagacgggtttacatccctaaaagcaacggcaaactgcgaccactgggtatccccgcgttgcgggatcgtattgttcagcgggccatgctgatggcgatggagccgatatgggagagtgattttcatacgctctcatatggcttccggcctgagcgcagtgtccaccacgcgatccgcacggtgaaattacagctcacagactgtggtgaaacccggggacgctgggtgattgaaggcgacctggccagttacttcgacaccgtacatcatcgactgctgatgaaggctgtacgccgcaggatcagtgacgcacgtttcatgactctgctgtggaaaaccatcaaggcgggacatatcgatgtcggtctctttcgggcggccagtgaaggtgtgccacagggcggtgttatatcgccgctattatcgaacatcatgctgaatgagttcgatcaatacctgcatgagcgttacctgagcgggaaagccagaaaagatcggtggtactggaataacagtatccaacggggccgaagtacggcggtcagagaaaactggcagtggaaacccgcggtggcgtactgccgctatgccgatgattttgtcctcatcgtcaaaggcaccaaagcacaggcggaagccatcagggaggagtgtcggggtgtgctcgaaggcagtctgaaactcaggctgaacatggataagactaaaatcacccatgttaatgacggctttatctttctggggcacaggatcattcgcaaacgcagtcgttatggcgggatgcgagtggtctcaacgatcccgcaggagaaagccagaaacttcgccgcatcgctgacagcactgttatcaggcaactacagtgaaagcaaagtcgatatggctgaacaactcaaccgaaaactgaaaggctgggccatgttctatcagttcgttgattttaaggccaaagtcttcagttatatcgaccgtgtcgtgttctggaagctggctcactggctggcccgcaaataccgtacaggtatcgcttccctgatgaggtggtggtgtaaatcaccgaaaccgggtcagagcaaaacgtgggttttatttggtaaaaccaatcacggcaagctcagcggcgaaatactgtaccggttggtggggcaaggcaagaagctgttccgctggcggctacccgaaggtaatccctatctgaggacggagaccagaaacacgtatacatcgcgctttacagaagtggcaatggcgttcgccagcatttaa

SEQ ID NO: 84818 - DNA, 480 bp, Citrobacter koseri
atgccactgctggataagctgcgtgagcagtacggggtcggaccggtatgcagtgaactgcatattgccccgtcaacgtattaccactgtcagcaacagcgacatcatcctgataaacgcagtgcccgtgcgcagcgcgatgactggctgaagagagagatacagcgcgtatacgatgaaaatcatcaggtgtacggtgtgcgtaaagtctggtgccagttgttacgcgaaggtatcagggtggccagatgtacagtggcgcgtctcatggcggttatgggacttgccggtgttctccggggtaaaaaggtccgtactaccgtcagccggaaagccgtttccgcaggcgaccgcgtaaaccgtcagttcgtggcagaacgtcctgaccagctgtgggtggctgattttacttacggtgtgcccggagttcagggcgggcatggatgcttaaatgaaccgcgagtctgtctggaatattga

SEQ ID NO: 84819 - DNA, 327 bp, Citrobacter koseri
atgactaaaaatacacgtttttcccccgaggtccgtcaacgggcagttcgtatgattctggaaagtcagggcgaatatgactcacaatgggcggcaatttgttccattgccccaaagattggctgtacgccagagactctgcgtgtgtgggttcgtcagcatgagcgggataccgggagtggtgatggtggactcaccaccgctgaacggcagcgtctgaaagagctggaacgtgaaaatcgtgaactgcgccgcagtaacgatatccttcgccaggcttccgcttattttgcgaaggcggagttcgaccgcctctggaaaaaataa

SEQ ID NO: 84820 - DNA, 147 bp, Citrobacter koseri; identical to SEQ ID NO: 27109

SEQ ID NO: 84821 - DNA, 1689 bp, Citrobacter koseri
atgttaccgtggtttcgtaaatcgctttcccggaaagcggaagagaaaatattacctgtttccccgggaaacacgcaggaaaaagcattatttatccgtgacagtgacggtttttatttaccgcagtcggctgacatattgctggccacaccacagcgacaaaactggttacagcaaatcagccgggtggtggcgttaccggataaccaataccgggcactttgcctgtctcctttgcagacgctggcagaacgacttcagtgtgtgccggcatcaaaaaccgggaaatatgccggcgaagggggcttgctggatttaacgctgaatacaacggcttggtgtatgcggatgtcccagaaagagatgctgccccgggggcttccgtcggaagagcagagccggcagttcagtgcctggaatgtgtgcgtgttttataccgggctgttttactggttgccgttaaccgctcagtttgaggggcaactgaacagtctgtcatcgtggcagccggggatcagtccgccatcagagccgtatcgttttcgctttcatgagccggtgccggatatcacgcattttcgccggacaacaggggccatgatggctttccggctattaccggagaaggtgatccactggttgtcgggtacaccaaaggcgcttcaggcgttgtctgacgtggtgaccgggcaggtaaacggtgataatgatttacagcgtgtgctgaatgaggcactggctgcgtttgaagttgatactttgcctgatatttcgggttcaacaataaagaaagtgtttcccggggaaacaacagcggccacacagctcaaagagaatatacaggatatttcttcttcgggtttgatgagttcaacatctttgcatgatgacaaggtattttcgtcctcgttatcggtgccggctgcggtagatagctatgcttctgagtcttttaattcggatacagacaatcagagttgtgtgcaatcagccgtgcctgttgtacagcctgatactttagttaaaccggatgacgatcttcagtatgcgctggctttatccgggattctgtcttcagaaaataatgacagtgcagataataaggatgaagtgaatatggttgagaacactgcgctatcagaagttgcaaattgtgaaaacaagcatgatccccagatacaaagagatatcattcagaatcccattgagtcagttacagaaatcacagaaaagaaaactgtacccgggaatatcgtgaataccggtaaggttaataaagaggaagtagttgctgataatgtgtcgccggctattttagccgaagattttattacctggcttcatcattctttgtcggaaaagacattaccggtaaatattcccgggggattggttcattccattgcagggtatttatttttacgttcgccacagatttttaccttatatctgagtcggagtccgtataaatttgagcgatatactccggttcagcgtgcattcgagtctttacgtctgcacaggagaaacggaaaacaatcaggtggactggttcattgttgggttcagagtactgcatcatcagaggaaaaaacgagttggaaaaaaactgccggttatttggtaaaaagtcagaagttgttaccgggtgaggatcgggacgacagtttgtatattaagtttgaataa

SEQ ID NO: 84822 - DNA, 1050 bp, Citrobacter koseri; identical to SEQ ID NO: 27112

SEQ ID NO: 84823 - DNA, 339 bp, Citrobacter koseri
atgattgagccgctgcgggagctgttggtgaacccgccgctggaaaactcgcgtcatgaagatcagaactggcgcgacaatctggtgcgtcaggttcagcattcagagctggagctggtggcgaactttgcggacatcccgctgcgcctttcccagatattaaagctgaaacccggcgacgtgctgccgattgaaaaacccgaccgcattattgctcatgtggatggcgtgcctgtactgaccagccagtatggcaccgtgaacggtcagtatgcgttgcgcgtagagcatttgatcaacccgattttgaattcgctgaatgaggaacagcccaaatga

SEQ ID NO: 84824 - DNA, 399 bp, Citrobacter koseri; identical to SEQ ID NO: 5182

SEQ ID NO: 84825 - DNA, 855 bp, Citrobacter koseri
atgttaaaacaagaagaatataacagagataagtatataaatcaaattcaaagttggactttgtgtgcagatgatttcgagaatggaacatacagaaagccaaaagaaaaagcgttaaacaaaaaatatataggttacaacaacaactattttattaatggttttgtgtttgatatagaccaacctcaaggtgcaattgcatgggatgtttgcggattacctaagcccaatataattattcaaaatactgataatggtcatgctcatttgctttatgctttaaaagctcctgtatgtaaaactgataatgcaagagtaaagccgcttaaacttgcaagcctgattcaaaaaggatttacagatagattaaaagcagatcgtgcatatgctgatgtgctaatgaaaaatccaattaatgaagcggaatggcgtacggtttggggtaatgttgaagcgtatgatctcagctatctaagcgagtttatacctgatgacattaagacagaaaaaagattaccttctgatggtctaggacgcaatgttaatctgtttgaagacctaagacattatgcatataaatctgttttaaaatttaaagaaaaaggcaactatgaacattgggaaaaagaactgatattaaaagctgatggattaaataccttctgtaatggtagtaatctattaagctataatgagataaaagcaacagcaagaagcgttgctaaatggacatggcgaaacttcaataaaaaacagttttcatgcatacaatcatacagaggaaaaaagaacacaggaaagacaaaaaaaagcagtcgtatgttagacatgatcatgaaagcagatgcggagtaa

SEQ ID NO: 84826 - DNA, 1260 bp, Citrobacter koseri
atggctttatatagattagaaatgcagaacgtaagccgtgcaaatggtgtcagctcagttgcaaaagctgcttatcgtcatcgttgcgtcatgttcgatgaaagaacaggagaaacacacggagagaaatcgctaaaccgtgacgatctagtttatgctgaaatattagcaccagataacacgcccgattttttaaaaaaatctagcaacgatttatggtgtttcgtcgaaaaaaaagaggctagggcgaattctagaaccgcaaaagaattcaaaatcactttgccaacagagttgtcgaatgaacaaaacatcgcattgatgaaagattttttattaaatcatttcgttgacaagggcattatatgtgactttgttttacataatgacaaaggcaataaaaaccctcacgcccatgtaatgatcacaactcgtgaaataaccccaaatggatttggtaaaaaagtacgggaatgggatgaagaaaaaactttgcatgaatggcgtaaacagtgggcaaaagtccaaaataagcatttaaaaaaattaggtttaaaatctcgtgttagccatagaacgctagaagaacaaaaaaatataatgatcgatttagctaaaaaagcagaagatgcaaaagattttgacaagtctattttatatttagcaaaagctattgaactagatcgcccgccgatgcagaacctatcacgtaaaaaatggcgttctaaagaagggcaggaacaacgcaaacgtgaccaagcgatcagagacaaggcaagagaagatgcaagggctgtcagggtgttgaggggtgttgcagttgttgatgttgcttcattcacagttcaaccgctgcagaaaaaagagcaggcaaaaaataatgacttttcagaaaaaaaatcgtggtggcgttctactgttaattttataaaaaatattaaagctaagttctcaactaaaaaagatattaaacccgttcaagaaaaagaacctgatttaatgattgatccggtcactggtttaccgattaccacgcaaaaatggcaggagatgagtgacagggcaaacgtaaggactccacaggcggagatttcgtacaaggtaaggcaatcggacggggaagggctaaaaacggctcagaatgcgttacaggacgttttagacgtatcaggcggtaaaactgtcaaagtgaagtctgtacctgttccgggttcgcgtaggcgtcgagtgatagaccaagacagcagtgacaagggttaa

SEQ ID NO: 84827 - DNA, 408 bp, Citrobacter koseri
atgaataaaaaagaaatagaaataaggttattgattttaaaaaatgagatcgatattgaagacattaaaaactatttcataaacgatgaaatagaagaaggtgtttttactgattatttaaatctgcattacgcagttgataatgcaatgcataacaataaaaaatcattatttgaaagattagtatatttaataaataaagatcgtgaaaacgaaggtaaacgaaaggaagttatagctgatcatgatttagtatatttaaaactaaataatgatatagatattaatgagtttaagcggttattttcattacaaaaaaacataccaatgaatgattttttaaacatgtttggctacgtcgttaaaattagaagagaggttgaaaaatgggaagtaaaaaaacgttag

SEQ ID NO: 84828 - DNA, 279 bp, Citrobacter koseri
atgggaagtaaaaaaacgttagaacaaagaatggcacttgcacaagatagattatctaaacttaaaaaagaagcgtcagagaaagaaagaaaagctagagagcatataaaatttaaagccggaggagaagttactagggtctttggattggattatgacgaagctgttttattaggttttctagctatctatgacaagctgaaacctgagcaaaaagcacagataaaaattgacggtgaaaacatcataaaatcacgtctagaaaacgcttccaagtag

SEQ ID NO: 84829 - DNA, 723 bp, Citrobacter koseri
atgtacgatgtgttgaaaaaagagatcgaaaaatcaagtgtgggctatattgtaagggataaaatagaatcggcccttcctgaaaaagataaaatcgcaaactatcatgatgcaatgaactggttggatggaaaaataaaagatgagagtaattcaaagatagagatagtcaacatagaatcaaccttaattatcccatttaaaataggtgacatggcatctagtgtatcattgataagtatagccaaaatagctagttatgctatgcctgtattcatggttttttggttgggttcactgttcgtcacgcggagaatagagatgatgaatcttatgaaaacaaaggatatatcattgatatacccacatattcttaatatcttctcagtggacacaacaaaatctcaagatttcaacctttatctcttaggcgatgaaaagataagaaaacaaataaacgcctctatatttttaattaaagcaataaaaggttttttatttatatcattagcactcgcaatgtgtgggccattgtattatggcgaatttatttacctggtaaactacaacacatcctcgctgccactattcattgtttcattttcttgcatgctaataaatataatccaagcagttgggtatgtttactttgagtcaatttcatctaatgttatttacagaataaaaaatggtgtaactgataggtatgaacttaatttttaa

SEQ ID NO: 84830 - DNA, 648 bp, Citrobacter koseri
atggaaagggagcttatggtcgttgaaaattgttcaggaaaatcagttgattaccgaattcacgtggggattgactatgctaaagtggttgacttgcagagcaaatggggggcctatcgtgctgatttattgtcagctctaattactgctaaccccggtatggccactgataacgagttagcaaggaaaattctggcagataacagcctttctgattggcattgggactggtgccgcaagctattgcaatgtaatagtgatgattatcagtggttttttctgcaaataaacgatgctgtacaaggtgtttgtgttctttatcatccaaaagaaagtcgatttgataataataaaattttctatgtggattatattgcaacagcatactggaatcgtcctcgtcctaactttacccctgaatatagtggagtaggcaaagagcttatccaacatacaattaattatgcctgttcaacctgggggtatagacctggtttttgcctacatgcactcccaagtgcagagggtttctataaccatcttggcatgactgattttggcgtcgaccaagaaaaagaaaatctccgattttatgaggcatcacaggttgtcgcatcaactctcggaggaatttcaaatgccgcatga

SEQ ID NO: 84831 - DNA, 213 bp, Citrobacter koseri
atgccttatccggcctacaggatagtgccacactgtaggcccggtaagcgtagcgccaccgggcgtaagaaatgtggcggtcggatggcggcgatgccttatccggcctacaggatagtgccgcactgtaggcccggtaagcgtcgcgccaccgggcgtaatgtcattcaggactcaaccgccagcgggcggtttctgaatttgagtgactga

SEQ ID NO: 84832 - DNA, 1083 bp, Citrobacter koseri
atgaacctgacgacgttaacccaccgcgatgcgttatgcctgaacgcccggtttggcagtcgtgaagaggctattcacgcgttaacccagcggcttgtgcaactggggaaaatttcagattccgatgcttaccttgaagaagtctttttgcgtgaaagccaggggccaacggcgttgggagaagggctggcggtgccgcatggtaaaacgtcggcggttaaagaagcggcatttgctgtagccaccctgcgtgaacccatgatgtgggaaggggttgacgggccggaagcggtgacgctgatttttctgctcgccattccgccaggcgaagcgggaagcacccatatgcagttgctgaccgcactcaccacgcgactggcggatgatgacacccgcgcgaggattctggctgcgaccacggcggatgagctactgtcggcgctggacgaccaatatcaggaaagcgcttttcagcccttacaggatgcgccgaccatcgtctgcgtaacggcgtgtccggcgggaattgcgcacacctatatggcggcggagtatctggaaaaagcgggacgcaaactgggtgtgaacgtgtatgtggaaaagcagggcgctaacggaattgaaggccgtcttaccgcgcagcagctcaacgcggcaaaagcctgcattttcgccgcagaggtggcgataaaagagagtgagcgctttgcgggcattcctgcgctgtcggtgcccgtcgccgaacctatccgccatgccgaagcattgatccaacaagcgttggcgctggagcccgtgcagggcgatcgcgcggtttaccaggaaacggcagcgcctaagagtctgaaaacggagttaaaacaggcgctgttgagcggcatctcgttcgccgtgccgctgattgtcgccgggggaaccgtactggccgtgtcggtgctgctggcgcaaatgctcggcttgcagcatctcttcgatcaggagaactcctggctgtgtgatgtatcgcaagctgggcggcgggatgctcggcatcctgatggtgccggtgctcgccgcctataccgcctattcgctggcggataa

SEQ ID NO: 84833 - DNA, 186 bp, Citrobacter koseri
atgacgatggatgtcgaagtacctataaaggattatattaaggagcgcgaaggtgaaatgtttttttaccgtatcgcggtgataaaaataagggggcgggcagtgtgccaacccccgtttattattttatgggtgtttgataaagcgggaaagacgctgtatcagcaagcggttttcctggcgtag

SEQ ID NO: 84834 - DNA, 630 bp, Citrobacter koseri
gtggcgagtaatcctctatcaccgaccaattcagaaaagccagcctacgggctggctttttgctgtctggaatttaacgaggatgagcattgtaggtctgataagcgcagcgccatcaggcgggatcggtcgctcactttcggtaacgccggatggcggcgcaagcgccttatccggcctacggcgcagcattgtaggtctgataagcgcagcgccatcaggcgggatcggtcgctcactttcggtaacgccggatggcggcgcaagcgccttatccggcctacggctcagcattgtaggcctgataagcgaagcgccatcaggcgggattggtcgctcattttcggcaacgccggatggcggcgcaggcgccttatccggcctacggcgatttcgccattggcaaaaaatgtgcatcacttctcactgtttgttcacgtttttgtgacatattccattgtctttttttatctttgcttaaatttttttttgcgttacttatggctgagcccagcattttccgctgtgcgttttagcgttcgtgatattaatcgctcagatatgcagcatttcgtcagaaatttttcacaatctgcacaaacgttaatcaccaaatgttgcgaaatatga

SEQ ID NO: 84835 - DNA, 162 bp, Citrobacter koseri
atgactcaggcgccgctggccgtggtggccgcactgcgtgaaacatccattctgttcggcgcgctgattgcctggctgctgctcaatgagaaagtcgccgggctacggttggtcgcggctggcgggattgccgccggggcgatattactgcgtttatcctga

SEQ ID NO: 84836 - DNA, 852 bp, Citrobacter koseri
atgatcttcatcgacttggaaaataagcttccaacggatatggatttgcatcctgatgttcgctggagtgaggctgattggaacgcttggcagaaagaatctgttcgcttgattggtgagcttgccaagctcaatgcaacaggccagatcaaagaacgtaatgaattgattgataagcaaagtggccactggggaaagttgaaaccatggcttcttgtactatcgggtggaaaatgctggtttactgaagcacgagatattgcttcgcatttagacgtggagcattttcgccctaagaaggctacgcgtaatgttaagggacccgaacgagatgggtactggtggttggccttcgactatatgaacttccgaattgcgggcaccgtacctaatagaaagaagggcgcgtggtttcctcttcgctatggctcgccatgttcaagttatgcgcgtcgctgtgaaggagatgagattccgcacttcttagatcctactaatgcttatgacgttacattactcgcttttgacgaagaagggaaagcggtgcctgcaccgggtatttctcgttgggataatatcagggttagacgcaccgtagaccgcttaaaactctccgaacatcaagccttggcagaagaacgtcgtaaggtttggcaaagaactacaaagctgataaataagtattttcaggcactggctaatactcgaacttctgcggctgcccgtgagcaagtgaaggtcgcagcacgtgacatactctgtcttactaagcctgaaaccgaactttcatcagtggcgaaatggtgcgttcgcttgcgcaacgatccacagctttctaggctggttgggtaa

SEQ ID NO: 84837 - DNA, 1737 bp, Citrobacter koseri
atgcaactgcttcgcatcagtatcccaaacttccgcaatcttcgcgatctcaacattgctttcgatacccacttgcagcctgccgatgcaccacccaaacccatccgcagccacgccctgattggtcagaacggcatcggcaagtccaatctgattgaggcactgatcaccatcttccgtgatgtcgatctcgatcgtgaagcagcatttaattacacactggaatacagtattcacgaccatgttgtgcttattgaagccgattctaccaagcagaagcgtccctatgtatgggtagatggtaaagtagcctcacagggctttttgctcaaaaaccgcgaattactgccagcacatatttttgcctattactccggtcgcaatgagcgtattgaagcgctgtttcatgaacatgagcgacgctttaatcagcgccaggaaatcaccactaacgaagtcctgtccgaacaacttctggagaactttactggctccgaggcggatattcgtgcgattgaagaagccaaacgtcgccgagaagtgcggctgaagcaagtgggcgatgaccgtctgcgacgcctgttctattgtcgcggtggacacagccaactggtacttctagcttgtctgctatcggatgaccctgtgtttcagaaggtactaaagaacctgcacatcgaatcgttagaatccgctttattcgttttaaaagagccgcaccggctacgtgaaaagcgccgcaatggaaagttcgaagtgcaggaactgaatgaaggtgacccacgcttttggtatgctcgcagcaatgtggtcagcgagtttcttgacaagctctggaaggttgcttgggcccccattgaacaggagacaaccaaacagattgattttcgtggtcgcacagagaagcaaaagcagctgtacttgtttgtgtcaagccaagaaaagcttaagcaattgggagagtcgatcggcagcaccgacagtttctttcgctacgctgaaggagcctatattggtgatctgatcgatgaaatacgtattgtggttaagaaacgtgatgaacatggtggtaaggtaagctttactcacctttctgaaggtgaattacaaatgctcaccgtgcttggtttgatgcgtattacccgtgacgacaattgtttgttcctgcttgatgaacccgacacccatctgaaccctatctggaaattgcgctacttcgacgatattgaaggcgtactaagtgcggatgatacatcgctgctacagagcgagtcgcaaataattattacaacccatgatcccatgatggtgggcagtctgaagcgtgaacaggtacatatactgcgtcgcgatggtagtactacgctggtcgatagtcctgatgaacatccgcaaggaatgggtgtaaccgggttgcttaaaagtgagctgtttggcttatcatccacactggatatcgaaacagagcgccgcttgtttcggcgcaatgaactttttgcactcgacgaaagaactaatgaacaagatgatgaactacgccgtttgagtgtggagttggcagacttgggcttttcaaatgcggatttcaaagaccctttctatgctaagtttgtacgacgaatggccaaacataccaagttccacaaaccaattcttacgcctgaggaacaagctgaacaggatgcaatcgccgactcaatcatcgatgagattttacgtgaggatgatggacaatga

SEQ ID NO: 84838 - DNA, 1944 bp, Citrobacter koseri
atggacgcgaaacaatttttgtctgaatttggacatgtggctcatgcaccgggaggggttgcgcgactgcgagaattgatttatcaacttgcagtaacgggtagactaaccagccaagatgaaaaagatagcgatgcggacgaagttctcaacaacgtcgcccgcatccgtcagcagcttattgccgcaaaaaaatataagcgctcaccaaaattggagtcatcaaatcttgttgcaccagccattgatctccccctcaattggcgctggagccgattactagatcttggtgaaatcaatccacgcaaccaagctgaagaaacggccatggccacattcgttcccatggctggagtttctgaaaaacattcaaaagaaatatcaggtgaattaaaatcctggtcaaaaatacacaaagggtatacccattttgccaacggtgatgttcttttggcaaaaatcaccccctgttttgaaaacggtaaagcagctgttgtttctggtctcgaacatgacatcggtgctggctccacagagtttcatgtttttcgctcaattagccagtttattcatcctgattatgtgtacctattcttgcgctcacctttgtttcgggtaaagggggaagccaatatgactggcacagcagggcaaaaacgcttacctacagattatttcgcgctttgtgccatgccattaccccctacggctgaacaatcgcgcatagtcgccaaagtcgatgaactgatggctttgtgcgacaagctggaggcgcagcagcaagcccgccgcaaactacaaaacgcactgcgccagtccatcctgcaagcagtcgccagcgccagtagcccgcacgaacttcaaaccacctggactcgcctggccgacaactttgggtgcctgtttcatacaccagaggatgtaaaagagctgaggaatctaattttccagcttggaatccaaggcttactcgttgaccaatgtgaaactgattctgagaaggcgattgcattcgtacgctctgtgcaggcaaagaaggatcgattagtaaccagtggagtgattaggagggcaacttcatttcctaccgtcgaagaaagagaagtgccttttacactgccgcgtggatgggtgttttgccgactgggagaggtttcaatttgtagagatgggcagcgcatcccattgtcgaaatcggagcgagagcctagacgcggagaattcccctattacggtgcgtcgggtatcattgaccatatcgatgactttatttttgaagaagatcttctactcgttggcgaagatggagcaaatcttgttaatcgaagcaccccaattgcctttattgcaacgggtcgctactgggtaaacaaccatgcacatgtgcttgacaccgtcaatggcgtcgccctcagataccttgcgctgtatatcaatgcaatcgatcttaagccctatgtaaccgggacagcgcagccaaagatgaatcaggagaaaatgaatctgatagttgttgcagtgccgcctcctgaggagcaagcacgtattgtcgaatgcatagataagttaatgcgcttctgtgactcactggaaaagacactttttaatgcagtgaaaactgttgggcgggttgcaatatctgccgtcgccagcctcaccgggatcgccatcgaacaagaggaggagcccatgaaagccccgcaaaccgagctgatcgctccactacgtttgggcacagtacccgacatcaaaacccaagcgccgctggctaccattcttgcccgccaccacggcgaaatgagcgctaaggatttgtggctgcgattcggcggtgaaattgatgccttctacgcacaactgaaaaccgaagtggcccacggctggattaaggaaccggcccccgccgaagtgcgagaaaaaccagccaacatggtgagtgcctga

SEQ ID NO: 84839 - DNA, 1782 bp, Citrobacter koseri
atgaatctcagcagcacaattaaatccattcaggatatcatgcgaaaggatgatggcgtcgatggcgacgcgcagcgtcttggtcagctcacatggatgctgttcctcaaagtgttcgatcaacgagaagaggaatgggaggatagcaacccagcgtataaatcccctttgccagaagagtatcgctggcgtaactgggctgcctataaagccgatgttgacggcaaaaagaaaccacagatcgttggtagtgaactgatcagcttcgtcaacaacgagttattcccgactctcaaagagattgatgccaacaagagcccccagcacaaagtgatccgtagtgtatttgaggatgctaataactatatgaaatccggcccgcaaatgctggctgtgatcgagaagttggaagaggctatcaattttcacgattttaccatccgcgccaatattggtgatgtgtacgagcaaatgctcaatgacctgcgtggcgctggtaatgcaggggaattctataccccgcgtgctatcactgcctttatggcggatagagtcaacccacgcctagacaagcgtgagacagtcatggatccagcctgtggaacaggcggcttcttgaccgccgccatagaccacttccgcaaccaactcgcgacaataaaatcaccgcgtcctgaagataagcgagttattgaagagttaatccacggcatcgaaaagaagcagttgccgcacctgctttgcaccaccaacatgctgctacacggtattgatgtgcccagccagatcgagcacaaaaacacgctaggtaccagttggaatgaatggagcgccaacgataaggttgactgcatcatcaccaatcccccattcggtgggtatgaggatgatggtgtgggcagcgactatcctcctgacctacgtacccgtgaaaccgccgacatgtttatggcgctcatcattaaaaagctactgaaggaaaaaggtcgcgctgccgtggtattgcctgatggatttttatttggcgatggcatcaaaggcacgctgaaaaaactgctgctgcgcgaatgcaaactgcacactatcatccgcttacccaaaggtgtttttgcaccgtataccactatcaagaccaatttgctgttcttcaccaagggcagcacggtggacgatggcaccgaacacttccacactgacaccatctggttttacgaacacccctaccctacgggctacaagagctactccaaaactaaacccatccggctggaagaattcgaacccgagcgagggtggtggggctcggaggaaaacgactttgccgaccgcgttgaaaacgagttcgcctggaaggtggatttcaaaactaagcgcgaaatggccgaagctgctgcgcaaccgcactggcaaatcgccgaagaactcaacaacaaagccagcgaattggataaccgcatccgtgatatgcgcgattccattaaaggtgtcagcgataaaacccagcgccaagctgtagatgatgaaattgaaattttgcgctatgaaagtgagggtctacgcttaaaagcccgtgatgcccagtcagcgggtgatcgccactattggccgattttcaatcttgacctaaaaaaccctaatgccccagaaaaagaaagttttgatcccgaagaacttttgaccaaatacaaaaagttgctgggagagattgaagaaactgaaaatcagctcaaaagcgagttagccgcagccctagctcaccacttttctggtgaggatgcttga

SEQ ID NO: 84840 - DNA, 444 bp, Citrobacter koseri
atggatacacagcaccttcagttcgctgagcagggagcaattacagcctcagtggtcccggacgagttacgcattgacttctggccgaaacattttggctccatcccgcaatggataacccttgaaccccgaatctttacctggatggaccgcctgtgcactgactatcacggcggtatctggaacttttcgacgctcagcaacggcggcgcgtttatggcccctgaggcagagagcaacgagaagtggacattgttcaacagtatgaacggcaatggagcagaactcaccagtgaagctacagggatagtcgcctgcctgatggcatacagccaccatgcctgtcgtaccgaatgtgacgctatgactgagcactattatcgcttacgcgactacgcgctgaaccatccggaatgcagcgccattatgcatcttatcgactaa

SEQ ID NO: 84841 - DNA, 621 bp, Citrobacter koseri
atgaaattactcatcacggcggcgctggccgccagcctctgcattatctctgtgagcccggttctcgcagaaaatatcgttggttcagtcagggcctggcagtacatgcaggctgatggctggaaatcggctgacggtacggataacaacacgctgcataacgcactttatcaggctgatgtaataggcaattatccctggacgaaacagtttctgctgcgtgcacgtggtggcggtgactattaccttgccgacaagaaaacgcacacggtacgcaggctggatgtgaaaccggccagcggctactacgctgacctgacctcggtgtaccagggggagaaccgggggaaaggctgttctttcgccattattgatagtcaataccggctgagggatgaagctgagcgagatgctgtagtggcagaggatccaggaaaagccatagagcttgcatggcagcaatttagcccaaaagtagtcatgacaattccggataactgtgcgaataaacatcagcaggccgatcttgcagccaagagttcggaagacgacaggaaattacagcagtgggtggcgcaacaaagcctggcggaattatgccgtcgtacaggcaactgctga

SEQ ID NO: 84842 - DNA, 714 bp, Citrobacter koseri
atgtctcaggctgagcgtcgttatgaccgcctgtctgtccggctgtcgctgattatcagccgtctgctcgcgggggaaacgctgaatgtgcgtcatctggcggcagaattcggggtttcagaacgcaccctgcaccgtgattttcgggagcggttgatttatctcgatctcgaataccgggatggctgctgccgtctgctgaccgggggccgtcacgagattcgggaggaggctgcattgcagttcgcccggcagtcaggcactggcgtgttgtttcctgatatggaccaccatctggtcagttcgttgctcagcggccaggactcctcgccatgccttatttggcatcaggggggctccgtaccgccttcccgaccgggcatcttcacacgactggtccgggcggtatcagaaaacaggagggtaaccctgctggccgacgggtgccgttgcgacagccttgctccctaccggctgattttcagcgccggtgagtggtttctggtgggggaacaccttgcccgaataaccatttttgcgctgtgcaccgttcactccgtgacgtttcacccggaaacgttcacaccagaagggcatttcatccacattctgtcccgccctgattttttacaggcgttgcctcattttcatgtttttcattcattactcgctgacggcagttacgggcagcttacccataaggatcaggtatga

SEQ ID NO: 84843 - DNA, 876 bp, Citrobacter koseri
atgaataaatctgtcggccttcaggcccttgaaaaaccactggcttcgttaccgcataccctacgcaatctcgtttttgaacgtctccaacatctgactcactacgaacccgtcattggcattatgggcaaaacaggtgccggtaaatcatcactttgcaatgctctgttccagggtgaagtcactccgatcagcaatgtggaggcctgcacgcgtgaggcgctacactttagacttcgtaatggcaatcacagcctaatggttgttgatttacctggtgtgggtgaaagcgagcaacgtgacgaggaatatacagcactgtatcgtcacattctgccagaactggatttagtgctgtgggttatcaaaaccgatgaccgggcactgtcagtggatgaacacttctatcgcaaggtgatgcaggattatcaaaagagggttctgttcgtggttaatcaagctgacaaggccgaaccctgccatcaatggaataccaccagcaatacaccatcccatagccaacagtcgacaattgaggccaagcagagcgctgtacaacagatcttcctgccgcaccatccagtctgtgttgtatcggcccgaactggttgggggctggatgcgatggtcgagacaatgatgcgcagcctgcctgaccgggccaccagcccactgacgacacagctgcatggcaggctctgcacggagccggtaaaaaagcaggccagggacagtttcagccatgccgtgggaaaggtgtttgatggcgtggagtcatcccctctgcttccggtcccggttcgggcggtcattcgtaccgtacgggaaaccgttgtgtcagtcgcacgggccgtctgggactggatattcttctga

SEQ ID NO: 84844 - DNA, 249 bp, Citrobacter koseri
atgacaaagaatcagatgccgaaaataaccagaatgccgacctttgatggccgggagttaggtgcacaggccgggctacaaatggcagtgaatggtgctcaagttgaaaccaggggaatccagatggttgcgcgtccgcaacaaggtaatcaaattccggggtatggtcgtcaaacttctgctcagacaacatctcagggtacttttgcccctgtgagtggcccgaaaatcccgccgatgaaaaaataa

SEQ ID NO: 84845 - DNA, 699 bp, Citrobacter koseri
atgaacacactgacagtatctctggtaacaataatgatccctggtgtcattatggcgctaatttatgatacttacactcaacataaatcctgggattcatttcgatatgttctgatgtcggttgtatttggtatcgttacttatctggcaatgcaggcagcagtgagcttatttcaactgattgctgggatcggtgataccaaatccattaattggagattactgtcagtctggtcaattcccaatgaggaaaagatagcgattaatccactggagatcttactgggcgggctttgtgctatccccttagggctgattgctgtctatcttgcgaccaaacggacatttcatgaactgttactgcgtaagggcatttcaaataaatacggtgatgataatgcctttatacggtcagttgagatcatgcacagaaatacagggcaatgctacgttctgttgcatgaaaataatatgctcattcatggaacagtctatctgtataacgaaaatgagaaaacgcaggagctggggcttctaaatgctactgtactcagttcggaaacaggtacagttctctggacgacgggatttatctatctttcaaaagaatacggtaaaatggtcgtatttgaaaattacattgaggttccacatgacaaagaatcagatgccgaaaataaccagaatgccgacctttga

SEQ ID NO: 84846 - DNA, 345 bp, Citrobacter koseri
atgaaaaaaattcttcgtaatgtcattcttactacagctgtggtttctggttcagtattcgcagcagatagtagccagaaggtcgcactttctgatcttcattttgccacaacaccaaatggaatgcagcaaattgaaggtaatggtattaatactactagtcagacactcaagcatgtgtttgtgaaatttaaccttcttcaaaataatactgtagtggggcaaaccatcgctatggtagagaatcttgaggccggacagaactggaaagtacaggctccttataatagttttgctgttaagcctgatagtttcaaggttactgagattaacgttataaattga

SEQ ID NO: 84847 - DNA, 162 bp, Citrobacter koseri
atgaccacaccacgaatgggctactgcccacgctgtaaacaggattgtgaaatctcttttgctacaaaagccattcatgaaaagacgggtaaggtaattttgccgaaaaagggtaaagtccttgtcattcctcattgtacggcttgtcgtaagactaaatag

SEQ ID NO: 84848 - DNA, 927 bp, Citrobacter koseri
atgacaatgtttcatgatgttcatctggaactgctggtcgacgcctattcacttccccaggcagaacgacttgcgtacatagacctctgtattcgctatcttggcagcatctccagagctgagattatggctgagttcaaggttgctcaggctgcagcatctaaggatcttgctctctatcgggagctaaaaccggataactgcagcattgatactgcaaccaaaagaacagttatccttgcagacagctataccccattaattaggattggtgttcacacggcccttaaccttattcagtatgggtttacacgctccgaattaatgcaaaagcggccaatgctacccattgatgaagtggacccgctctatcagccggaacgtctcaaagaagaacaggtagcggcggtaacaagggcaataaagggacaatgtgccattagatgttcctacggttcaaaaagtggtgatcacagggaaaggatactgtttccattagcattgtttgttgaccgtaagaactggtatttcagagcttatgaccgaaatgaggaacaaccacagcgcagtggttttaagaacttcaaactatccaggctttttgatgctcatttagatacaacaatttcgccgactcttgctgagaagacggatagagagtgggacgaagaagtcacttttatcattgaatttaaaaagaatttaccaaaagaaacaattaatgagatatcgcgcgagttctctataaatggtaacgtccattccgtcacttgccgtgcagcattggcctgttatgtaaaaaccaattggaaaattgacttggtcaatgatgaaaataataagtggttatactttgatgtactaaatgcagaggctttacaagacgttcagtgtttagctccattgtttgaacaaaaaaacagttaa

SEQ ID NO: 84849 - DNA, 1953 bp, Citrobacter koseri
atggcagcagagaatcgttcaaaattgcttcgcatgaccattcggaacattggatgtatagggaatgaaggcatcgatattgcacttgataacattgtgtgtcttgtaggtaaaaacaacgctggtaaatcaacagtcttgcgagcatatgagttagctaaggggccaacagcatttgatgccagtagcgatcgacatcagcatgcttcagaggatgaacattcagagattttgctcgaagttcacattcctgacggtattggtaatgtagatgcaaaatggaaagaagaaagggacggttttctcgtcgttaaaagccgttggcagtggaaagcacctgattttttgaaagtccgtacaacttgggatcctaccgctggagaacatggtgaaggggactgggcagaggacactaaagcaggcggcgctgattcagttttcaactcacgtctgccaagacctttgcgtataggatctctggatgatgcagggaaaacagaagatgtgcttttgagttttgctctcgcccctttacagaaagagcttgagaacgcgcggcttaatcccgaatcgccattagcaaaagcgattgaaagtgtttctggaagtatcaacttgcttagtgaacagcatcaagaacattttaatggtattgcgggccgagtttccgaagggtttaaaggtatttttccggggctggatgttagtctgagcatcggtgctgcccctctggctcctaaagttgcggatctcatcaagaatggctccagtttaaaaatcactgacgggagggctaatacctctcttagtcagcagggcacgggcgctcgccgcgcactattctggtcaatgttgcaagttcacaatgaacttaatcgcgacaaagaagtacgtgctgaattccgcaagcggcttgagaaagaagtaactgaacttgagaagaaactaaaaaagccgcctaaaaacgctgatttgaatgccctccatgatgagcttgctcaggttagagctcaactggatgcccatgatagcggtgctccgatccctgatagtcctgatgatccagctttccccggctatttactgttaattgatgaacccgagaatgcccttcatcctatggctgctcgtgcagcacagagacatctgtatcagttggctaagaacccagactggcaggtgattatgactactcactctccgtgctttatcaatccatttgaagatcacacaaccattgtgaggcttgaacgcgataatccggaagaaaattcagcagttacaccaagaacttaccgctctgaccatatagcttttgagggtgatgaaaaacagcgcttgcaggcattgcaacatattgaccccagcttttcagaggtattcttcggttctcatccaattctcgttgaaggagataccgaacatgctgcatttatggcctcgatcatcgagcgtgataatgcattgatggatcagattgcggtcatacgagccagagggaaggccatactggtaccgctaatcaaggtactgactcactttaaaatccatttcagtcttgtccatgattcggattcacctaaccgctccgatggagttaaaaatggaatgtggactgaaaaccgaaaaatccatgaagcattgtgtcaagccagaaacgcgggactaacagtccgccatcgagtcagtgtacctgacttcgagcgcttccttggtcatcgggaagcatataaggataagccattgaatgcttacctccagatcaagttggatgatgagttagcggaacgggtacagaggctcatggattcccttctgaactctgatgaacattgctcgtttgggaatgaaatcgatcacgatcgctatatggaaaagctacagggagttgtttctgggtgggccgaggcgaatggatatgcggaggatctgcgctttaagagccaaagataa

SEQ ID NO: 84850 - DNA, 2226 bp, Citrobacter koseri
gtgtcatgtatcttgaaagagacctttgggcagacatttcaaatattctctgacggtgttgatggcggtcgcgacggggctttctatggcacttggtctggaactgggttcggcgatggcataagtaatagctttactacccaatgtaaacacactagcaaacaaggtatgaagctttcaaagggagttgttagtgatgaacttcctaagattgagcggcttgtgagtgaagggctagccgatgtgtaccttctattcactaattgttcagtttccgcagaaacagcagctgtgatggaagaggatatacgtaaaactggtgtaaagttcgcaaagatttatggggcagaatggataaaccacagcatatccttatacccaagtcttaggcgcatggtaccccgaatatatggccttggtgacctttctcaaataattactaatcaggcatttaggcaggcgaaaagtgttctcgattcaattgctccagatcttgcatgcttcgtccccacagaggcataccgccgttgtgcacacgctatcagggattacggatttgtaatgctgataggtgagccagcaagtggtaaaacgatgatagctaacttgttagcgctctcagcggctgatgagtggggactgcaaacgttgattttaagttcgccggaagatttggatagacaatggaatccagatgatccaggacaatttttttgggttgacgatgcttttggatctaatcattgtgactttaaccgagtccaggaatggaatcaaaggctccctaagttgaaagctgctatacacaagggagcacgagtgattttcacttcacgcagctatatcttccgtgcagctcagaatcgcttaaatacaaataaattcgagttattcagagatagtagagtcacaattgaagttgagaaactctccgatcctgaaaaagccatgattctgtacaaccacttgaagcttgggaaacagactaagacttttcgaagggcaataaaaaattttctaccgtcggtagtatcagtacccaaatttcttccagaaattgcccggagattcgccaatccgcagttcacaaataagcttgtgcctaacgaagctgcagtcgttggttttttctcaaatcctacagggatcatggcagatattattggtggactagcgcccgctgaaagagcggcattagcccttgtattttcaaatggaggggaactaccaatcccacttcggattgaaaaccctcagacaaccaatatcatcacgtccatgcaatcaaatcttggcgacgtaaaagcagcattgtcagcattggatgattcacttatcagaataagtaaaacacaagacgaacactactggaaattccgccatccaaccattcgcgatgctttcgcaactgatgttgcggggaatccagaactcatcgatatctacctttcaggagtcacaaaggaaagattaatcgaggaaatcagttgtggggatatggggatcgaggggataaaactggttgtgccgcacagtatgttcaacagtgttctgaacatcatcgatcccagtggtaacagagccctcatcagtaggccaatactcacatttttggcaagtagatgttcaactgatttcttggggctttatttcaatagcgacgaagcaaagacatatttgcttgatttaattagctcggcgagaagatacgataatagcctgacaatattgagtaggctgaatataaatggtctactcggggatgacctcagaagaaaagtgctggataaactgagcgttcttgcctcaataaaccattcagattgtttcattgacgccgactttgtcggagttttactttcaaaagaagagaatgaagccagactttctgtccaaaaagtcgagttttactctaatatgaatgaaataatccaagatatagaggactcttgggctactgacgacgatgtagacgaagcattttacgatgtcacacgccttttggaacgatttcgtgacgagaacaatgaattgtactgtgaggatttttatgatgaagatgaatggcaaaaatctgaacaattcattcgtgaaatcgaaattaggaaagataagctcaagcttcagcaatccgaagcagtggattacgatgaactagaagcagaagaagcccagagtacaaatttgcaattagggcggagcattttcgatgatgtggacgagtaa

SEQ ID NO: 84851 - DNA, 489 bp, Citrobacter koseri
  misc_feature (429)..(437): n is a, c, g, or t
atgctcacttattgtgtttttattactctgttaattatcttattgtctattatactatataaaataaatcctaaatacatctattattcttttttattctataagaaaaaaataagtcaagataagaatttatttggtaaatgcattcagtatataaccaccacttttttgtttacagttctctatttttttattgaatatgttccattctcggattttcttggcaaagttatgccattattgcccgactatgttagtgctttattactgtctctaaaagggaaaggtgcgtcaataacaattatattggcatcaatagaatttattggtttgttatttttgttttttattttcatgaagatgccagcatcgtcaaaaaataaaatagtcaatgaggtaagtgttgataagattctaagctatagaaannnnnnnnntacacactgcatatcgtcggcagcgtcagatgtgtataagagacagatataa

SEQ ID NO: 84852 - DNA, 2190 bp, Citrobacter koseri
atgactaatgttccctcctggcttcgagcctttttcggcgaaggtaatttgctcagcctcgaaaaattactgactgacggacctagagcttatccagaagagcaaaaaaatgccctgctacctttggtggatagcgcacgagatggcgaatggcccattattctgccgtggtgtgaccgcaaaaactgggttttctttgcgatggcggaagatgagcgcactctgttagaactcagtaacgtcattggagcccgactcggttctgctgatgtcgaacctgaccgcaggatttacctgagtcccgcttctggtcccacactcaccgcggaaaccatactgttggagcactgcccaagggggtttattcgtattgaattgttggccgccaaacgtgaggataaactggcgaaaatgcgggtttttactgcactgacggaggtaattacgttatttcgccaacgtccatcgcttgttcgtacccgcaaacgcccgtttggtcgtatccttagcgatttcatgttggcaacaaatcaaaatgagatagcggccagtaacagctatctacaggaactacgtgacaacggtctgctgtctaaacgcaatttgctgttgctcgaacttcaacaggctgggaaatggcagaaatgggacaccctgctaaaccatccagatctccccgaactgatcagaggacgcattcctacttcactggttagaatgctgctcaccgcttatcagaaccgctatttaggttatgatatgcagagctacgcgcagcaggccccctcagtattgcgcccggttttcctttctctacatccgctctttatgcaggttccgctgctgggatacgaagaggaagatcttaacatctggaaaacttgggcaatcggagtggcgctagccggtgaaccaaccctgctaagtgccctgccaaaagcgctgaaatccaactggctaaaagaattacagcagtgggccgatcttggaggaattaggtacgatatctcgacacaatctccagtctcattctctttgcctcctaagtcgctagaatcactggcctcttatctacaaacatcgctgacggcaacaaccgacacgctgaattcatacgccgacacactccgcgaaatagatatacaactgctagatcaagcaaagaaagttccactacttataacgctgattgaaagtatcgaacggcttactaccactcatatctccggctgggatagttggttctcacatctgtgcaatcccaatgctgatggaaatgcactgttgcagattgtcgctctggaaagcgaacattggtccacctcctccttccaggaatccacattcattcgcctactgtcacagaatattccgccacacgcatttcccaccctgcgtaatgctatgccggccttcattaactggctgaggaaaaaccaagtgcttttaatgagctcaacttggcttaaatggatggatgttctggcgatggaacaaagtgtcagtccggcagatattcaactggcgacgctagcaacggagcatttccttcaaggttctgtcagccggactgactatcaggaatttgttgcgacactgcaactcattattgaacgctgcggttcgcttaaaaatataacttcacttgccgagatgatcgaactgttcctggatgcaccagaacacgataaagaggttagaaacgctctgtggatgaatattcaagcttgtgctgttggtgtgtggccgcgtctagatcactcaacccgcacgatcatgcgtaatctggccatcgacgtattgggcaagggtgccgattctgcgtttccgccggaaccaccacgaagtgatgacagtgagcttgaaacacttccgaatcttgcaggaaaacgagtcgccatttataccttgactgaaggcgctgcgcgccgagcacgagggatgattgaggcgttgtttcagggaatcaaagtagatgtgaatcatgatcataccgcgacggacaagttggtcaatttggcaaaacaggcggattactttatttttgccgcctcaagcgcgaaacaccaagctctgtatgcggtaacaccatatcgacgcgatcttatttaccctgaaggtaaaggagcgggttcaattctgaatgcattcatcacccatgttcaacatgccatgaatattacaggataa

SEQ ID NO: 84853 - DNA, 531 bp, Citrobacter koseri
atggaagagcaacgacaaatatttctccacggacctctcggacagcgacaacttagagaagtactgagcgcacagttctgtggactaatcctctatccagaactcatctggttgatctcgccctggataagcgattttgacgtcattgataatcgcggcggccaatggagttttcttgacccatcgtggggtgccagaatgatcagtttccaggagttgcttgctacagcggcaaataacggctgtccactcaggattgtcactcgccctgatactcgtaacaaagtgttcgttgaacgactgctggcaaggctctctccggatcatgatgtgcaatacagataccatgagaacttgcatgctaaggatatgttaacaaagcacttcctcttgagaggttcgatgaactacaccaggagtggtacaaacctcaatgatgaacatttgctgttctccaccaataaaaccattatttctgacacactaattgagctcagtggacaatatacattcggagacagagatgactaa

SEQ ID NO: 84854 - DNA, 4431 bp, Citrobacter koseri
atgactgctgaggatttagcccgtttacacgcggcgcttgatgtactcgaagggcgagaagccgaactgctagtctggggagacacggaaggcgcgtttacagatgctgatattctgtctctgtttgcccaccattttcccgacgaaaatggcaaaatattgatgcaggatctgcaggatgccgcaatgttgtttagcatcccaaatactaaaggtacgcggctttatcgcacgcgaatggcggaatccgttcatctgtttcgtcaccaacgccagtggtttcgcggtcagcaactgagtcgtacccggacgttggtggcggattatcgttttatccgccgccctcgaagctatccggaaaggaagtatccggctgagaaggttctgagccaattgagcgatgtcgaatggatgaatgacatcaagcgtcaagccttgcgagcactgatcggtgatttctcaattgctggttttcaatcgcgggcaactgctcgtatcctgcgagcatgggatttccatagcaatcatacgcgcgtcaaagaagcaacggctacaatcgtatgtgccggcaccggcagcggtaaaaccctggcgttctatctgcctgcactaacttcactcatcaatgacttgcaacgcgatcgctcagcacgggtccgtacgctggccctgtatccccgtaaggaactactcaaagaccagtttatggaaacttggggaaaatgccgagaagtggacgctcagtcagttaaactctctggacgtaaaatccgcatcggatctttctttggcgataccccccacagcatccagtacattgataaagacaaagatattcctttcgacttactgcgctgtaacacgcctaaatgccaaggcggaatgcgctggaaagcggaagatatcagccggggcaaagagatcctgcgctgtacgcattgcgcacatagtgtgggtgaagacgaagtagtgctcactcgtgtatcactaatgaacaatccaccggatattttgttcaccacgaccgaaatgcttaaccaacacctcggcaataacaaggccaaccacttgttcggtgtgggcataaacgtaattgcaccgccgatggtgttacttgatgaggttcatacttattcaggcaatagcggtgctcaaaccgcatatttgctgcgccgctggatgcaactggcacgctgtcgcccgcactttgtcggcctctcggcaacgctgagtgatgcagaacgcttcttcgcagacctggtaggagccaacaaaaagcatgtcatgctaattgaacccactttccaggagatggaggataaaggggctgaatatctgttagcactacggggtgaccctgtttcgcaaacggccttgctttctaccaccatccagaccagcatgttggcacgccgactaatggatacccgcaaagccacatcgcacggcacctggggccgtaaaactttcgtatttaccgacgatctggatatcaataatcgcctctatcaccaactttgcgacgctgagggatggcgtacacgcgggaagcaacttgtgcccaacgaaacccctctggcggctcagcgtaacgaacgcaacggtgtatccaatgcgctgacccttgctggtcaaaactggcgaatagctattgatattggacacccgcttgataattccgatcgggctatcgtagcgcgtacctccagtcaggacaccggggtggaccccaaagccgaagttgtcgtggcgacagcttcgctggaagttggctttaacgatccctctgtcggggttgtgattcagcacaaagcaccgcgtaacgtcgcttcttatcttcagcgcaaaggtcgcgccggacgttcaagaactatgcgcccttggatgatagtagtgttgtcagaattcggccgcgaccgcgtggtgtaccagcgttatgaagagttggtgacgccggaaatcaagggccaatcactaccattaggtaatatccacatccagaaaatgcaggcggcgatggcaaccctggactggctgagtatgaagatccccggcagtaacatctggtcactgctaaacaagccgcccaaaaacagagagcaacacgggcatctggaacagatgctcaatctgatttctgtcgtgctggaacaaaacgtctggcaacaggggctggaacaatacttgttctacgcgctaaaaattaccgaatcgcaacttcagcacatcatgtggtcaccgcctcgttccattatgatggaactacttccgaccctaaagcgccagttgactaccaaatggtcactgatgggcattcccggcgcagacagaacaccaggccgctcaccgctgcctttgtttattccggcagccctcttcagcgagctgaatttgcctgaactgagcatccagcttgagcgcccttttacaaaatatgaatacctaccatttattcaggggctgaaggagtttgcaccgggccgcatctccaaacgctacgccatttattccgatcttgaagccgactggctggtgccacacaattttgttccgttactaaaccaagtttcagaagtcgatttcgagatcaacgaggcatttggtgatacctggctgcctgagtgtttgattacgcttgcggatgctccagcaatgaaagttattcgtcctctgcaggtacttactcgggcccttgatttcaaacaaaatctgaccgagaaaagcaattctcagctgacgtggcatactcactttgccacaaatgctcaggccgaaacgatggcgattcccgcaggtccatggagcacagtgttgcagtccgccacgttctatacccatcagcatatgactccacttgagctaacgcgttataccacagccgctagtgcttcgctgcgcagtaaaagcaaacaacaggcttgggttaatttcagatgggttgagaatggtcaaccggttgcggtgggtgctcgtcagtgggtggatgggctgaagcttagcttcaccctgccttccacgctacatcagcaggtcatgaacgacgccaagttagctagttcgctcaggacgctctatttccatcaccgcattagcagtgaggcgcgtttcgaacatgacagcttcactgcagattggatctacgagtgctacctggcggcactgactaaagagatcgtcagccacaataccgtcgccgatgcaattcatgccctacgcacgccggacggtagagagtcgctggcaaccattgccgattcactattccaggctgaaaatatctttgaaaacgacgatgatggcaacggtattgcggaacgtcaagagttacagcagcagttgagaagcctgttcaatgagccgcaacttctcgcgatgcttgatacgcatagtgctgtgtttactgaagatctcagtcagagtgattcattttgtcagtggcttcagaccttgttgatcaacaccttctccggagccgtaaaacagaccggccatctactgctaccagatgtggacgacagagggttgctagttgacgccgtttttgatggcgagcacctcgatatctggctcaccgaatcagagcctgggggctgtggaattatcacccgcctcgaagaagcgttccacagcgatccagtcgccctgctaaatctgtttatacgcagtttcgccgccagcgattacgagcaaatagatgatgatcttttcgaactactctctcgacttccttcaagcactacattacagaatgcgctgaacgatttgcgcatggcggaaagtcatcacgatcgccgaacagcgaacggacaactgcgtgctcagctgaaaaaacaaggatttgctctttctcacagctttatgtccgtgctgcatacccgtattcttcgccctggcagccacccctctcacgatcggcgcttgctagagtatctgcgggaatggcaggcactagaggtcaaagcaggttatgaagtcagcctgaatatcttcgcccatacccaagcaactcaggaactgcctgatgcgaacgtcaccaaaattttcgaccgtttttgccagattcagggcatgctctggcagcgtggcagtccccttcgtcagtcagtactcagctactacaatccctttgataatgggccgaagctgacggagagattgctgctcagcactctgttccagcagcaagcaacacaagttgatgtgaccaatagcgactggcttcagcagatccatatagcaatatctcgcgaaggatttgctgaactgttgatccctcgggaagcccgttatcagatagtacagatcgtgtccacactgcaactggagcctatcgattatttcggcctgcacctctatccacgaatgggagccgtagactatcggggtggtaacatcgtgttgcgaatcgaactagctgaagccctgcagtaa

SEQ ID NO: 84855 - DNA, 828 bp, Citrobacter koseri
atgagtacgttacgccaacagcttgcagacatgcagaaacaacttgatttgagcgttcaggcaagtaaggccacgctaattattgaaaaatgcggcgtggtactgtcgagaaccgatacggtcgctgggcattatagtcgtctgaagtatcagtacccggccctgcaacgtctgcctccagaattaagagttacctggaacgaaaatcagcgtaatgaacttaaaaacgctgcaaatagcgttaataatctgctgtcccagtggagtcgctggctgaaaaatcagactctgactggcgctgccatcagcaccgaaaatcccgatccacagttggacgaagaaacgactacaaaagaaccaacggcttatgacatcattcagaatgactccttaaccaactgcatgaacctgtcacttggcctgtaccgtacacttagtggccaactgaacaacgcatgggaagagtggcagcaagagttgcgtcaacagattcatgttgacaacaaaactctcgaggctcagcagaaagtcggcaaactaaaagaaattgccgatgagtactcaaacttacgcaataaattcgatgcactggttcagtccttacctgagaatggcgagagcattactcagatccgctcgatggcggaacatctgaacaccttacgcggcatgatgaaaaccgactggcctttggcggttcaacacttctttgaccgaatcaacgggccacagagtggcaaaccaaccctcagcacacttacaacagaagtttttgagtggttgcgtgatgaagacatgttggaagactttgtgattacaaggaaatag

SEQ ID NO: 84856 - DNA, 3177 bp, Citrobacter koseri
atgagcattatgaactactggccatcccttgagaacatcgagcaatgcatccgtaaagaagctgaagaattgcaggatgacgtgcttctagctgtgcatgaaaagatggctctcatccgtcgcgacgtcaataacaatcaggagatcctccaagatgaggatctttttgaccaactgcttactaccgagcgtgcgatcccactgattggcgactcagggatgggaaaatcacatctggtgcgctggttggactgccgtctcaaaagctacctggagacgaaaggtcagcttacacagtgggaaattgttcgtattccgaaaaacgccagcttgcgccaagtactgttactgatcctgaaaaacctgcacggaggcctttttgatgacgcgcgcaaacgcgttgacgatgtggcccaagcgcattccgctaaagacctcgccgacctgctattgaccatgatgtcacaccaactacagagcatgtacgacgaatcgatggcacttggtatggaatacgaaaagcaggggaaagagattcctgccgatattgataaacgcattaataccattattgaagaagtcgaaaatggcattggcaacctgataaccgatcctaacttcaagctgaatctgctcaagccggagcattgcatctacaaacgcgccagtcgtatgagcgatgggctaaaggctagtgatgaggatcacgacaagtacgaactggtgcctagcgacctctttttccaagacaacattgatgacctgtcgtcgcttgcccgcgaatatattcgacattctcgtattgatgaacatgataatgaaaaggcgcgagttcaggccgtaaatgttctgaatgaagcgatgcatgcagcactgaaatctttatttgccaagctcttcacctttaacggcggcaattttcaggaactatttcaagagatccgccgtgaattacttgcgcaggatcgccgcctggtaatcctagtggaagatatggctgctatttcagcgatcgaagacgtattgattgatagcctaatcgaagaaggcgttcgtgacggggtgagaacactctgcccggtacattcggtcatagcggtcactaacgagtatccaggttataaacgtcgacaaggcacgctggtaacgagggctggctatgaatggagcattgaaagcacacataaaagcgacagttgtgaagaaagtattatttcactgtgcggtcgctacttgaacgcggcgcgtcatggtgcagcagcactgaagcagtcgcgagcgcaaggtttaaatgactggcctccagtctggcaggacgaagaagtaccagaatggctggctgattttggtagtacagccaaacagggcgttccgctgttcccatttaaccgcaatgctatccgggcactggcaaataaatactgtcgagacggcagcaatcaacttgtttacaatcctcgcgtagtaattagccgtatcctgttggatattctgcgggattgtcgtgctgaagcagaacaaggttcattcccaccgcctaatcttgcaggcattaccacggatgctgaaattcagtacaaaataagccaattaactacccatcgagtttccagcgcggcgacgctgaccggactctggggctacaactgtcactcctgggatgaagtcagaaaacaactatcaccgggcgtcgccaaagctttcggtctgaatgaattagctgaacacctgaacggcagaggcaaaatgcctgaaacttcaaccagaaatggcgacactgataagaaaatagctatagctcctaaaccaccggtatctcctccacagccaaaaccactagtggaaaatacgagtctgccttttatcaggcatctcaaagcttgggtaaacgacaaagtcgttttaccccaagatattgcccgaaatctgcgagccggacttaacagttgttatgagctctacgcccaagcggagtttttcggcatggtagaaaaaccctcgttgctcgagcgtatcccgttaattagcctgccgctttcagcttccgatccttccaacgccattgtaaagttctacgatcgtaaagacctgaacgacccgttacgtaggatcgaaatctacaatgtgtccctggcaatactgcgtattcaacattatatcgatcttgaacaagggggcgactaccctgaagcgctggaagactatgtccattatgaaaactttgtcagttggtgggtcccacaagccactgaaaaagcaattaatcatgcccgcgcacgaaaattgaaacccgcactgcgcaatcattaccaaaaagcactactactgggactgatgacaggaaaagagaatccagcggaactagttgatacgctttgcctgacgcagaaaggggttggcagaacccaagggaaaacccgaggacgtacagcagacactaacccttccgctctctgtttctacgggcttgaagctaatcaaaaacctcacaccagtattaaagtggctgaagcgcggcaagttgcccttcagggctgggacgaggcgcgagacgcgtggctttctcaggtcgcagttcctgagttgagttctgggctcagttcaatccgagccttggaagccgaagttgtcaccctcgcattgaaagagatcctaaaagagccgctgggtgcggagatacaacgcgcggcagagacagccagaaaagagatcgcatcaacgatcgcgaatgcacaactctttgagaatgtgaaaaatcaggatgaattcattgcccttctcgatgactggaaaacgtttatcgaagtggttcgcacccagtactatccagcagaaaccgaacagattagaaattcaacttggctattgaatgaaatcgatgccctgaaagtggatgctgaagccagcctacataccctgcaaacacttaattccctcaccagacaacaggatgtcttcatgctatggcacgacatctcccatctggatggcgattatgtcaatcgcatcggcaacctgcttgcacagtggcagaatattcaatcgaaaatcagttttaatctgcaacagataaacagtaagggtgatgcgccaaaacttgaaaatgctcgcaagcaggttgaagagcgactgaaaaatctggcggctgatatcagcgcctctggagcgaatgaatga

SEQ ID NO: 84857 - DNA, 870 bp, Citrobacter koseri
atgtcaatcatcaataacgccaaccctggcagcagtctggtgctgctccctttgtttgatcgcattgtacaaaacgcccgtgtttcgctttctcaggatgcgatcatagctcgctatcgcccaaacaatctccccgcgaacgacaatgcctggggaaagattagagagaaccttgccttctggtgtcgtttgggactttggcctatggaaaatgaagcgctactaccgcaaccagaagaaacacgcccgctctatcagcgagtgctgcaatgcaccatcgaagcctgcaaagaaaaaggcatcgccgaagggaatgagtgcgaacctatgtggcgagtgctgtcttgtttgctaagtttgcaacaacatacattgatgggggcagaacctctttcagtaactgaggttgctaaaaatgtacataaatggttgccagcaggaacgatcaacagtaatagtgaaaaattacctatagaatatggtcgctaccttggcttcctggaattagctccagaccaaaaatattacactgatcctacccgggcaattaaatgctttttaccgcaaatttttggcgaccagaaaaccctgcccatcaaagcctttatggccaatatggcagaagcgatgccaatgatggatggtggcgattttagagtgacagtgcaggaaatgatggccgaacgggggtggtccgcaccggaaggcaaaaacatcagtaccagcacttcgcttgcgctccgtcgtctggagatcagccaacagatccaactgactttcggaagtgatgatgccgaatcgttatccctgcaacttcccactggtgaaatccgccccgtaagcaaggttagtctcagggagatcgcataa

SEQ ID NO: 84858 - DNA, 2481 bp, Citrobacter koseri
atgattgagcaatggtcgcgtctacagttggcgctgacaacctgttttaatgaagatgtgacctttacggaagggatagaaaacccctttcttaaacggttaatgaatattattaccgattcctccgctggtcagaatgatatttttgctggttacgccgatgcccttcgagccgcacaagcgaatggcatcgaagaaccttggctcccctatccaccaacaataacggatatgccccatcctctttggggtctggtaaaatcagtcgcagggcagacgctgtcactctctgtagatatgcatctggatagcacaaaagctacttaccaatgcaaaacccgtcgcaatttactacaaccggagatggatccggcgcttaaaaacctgctggtagatacaccacatacgcactatcgcggctttgggcagcaggcagcaatccgcacgttactcacctcagacatcaacagtacgttggtgataaatctacctaccagttgcggcaagagcctgataactcaaatccaggctatcagcgctcctgcctgttccttaactttagtcattgtcccgacagtagcactggcgattgaacaagccgatttgatgcgggatatgctgcgcaaggccgaacaggatcatggcggaagctacgcgtgggttggcgggcaggatcagacgacgcgccagacactgaaagagcggctgaaaaacggcacccagcgagccctgttttgttcaccggaagcagctaaatcatcgctggttccggtgctatttgaactggcaaaaaataatctgattggtgccgtcattgtcgacgaagcacatctaattgatcaatggggagccgaattccgtcccgactttcaactcatttcgccattgatccgttctctgaaagcccagcctgattgccgtttccgcaccctgttgctctccgccacctggagccagaacactcgtgacgtcattgtggagcaattccgtgcagatgacagtgaactcattgaaatcacagcgaacttcctgcgtcccgaacctgaatacttcgtgcataccgagcctaacccgacctcacataagcagcgcgttgagcagttgttgatgtcactcccacgtccactcattctttattgtacgacccaagaagaggcagaaaactggtatcagcgactccgacaacaacaatatcaccgtgtcggcctgttccatggtaatacggaaacgctgacgcgtagaaagctaatttcacaatgggcgaacgatcaactagatataatgattgccacttctgcgtttggcgttgggatgaataaaagcaacgtccgcacgatcattcatgccgctgttccggaaaatattgatcgctactatcaggagtgcggacgtgccgggcgtgacggcaaagcgtgtcaggcacatctggtctggcatccagcgcagatggagacggcggaaagtctctcagttgaaaaactcatcggagtcgaaaaaggtttcttacgttggaaagcgatgtttgaacaacgtcagccaagtgatatcgccaactattgtatctctctggataccaaacccgatcacatcgactatcagggggatcgcaaccaagcctggaaccgcagaaccctcttgctgatgcagcgtacaggactgattgaactggtgtttgctgcacctgaactaccggaaagcttacgagaaggtggagaaaaaaacgatcaggcgatccgtagttggtttgccaattattatagccaagtacatatccgtcactgcaacgattcacacctttcggaagagtactggaataactttgtggaaaaagcccgtagggaagaattgaataagaggcgagcagcttttacgttgttaagagaatggctgaaggatctcgaaccatctttgtgccaggttttaagaaaattttatatttatcaaaataatgaacctgagctaacctgtggaggctgcccaggttgccgggctcagggcaaggcctcattctctccaaccgttggcaccgatgtaaaaatcttgcactcgacaccaaagaaaaaagcacgcttcgttggagcagtaaaaaaagtgtattacagcgaagaaatggatattcgaactttgctgtcagaacttcgcgttacccttcgccatctgatcggttccggcaattacgaaaccatccgaacagataaagttaactttattcatctggaacgcgctttagattctgtgtctcgtttctggagcgtacaaaaacttgcagcgccaacgtcaaacggagcagaaattgtgatcgtggcaaataccgccacagttctaccgacactaccagcctcacgttatgaacgtattattatcgccccgcagcatctggcagatccactgcatccgtacagaaaatggtgggatagcgcagaaaactctctgcccctggacacttttatcaggcaatcacaatatgtcaatcatcaataa

SEQ ID NO: 84859 - DNA, 3111 bp, Citrobacter koseri
atgagtgtattaccaattgggtcgttggttatttcagatagttttgacggcattggcaaagttactaatgttgatattgatgccaaccgcgcaacagttgcattttttgagtcccccttgcaacctttcgcccggcacactgatactcgtctggataagttgattccgacaattcctcacgatgaggcagtgatatattgtatcgaaccagaaagccagcgatgggtacgcgcgcgttttggcggatcccgtcccaatggcgattttctggtaatctttcgagaagacgaatctgcgactctcccgatcgataaagtctacgttctcaataaagcccctgatatcccgattaatccggcccatttccttgcctctcagacgaatgatgctccgtttttcttccctcgccgtcaatcctttatcaatacgtatatccagcagcgagcgtcatgtcggggtatggcttccctttcaagcagcgcagttgaacttgaacctcatcaattagctgttgtacggcgcgtactgcaagataaaacgccgaagtatattctggcagatgaagtagggctcggaaaaacgattgaagcaggcatgatcattcgtgaacacgcgctagaagaagccagtcatgtcagcatgctcattgccgtacccaaccaactcgttaagcagtggcgggaagaattgggtgaacgttttcagctgagacagttgctcgtagatgtgacgacaacactctcttcattaaggcaagatgggatcgcgcaagggatagttatctgcagttatactgaagccagccttctgcttagcagaggattcaaaccatctctggttaccgtcgatgagatccaccaaattgcaaactggccatggtcaatagatgaagacgaacgccatgatttcggcctgatttcacaggcgtgccacagagcacattatgtgttgctacttacaggaacaccgcttcatgggcatgagcgtaacttcctgtcgatgctgcattgtatcaatccagaggcttatcagattgacgagaaccatctaaaggcgttcaccgaattggtgaaaaaccgtgaaagtcttggtggcgttttctcggcccttgtaccgtcagtgtctaacatcagtctccgccgtaaccttgatgaaattcttgcgcaatttccggatgaccatcagttagcaacgctgtgccaggacttgtttccgttgattggcagattctctcagccaacgcctgagcgtgaagcgggtattaaagcgatacgcctgcaccttggtgaacattatcgaatccatcatcgtttgttgagaaaccgccgccaagtcgctcttagtcaggacgaaagtaagaacctgaatttaaatctgctattccctggacttgatggggtgattgagtatcactggcaaaccgaagggctgacgctggacgagctactggaagaatatcgggccatggcagtgctgccgcaaaaccataactggtcgctaaaagaagcgagctatatcgactgggttgacgatctattttccagtccattgtgcgtgatgcagcgtgcaaaagcggctcttgcatcttcaaaccctcttccttccgatgaagaggcattgctggaacacatagtcttaacggccaaaaacgaactacaggccatcgacaatatgttagctgcagcactcaatgactggctgaagcaattccaggagggtaaagcaattgtgttctgcgatcgccctgagttggcgcaacatctatcggtcaaactaagtatcctgttggactatccggttgaacgttatctaccgggtcaaactttgcaatttacccaaccgcaaagccccattcgtgtacttctgtgcgataaaagtggcgaggatgggctgaatctccatggagggcgccgtctggctgttcactacggtttgccgcgttcctgcagtcgtatcgagcagcgacttgggcgcctcaatcgatatagtgccaatctgataagaatcaaacccattcagagccttgtgctgaaaaataatgctgcccaaggtctacgtaatctgtgggcagatcttctggtgaacagcattggcgtgtttaacaacactatcgccagccttcaatttgtgcttgatgactatattggcgatgcttggagcaggttgttccgagaaggtccacaagtactagaagatctcgcgacagaattgcctggcgaaaacggcgtgttgatcagagaaactaacaaaatcaacatgcaggaaaaactgctggcaatggatgaagaggttgtacaagctgcacttttcgcgcagcagttaagcaatgacgacctaagcgctgtagaacagtgcaaagccctgacgccctggatcactgaaggattacgcttccgctcatcgggaaatgctgaagagggcatacggttccgtttcgaactagctgaacgcagttctggtaccctagtcgactttaaaacattcctcacgacctgcatgctcagctttgacaaagaggggggcaaccctccctccacgcatctgatgagcgcaaagcgtatcccggccattgatgggaaaacggtgtatcctttgcgctatggtcagccctttgtcgatgcaatttggcaactcctgaaccaagatgcacgtggcagttcagtagcattactgcgcatgattaacgcgcaactcaacgcccctcgcttcttcttcggaatgacctggctcattactggttgcgaccccgttagcccttacgcctaccttcgtaaaagcgatgagcttgcaccgccacgcatagtgcaggaatgggttgctgctgacggttctcttgtgaccagtccacaactccttgagatactaaacagcgagtacagcaaaaatatttcagcaacgaaaagctatgttgatctcaacctgcgtgcctcaagatggcaggaaatagaagaactgatttccgctgatgcctggaaagaaatggtcgaacaagtttatgataaatccttgcaaaaacagcgtgatttagtcggagacagcgcttatatccagttaatgtcagtaaaagcgatcatcatctgtagcagcaatattttatccggagttgcctaa

SEQ ID NO: 84860 - DNA, 909 bp, Citrobacter koseri
atgtcactattacctgaatatgaagatgcagaagtatccacaaagtctctctatgaaatatccttaaagcatcagatagagaagcttctattttttcgtgaaaaattcgttacatcactaaacagacctcgacacacaaactatgtagaacctgactgcgaatatttttttgattctgtcataaataattcagcagcactagcagaatactatctcccttatatcatctattctatcattggtacgacactcacccccccacaaagaccatggtttagtaagtttaaaaataagtgcggtgaagatggttatcagaaagcaaaatcagcactattttcaaaatatgagatcggtattcttatcaaatctaccagcattgataatgaaatttatttaaaaaaatgccatgatttatttgataagtctatagagactataattgaaggaaaatatgatattgttttcactttaaacaactatataaaacacaactcaatgactttttgttacgcccctttatcaaacactagcgatgataaatgcaaaagtaatcttttccttagcttcacaaaagatcaatgttttatgcttgaagattcaatacttaaaacattgatttcaagtgatttaaatgaaaccaacaacactggtaagataattgatataaatggaatgaaattcacaaacaaaggaagcataggggcagccaaattattagaaaataacaatataacatatattaaatgtaatgagtttactggaatcatggcagaaaatttgttagaacttattgatgacatgataagaactattgtgaataatgtaatttcaaatgccaaaggacaaactaccacttctgaaacatataaaaaatatttagacattattgaaacaagacaaacagcataa

SEQ ID NO: 84861 - DNA, 435 bp, Citrobacter koseri
atgtacggaacatgcgaaacgctctgccgtgagctggcagcaaagtatccgggaaacacgccgctgatgctgcttatctggtccccggaagagattcaggcactggctgacggtatggaaatttctctgaccgatcatgaaatcaggactgtcctggcgcacctggaggacatcccggaagaccagcggattgagtccggtatttcttccgccgctgcgatggagattatcagcaacgtgagcgaaaaccgcctggtgaccgtctctgctgaactgctggcgtccctgattcagaccgctgaacaggcactgtggaaacgtgaatgggccgcccgtgataacggccttgccgtcccggaatgtgttacccgccgtcaggcagtgattaatcaggcccgcaccctgctgaaaaacaacacacacgaaaacaactga

SEQ ID NO: 84862 - DNA, 510 bp, Citrobacter koseri; identical to SEQ ID NO: 8465

SEQ ID NO: 84863 - DNA, 552 bp, Citrobacter koseri
atgaaaaaacaaccactactctggatgacgatagccgccgcactgctgtccggctgcacaggccacagggaacatcacccgcaggtgacattcacggtcgataccgtgcgaacagacacaacggccagcaacccaatctgcctggcggaaaaatacggaagccttcttaatgagcgccatccggacctgtttgccggtgctcaggggagtatttcacgcagtgcattttttaatgacagcctgacgctgacacctgaaacgctccacgggatgatacagaatacgccctgtgttgaatcactggtaacgtccgtaggtccggataccttcactgcagatgtctctcccggtgtcagaatgcaggtatcaccggatattcacggtgcgcccggaaatatcactctgcgactctcgaccacagaccagaaacgaaaacagactgttgaacaaagcattactctcagaccggaacagtcccttgtcgtgaatggattcaccggagacggagctggcgaaaagcgcgtcgttctcatcacacctcacgtgcgttaa

SEQ ID NO: 84864 - DNA, 921 bp, Citrobacter koseri
atgaaaagtcttggtaaaatatctttaggttggtggaatacaagtctttcgccacattcaaaagaaaataaatctactgaagaacataaacaatacgtagcactcacaataatccgcttactaaacgaaagaaatcttgatgccatatgtttatgcgaggtttcacagctcgacgttgagtttataagcgaagttgttggggatggttttagtgtttatgatggcgcatatcgtaaaggtaggaagaagtttgatatatgcatagttttcagatctgaagttcttcagttgactgactcaactgttatcagtaaaccacaccccacaggtaatagaatttatgctgggcaaaaagttgagtttgtaataaatgaaactcaagagctgctaacattattcttggttcattggtctagccgattatatgattatgaaaactctccgaagaaagctgagcttggcatgctcctaagaacagccgtatcagattgtttcgaaaaagtggcaaacagtaaagttattgtgttaggagatttcaatgaagaaccttttaatgaaagtatcacctatcatttagccgcgactagagacatagccttagtaaaaaggagaccgggtctgctttataatcctttttggcggcatatgatttaccccaaaatgcatcctaattcagatacttccgggatacatggcggcacctattactataaaaatgatgattttagtaagtggaaaacatttgaccaaatgatgttttcatctgattttatatcagggaaaacgtggcacttaaacgagagcgaaacggttgtttttagtgatcctgagtttcttcagtatataaataactcaagctcaaaatttgatcatttaccaataatttcagtgattgagaggattgatcgtgaacgattttaa

SEQ ID NO: 84865 - DNA, 465 bp, Citrobacter koseri
gtgaacgattttaaaaaatttctattggcaggtgtcgatgctgctaaaaccgcagtagccaacaaacaagaaatttatgatgttattaatgaagtggataagcagcttagtgaaatttatgattccaaagtacatttcggtatttggaacttaactagaacgataacaccaaaaaaaaataatatattcggaagtgctttaagtgcatttagcttagagagagaagattatcaaggcttagcaataagtgatcatgaaaataaaaacgccatccatctagcagactggtatatgtcagagagtggttacccatgcaaaataactatagatggcagagagtcattttgttctaacaaagaggagttagaaagtgaagtggcaagtttattaagtcatgttagaactggaaaagcaatattaaaaaagctagaagaatttaagaaaagccaagctaaagaagactga

SEQ ID NO: 84866 - DNA, 147 bp, Citrobacter koseri
atgtcggaacgcatattatcagcaataaatgacgttgaaaagggtgggcgtccggttttccctttgatgccattccatgtctttcctgagtatatggcattactcagaaaagcactggaaaaaaaagacacaaaagagaacagataa

SEQ ID NO: 84867 - DNA, 516 bp, Citrobacter koseri
atgaatattcaggaagcattaaacatttttggtttatccggcgatctgactgaaaaggacatcaaggcggcctacagaaaagcggctttaaaatatcatccagatcgtaatccactgggtgccgaactgatgaaagcagttaacgctgcgtttgattttctcatggctaacattgacaaaattaatcagtttcaaagcactgatgaaaacgcacgttacaactacggtgaagatctggaaaaagttttgaatactctttccggcctgactggaattgtctatgaagttattggtaattgggtatggattagtggtgaaaccattactcataaagaaacgttaaaagaaatcgggtgtaaatgggccgcaaagaaaaaacaatggttttatcgtccggaagaacataaaagttactggaaccgtgaagaacacacgatagaggaaatccgcgcaaaatatggttcgaccggacagcgcagggcgacgggatggcaacaagtggaaaccagagcgtaa

SEQ ID NO: 84868 - DNA, 375 bp, Citrobacter koseri
atgttctgtgaaaaccctgacttaaaaaataactacactctgcaaaactgcctgaggaaagccaattatcacaacgaagctagagtgatagataatattttacaggaaaaaaaattcacagattccatcatgaaagatgagtcattttttagtctggtgaaattagtttccaataagtccattgcacaccaggagagcctttcaggaaaaaaacgggaaaagatagactatcgatataaattcttaaatgacaattcaaatatctgtgagtttcagtattacatttttagatgtcaccgtatttatgagaatattgtgaaagaatatggggatacattactgaatgagcttaaaataaaaaacaatgatatataa

SEQ ID NO: 84869 - DNA, 621 bp, Citrobacter koseri
atggatgataactctacgtcagtaaccagcaaagaagatgtgcaggatatttctttaaaaaactggctaaagaataaaaaaaccattgtattacttatatttactgcattaacaaatgttggcaatgtcctttcgacgattgatattatcacagataaaaccagttctttttacacatggcttggggaatcgaaaaaattcgaaggccattggaccaacaatacagaaggattcatagacggcactcctgattttttactcaagaatgcaggcgatgtcctcataaaatttgacctgaacatcaaaggtggcgaagtgaggggagagcttcacaccgacgcacgactaaaaatgtgtgaaactatagaagaaaagttaaaaactttgtgtacattaatagcctcacatccactaatgattgagggggaaaaatcaccattttccaatgaattcgatgcctatattactgagtatagaaatggagataaaaaaatagtcgcaatattaaatatgaaaattacagacgatgacaaaatgacaataacaaatacaatgagaacaccagaatcagcattatttccaactaaaatatatgctataaaaataataaccgaagaataa

SEQ ID NO: 84870 - DNA, 312 bp, Citrobacter koseri; identical to SEQ ID NO: 4281

SEQ ID NO: 84871 - DNA, 231 bp, Citrobacter koseri
atgtcacttgaaaaagcgcatacggcagtaaaaaaaatgacctttggtgaaaacagagatctggaacgagtagtaacagcaccagtatcatctggaaaaatcaaacgtgttaacgtcaattttgacgaagaaaaacacacccggtttaaggctgcatgtgccaaaaaaggtacatcgatcacaaatgtggtgaaccagcttgtagataaatggctcaaagagaacgaataa

SEQ ID NO: 84872 - DNA, 621 bp, Citrobacter koseri
atgaaagtaatctcatttctgaatccgaaagggggttcaggtaaaacaactgccgtaatcaacatagccactgcgttgagcagaagcggatacaacattgctgtggtagatacagatccacaaatgagcctgacgaactggagcaaagcgggcaaggcagcatttgacgtatttacagctgcatctgaaaaagacgtctatggaatccgaaaagatctggcggactatgactttgctattgtggacggggcaggttcgctctcagtaatcacctccgcagccgtcatggtaagcgatctggtaattatccctgttacacccagccccctggatttctccgcagcaggaagcgtcgttactgttctggaagcacaggcttacagccgcaaagttgaagcccgctttctgatcacccgtaagatagaaatggcaaccatgctcaatgtgctgaaagaaagtatcaaagacactggtgttaaatctttccgtacggccattacacaacgtcaggtttacgtgaaatcaattctggatggtgacagcgtgtttgaatccagtgatggcgcagcaaaaggtgaaatagaaattcttacaaaagagatagttagcacatttgagtaa

SEQ ID NO: 84873 - DNA, 2178 bp, Citrobacter koseri
atggatacccttaaatggaccgggagaaaacagctccccctcatccggcagacagagtctgcggaatgtggtctggcatgtctggtcatgatggcctgctggcatggtctgcagacagatttacccaccctgcgcgaacgtttcagtatcagcacacaggggatgaccctgcagaggctgatagagtgtgcagccggtatccggttgtcctcccgggccgtccggctggagccggaagacctgaaatccctttctctcccgtgcattctccactggaacatgaaccatttcgtcgtgctttataaagttcgcgggagcaggctggttatccacgacccggacaaagggaagataacgctctccctgcaggatgcaggaaaacatttcaccggtgtcgcgctggagttgacgccggccagtgattttaccgcccgggatgaaagaaaaaaaattcgcctgcgccaactgacaggcaggacacccgggctgctggccgcgatgtcgcgcatcatcatttttgccctggcgctggaaatcctgacgctgagtagtccacttctcaaccagctggtaattgatgaagtgctggttgccgccgatcgaagtctcctgaccgttataatcattgccctgctgctgctgtcaatgacccagatgctgctgtcgctggcacgccagtgggccagtataactctgtccgtcaattttaacatgcagtggacagcccgggttttccatcatctggtgcgtctcccgctgggctggtttgatgcgcgcagtaagggaagtatcaatgcccgttttgaggccgtggataccatccaggaggcgctgaccacgcaggtactggaaggtattctggacgtgttgctcgtgataactgcgctctgtatgatgctgctgtacagtccggaaatgacgctgatagccgtactggcagccattatctacggtgtgctgagggcgttgtggtatccgtcccttcgacagtcggcagaagatgcctgggacgcaggtgccagggagtccgggcattttcttgaaaccctcaacggtattctgagcctgagaattaacggcgtgacagcgcaccgtgaggccgcctggctgaacctcaacattgttcgcaggaatacgcagctgcgacagagccgtcagctgatgtgctatgacattgcacacaccctgaccggcagcgtggtatcagcgattattttgtggaaaggtgccggggaagtactgaacggtaccttcaccgtcggcatgctggttgcttatttgtcctaccagatgcgtttttcatccagtatcagcagcctgaccgataagtatttttcctggcgtatgcttgatatctacaacgaacgcctggctgacattgtgctgaccccgacagaagactatcagcaacaacccgctcaggaagacaatgatacttctgtcttcccgtccgtattccggggggatgtggccgacggtgcccgtgttcctttatcccttgagcatataaccttcagccacaagggagggaataaaccgatactccgcggggtgtcgctgacactccatcctggcgaggtgatggccattaccggtcaatccggatgcgggaaatcgacactggtgaagcttatcctggggatccacatcccggatgagggaacaatcagggcatttggcataccgcatacccacccggattattttcaggtacgtcagcgaatcggtaccgtactgcaggatgaccatcttttcaggggctccattgcagataacatcatttttttcagtggagaccgcaatcatgaacgaatgatccagtgcgccagactggcacttatcgacagcgatatcatgtctatgccgatggggtatcagacgctgattggtgaaaccggtggagggctttccggagggcaaaaacaacgcattctgctggccagggctttgtacaagaaaccgggatttttattactggatgaagcgaccagccatcttgatgttgaaagtgaaattcagataagccagacactacgtcagctggggcttcctgtcctgctgatagcccatcgcccggaaaccatagcctctgcagaccgggttctgtatctggcagacggctgctttatggagctgaggcacaagcgcaccattgatgatgggctgaacaaaaattaa

SEQ ID NO: 84874 - DNA, 1254 bp, Citrobacter koseri
atgagtatattcagggaggaagcattagaacataacagtgatacagagtacggagatattgtcttacccgcgtcatttggcatgtcagtatgcgccgttgctacattacttatatttctgagcgtctcattattcgtttattatggtagttatacccgcaaggctcatcttacaggtatagtgatgccttcatcaggactggtgaaaatcacaccgcaatatgccggatacgtcacccgacagactgtttcagaaggtcagcacgtagctgccggtgagcctgtttaccatatcagcggcgagcattacaacgggcagggcacaggtacactggcagccatgagcatgtccctgaagactcagtatgccatgctgtcttcccagcagactctggaattgcgtgacaacagtcagcagcagcaggccatactacagcgaattgcctccctgaaaccacagattaaaagtgcagagctgcgcctgtcgcttgccgggcatcaggccacgctggccgtgtccgtcatggagcgctataaaaaactggctggaacgcattacgtatcagatatcgaataccagcagaagcaaattgacgtttctacgtcactgcaaaacgttgaggatcagcgtcaggggcttctgcaactacacactgcaatggaggctgctgaagaagatcttaaccatctcatcgttcagggggaaagccgtaaagctgagctggacaggcagttgcaggggatcaggcaacagcaggacgaactggccggacaggagaactttacgctgacgtcaccggtatccggaaccgttgctgccgtgctgatcagacagggacagtctgtcagggcatctgaaccggtcatgactctggttcccgacaatgctcgtctgcagatagaactctatgccaccagtcagaatgccggttttattcagccggggcagcgtgttgcacttcggttcgccgcattcccctatcagaagtttggcgttcagtacgggactatccgagagataagccgtacaacgctgaccccttcggatttactctccgtatcccctgtgacctggaaagagaatgaagggcactaccgcgtcatcgtcgaacctgagaataccttcattctggcttatggaaaacaggaacccctgcgccccggcatgacccttgagggggatgtcagcctggatacccgccatttgtgggagtggctgaccgagccactctggagcctgaaaggaaaactgtaa

SEQ ID NO: 84875 - DNA, 651 bp, Citrobacter koseri
atggatgaacgttcgagccagtttagatatagtaaatacagcgctattatttttcttgcagtggttattatatcaactattgtaacattatcgccaacctttacactgcgttatgttggactggatattgcatttttcattgtgttcattacagagattctaatttcaactcttgtttacttattttacctaaaggaatttcctgagtgtagaataaaaataagaacagactcagctacagttaaattttcagccctgtcattccttataattattctgatacagttagctgtttactgctacagagactatttatatcattacgaaccatcacagataaactggataacagttttagtgatgacactggtcgtaccctactatgaggagatcgtatacagagcctgtgcctttggatttctgcgttcaattttcaaggaaaacattatcattccctgtgtgataacatctttgtttttctctctgatgcactttcagtattataatgttctggatcaatcagtcctttttgttgtatctatgctgttattaggggtcagaattaaaagcagatcccttttttatcctatgttaatacattcaggcatgaatacctttgttatattattaaatattcaaaatattttataa

SEQ ID NO: 84876 - DNA, 660 bp, Citrobacter koseri
atgttcatcagagcttatttaagggcatcgacggaagatcagttcgccgatcgggcaaaagagatgctggagcagttcgttcaggaacgaggctataaaatagccagttactaccgggagaacatcagcggaacaaaacttgaccgcccggaactgggacgcttactgatggacagtcaccacagtgatattttgctggtcgagcagatagaccgcctgacccgtctgagtaacagcgactggatgacgctgaaaaagcagatagaacaacatgagctgcggattgtcagcctggatgtccccacgtcatggcaggcgctgtcagataaagacccttcacagactgacccaatcacctgcgcagtgataacagctatcaataatatgcttatcgacctgatggctgcgatgtcgcataaggactggctgagccgccgccagcggcaaaaacagggaattgaacgggcccatatactggggaaatatcgaggcaaacaggctgatcaggaacgacatcagaaagttctgtactaccgggaggtcaagaaactgagcatccgtgaaacggcagaagcaacaggctacagcacttcacaggtttgccgaatccaggcatatcatcgagataagttagattttaaatcaataagtaataaataa

SEQ ID NO: 84877 - DNA, 2988 bp, Citrobacter koseri
atggcaaggaggcagattctttctctgtcggaaagagaatcattactggcattaccggacgatgagttaacgctgacacgaatggcctatttcagtgaacatgatctggcgtttatcagtgctcaccgtaaacccgccagccgttttggttttgctgtccttctttgctatctgaaaaatgtcggctttgcaccggataaaaaaatcccaccctctgatatgctgctgaagcatatcgccagcaggctaaaacttaccggggatctctggcctgcttacctttccggcagggaaaccacgcgacgcgaacatttaaccgaactgtaccgctaccttggcgtaaaatcgttcaccggcaaaatacagcaggactgtattacacacctgctgccgatggcgacgcgcaccgataaaggtattcttctggccgaagaactgctggtctggctccggaagaacaacgtgataatccccgcgattgatgtcgtggagcgtacctgtgcggaggccatggctggcggcgatgaaatcgtatttcagaccctgaatgccccgttaactccggctcacagggatgccctggatcgtttacttgagtcctcagataataagtcttccagactgacatggcttctgcaaccgccgggtaaaatcaatggtaagaacgtgctgcaacaccttgatcggctcagtagcattgaattgctggcattacctgaaggtatagatcgtaccattcaccagaaccggttgctgaaactggcgcgggaaggccgaaagatgagcagccgggatttgacccgattttcagcagcccggcgtcatgcgatcctggtgtgcgtgctggaagaagccagagccacactgacagatgaagtgattgagctgcatgaacgcatgctgaacagcctgttcagcaaagccaaaagaacacaggctgagcgccttcagcagaccggaaagctgatccagtcaaaactgaggcagtacatagatatcggccaggcactgtttgaagctcgtgattccggtggcgatccatggctcgcaatagaaaacatactgccatggcctgaatttgtcgccagtctggaagaaacgcgccatctcgccagaaaaaataattttgatccgctgcatattattactgagaaatacagcacattacggaaatatgccccgcgcatgttgtctgctttacagttagtcgccaccccggcagcgcaacctctggctgatgcgctggttgtgatccaggatatgtaccggaagcagtcacgtaaagttccggcgacagcgccgcttgagtttgtccctgaaagctggcgcaaggtggtgattacacctgcgggtattgaccggcagtactatgaattttgtgcgctcagcgagcttaagggggcattgcgctccggagacatctgggttaaaggctcacgccgctacaaaaactttgatgattacctcattcccgaaaaggactttgacaaactcacaccggcgctgcccctgcccgtatcagctgataatcatgagtacattaccagccgtatgactctgcttcagtccagacttgaagaggtcaatgccatggcagcccttggtgaactgcccgatgtggaaatatctgacaggggagtaaaagtctctccgctggataactgcgtcccggtgcaggtttcaccgctggcagagctggtttacagcatgctaccgcgccctaaaatcacggaaattctcgatgaggtaaacagctggacgacgtttacccgacatttttcgcatataaaaaacgacattacccgtcccgatacccgcctgctcctcaccaccatccttgcggatggcatcaatcttggtctgaccaaaatggcggaagcctgtcccggaagcaccaaatcatcactggaagatatccaggcatggtacatccgcgacgaaacctattcagccgccctcgcagagctggtaaacgcgcaggggaaaagaccactggcggcattctggggagacgggacaacgtcatcatcagacggacaaaatttcagaacaggcagctctggccgctacgcagggcaggttaacccgaaatacgggcaggagcctggacgtcagttttacacccatatttcggatcaatacagcccgttttacacctgcataatcagtcgggtcagggattcaacccatgttctcgatggcctgctataccacgaaagcgacctggaaatcagagagcattacaccgataccgcaggtttcaccgatcatgtctttgccctgatgcatctgctggggtttgcgttctgtccgcgaatcagggatctccacgacaaaaagctgtttatcaaagggaaagcggaccagtacccggcgcttcagtcactgatatcaacgaccagcctgaatctgaaagagatcgaaattcactggcgtgaagtactgcgtctggcgacctcgataaagcagggaaccgtgacagcatctctgatgctgaaaaaactagcgagctaccccaagcaaaacggacttgccaaagcactgagagaaattgggcgcattgagcgaacgctatttatgcttgactggttccgcgatcctgcattgcgtcggcgagtacaggcggggctgaataaaggtgaggcacgtaacgcactggcgcgggcggtatttatgcaccggctgggagaaatcagggacagaaagcctgaaaatcagagctatcgcgccagtggactgacgcttctgacggctgcgatctcgctgtggaatactgtgtatatggaaagggcgatcgatgccctgaagcgtaaaggactaaagatcaacgaacaactgctgtcgcatttgtcgccgttaggctgggagcacatcaatctgacaggtgattatatctggaaaagcaaccggataccggcttccggtaagtttcgtcggttgagaccagctaaagtcggaaggtcaaaaaacagccttaacgtacaataa

SEQ ID NO: 84878 - DNA, 327 bp, Citrobacter koseri
atgatgactgagttcaaacgcacccaacgtgattatcctctatcctttaaaatagctgttgttgagcaggttgaaaaaggcgagatgacctataaacaggcccagcagcggtatggcattcaggggcgctccaccgttcttgtctggttacgtaaatatggccgacttgcctggagtcctggacttcctgacctggtgaagaggaaactgcctgtgactcagacaactatcccgctcacacccgagcaaagaatcagggaacttgaagcgcagcttgagctggcgaaccagaaagctgagttttttgagtcagtttatgagttttga

SEQ ID NO: 84879 - DNA, 636 bp, Citrobacter koseri
atgaagggattgccgaaaaacactatcgcgtggctgctattttgcggcagcctcgccgccccctcggcgtggggttttgagaccaattacgatcgcggacgggtcgattttgccgggcgggtgacggatatttcctgtagcatcgcgctaaacggcggccagcatgccggcagcggtaatgtctggctggcgccggtcagcctggcggaagtccacgatcgcggtgccggggcgtttatgaaaccgcagccgtttaccctggcactgtcaaactgccagctgcgccatgatggtggggcagcctcgcaggatgaggtgcgtcgggtcagcgtgcgctgggtcgatggttttttactgacggcggtcggtaacgaaaacgccgggtatctggccaataccttgccggatggagcgcagaatatttatctggcgctatcgactaacgataataatacgctggataagagtaataaaattgtcccggcggacccgcagcaaaatcaggtgcgtttgcaggaaagcgcggtcagcggcggcctgttcacctattacgttggctatgtttcgccaacgccgaaaagcgccaccagcgggccgattaccagctgggcaacgtgggaattagtttataattaa

SEQ ID NO: 84880 - DNA, 996 bp, Citrobacter koseri
atgtcgctgaggaaattactaacgctttttatcgtcttaatggcgctgggaaccacctcgtcctgggcctcctgtacgcgtctctcatcgccaacggtgatgctggacatggtggtgggcagggtggtggtgccctcggatctgccggtgggctcggtgatccttacccgcaactggacgatgagcgctcccggcggggcaagctatcgctgtacttccggcaccaaccgctttgcggcgaagatcgtgtcgccaggggccacggaccttggaaataaaatctactccaccaacgtgccgggaatcggcatgcgtttcagccgcggcggcgaaacggtaaatatcgtctatcccgacgtcttttcgtcccaggtatataacaccaccaactattccctcgaagggtcgcgctttacgctggagattatcaaaaccgcggcaaccaccggcagcggcaccctggcggcgggtaagtacacctcctacgactgggagagcggcgataacccgaccctcgaaacctatctgagcgccaacgccatcaccatggtctcgccctcctgttcagtgctgagcgggaaaaatatgaatgtcgatgtgggttccatccggcgcaccgacctgaaaggggtcggcaccaccgccggcgggaaggattttaatatcgacctgcagtgcagcggcggcctgagtgaaacgggatatgccaacattagcacctcgttctccggtaccctggccaccagcactaccgctaccatgggcgccttgctgaatgaaaaagccggcagcgggatggcgaaaggcattggcatccaggtgctgaaggatggctccccgctgcagtttaataataaatacaccgtcggccgcttgaataatcaggagacccgctacatcaccataccgctgcacgcgcgtttttatcagtatggcccgacgaccagcaccggcgaggtggagtcgcatatgatctttaacctgacgtacgattaa

SEQ ID NO: 84881 - DNA, 2487 bp, Citrobacter koseri
atgaagcagaggtcattctgcccgggaagattaagcaccgcgatcgccatcgcgctgtgctgctttccgccattttccagcggacaggaaaacccgggaacggtatatcagtttaacgacggctttattgtcggcagtcgcgaaaaggtcgatctgtcgcgcttttcgaccagcgcgattaccgaaggcacttactcccttgacgtctacaccaacgacgagtggaaagggcgctacgatttacgcatcgcgcgcgataaagatggtcggctgggcgtctgctacaccaaagcgatgctggcccaatatggcatcgcggcggaaaagctcaatccgcagctgagcgagcaggagggctactgcggtagcctcaaatcctggcgcaacgaagaaaacgtcaaagacaacctggtccagtcctccctgcggttgaacatttcggtaccgcagatctatgaagatcaacgcctgaaaaactatgtcagcccggagttctgggacaaaggtattaccgcgctcaatcttggctggatggcgaacgcctggaacagccatacctcttcggtaggcgggtcggataacagcagcgcctatctgggcgtcaacgccggtctgtcgtgggacggctggctgctgaagcacatcggcaacctgaactggcagcagcagcagggtaaagcgcactggaacagcaaccagacctatctccagcgccctatcccacagctcaactccatcgtcagcggcgggcagattttcaccaatggtgaatttttcgacactatcggtctgcgcggggttaatttttccaccgatgacaatatgttcccggacggcatgcgctcgtatgctccggaaattcgcggcgtggcgcagagcaacgccctcgtcaccgtgcgccagggcagcaatattatctatcagaccaccgttccgcccggaccgtttaccctgcaggatgtctatccttccggctatggcagcgatcttgaggtctcggtgaaagaagcggatggctcggtagaagtgtttagcgtgccttacgcttccgtcgcccagctgctgcgtccgggaatgacccgctacgcgctctccgccggtaaagtggacgacagcgcgctgcgcaacaagccgatgctctatcaggcgacctggcagcacgggatcaacaatctgttgaccggctacaccggggtcaccggttttgacgactatcaggccttcctggtggggacagggatgaacaccggcatcggcgcgctctcttttgacgtcacccattcgcggttgaagagcgatgcccatgatgactcgggtcagagctatcgcgcgacctttaaccgcatgtttaccgatacccagaccagcatcgtgttggcggcgtatcgctactcgacgaaaggttattacaacctcaacgacgcgctgtacgccgtcgatcaggaaaaaaatagtcgcagcaactacactctgtggcggcaaaaaaacggcataaccttcacggtgaaccagaacctgccggacggctggggcgggttttatctcagcggccgtatctccgattactggaaccgctccgggaccgagaagcagtatcaggtcagctacaacaattcatttggtcgtctctcctggtcggcgagcgcgcagcgcgtctatacgccagacagctccggtcatcgtcgcgacgatcgtatttcactcaacttcagctacccgctgtggtttggcgataaccgcaccgccaacctgacgtcgaacacctcgttcaataactcgcgctttgccagctcgcagattggtatcaacggttcgctggacagtgaaaacaaccttaactacggcgtgtcgaccaccaccgccaccggcggtcagcatgatgtggcgctcaacggcagctaccgtacgccatggaccaccctcaacggcagctacagccagggcgaaggctatcgtcagagcggcattggcgccagcgggacgatgatcgcccacagcggcggcgtggtgctctcaccggaaagcggctcgacgatggccctgattgaagccaaagacgcggccggggcgatgcttccgggatcgccgggcacccgtgtggacagcaatggttacgccatcctgccgtatctgcgcccgtaccggattaacgccgtggaaatcgacccgaaaggcagccatgacgacgtggccttcgatcgcaccgtggcgcaggttgtgccgtgggaaggcagcgtggttaaggtcgcgttcggcactaaggtgcagaacaacctcaccctgcaggcgcgccaggcgaaccacgagccgttgccgtttgcggcaagtattttctcccccgacggcaaggagatcggcgttgtcggccagggcagcatgatgtttatcagcgatgcgaacgccaaacgcgcgattgtgaagtggagcggcgggcagtgttcggtggatctgggacagcaaacaacaaaggatagcgtatgtcgctga

SEQ ID NO: 84882 - DNA, 357 bp, Citrobacter koseri
gtggtggccaatcagaaaaatgaaggccagaacgtgctgcagctggcgatccgttcgcgctttaaatttatttatcgtcctgccggactgggcaaccgcgatgcggcggccgagaagctgaccctgaccgccagcggcagtagtctcgccatcaacaacccgacgccgttctacattaccgtcagccgtatttcccgcgacggcggtaaagccctgaacagtaaaaccgtgatgctggcgccgcagtccagccagacggtggcgctctcctccgccgtcaaccgcggcgaaaccctgaccgttaacaacattaatgactatggcgccgatgtcgcagtgaaagtggccgttaaataa

SEQ ID NO: 84883 - DNA, 612 bp, Citrobacter koseri
atgaaaaaggttcttctctctgcagcaatggcaaccgcgttttttggcatgactgctgcccatgcagctgataccactgttggcggcggccaggttaatttcttcggtaaagttaccgatgtatcctgtactgtttccgttaacggccagggcagcaatgcgaacgtttacctgtctccggtaaccctgactgaagttaaagcggcaaaagcggatacttacctgaaaccgaaatcgttcaccattgacgtctctaagtgccaggctgctaatggcactaaacaggataacgtaagcaaactgggcgtgaactggaccggcggtaacctgctggctggcgcaacccccaaacaacagggctacctggcgaacaccgaagcggctggcgcgcaggatatccagctggttctgtctaccgacaacgccaccgcactgaccaacaaaatcatcccgggtagcggtgatcagcaaccgaaagctgttggcgatgctgctgccgtagcggatggcgcacgtttcacttactacgttggttacgccaccagtactccggataccgtcactgccggtgtggttaacagctacgcgacttacgaaattacttaccagtaa

SEQ ID NO: 84884 - DNA, 216 bp, Citrobacter koseri
atggcggaaaatcgtgttgaggccaacgcccataatgcgggcggttgcccggcatccaacgccattcatggccatatcaatgattttctggtgcgtaccgggttgagaagcggtgtaagtgaactgcagttgtcatgttttacggcagtgagagcagagatagcgctgatgtccggcggtgcttttgccgttacgcaccaccccgtcagtagctga

SEQ ID NO: 84885 - DNA, 693 bp, Citrobacter koseri
atggcaacaaaaaaatacgaactaacaaaagaatacttttttcatggtgaattttggcaccaacttgatgataacaaaggaagattttcagcacgaattgaatattcaccgtaccatggtctgattctagattattgtatttctgacagtgaaagccccagaacatgtgaaatattatatggagtcttaaatactggagaaagatgtactctaattgggaaatttgatttcacacaagggaatattcattttgataaagggattatccatactggaaggcatggatttcccataatgctattcaatgatttttatgctcccgactcaaagatagaatattgtgatttatccttgcacggattgcaagaatttatccaccctcacggttttttcactcaattgaaacatttagaacatccaatatttatcgcaaaaggaaaccattggactcttcaacttgtcaaccatgtatcttttagcgtaattggtgatgatctattaaacataataacttgccaaaacaaagccgcactggagaacataattcatcaactaaaaaagacaaaagaattataccctgatgcttttttctccattagaaaagaacttgttttctactttaggataaaatcatctaatgatttaggaatagaagacggtaatacccccatttttgacggaggtgataagtag

SEQ ID NO: 84886 - DNA, 801 bp, Citrobacter koseri
atggcacaggacgcagtcaggagtcgaagcgtcagcatacattttgcctgccagttgtttgctgtcagcgaaagttgctatcgctatcagcctcagttgaatgaagaaaatgtcattattgccgactggttgctccgcatcactggcaatcagcgcaactggggatttggcctgtgctttttgtatctgcgtaacgtaaaaggctttaagttcaaccacaaaagggtgtaccgaatttactgcgagttatcgctgaacatgcgaataaagccgaaaaaacgactgaaacgggataagcccgaaccgctgacggtacctaaaaacagtaatgaatgctggtcgatggacttcatgcacgatcaattatcagatggtcgctcagtccgtctgctgaatattatcgatgattttaaccgtgaggcactggcaatagaggtcgatttttctctgccggcaaaccgagttgtgcgaacgctggaacagctcattgaatggaaaggtaaacccatagcaatacgatgtgataatggaccagaatataccagtaacacgttgatatcatgggctaatgacaggggcatccagattaactttattcagcccggcaatccgcagcaaaatgcctatattgagcgttacaaccgtacggtacgctatgattggctggggcaacacctgtttacatcactggatgaattgcagaactatgccacgcagtggcaatggttttataatcatgaacgaccaaatatggcgttgaatggtttcacgccgatgcaacatattcaacgcatggcctga

SEQ ID NO: 84887 - DNA, 267 bp, Citrobacter koseri
atgaaaaaatcacgttttaccgacagccagatcatggccatcctcaagcaagcagaagcaggaacgccggtggctgaattgtgccgcgagcatggcatgagtagcgccagtttctataagtggcgctcacgctttggcgggatggatgcctccatgatggcccgtctgaaagagctggaagatgaaaaccgccgccttaaaaagatgtatgccgaagaacgactaaaagccgagatcattcaggaggctatggcaaaaaagtggtga

SEQ ID NO: 84888 - DNA, 3471 bp, Citrobacter koseri
atgaatgataaaaaagatggaaatataaagacagaaaatatcattaaggacgttattagtaaaaataagccactggtgctttttttgggtcaagactatgcttatactaataaaggagatccggtactagctaaagttattagccatctcaatattgaaaatgaaggaaatgaaagttggttaagcctactaaaaagcaataaagtaactaaagaaacttacgagtggctagctgagcgatttgaacgaactacgcaaactgacttcatagataatatatttcaactatcatggagtgcggtattcactacgtctattgacccacaaatagcaaaaaaaatagagagtagaggaagagttccagaatcaatattgtctaaagaccactatgctaaggtagcaaggagtcgttcaaggcctcccatatattatttgtttggcaagtgcaatgagatcgataatagttatagtgttccatctaatatttttcagttaatgcaaaggaaaaacactcacacgggcgcgttgctaaacagagttcctgatacagttacatctttaggtttattggttgttgatggctttagagaaaatagagattggttgtctattgatgatatgttggctccattatcagtgaatccagaaatagccgttatttggctgggtgaagcaccaattaactctattttctttgatgccatgataagtaatggtcagattttatatgatgagcgctcgttaagtgaaatagtattatcgatgcttgttcactcagactccttttctgatgaacaattaggagtaatcgaacaaagaggaacggagacaataacattaaatgacgggaagtttttttcagtcccatcatctcttcggttaagggttgagtcaacagctaatattattgatgactcctggttagagcaatatccaataataactggtgtcgaactcgaagaagatttcagacgctttcatggaggttttggtggtattagaaatcaatttgaaggtattaggaagggatatgcagtaaaaagagaattcgaaaaaactttagaaataaaatgtagggacaatttaaataacataggaaaatcaaatggttatatcgtggtgcatggtcaatccggaacgggaaaatcagtttctttggcaagagtggcatacttattaagaagcgaattcaaactcccaatattatattcaaaaaatagacttccatcagcaagtgatattgaggactttattgcagaagctgaaaagagtggtgctatatgtgttgtgctcgtgtgcgatgctaaccaatccccagataaataccgagacttagcaattagtctgaaaagtcgtggtagaaaatgccttatcattgggtcagcctataaaattgaaggtattagaaagaaaaatattaactttatagaagcaaactctaaaacaactgaagaggaaattagtaaactttacatattactagagcaatttgcaccaaggtatggtcgtgtggctaagttaactcatcaagataaaaatgtattttcgcttttctatcgtcatttaaccatgggacgtgcgagaataatagatggaattactgatgaagcaaggtatacggaacaagctataagaataaaagctagaactatgccacagagttatcagccacaattcgttttagctcaacaattaataaagcttggtatcggaagcacaacagtcaaattgtttgaagatgaaagtgaagagcatacagaagcaggtatagatgcagcaggtaagttgatagatctcgttatggttgccgggaggttagattgccctgtacccttaaatctcctattaagaacattgagcggcgataaaaattctctagactatatccaaatagcatatctttttgaagagttagacctttttagatgggatacttctgacgctgaggggcatgaatattttattcatcctagacttcgccttgaagctgaacttatttgtcggagaagattatcagagcgtagcaaggagattggttatcttttacaattaataaagtcagtaagatattcgagcactgatcgaagatcagaaataactttcattttagacttgctaataaaaatgcagaaagaaggtccaaggaaaaatgcttatcaagacggttatcttgacgtagccaatgccttaactgaactcagaactaagcataatatcatagatgcaagcttaatgctccaagagtcagttttccgacgctctgcagtacatgcatctgataaaaaagaaaacgcagatataagagtattaactatagagcaacgtgatctaatattaaacgaagctcgagctattgtcgaaaatgctagaaatcaaatatcagaacgtacattacgagcaagtaaaaagactcagcaaagtttagctgttgaacatgcatcgatttatggatatcttgccgtcggtttggctagacaagatgctggtgaagatgttgtctggtcccactatcttgcagctaaaacagcgattacaaccgctatttctgtagctaataaccattatccatttgatattgccttatggactccaattgacgtgctaaaatataaagaatttagcctagcacataagatggagcttctatcagatgttttatctatttttgatcaagcagatacagtaagttttaatgatttttctgcaagtaaatttgaaagtagaaagttaaaagctgctatggagcttggcttcgaaaagatagaagaagaaagctatttaagtttagaaaaaaccaacccatctatagcgtactatattaaagctaggagtatgtgtgctggaatatttaatgggaggtttgaaaccataccagacaatctaatgaagtgtgtttcagaagctgtatccttcttaatgagcaagctaaatattgtcttgactgatataagaccattgcagttattgattcagttaatttggattcaaaaaacacattcctttatatttaaaaaggaaaagctcattatcccacaagacaacaagtttcaagatgaaattctattactcgtccgcaatcttaaccaacttgccggagaaaataaacgtaataactttaggctattagaagcagtatttgaatgggtaagaggtagcgctgagcattcaagagaattgtttagagagttatcttctgacactgaatttgaagattccagccgtgtaacaagacgctttattctagaaaacaatgatgttgttcgaggatttaaaggtcgagtaattcgtgatagaggtgatgggcattggacagtttctgtctttgacctatcaagaaatattgatttgttaggtcgtgatttcaatggtgacgatatatccattggacgtgagatatcaagatttaatatagcttttaattacttaggaccgattgctgagccattgtctcgatatggagtaagatcatga

SEQ ID NO: 84889 - DNA, 867 bp, Citrobacter koseri
atgaatttcagcgaactacatcatcttcatttagattttaagcgcaggctgacctctattctgggtaaagaagtttttcctgaaataactttaaatccgccgaccggtgacagtgacgaactctcattcatccgattagtatcgtggggatatgtttttgtttacgaggctggaagagcccctttaaattttttaaagaaactacctccattagatggctacactggcaaggtattaccaagtttgcatgccctgagaacatgggcaaaccataatttggagttcgagaaatccagtgatgtaaaaactgttcgtgtggcaacaacatggttgattgaaaaatgtcagacaggatcgccttcaaagccagaacattggaaaaaatgttttgatgcaatgggctctgatttaaaaaaactattagaagactgtttattagcttgtgactgttttgacctacatgaagatagagcagggttgatctcctcatttgaacaaagtctcgataggaattggagtgcttacctttttgatggatatgctgaaaaagctcttcaaaaatttggatatgaggggttaagcgctcaacagatcagaaccagtaatttagatgcttggcgaaaaatagttttatcatcaatagatgatgagtctattaataggaatctaacaatacgagtggagaatgacatacttaaattaatggcatcatcattccctatgacatctactgagataagtaagatcattaatagggatgaaaaagctattgtaatagcagccatgatttacttgagggaattttcaggagataaaatgcaaaatgctggtgaagtcttagaagctctccgagagttaaattcgtaa

SEQ ID NO: 84890 - DNA, 138 bp, Citrobacter koseri; identical to SEQ ID NO: 39597

SEQ ID NO: 84891 - DNA, 207 bp, Citrobacter koseri
atgaaaacaaaacaagactggctctttcagttaagaaaatgtacatcaagagatactcttgaaaaagttattgagattaaccgttacaaactgcctttatcagaatcagaggcattttattctgccgcagatcatcgccgcgcagaactggtgatgaataaactgtatgataaggttccttccggcgtctggaagtacgtccactaa

SEQ ID NO: 84892 - DNA, 1881 bp, Citrobacter koseri
gtgaccgaaattattcatgctggcgatcctgatgacgaaggacagctacttgtcgatgaggtcctggaatatgcaggcaacacaaaacccgttaagcgcgttctgatcaacgacaacacccttccggcagtgaaaaaggcgctggcaaatcccaaaaataaccgtgacttcagaggactctatctcaaggctctggcgcgttctgtagccgacgcgatatacggtttatccatgacgcgtgcttatacgatcccggcacgggctaaaggctataaagggacactttcggtcgggcgtgttcagacgcctattcttggcctgatagtaaatcgcacccgtgccaacaagaatcataaatccagtttctactacaccatgaccgggcattttcaacgcggcgttgatgttatcagggcgaactggaaacctggtgagttcgcaccactgacagaccgtaaattacttgataaggcgtgggcgaatggaacagcggcttcccttgcaggaaaaccagcgacagttgaagcagcagcaacagacgataaaaaaacggctgcaccattgccctttaacctggtccggcttcagcaatacatgaacaagaagttcaaaatgacggcacaacaaacgctggatatcacacagcagctacgcgaaaaatacaaagcaattacttacaaccgttcagattgttcatatctttcagacgaacaattcagcgaagcaccacaaataatcgatgccctgaaatcggtgtttgatcagccaatggatattgatacgacacgtaaaagcaaggcatttaacagcgcaaaagtaacagcgcatacagccatcatcccaaccgttagcgtaccggacgtaaacgcactgagcaccgacgaacgcaacgtttacctggcaattgcacaacactatcttgtccagttcatgcctgaaaaggcatatcaggaagtatccgtcgccattcagtgtggtgatgagtcgttttatgcccgtgccaggaaaactacagacagcggatttgaagcgtttcttggtgtggaaaatgccggggacgatgaagcagaagtcgaaaatgatgattccgcttttgatcttctctgtaaaattcgcacaggagaaacagtgacgacaaaagaagtggttgtgaatgagaagaaaacaacgccaccgccattattcaccgaagccactttacttgccgcgcttgttcgtgtcgcagattttgtcactgatccagtgattaaaaagttactgaaggataaagatcgggataaaaaagacgaacatggcggtattggtacgccagctacgcgggcttccatattggaaacactgaaaaaacggaactatatcaccctggaaaaaggaaaacttattccgacagataccgggtatgcgcttattgatgctctgccggatatagctgttaatccagatatgacggcattatgggcggaaaaacagacactcattgaaaacggagaaatgaccatcgaacagttcgttgacgaactgtacaatgatctgataccgatgatcagtaatgcgaacagtgctgaaataaaagtttcccccagcgcgccgtctggtcagtcacaacgcctgtcctctccttgtccttcctgtggtaaacagattgtaatcagaccaaaaggttatttctgtacaggatgtgaatttaagatatggaaagatttctgcggcaaatcattaaccgataaacaaattgaaacgttaataacaaaaggagttacaagtgaattgaaaggtttcattagtcaaaaaacaaacaaagaattttcagcaaaagtaaaactggttgacaaagcaaccgggaaactgggatttgagtttacacaaaaaagtaagaaataa

SEQ ID NO: 84893 - DNA, 990 bp, Citrobacter koseri
atgcaaactacatacagattagctagtaatacctctaccatactgggagtagaggaaagtcatggtataaccgaagtactatttccagatataaattattttggccacaccataactatcaccaagatgttttcgggatatgccggacatcgttggaaggtagtttctgtaagtcatccttccgtaacagatatatttgttgatttagaattgcgaggaataaacaatgacgagatttatctatctcaaacatacaatcaacgtaattctgtaataagcaatcttcataaaggtacgttagttgaggttgattatggatatatttactccataaagaagcaaagtggcgatacaaggtcctgcaaacgttatcccgatcaaaagcagtctggagaaatgcataaacgcagattggcaatcgtcattaaggcatccccatctggaatacaaattgtacctatcacatcaaaaataccttcaaatgctggggataaatctatatttgaagttagttcccaatctactcaacaacttatccattacaatgatacaacgaagcgttcctttgccctatgcggaatgatagaaacagtttcattaaacagaatatttgccccactagcctttcccgtggtacaaaagagtagaaaaggtccggaacgctcaactggatatccaaacaaattaactaaagccgataaaaagtgccttgatgacgctttatcatcatcaattggttttcaggattatcctgaacttaagaaaaaataccctttgatttacactgaaaacgaagccaataagtcagaaatcattagattaaattctgttctccagaatgaaaaggaaaagatagtaaactacgaagccctcatgacgcttgtagaagaacactatcaacagttatactcgcacaaatctcttctggaaattcagcagatgattaatgaagagttgcatataagacgcgagattctcgaaggcacttga

SEQ ID NO: 84894 - DNA, 207 bp, Citrobacter koseri
atgaatcagccatgcacacgtcttatccgcctgtcagaagtgatgaataaaaccggatttggtaaggcttggatttatcgtcttatcagccaaaatcggtttccacagcctgtaaagatcggtattcgtgctattgcttttatcgaaagcgaaatcgatgaatggattcaattaactatcgagaattcaagaaagcatgttgcttaa

SEQ ID NO: 84895 - DNA, 597 bp, Citrobacter koseri
atgatgaaatcagacgaacaatatcaggttcccgtgtggatgcgacctctgttgccgttgctctgcaataccggtggtaatgatccggaggaactgctgaatgatacagaaaccaccgccagtgcgaatattgtccgttatgtactgatagttgcagtgcggtcgcagattgatctgctgcagctactgtacaggaaaggactgttgcgcacagagataccaggtggcttttcaccggaagaagcgcaggaactcctggataatttggtgcgcagccatatcagcaaggcgctgtcgggtgagcgaatggcagcccgtgacagaaatgccgatctgacctggattcgccagcaactggtcgatgccgcctggtttgtccgtgccacactggaagcgcatgggatgggcgtcggaaatgagagtccctctgctccgccggagacaatgccggacatacagacacgggaactggttatgttgatcaagcgactggcatcatcgctgaaagcggtgaaacccgacagtagcgtggtgcgtgaagcgcaggactggctgtgcgacagaaaacttgtggatatcacagatattctccggtga

SEQ ID NO: 84896 - DNA, 720 bp, Citrobacter koseri
atgagcgcacgttcacgggcactgatccccctcagcgcagagcaacaggccgccatgcaggctgtggctgtcaccgaacaacgtcgtcgtcagggacgcacactttcagcatggccttatgccagcgctttctttcgctgcctgaatggcagtcgccggatttcgctgaccgatctccgcttttttgctcctgcgctgacgaaggaggaatttcatggcaaccgtctcctgtggctggctgccgtggataaactgattgaaagttttggtgaagtctgtgttcttcccctgccatccgatgcggggcatcgtctgttcccgtccgttccttttcgtgaaggtgagcggcgtcgtcagaaaaccacgctgacagagcagaaatacagccgccagcgggaacgtgaggcagaacgacgggaactggaataccagacatgttttgctcaggcgcagattgaccttgcgtttcatactcccgccacggtcggaagctggttgtcccgctggtctggtgttgttgaggagcatgatctggaaacgattttctgggggtggtgcgggcgttttccatcactgtcatcatttgaccggtttttctggcaggaggaaccactctggcggctgatttttgaagccggtgaggccggtcgtggtgcaccggtacaggtacgtgcacttgagcagtggatgatcccgaacaagctggagaacgcaatatga

SEQ ID NO: 84897 - DNA, 435 bp, Citrobacter koseri
atgaaaactgaactgaccctgaatgccctgcagtccatgaacgcacaggaatatgaagatatccgtgctgcgggaagcgatatgcgccgtaatctcactcacgaggtgatgcgtgaagtggacgcaccggctaactggatgatgaatggcgagtatggcagtgagttcgggggctttttccccgtccaggttcgtttcacgccagcccacgaacgtttccacctggcattatgttcgccgggagacgtctctcagctctggatgctggttctggtgaatggtggtggacagcctttcgccgtcgttcaggtgcaacatatcttcacgcctgtcgctatcagtcacacgctggcgcttgccgcgacacttgatgcgcaggggtacagtgttaacgacatcatccatatcctgatggcagaaggaggtcaggcatga

SEQ ID NO: 84898 - DNA, 2049 bp, Citrobacter koseri
atgccatccgtgatttcgggattcttaagtaagagaggtgccggacgcgcgaacgtccggcaggacataagcaattataaggggatgattatgcctgtaacgaagtgtgaaccagaaaccacccgcaaagcaagccgtaaatctgcaaaaacgcaggaaactgtcctgtctgccctgctggcgcagacggaggaagtgagcgtgccgctggcctcactgattaaatcaccgctgaatgtgcgcacggtgccgtattctgtggagtccgtcagcgaactggctgagtccattaagggcgttggcctgttgcagaatctggtcgtgcataccctgcctggtgaccgttacggtgtcgccgcaggtggtcgccgactggctgcactcaacatgctggcagagcgtggcatccttacggctgactggcctgtacgcgtgaaggttattccgcaggaactggcgactgccgcatcaatgaccgagaacggtcagcgtcgggatatgcaccctgccgaacagattgccggattccgcgcaatggcgcaggaaggcaaaacacctgcacaaatcggtgatttgctgggctattcaccccgccacgttcagcgaatgctgaaactggctgaccttgctccggttatcctcgatgcgctggcagaagaccgcatcaccaccgagcactgtcaggcgctggcgctggagaacgacaccgcgcgtcaggtacaggtgtttgaagccgcctgtcagtcgggatggggcggaaaaccggatgtgcgggttatccgcaatctgattacggaaagtgaagtggcggtggcggggaacagtaaattccgcttcgtgggggctgatgctttctcacctgacgaactgcgtactgatttgttcagcgatgacggggacggttatgtcgaccgcgtggcgctcgatgctgccctgctggaaaaactccaggctgtcgctgaacaccttcgggaagccgaaggctgggaatggtgcgccgggcgcatggagcctgtcggtgagtgccgtgaggatgccggaacataccgctgtctgccggagccggaagcggtgctgacggaggcggaagacgaacgcctgaacgaactgatgacgcgttacgacgcgctggaaaatcagtgtgaggaatccgacctgctggaagcagaaatgaagctgatgcgctgcatggcgaaggtcagggcgtggacgccggagatacgtgccggaagcggtgtggtggtgtcctggcgttatggcaacgtatgtgtccagcgtggtgtgcagttgcgcagcgaggatgacgcggctgacgacgctgaccgtacggaacaggtgcaggagaaagcgtcagtggaggaaataagtctgccactgctgacgaaaatgtcttccgaacgcacgctggcagtccaggcagcactgatgcagcaaccggacaaatctctggcactgctggcatggacgctctgcctgaatgtgtttggcagcggagcttacagcaatcccgcaaaaattcgcctggaatgtgagcattatgcgctgaccagcgatgcgccctcggggaaggaaggtgccgcattcatggcgatgatggcagaaaaagcccgtcttgcagccctgctgccggatggatgggcacgggacatgacgacgttcctgtcactcagtcaggaggtgctgttgtccctgctcagtttctgcaccgcatgcagccttaacggtgtccagacccgtgagtatggtcacacgtcacgcagtccgcttgacacgctggagagcgccatcggttttcacatgcgcgactggtggcagccgacaaaagcaaacttcttcggacacctgaaaaagccgcagattatcgcagccctgaatgaggcaggactgttcggtgccgcacgggacgcggagaagatgaagaaaggcgatgcggctgaacatgcagagttccacatgaaagacaaccgctgggttccaggctggatgtgtgcaccacatccacagacagatgccactgaacgcaccgataacctggctgatgccgcctga

SEQ ID NO: 84899 - DNA, 234 bp, Citrobacter koseri
atgagcgaatatttcagaatacttcagggactgcctgacggtccttttacccgcaaacatgccgaagccgttgccgcacagtaccggaacgtctttatcgaggatgaccacggagaacattttcgcctggttgtccgtaataacggaacaatggtctggcgtacctggaattttgaggacggtgccgggtactggatgaaccatgccatccgtgatttcgggattcttaagtaa

SEQ ID NO: 84900 - DNA, 528 bp, Citrobacter koseri
atgagtgcacgtggtatcaacaaggtcatcctcgtcgggcgtctgggcaatgatccggaagtccgttacatccccaacgggggcgcagtggcaaacctgcaggtggccacatcagaaagctggcgtgacaaacagacgggggagatgcgggagcagacggaatggcaccgcgtggtgctgttcggcaagctcgcggaagtggcaggtgaatatctgcgcaagggcgcgcaggtctacatcgaaggtcagcttcgcacccgtagctgggaagataacggtatcacccgttacgtcactgaaattcttgttaagaccacgggcaccgtgcagatgctgggacgtgcaccacagcagaacgctcaggcgcaaccgaagcctcagcagaatgggcagccacagagtgctgacgcgacgaaaaaaggtggcgcgaaaacgaaaggccgtggacgtaaggccgcgcagcccgagcctcagccgcaaccgccggagggggaggattacgggttttcagacgatatcccgttctga

SEQ ID NO: 84901 - DNA, 192 bp, Citrobacter koseri
atgaatatcagcacagaaacccgcgaaattctgcgcaattacaaagccgtgattaatgcgcggcgtcgtgaaatggggcagaaaccgctcaccactgcgcagattgttgatgaaatctgcgattttgtggtgaatcagcaggcggttttcctcggtggtcactatatccttcagggcagcagaaacaggtga

SEQ ID NO: 84902 - DNA, 423 bp, Citrobacter koseri
atgtactgtactgttaaagaaattatccgcgatgtactggacacagacgtgccggacagtgaatgcgtttttgccctggtgctgacccgtggggatgtgcgccatatggctcaggactggaacctgtcagacgatgagctggaaaccgtcatgcagcggctggacgatgcctttgaatatggtgcggatgtcagcattgttcacgacgttgttcgtgagctgatggaagaaaagcgcgccagccgtcaggttacagttccggcggtgatgctggaaaaagtgatggcgctggcaggcagtgaaatgaagcgcctgtatgccgtcgggagtgagaacgggggcgacggtgatgcgttcgtcagggaggaacgcgaagcaatgaacgttgtgttacaggcgctggacggggagcacatgtcatga

SEQ ID NO: 84903 - DNA, 426 bp, Citrobacter koseri
atgcaatatgcgaaacctgtcactctgaacgttgaagagtgcgaccgtttgtcttttctgccttacctgtttggccaggattttctgtatgccgaagcgtctgtatacgcgctggcgaaacaaatgatgccggaatatgaaggcggattctggcacttcatccgcctgccggacggtggcggttacatgatgccggatggcgaccgtttccacatggtgaacggtgcaaactggtttgaccgtaccgtgagtgctgatgccgcaggtgtcattctgacctctcttgtgattaaccgccagttgtggctgtaccacgacagcggggatgcaggactgacccagctttaccggatgcgcgatgcgcagttgtggcgtcacatcgaatttcaccctgaatgcaacgcgatttacgcagcactggactga

SEQ ID NO: 84904 - DNA, 1677 bp, Citrobacter koseri
atgagtgtgattaatcatctgacaagtaacaataacaaactttcggtacatgaattttttaaggtatgtcaaaacgcaggcattctccgtcttgtaaaaacagaggaagatgaaaactatatctacattattatttgtggtgtttatcgcattcaaaaaaacaaaaaaaatggaaatatcagtttgtgggtgtacaagctaaaagacaagaacacagggatatggattcgaagaaattcatttccttgcaagatttatttgttctggtctaataaagctgcacacgatatggacgactggttaaaatatgcgattactcacatcatcaaatcattgattaatgccggatattcaattgaagataaaatctatttgttccgcattggagaggaagagaaacacgatgagagtatttacatttccacactatatccatccagtgtatattactcgcatcattatgaaatgcatgacattatacattgccttggtaaaacggcatcattcaactacccctgtgacgtacaatatatcagcaaacatgatttactcgaagagataaaaaacaaaatttatcacagagtattaaaaattataggagtggacaataagtttaatgcatcaaaagcattgtgcaaagccatatggataatggtagataaaaagatattcgcacaatatgccagagcttcacattgttcgatagcttacaattcaattcgtcagtcattatttgaggactatctggatttttcaaagcgaatccatattctggatgatatagatttttgcggattgtggcctatggttggtcttctaagacaacaacataaaaagggtcagtttatgctatcaggaaagacaaaagagttatatgaaagactttgttttccctatgagcttagttatggtgagttcagaagtttacgacatgttagtttatcattagtatatgctttaatttataaccatgataatgcatcattcagattaacagtcagattattacgccatccacttatcaagaactatcctgtaagagcaatttactggattatcgattatattagcattcgagcttacccagaaaaagaaaatgatatttatcgtatatgctcaaaatggcttgaatatcatcgtgatttatttaaaaacattggcttttatgaccgtaatactgaatccaggcaaacatcacgctgggaaatggaaacgaatcagttgtgtcatgcaattgactggttgttagcagaagaacggttaattcataaaaaccaggagtggccttctttctggagactatctgatgaatggacgcggcaagtgaagaataacgttattcccgcaacccaaaaatggaaaggaaccgggataaactggcagaaaattgataactgtgtaaatgaattaattacatttgatgctctgtgtcaggaaggtcaggagatggaacattgcgttgccagttatgcagactggtgtgcatctggagaatatattgcaatttcagtcctgatggataatgaaagagccactcttggactttcacgaaaagaacatgatttaacctatcagtttgaccagatgagaggtattcgtaatcaggctgtttccagaaacatgctaattaaaggcaggcatattttaaaaataatcaactcatcactaaaaggataa

SEQ ID NO: 84905 - DNA, 354 bp, Citrobacter koseri
atgaatgattgtttcggttgtatgcatccatatccggctggtcactggttttattttttacaggattttacaccactacttgaaaatcctcttttctacgtctttttcttttttttcgcgggtatggcaggtgtatttatatcaagagtgactaatttaattaagtcgatgagacatgacaataaaccatcaatagataattatgagcaaatagaaatagaacactatatgacaaatgaggaggtaggcagattagtaatcaattttatgaaacgcacaaacggagaaccattactaatagtgtttccagaatacgataatggagacaatgatgaaaacaaaaactcttgttga

SEQ ID NO: 84906 - DNA, 249 bp, Citrobacter koseri
atgagcgaaatccgatttgtaactctggaatccgactttaacaatattaaagaaatttattctgatgatgagttaaaccgtttgctggaagctgttaatcagaattgcccgaccagaattgtgttgggtagcgtggagaaggggaaagaaacaccactcaagtggtgttttagaacaataccagagcgtatttcaattgaggaaatcgatgaaataaaatttatccagaatccttctgaacagggataa

SEQ ID NO: 84907 - DNA, 1209 bp, Citrobacter koseri
  misc_feature (1164)..(1173): n is a, c, g, or t
atgaacaaaaaaaatgcacacaaaaataatcaagagcataacctgcgatttgagctgctacccagccactttaggcgttgggccttgcatttacactacataactggagtggctgtcgagataatcgttgttacgttattagcctttttaggactggcctgtcaggatttgtgctgtgttcaactgggcaataaacagcgatctcctctggcattatatctgctgctactttcaaggtctggcagtggcaagtcacggatattcagattgctaaaggttcctgttgaacaactagagcgggagtttgaagatgcttatcgtgctgagcttgaggaatatgaacgaaaaattattctctgggaggctgagtttaaagtattaaacaagctttataaaaaagagctgagccagcgggtagattccaccgcgtcgatgaagaaccttgacgaatgtctccgccgaaagccgaagaaacccataaggaaatttattattttaacaaacccgacatctgaagctctcgccaaagaactcgggctgggatatccaaataaggcactctttaacgatgaagcagcaggtgtatatacgagcggtttgtataatgatccagcacctttcaatacattctggtgttgggataaagtcaccattaacagggtgtcacgggaaagctttgttattgaaaattatgttttttcatcttttttgatgatgcaaccttatccatataacaatggcagcagacagaaaagatcaaaaatcagatataccggattgctggcccgtactctaatgatagatctggagcagattacagaaatgtgcaccttcaatgagcactatgcacaggatgaagttgcgatggatgaactttattcagtgatgacggaacttatgaaggctggggttgagcgtagagaaaataacgatgaatatacagatcttaccctgacacctgatgcacaggtactactggataatacttcgtcgaatttacagcaacacatgaagcctggaggttccctgcatcattatgatgatataggtgctcgttatatcgagcaaagcctccgaatcgctggtgtattccagatttcttgtgaccctgactcgacagcaattacaaatgaaaatctgctatctgccttgcatctgacggannnnnnnnnncaacaagggagctcagcgatgttgaaaaactactga

SEQ ID NO: 84908 - DNA, 579 bp, Citrobacter koseri
atgaaattcttcatgatgaagcgtgtaatgctggcgattgcactccctgtacttgtcgcttatttcggaggaggtaaggtcatgtcagtttattgggtgcccctgttttttatcagtgcgatgctatgtgcaacagcttatggcaaatatgtcgtcaggaaaaacaatgatgctacattcaattatctgaatgaaaataatgatgggatctatattcataaattcaatgactgcgagattcggttagacaaaaataaacaagaagtatttcttaaaaatagcgcaggagcaaaaacctattcttttaatgaaatcaaagaatggcgctacaacattaaatatggaggtgaggttgcaggtgctggtttgagtagtatcagagagaacagtaaaacattaggtcaaaacatcgctgatacaggtctctttatccgggttaaagacattcgtaaaccagaatggcatatccggttctatcctcgtaatgatgctttcaattcgagtaatgggttaaatgatttgaagacgcagctcaaccaatggatggagatctttgatcagaatttaaatgctgcatag

SEQ ID NO: 84909 - DNA, 1200 bp, Citrobacter koseri
  misc_feature (686)..(695): n is a, c, g, or t
atgaagggaatgcaacaaatcaaaagaggaaaaacctttaatgggctaatttcttatttattaaaacctgcttcgcaccacaaatcagatccgagtgtggttggtggcaatgtgatagaaagcttcgcagaagcactaagtgcagagttcaacgctacgaagctcctgcgctccgatgtcagtaaacctgtatggcacaattctctgcgtctgcctgcttgtgagagtctaccaatacaacgatggaagctgttagccgacgactatatgaagcgtatgggcttctctgaaacgcatctacgagcttatgtcctgcatgatgataaagatggccaacatatccatatagtagcaagtcgcatcgatgcaacatccgggaagctctacttaggtaaaaatgaaaaccttatcagcacacgtatcatagaagagctggagcaggactaccagctaacaagaaccaaaggaactgatgccctgaaaccttcttccttacctgcaaaacgtaaaaaatcacgtaatgaagctatgttagaagacaggactggcgaaaaatgtgcaaagacgatcatacaagaagctatagatagactcattactagcaagatttcagaagatgagtttgtgcagcaacttgcagcacaaaagataaaagcaattctcaacagggcttcaaccggaaaaannnnnnnnnnaatgaacggtttctcgtttgagtacgccaacatttcattcaaggcatcccaattaggtaaaaagtattcatggaaaaacttagagccgttcatcatcattgctccccttgccgtagatgatagaaaagcttccattgccttcaatgcaaccaacccagaagaaattatcaagatagtgaaagctgatgccgtaagtttttttggtggtatagatgcagaaaacaccctgcttcctttatctgtcttgcctgtagtagatgatatctatcaagagaaagttaaaaccacaggtaaaagctatgtggacgtagcgatgcgatggatagaaaccattccttttatagacacgatagtcatcaccctcaaaaaactacgtaatccattgttaagggcgtttaaacagcctccgaagattttttctacctcactacttcatatagagctgccatcccttccatctgttgaaaaatccgtgaaaaccaacatttttagactgaaaatttag

SEQ ID NO: 84910 - DNA, 378 bp, Citrobacter koseri
atgaaagaaactatagcattaccattctgtaagaagaacaacaaagtcccagcaaaatcattgcgaatccattgtgtcagcgcccgattcaaccatgaagaactacagcttctcaacacgaaacgtggtgataaaagcaagggtgaatggctcagattagcttctcttgataagcttcccgtaatggttccaccaataaatatagaagcctggaaatcattagccgaaatatctcagaaactgaataacctaatatgccatcttgatactaaaagtagcggaggtgagcttaccaaaacagaaatcttcgctataaagcgtcagatatcagagcttcgctcatgcctcacagcttctgatttgccaggtggtaaatag

SEQ ID NO: 84911 - DNA, 183 bp, Citrobacter koseri
atgctcaatgataataaaattcgcactgcattaataaattttttactggctaaaaaaccagcgccagaaaagattattgaagaattgcatatcgagaatggaagagcaatagctgatgtcgtagcagcatatagttatttgcattgttacgagattaaagggctgtctcttatacacatctga

SEQ ID NO: 84912 - DNA, 1206 bp, Citrobacter koseri
atgtcatatcaaataaaaaaatttgtgatgagcaatggcgaacgaggatgtttggttctcgataaagaaacacagttgcctgtttgttatcaaaatctctatcttacaaccaatgtcaggaatagaagtgcgaccgcatcaacgatggagatagttgcaacaaacttactaatactaagcaatttcctcaaaagcaggaaaataaatataattgataggattgaaattaaggagttcctaagtgtagcagaagtggatgacctgatccgttatgcaaggcagagatttgataagcaaaagattacaaatgtaagattaataaaagggtatcagattgcaagaagaactttcggttatagaattcatgttttttcgagctatcttaattggctgtgcggtttacttcattctattaagggaattcatgctagatatgaagtcgagagtttcatagaaagtattagagcacatctcccgctaaataaatctcttagcatgaatgacagaaaagataaatcaatgagcaaagaagagataaaaaaactgtttgagttattagaaattgaaggaagccaaaatccttttcagaaggatgttcaaatgagaaacagactcatttttaccttactattgaattgtggtttaagagcaggagagctattaaatctaaaagttaatgatttaaatcctagggattacacactaagtattttcagaagacatgattgcattgaagatcgaaggctgaatcaacctttagtcaaaactggtgaaagggaaattccattgtcggacgagttagcattggagattttggattacataaataactatagaaataaatacaccaaaaagaagaagcatgacttcctgtttgttacacacagttcatgtaaaacagttggagaacctttatctgtttcagcatatgaaaagataatttcgactattaaaaaatcaagcccggaattaaagaatttatcaggtcataaattgagacactcttggaactatttctattcaagtgaaattgatgattcgaatttagatatcagccgaaaatcaggtttgaggtgctatctcatggggtggtcaaaagattcaaagatgtctgaaaattataacttcaaacacatatcaatgaaagaaaaggaagttattggaagagtttatgactctttgaggaaaataactaaaggagaatga

SEQ ID NO: 84913 - DNA, 1314 bp, Citrobacter koseri
atgaaaacaagcactttaaaaaaagagaatgtagtttttgcaatgatgaaggggtataggttcaggatttcagataataaatggcaattagatataaataattgtgtttgcccacataaggttgccgataaaatgccagagtcgatgcgtgttggttatcttaataccttggcatatttttcgtctgaatatagtgcaggctacataaagaatataaatcacatctttagccaatggctaagattaatggatcttgaaatgattaattccaaagcggtttatcaatttaatgttagcttaggccctgagaaaaactataagctaaattcaataaagaactttcttaataaatggaaaaaactcggttatgaaggagtagataactcagctctgagaatgctggaaaaaataaccattaaacctaatttaacaggggaagccgttaaacgaagagatccgaatagtggaccactaacggaagaagagctgaaaatcatacttgaaagtatcagaaaattgttgaaagaagataaaatccctctgtttatgtattgctacgttattctattagcaacaacgggaaggaggccatcacagctaacttcgttgaaagcgaaagatctcatcagaacggaagagggttgttttctaaatataccgaaagtaaaacaaaggaagaacttcagaagtgagttcagcataatgagaatcgacgatagcctgtatgaggaacttataaccttgattgatctgaaccagaaacatatcgaagatagggtcaagaggaatattagtcatttaaaaaatgaattacctatactcatggacattaaacaatatgtattaattgatactggacaaagtttagataccatcatgacaactgattttttacatatgaagaattcttctatctcaaacaaactaaataatttgactactaaattcaacatggggtcatcaagtaataacggccctatacggattaatgcaagacgatttaggtataccctgggaactcgtttagcaaaggaaggtgcatcagttgaagtaatagctaaagcattagaccataaatctataaactcatcagggatatacgtaaaaaattgtccagacaatgttcatgatatagacaagatgcttaatcctttttttgaaccgctatcaaagatatttcttggagaagaacagtcaaaaaacaagaagctctttactgaatatattttaaattcgttcggattttttaatgataaaaatgaccaaattgaatgtttcacttgtaaaaactttagagcctggagttctcaatga

SEQ ID NO: 84914 - DNA, 228 bp, Citrobacter koseri; identical to SEQ ID NO: 12412

SEQ ID NO: 84915 - DNA, 252 bp, Citrobacter koseri
atgagaaaaaataaaggtgatgtgacttattttcttgaaaaagaaggtgacaattacaggcttacaaaaaggataaaagccagaacaaatgttaaaatcgggaacaaaactacgaaaatcacattgtatgatgccgtactgaatgagaatgaattacaacatattgattttacgtgtgccggattaaggaaagacgatgagacgccagttaagaatttaattaaggagtttatgttaaatgaaacccgataa

SEQ ID NO: 84916 - DNA, 543 bp, Citrobacter koseri
atgaactctttttttgaacaatatcaccctgtctttgaagttgtctgccgtatcctggggaacggctggcgcgtgaacaaacttgatgattgttcgtctcgtataaaactgacgtcaccgcagtttaaaaattactctgtgcatattcggatggaaaaagaccggttttctgttgtggggagtgtggatagtcgctcctggcgtagtccgcatcatgtttgcacgttatccagaaaacggaatcccgttgatattgcagccgatatcgagcgaaaaattctggtaaatgcttcgcaggaggtgttacaggcgattgagtatgagaaacaccaggtggaaaaaaaggacgaaattatgatcctgaaaggtatgttatcgcaacttgtccagcttgaaagctggtatggggcattgacaggctttaaagctgaaaacggattgaacggtaaagtcaccgaacagggcgacagttatgatttacagattcggggcttgagtatagatcaacttgttaaaattacagggtatttgaaacagttatga

SEQ ID NO: 84917 - DNA, 516 bp, Citrobacter koseri
atgaatatccaggaagcattaaacgtttttggattatccggcgaattaactgaaaaagatatcaaagcagcatacagaaaagccgccttaaaatatcatccagatcgtaacccgttaggggctgaactgatgaaagcggtaaatgcagcttttgatgtattgatggcaaatattgataaaataaatcagttccagagtactgatgaacatgctcgatataattacggtgatgacctggaaaaagtattaaacgttctttctggtttatctggtctggtatttgaagtgataggtaactgggtctggattagtggagaaactattacacataaggaaactttaaaagaaatcgggtgtaaatgggcggcaaagaaaaaacaatggttttatcgtccagacgaacataaaagttactggaatcgtgaagaacacacgatagaagaaatccgcgcaaaatacggtacaaccggacagcgcagggcgacagggtggcaacgcgtggaaaccagagtctaa

SEQ ID NO: 84918 - DNA, 546 bp, Citrobacter koseri
atgattaatcaaagcattacaccagattacattgcattaaccaatggagaaatagagggcccagtcgtttcatgtgcaaataacatgattatcatgcgtgcaataaaaacatacaactgcatgataataaaaatcaacgcccccgatgaggcagggccctttgacatttatccgcaggccatatatggtctttttgatgagatagaatgtgcattagataaactgaatcggttgattaaagaaaccgatgataatattgaaagcgaaggactttctgaacttattctacaaaataatactttgacagtgcgtgaactgagtgaaaatctgatcggttttcttgaccactgtacgctacataattgtcttactagtctgaatattattattcattttctgagatatcctaaagaacctatggtaaatattgtgatgcttgcaggtacaacagacagttcgcaacgtgttagagagaagatatgtaaggcattgcaactcactagcaaaaagcttgctgatcgtaagagggaaggcaatgcagggtaa

SEQ ID NO: 84919 - DNA, 405 bp, Citrobacter koseri
atggctaaacatattactggttatgatgaaaaacacataacaaatgttataaataactggaatgaagatgagaagctaacctgggatgctttatgcgacaagttagtaaagattattggtaagagaccttcaagacaatctctaagtagtcatgtcaaggtttcggattgttttaattctaaaaagaagactctcaagtttggtattaaagaaacatgttctattaagcctgctaatttagaaatcgcttgtcagagaataaaaaggctagaaactgaaaacgaagctttgatagcattaaataacagatatttagagcagttcaagatatggctttataattctcatttgaagcaaataacagttgaagagcttaatagacccttacctgtaaaagatatttaa

SEQ ID NO: 84920 - DNA, 219 bp, Citrobacter koseri
atgctcgatgcgctttgtgtctgcgtaacgtttatcgacgagcttacggcattagacccgtccatcgtcagcttaatgagtacggttgagcataataatgcggcattaagaacctataaaatcaccaggaaaccggccgatggtatcgcatggtcaacgacgctggtgataaagcatgggctgacatatgagcagataaaaacgaggttaaacggatga

SEQ ID NO: 84921 - DNA, 549 bp, Citrobacter koseri
ttgctgcgtacgttactggcctttattgttctcgcggggctggcggcaatacctttaaaatcggtgattgaaaagcgctataacagcttcgtaaccgatatgcattcttacagtaagaataacagtaatacctcgattggcgcccgactcgcgatgcaaagagcgggtattgatgctggaaaaaaccactactggggccaatcacttgaacaacgcgatgctggaatgcgggattttgcccgacaggatacctcgttaagaggagcacttgggttcgtcgacatccatttgcataacgaattcattgatactttttctcttaaagggatttctggcgtcatcgctctgctctttttgtatctggcgatgtttttaaaagcttatacacaacgtagccctctgttattcatcatttccagtgctatagttatctatggtttaagcgacttattattatacgccaaaggtgaaactctgagcagtatgctggcattatgcgcggcgatgatgctgacaccaggcacgatgagagagttatgccatgattaa

SEQ ID NO: 84922 - DNA, 246 bp, Citrobacter koseri; identical to SEQ ID NO: 72370

SEQ ID NO: 84923 - DNA, 789 bp, Citrobacter koseri
atgctggccggcgcgcataacaccgccagcgggaacatggcggcgctcgacagcgcgcgtgggcgggcgcagttcgtcgggaaaagcatgataacgcttcctgatcagcccaaatattcaggagagggcaccgggataaaagcgataaccggcggggatgccgtggagatagacccgaagcacgaacaccagtacaccgccgttctgcgggcggtggttgtggccacgaacaacacgccgatgattttcaccgaacgtgctggcggcgtttcccggcgccgcgtaattttccagtttaaccggcgcgtcagcgaagaggataaggatcccgaactggcagaaaagatatccgctgaaattccggtggttgttcgtcggctgctggcaaccttttcggacccggaaaaagcgcgggcgctgctgctggaacaacggaacagcgaagaagcactggaggtgaagcagaaaacggatcccctgtacgccttctgtgcgcatctggagcgcctggctgattgcgtgggaatgctggtgggcaaccgtaacccgcctcatcgcccctgcatttacctctatcacgcttatctgacgtttcttgaggctaacggtttcgacaagccgctgacgctgaataaattctctgagggaatggaaagcgccatgcgggagtttaatcacgagtaccgcaaggagagaaagactcgcggcgtggtgacgaacgtcgaactttcagagagtgcggaggactggctgccgcaggcgcacccgttagctgaggataaaggataa

SEQ ID NO: 84924 - DNA, 408 bp, Citrobacter koseri
atgggcataaaagtgcgcggcgttcgccaggcaaaagccagccttgaccgttttattgatgacgttaaggggcgaaaggttattcgtgcaatacgttccgcattgataattatcgcaccggaagcggccagaatgactcctgttggcaagacatcaaacctcataaactctcagtttctggaagtgatggttaacggaacaagggttacaggtcgtgtgggttattcagccaattacgcagtatatgtgcatgaagctaaaggaactttaaaaggaaggccaagaccagcatcacaaggcggtggaaattattgggacccgtctggcgagccgaaattccttgagaaggccgcagataatactcgtgcagacgttgacagggctatcaagaaggagctttcgttatga

SEQ ID NO: 84925 - DNA, 684 bp, Citrobacter koseri
atgactgcattgaaagaaattggagagatcggcataagtgatagcagggaaggaggtatggactatattttccgaccatcatttctggctatgacgcgaattggagagcctgacgagatagtaaaggtcttcggtctgatccatggaagcgaaacacagagcatcattgacctcatcgctgacaatccatcattcaatgcaaacctgtttggaccatcgctaaatcgcgcttctgaccaccttgtttctgagtcgatgagagtgcttcagtgctgctgtgaaagtgacattacctgtttgactggcgagtggtctggagagaacgatcgcgttgtttatctgcccggactgatgccgaaaagcgatatcatcgtactcgctcaacaacttatgcaacacggcatcatcggcaaggcgaaggtcagaaagttacagcgaaacgaaacggatgaagcgacaaaagagtttcgcgctatcgagtacatcgttgccgctcagacgcatttcggcattagcgaagaagaagcttcccgcctgacaatgacgaagttccagttgctgcttgctgccaaatatcctgaccagaaaggcttcacaagagaggagtacgatcaggtagctgatgaatttatcgcgaaacaggcagcgcgaagagcaagggcggaagcagccaggaaaaattaa

SEQ ID NO: 84926 - DNA, 1236 bp, Citrobacter koseri
atggaaggatggcccgcgataacaaaaaataacagtacaagtaatacattcatgattggtgaatcagtcaggcctgatagcagacgttcaaaatcttacaatacaataggattcggtataaatcatatacattcggtttctcaaaaattaaatgaatcaagtgttataatgtcgactgaggatattttaaagctaaaaagaggagatcttagcgaaggtgaggagccaatcgttggagctgttacttcattatcgaaatttagatatataaacaataaaaatatctttggtatgaatgctggtgtttccggttttaatataatacacctcggcaaaggctccccgtactaccaaagatttacagatgccgtttctctttttaaaagaaattcagacgaaatgaatttaaaaagcaaagtttctagtattgtttttatgcaaggtgaagcgaattacgatacgcgagatgaaaacaacataagggataaagaaggttatggaaaaaggcttggagtcttatttgataacatgattaaagactcaatgttgataactggtcagaaaaatagcccattaatatttacataccaaactgggggaaaattctctaaggatgatttagatctttccatagggatggctcaacttgaagtttcaaacgctaagaaaggtgtatatcttgtaggccccacgtatcaataccctgataaaaacggtcaccttgaccctaacagctatcgatggtttggcgttcagattgccaaggtaatgcgtcaggttattgacaaaaaggaaaagtgggaacctttgcaacctaaatcagtattactttcggatgggaaaatagtagtaaactataacgtaccgcgtcctcctttgaagttttcaacgtcgtatgtgagttatgagccagtaatgtataaagataaaggctttacactatatgatagcaacggtcatgttgacatttcatctgtagaaattacggcacaagatgaaataaccattacccctgcgcgtaaaatcactggttcagcaaagttattttatgccgacaaaacataccataatggaaatggcaacgtttcagacagtgatgataccgtatcaccatataaatacgagtataaggaaggtagcgggcaataccctgaatcgaatattaaagaacttgtagggaagccatacccattgaacaattttagtgttgcattttgcttgcaagttacaaggtga

SEQ ID NO: 84927 - DNA, 1158 bp, Citrobacter koseri
atgctcaccgtcaagcagatcgaagcagcaaagccgaaagataaaccgtaccgcctgctagacagcaacggtctgtacctttatgtaccagtatcaggtaagaaggtatggcagttgcgctacaagctcgatggaaaagagaaggtgatgacggtaggtaaatatccgctcatgtcattgcaggaagccagagacaaagcgtggcttgctaaaaaggatgtgtctgtcggagtcgatccggtaaaggctaaaaagttgtcagtcaaagacaactcgttcgtctctatataccaggaatggtacgagcataaaaaacaggtatggtcaggggcatacagtacagagctgtcacgcatgttccaggatgacatactgccgatgattggcgggatggaaattcacgagatagaaccaatgcagatactggaagtgatccgcaggttcgaagagcgcggggcaatggaaagggctaataaagcaaggaggcggtgcggggaagtattcaggtatgcgattgttaccgggcgcgcgaagtacaatcctgctcctgacctcgccgatgcaatgaaagggtatcgaaagaagaactaccctttccttcccgctgaccagataccggcatttaataaagcgctagctggattctctggaagcatcgtttcacgcatagcgacacaggttcttcagtacacagctctcaggacaaaagaactaaggtctatgcagtggtcgaacgtcgactttgaaaccaggacaattacgatcggtgaagaggtgatgaaaggtcgccgagttcaccttgtcccaatgtcagaccaggtgatatcgctgcttcaaacattgaagccggtaacgcagcccgtttcaagttttgtgttcgccggtagaaatgacaaagcaaagtctatcagtgagaacgccgtgttgctggttattcgtcagataggatatgaagggctggcaagcggtcatggtttccggcaccagttcagcactatcatgaacgagcacggatggccagctgatgctatcgagaagcaactggcgcacgctaatagcggttctattcgcgggatctacaatcacgctcagtatatggataagcgccgggagatgatgcagtggtgggctgattggttagatgaaaaggtggcatag

SEQ ID NO: 84928 - DNA, 1254 bp, Citrobacter koseri
gtgcttaccgataccaaactgaaaaacctgaagcctcaggacaaactctataaagtttccgaccgcgacgggctgtatgtcgccgtgctcacttcaggctctgtctcattccgctatgactaccgcatcaacggacgccgggaaactctggtgattggtcagtatggtcgtgacggtatcagcctggcggaagcgcgggaagaactcattgcggctaaaaagttactcaagtcaggccagtcgcctgctgcggcaaaacgtgacggtatcaaaaagatccgtggcgctgagacattcgcggtacataccgacagctatatgaagcacgtcattctggctgacagcacccgcgccatgaagcagtcggttattgagcgtgacataatgccggtgctgggaaacaagatgatggctgagatcaccacatcgatggtgcgcgatctgtgtgacaggattgtcgagcgtggtggacgcgcgacggcagtacaggccagggagataatcagcagtgtataccgtcacgctaatgaccgtgggcacggtctgtttaacccggcagcagacataaagccgtcgtcaattgccatgttcaagccgcgagaacgttgcctgcaaccagaagagattggcattttcttccgtacactcgataccgtcgcggctatggcaacgatgaagctggcaactaaactggtgctgctgacgatggtcagaaaaaatgaattcatcaatgccacctggaaagaaatcgacttcaaaaaatggacatggactataccgtcagaaaggatgaaggggagtcgggcgcacgttatctacctgccaaagcaggcgcaggatctgatggttggattacagatgtgcgctggtggaagcgagtaccttttgcccgggcgctattcagtgagcaagccgttatccaatgctgcgctaaaccgtctgatcaccaccacagtggaatcagcacagtcggcaggatgcaaccttgaacacttcgctgtacacgacctgcgccgcactgccagcacgctgttgcatgaggctggctatccatctgactggattgaaaaggcgctggcgcatgagcagaagggcgtgcgtgcggtgtacaacaaagcggagtacgcccggcagcgtgcctacatgttgcagcagtgggctgatatggttgattgctggattaacggggagcacaccgatctggtgccgttctccccgtcgaagtttgagaagtggatggaagggctgtgttga

SEQ ID NO: 84929 - DNA, 255 bp, Citrobacter koseri
atgagtttggtgaccatgcaaatgaaaaaagtctggttttctccttccagaggaaggcattttctaaccagacgtgcagcgattagagcggaggcgcatgcaaaaatatttgagaaatatccatatgagcgccccgactacgaaaatggttttcttacctttcctggatactcaattcaacatgacgagccagatcgataccaaaaaatgctcagacgcatgatgcggttaatcgataagaatacggagaaataa

SEQ ID NO: 84930 - DNA, 177 bp, Citrobacter koseri
atgacaatgttcaatgaggcggagttaatccgccaacttgaagagcaacgcgctgtgattgtgcagcgcgacgatgaaattaaccggttgcgcggtgatgttgaaatgctaacggcggaactgagaaatgattctctttcgccatcagataacaaagacctggagcgtacagcatga

SEQ ID NO: 84931 - DNA, 648 bp, Citrobacter koseri
atgccaaataaatacacactcatctacgctgatcctccctggtcatatcgcgacaaggcagcagacggcgaccgcggcgccgggttcaaatatccggtgatgaacgtgctggatatctgccgcctgcctgtatgggatctcgcttcagatgattgcctgctggcgatgtggtgggttccaactcagccggttgaagcgctgaaggttgtagaggcgtggggcttccgcctgatgaccatgaagggattcacctggcataaaacgaataagcacaagggaaacagcgcgatcggcatgggccacatgacccgagcgaacagcgaagactgcctgtttgcggtacgtgggaaactaccggcccgcatggatgcgtcaatcagccagcacgtcacggctccgcgcatggagaattcacgcaagccggacatcatcagggaaaaactggtgcaactgttgggcgacgttccgcgcattgaattgttcgcccgccggtcgtcgcatggtttcgacgtatggggaaaccagtgcgacggcccggcggtgcaacttcatccaggttatgcgctggatgttgcaggagtggcgcaggcattcgcaaatgccccgctatctccatcagataatcaggggcgggagcgtgcagcatga

SEQ ID NO: 84932 - DNA, 228 bp, Citrobacter koseri
atgacaaaacatacaattgctggggccgatactcaggcatgtatttttgattttcttaaaaaaaatcctaacaaaacatctgcacaaatttcccaaaacttgggaatttctcaaaacgttgttgatttggcgataaaaaaattgattaaaggtggttttatcgaattcaaaaagaacaactttagcaagtcaataaaaaagattaaggagatgaggaatgccaaataa

SEQ ID NO: 84933 - DNA, 246 bp, Citrobacter koseri
atgaaaaatcaaacaggtggtccagcttttccagagttaggcaacgttggttgcaactcagactggcaaagtgaatctggaatgacgctgcgcgactacttcgcggctaaggctatggcatccattgtgcgcagatgggatgggcattcgtttggtggcggcccggaatcaccacaatacaaagaattagccgaagatgcgtattacattgccgacgcaatgctccgcgcccgggaggcatcatga

SEQ ID NO: 84934 - DNA, 303 bp, Citrobacter koseri
atgatttcaactcaacagcaacgcaacctgcaaaaaatcatggctggttttgaacgcgactaccgtgtggccgagatgcttcacgaccgccaggttgaactgcaggaaacactgaaaactgaatacctgcttccggcattcgacaatctgcgccgcgctggcgtccgtcaggaaatcatcaatgccgcggtagaaagcgtggagtttgaagaatcactggcggcattcatcagcgaactgaccgggatcgttggcaagtgggatgtagcagaccagatcgacagcgcgaggacggcggcatga

SEQ ID NO: 84935 - DNA, 150 bp, Citrobacter koseri
atgcagtggaaaatcattaacggttggtactgcgttacagcttgcggactgatgagctggaagtttcgcacgctgacagaggccattagctgggcattcgttaacaagctggcggccaggactgaaatggatatgggggtgagcaaatga

SEQ ID NO: 84936 - DNA, 1203 bp, Citrobacter koseri
atgaaacccgccgcgtactacaacgaaatagacccatttgcagcacagtggctgcgtaacctgatcgccggcggtcacattgccccgggcgaagttgacgaacggagtattgaagatgtcacacctgacgacctcagaggatttacccagtgccactttttcgccgggattggcgtctggtcccattccctccgcctcgcaggatggcctgacgataaaccagtctggaccggttcctgcccgtgccagcctttcagcgcggcaggcaaaggagatgggtttgctgacgagcggcacctttggccccacttcttccacctcatcagcgagcgcagacctgagcatgtctttggcgaacaggttgcaagcggtaacgcaaacacatggttcgaccttgtacaatctgacctggaaggaatgggatacgccttcgggcttgtgccgtttgcgtcagcgggcgtcggtgcgccgcacatcagagagcgggcctattgggtggccaacgccagtagcgaatacgaatcctcaaccggaaacgaagcgcggattgcagcatgtcgcaggggcggcgagattgacgggatggcagacccctgttgcgaacgactcaaccggatcgactcattgctacagcgggaagaatcaggatgggtcaccgaaggcctgcctgaaactaccgggcacggcactactgacgggatgggtaacgccgacatcacgagactggaaagacacgtctgggatgaccgcgcagcgggacgggaaggagcgactggaccagctacctcggcaggcatttatgaccgggtggcctactccgatggcaggttcttcggcaatgaacgggaacaatgcaacagtcaacacggacagcatgaggaaaacagtggtcctgtgcggaggggatttgaagggctcgggcgttactccaacctgcgagttatcagtacccttgaggttaacggtttttggcgagatgcggactggctcttatgtcgagatggcaaatggcgtccagttgaacccggcacattcccgttggttgatggggctgccgcacgcatgggacgagtcaagcccggggtggcaagagtggcaagcagcaaccgcgtaggcagacttaaaggctacggtaacgccataaacgcacaggctgcggctgaatttataagggcttatatgggggtgagctatggccggtga

SEQ ID NO: 84937 - DNA, 576 bp, Citrobacter koseri
atggacagcaatatcattgagttagtgaagttaggtcatgagcgcgccaacgaactgaaagcgtcatgcggtgctgtcgatgtgcgcagcgtggcgcaactgattagcgatctggcatcgcagcttgaagtgcagtatgtgcgtgccgaagagtcacagcgtgagttccgctctgctgatatcacaatgcagaatctggaggctaagtgcgaaaagctggctgcggagaatgcaaagcttgctgactgcgcgaacttttatcgactcgggtttaatccggtgaagggtgcttttggtatcgagtatcgaccaactgagcaattgctcgatgattgcggaaatactgcgattgaggcaatcaaaaccccggcgaccgacgctttcctggctgaagtgcgggccagtgcccttgatgagtttgcccgagcgcaggatgagcaagccagaaaatattatgagctttcgccgggttgttctgggcaaaacgaatgtcagtacgcggcaggtcaagcatggtattccgctgaatgtatacgtaagtccgtcgccaatcttcgccagggagccgcactatga

SEQ ID NO: 84938 - DNA, 273 bp, Citrobacter koseri
atgagcgttatccagtacagcgttaatggtgcaagccttaaacacgccaactatctcgacccgcgaccaattgatgattttgaagatgcttgggattacgagcaattggcacaggaagcagccgaggactattgggaaaaccatgacggttgggaaagtcgttggcctttgaatattgagttattcgccgatggcagcagcgttggaatgtttgaggttgtgatggagacggagccgacattctcagccagcaaaaaggagcaagcagcatga

SEQ ID NO: 84939 - DNA, 513 bp, Citrobacter koseri
atggcactgacacatgacgaactttgccagattgcctgccgttttctgaaaaacaacggttttaaggtggcgtttcacgatcgctttgtcgctgctgttgccactggtgagcaaccggacgcgatcggcttccgtaacctggcatcctgcctgattgaggttaagtgttctcgcgctgactttcttgccgataagaaaaaaccattcaggagaatgccaagccagggcatgggcgactggcgttttttcatggctgagcctggttttatcgaggtttctgatttgccgccagggtggggcctcctgcacgtcagaaacggacgcgtatacaaagttcacggctggccgggaaacgcgctgtggtgctctcgggagcataagccatttcaggccaacaaacaggccgaatgcgattacatgtatagcgcattgcgccgaatggatataagaggccatctcaaagaagtttatgacggcgtaatcgtgaacaagacagaaggaagcgcggcatga

SEQ ID NO: 84940 - DNA, 210 bp, Citrobacter koseri
atgaccactattaccagaatagcagcactcatcaccctgtttgtcatccccgctgcaacggcgggggaaaatcctcactgtgttaccaagaaagagtatccactcatcatcacgcagtgcgatgacggaacagtaactatagctagcgcgagaaaaggcaccgcttcagtgtgccgtaagggtgaggcatgtcaggagatttcactatga

SEQ ID NO: 84941 - DNA, 543 bp, Citrobacter koseri
gtgaaaaatatccagttatctgaacgtgagctttccatgatgctctgcgtgcttacgccaccctacgccatccgcgatacacacacagacgagttcaacgaattgcgtaacaaagtcttttacgctctgcgtgatgccaagaacgatgaacctgtaagttatcgtgatgagttgccagaggatgtgtctacagtccttgcggaggcttatcaggttgtcggagttatggctgaggcgcttggtgtgttcgatgacactgcggtgcagaaagttatggacaacttgtcacatcagaaactggttcatagtgacgtattgccattttctctgccgactgacaactctcctgtgattccggatagatggattccggtaagcgagcgggtgccggaaagcaacggtgtgtattttggctgggatggaaagcgtgtgttggaggtcaactgtttctttggtggcttctcggcaaatcaattcatccacggagaaataacccactggatgccgctgccagcagcaccgaagcaggaggtgagtccgtga

SEQ ID NO: 84942 - DNA, 252 bp, Citrobacter koseri
atgaatgatattcaacgctaccgtatggggtatttgggctggctaaaaaattccttttcaatggcaggcaatgcgattagcgatatggcatcagtggtattttctatagagatggcgtgcgcattgctatggatggcaataattctgacattcccggtatcaatgccaattcttgcactggtgcaaatggttgtcacccgacgtaagttgcgtaagcgatatggtcacgatgagctaatgagggatgactga

SEQ ID NO: 84943 - DNA, 282 bp, Citrobacter koseri
atgacgttgtgttgtaaacccgtgactgccagggaaggcaactcccattgctaccacttcgcccggttcgccgggcatttttttaaggtgaaaatgatgatctcaacaactgaagaaattaagaaacagacacctgaagaagaaattcgccgtgaaaacctataccacacgaaatgccagtgtctggctgaggttctttgtaaacagtcattcattgacaaaaattcagccaacaatgcagcagaagcgatcaacgcagcattcgataagattactttttaa

SEQ ID NO: 84944 - DNA, 543 bp, Citrobacter koseri
atgtgtaacccggctatcgcactggttgctgtcactgtggcatctaccgccgcatccatgtacagccagcgccagcaggcaaaatatcagtcagcagtggcagatcagaacgctgatattgctgaatcacaggcgcaggatgcaatcaacagagggaatatcgaggcagaccagaggcgccgggagatgcggcagcgcgcaggaacagcagcggcaacaatgggggcaactggcgccgagctaagcagtggaaccgcgctggatatttttggcgacaacgctcagttcggtactctggatgcgctaaccacagtaaacaacgctcaacgtgaggcctacggctatcaggttcagggtatgaactcacttgctcaaggtgaaatggacagaagtgcggccagatcaaatataactcagactcttcttactacaccgttaaatgccgccggggcttataagatgggtggtggagatttgaataaattgttcagtcgtgatgcagcaccaatttcagcagcagttggcactcgtacagggcgctaa

SEQ ID NO: 84945 - DNA, 705 bp, Citrobacter koseri
atgacaactcaaagaaaaccatccccggacgcagtatttaagttcgaatcatctactcctgttcgtatgttcaacattgatggaaatccatggttcgctgcatcagacgtttgcaaggctctttgcttgaccaactcccgcatgtcgttaaaagctcttgatgatgatgagaagggtgtaagttcaacttacaccgttaaaggtagccagaccgttaatgtcataaatgagtccggcctctatactcttatcctgcgctgccgagatgcagttacccctggcactatcccctatcgtttccgcaagtgggtcaccggtgaagtgctgccgcagatccgccggactggtagttacatcaaaaatgcactcccgcaagaagaccgcattaagatggttgctgatcaggttgccaatgccaccgcatcggcagttatgcaggctatgcagattgaacagaagaactacagcgccccactcaaaccaggctaccgcgacatgattcactcgccggaaggagtgattggactggcggatcgttcactgctgatgaatctgctgaaccagatgcaggatgacggccacgacgtatccggagcggcagctgagttcaccacgatgatcagctacatcgtcggtgccagtaaatgcctgcgcgatattcgcacgcacgcgcagtacatcaatagccaggctagtggattctga

SEQ ID NO: 84946 - DNA, 321 bp, Citrobacter koseri
atgaaaactctacctgcaacaactttgcgggcggctaaaccatgcccgtcaccagtgatcgtatggcaaatgcttctttcacgcctgctggatcagcactatggcctgacactgaatgacacgccattcagtgatgaaactgtgattaaggaacatatcgatgccggtatctctttagccgatgccgttaattttctggtggaaaaatacgaactggttcgcatcgatcgtaaggggtttagctggcaagaacagtcgccttttattactgctgtagacattctagaagccagacgggctatgagggaaatgagaacttaa

SEQ ID NO: 84947 - DNA, 864 bp, Citrobacter koseri
atgttaaattctgaaggtacaaaaccgttacagctctcactgtccgacctaccgcactggatgtctgagcgtattctgcagcatataaatgagcttactcactatgagccggtgattggtatcatgggtaaaactggttcgggcaagagcagcttatgtaatgccctgtttgccggtgagatttcacccgtcagcgatgtgaccgcctgcacacgcgaacccttacgttttcgcctgcagatgggaaagcgcttgatgacactggtggatttacccggcgtcggggagtctgagcaccaggatacagagtacgccgcactgtaccgcgaacagcttccccaactggacctggtgctgtggctgattaaggccgatgaccgagcgctgtcggtggatgagcacttttatcatcaggtgattggggaagcttaccggcataaggtgctgtttgttattagccagtcggacaaggttgaacccaccagcggtggtgaaaagctgtctacagagcagaaacaaaatatcagccgcaaaatctgtctgttgcatgagctgttccaacctgtaaaccctgtctgtgcggtgtcggtacgtttgcagtgggggctgcgggtgatggctgaacggatgattcgttgcctgccgcgtgaggccagtagcccggtagcggtacagcttagtacgccgcttcgtactgatgccgttaataaaaaagcgcgtgatgattttggtgaaacggtcggctcggtactggacacagtaagttccctgcccctgataccggccccggttcggacaattatccaggctgtacgtgacaccgtggtatcggtcgctcgtgctgtctggagttttttcttctga

SEQ ID NO: 84948 - DNA, 690 bp, Citrobacter koseri
atgagttattttgatatcccgcatgcagttcgtaatgcggttaaagccattgatgaagacgaactggaaaaatgtatcgataaatgcctatatgaagaacaatctcattatctgcaggacttcagactctatgattgtgggccttatgtcatgcagcaactatattgctttgaaaaagctgttactgctcttcggatatctaagtcatccaaaaaacgcgaagcagcaagatacacggccctgaaagctggccgtgatttggcagctgcatttttgcaaatgagagcaggagtttcagaggttgaagcagaagaagttacatttagtgtagatgaacaaaatgttccgccaacgacgtttagtgaagccctttctgttcggataagctacagctggcgaactgaacagggtgcaaactggcagttcggaagcattatattctcttaccttgcgaaagaacaaccaagctatttctccgctgcgccagcacgcaaaattagttcagccaggcaaaagcagacaaaacaagaaaatttgtaccgggactgggagcacctaaaagcaatatgcaaggaatctgtccaccgatatctaaaagaagggagagatggctcactgatcccaaaaactttcacagttaaaaacttgcataatttcggggcgaatttttgggatcgcaccgagacttag

SEQ ID NO: 84949 - DNA, 150 bp, Citrobacter koseri
atgagtaccattttgcgtgaaaaagggctttcacttggcgtggggcatcttgatggacgtggggagatgatgcagttgtatgcggattatattggtaggctggggaaagatgggggtgtggctaagggggcatttaggaagatggcttaa

SEQ ID NO: 84950 - DNA, 867 bp, Citrobacter koseri
atgattaactggccttcagaaattgtagacaatattgcccgaagaagaaccgttatttatcttggttccggcgtatcgatgaatagttccaatgcagcagggaaaagacctaaaacttgggttgctctattaaatgatatgctaacacaggtcccaccacctaaggcacatataacaaaactcctgaaagaaaatgacttgttaaccgcctgcgaaataattaaaaaaaaacttggtaaagaagcatttcttggctacttaagagcggagtatttgactcctggatatactcccgcagatatacataggcatatatttagtctggattccagaatcgtaatatctccaaactttgataaaatctatgatacatatgtgaatacacagacccatgggtcaactaaaattaaacatcagtacgatgatgatgtccaatcagcaataaaagaaaatggcagattaataattaaagctcatggctctattgacacacctgaaaaattaattttcactagaaaagagtatgcagaagcaaggtctaaatatagtggtttttatgaaatacttcaagcgttagttattacgcataactttgttttcattggttgcggagtgaatgatcctgacattaaattgctattagaagacactttctttaaacatggtagttataaatcacactactttataatgccatctaaaacaatacataaagatcaagctgaaataatagaaaacacaatgaatgcaaaaattcttagctattcatcagctgataatcattcagagttaactctttcacttgaacaactagttacaagtgttaatatatatagagatgctctcagagagaatgggaactggtga

SEQ ID NO: 84951 - DNA, 1005 bp, Citrobacter koseri
atgaaaagtatcgttttttttaataataaaggtggtgttgggaaaacaacattactgtgtaatatagcatccattttttcccttgagtttaaaaagaaagtattggttatagatgccgatccacaatgtaacgctacaacatactgcattaatgaagatgagcttgaaaaaatttattcaaaagcaaaaagagatactattgaggtattttttgaacccttaaagaaaggtaagggatatttgggggctactattacccccataacaacagaacgttttggctttgaccttattccgggtgatcctaaactttcattacgtgaagatttacttgcatcagattggaaatctgcgacatcaggggatgcaaggggtttacaaactaactttgtcattaaagatattttatataaatatgaaaatttatatgattatatatttattgatgtgggaccatcattaggttcacttaacagatctgttttaattgcttctgattactatctggtacctatgtcagttgatatgtttagtctttcggcaattgaaaatatctctatttcgttaaaaaaatgggagcaatcaatttatagaagtttagagcttcatgaggaagaagaaaatgataagtttatgatcgcaggaaaagaaatcaattggtctcttaaatttgttgggtatgcagtgcaacaatacacagcaaaaactgtaagtggtagtaaaaggcctgttagagcctatgaacgtatcaataagaaaataccatctctaattaataaatacctaattgataatgaaacttcaaatattgacagttataagcttggggaaatacagaatcttcacagtcttgttccattatcacaatcggctaattgtccaatttttaaattaaaatcaagcgatggtgttgttggagctcattttacaatggttaaggaagctaaaaatatcttcgaaaaaattgcgaagaacattcaaaatcagatggaggctgtagaatga

SEQ ID NO: 84952 - DNA, 1368 bp, Citrobacter koseri
atgaatgctaattgggagataaaaaaacttggagatgtaataacattacagaggggccatgatcttccttctcaggatcgacaacatggtcaagtacccattatgggatcttcagggatcactggttatcataatcaattcaaagcgaaaggccccggggtaattatcggacgcagcggtaattccatggggcaggtttcttatatatcagaaaattattggcctttgaatacttgtctttatgttactgatttcaagggtaactgcccagagtttatttattactttcttaaacaaataaattttgaacagtttaattctggaagcgcccagaaatctttgaatagaaatgctgtttacccttttgaggttaaattccctacttcctacaaagctcagtcaaaaattgcatcaactctttttgctttagagaataaaataaagttaaatcaagatattaaccaaaccctcgaacaaatagcgcaagccctgtttaaaagctggtttatcgattttgaaccggtacaagccaaaattatggcactggaagccggtggttcgcaggaaaatgcaacgcttgctgccatgacagcaatttcagggaaaaatattcatgagcttgcgattttggaacatgaacatcctgagcattatgctgagttaaaagctacggcagaactatttccgtcagctatgcaggagagtgagctgggaagtattccagaaggctggaaaatatcggctatccaggatgtagcaaaaatagtaaaaggtaaatcgtataaaagtacagaacttgattgttccaaaacagcattggttaccttaaagtcatttaatcggggtggtggatataggcttgatggtcttaaagaatatacaggcaagtataaacccgagcaggaggtttttgcgggtgatttgatcattgcttataccgatgtaacacaggcagcagatgtgataggtaagcccgcaatggtaataagtgatactagatacgaacatcttgttatatcgctcgatgttgcagcagttagaccttttaatgatagcctaaaatactatctctacggggtagcaagaactgaacaatttcaaaaacatacaagttcacattcaacgggaacaactgtactacacctaagtaaaaatgcggttcctgattataaattcatattagctaatgaagagttggttaacatttactcgaagcacgccagttcgatattttctaaagttaatacaacaattgaggagaataatttcctctcagagcttagagacacactgctccccaaacttatttccggagaaattactctaccggaggtagaggaaatagcaaaggaagctgactatgtttaa

SEQ ID NO: 84953 - DNA, 984 bp, Citrobacter koseri
atgaccactctcgttttttcatactcccatgcagatgaagccctacgcaatgagcttgagaagcatctttcccccctgaagcgcatgggaaagatcagcacatggcacgatcgccgcatcgttccagggcaagagttcgagaaccaaatagaccactacttttcgcaggcagatatcatcttattgttaattagcagtgatttcatcgcttctgattattgctatcaggtagaaatgaccaacgctctggagcggcataaacggggcgaggcggtggtcattccggtgatcttaagagaatgtgcctggcatcagctaccgttcggcagcattatggcggcgaccgttgatggtaaacccataaccaagtttgccagccatgatgaaggctacgttcaggtcgtcaatgcagtatcccgcgccattgctaatatggaagcgaagaaaccacagcagagtgcttatgtttcttctcctgcgtcagtaaacccaatgcttcaggcaacggataacgtttttacaccacgctccagcaatctttcgctgccaaagcgttttaccgaccttgataaggatcgtgcctgccgtgatggttttgaatatgtcgtccgttactttgaaggatcgctgactgaactcaaaaaacgccatgctgggttagaggtcgattttcaccagcgtgatgcagacgccttcacttgtgcggtctacatgggcgggagcaaagtcggtcaatgcgcaatctggcgtaatagcgggcgcaatatgggtatgggcgatatcggttatagccaggatggcgtaattggaaatgcctacaatgaaatcttaaccattgacaacaacggtcagctcctcggtttccgcccatcaatgggagtctatagtgctggctactcaagggataccttgctcactaacgaaggtatggctgagcatctatgggatatgttttttgagccgataaaacagcgggcaagttag

SEQ ID NO: 84954 - DNA, 1032 bp, Citrobacter koseri
atggacttaccagaatcattcctgttatctcatgctgagtatcatattgagaataatactccccacgttatcatttctgatgacaatgagttcagattaaaattagaacagctggatagctgccttaaaactatcagcagaggacgtaagttaccttttactatgctgtataaccggtcaggttttaaagagactgcggagtcagccatcattcttgatgccattcgttacctcaatatgtttccgcaagatgcgatgaaggtacgaacagccaatccacgtattgcggcattccagcatttattcacaagcgctgatttacatgcccggatctataacggaaaaatagtgggagcagatgctgttaccacagcagaaatgctgaataagctggtgcaggattaccgattcgctatgagtcaggcaggatttaaacaagcatgcagaaagtaccaacgggcttcggttaaaaacctcaagggagtgatgaattacatcagacatctgcaggagcgtcattcccggctattggtgcttcgtgttgatttttcatgggcagatgagcataaagctgacatcactgctgatgacgcccgcaagcaccgtcagcagttttttcgcaatatgcaaaagaatccattgtttcgccatgttctcgggacggtgtggaaactggaatatgcaccacaacgtaaatttcattaccacatgctgtttatcttaaatggcaacaaagcacaacaggatggcgtgattgctcatgctttcggtgaatactggaaacataccatcactcaaggtaaaggcatctactacaactgcaacgcccataaagcacgatataagaactgctgcctcggcaaactggaacgcggtgacaatagtaaggatgaggggttgctcgaggctttaagctacatcacaaaaatcgatgcctttgcacgtctggtcctcccggggaatgccagaacctttggtcgcggagaagtacgttcactgaaaaacaggaagagaacaaaaagaggccggtaa

SEQ ID NO: 84955 - DNA, 204 bp, Citrobacter koseri
atgagcattattgatattcacaacgataaattcgtagatatgcgtttcattactgaactgaccggtcagtctgataagtggttttacaaaataatacaagaaggaaaattccccaaacctattaaatttggccgtagctctcgttggcttgagcgtgaagtaaaagagtggctggaagaacgagtgaaaaactcaagagcatag

SEQ ID NO: 84956 - DNA, 1050 bp, Citrobacter koseri
gtgagtaaaaaggctcaggatgtgaagctcagaaatgaaagagagctgagattttatcgttggttttttcagaatgattcagcaatattaagttatcagttaaagccgactggcagcatgcttaatataaatcacttgtataccctggatgtcaggaaagcttccgacgttattaactcggcaattcgagtcttttatcatcctgaaattgcgcaggggtatggagaaagcagtcggcgagaaataagcagcaatttattaccccaacaggagttttcatggttcaagaaatgccaggatgcctgctattatgtatggttgcggatccgggttactgatatcaacaatatcagttacaatcctttcattcctctttcaggtcttgctacccctttaattccacgagagaacatttataatctgctggagcttgtttcatatccggcaagccatcaggagaggctacaggttattacggatttttttgatagacttagcacaggactgaaagataaattagcattaatgaagagcataagaagtgagtggtatgcactttatatgcataaagacacttttcctctgaagaaaaatgaaaaagaaaagtgtgaatgggcatggaattatatccaaaggaacagggttaatatcagggagggagcaaaaaaaagaataaataataaaccgagcagcaatgtaaatattgcccataatggagaaaatcaggaagtatatcctcaaaaatatgtgtctactttatctgaattagcttcagcacatcaggtaaatacactgaccagtctgcattattacgcgatgcaatcccccacagcagaaaaactcaatccagacagaaaagatagctcattatatctccacgcaggcagcctgatgccatttttaaaacctgccagcgataatgaaaaaagactgattatccgatgcctttacatatgctggtttcatacagacgataagtttatcaaccgatttcaaaaagcgtgggaaggtataaacgccagaaagaaatcccgggaacgcaaaagataa

SEQ ID NO: 84957 - DNA, 435 bp, Citrobacter koseri
atgctgaagcctccctctgccttacttttcagcgcggcattattcaataccgctgcgcacgccgttattctggaccaacaatgggggaactggtacgggagcatcagtgccatggagtttgagatcaatactcaaaatgcttcaggtgaagtgctcacactgacctgtacaagcggaaagttagctgttgcttatagcgttcccgcagaagactaccgcgtttcttccctgacaggagttgcagaaccgagcatcagcgttaacggtacaaatcattctctggatgaaacggcctttactgcactaaaagcaacaagtgaaaaagacgtaataaaaatgacctctatgaatgccgctatctctagaaaattcagtgctaaagggctgaatgaagcgctagccgatacctcatggcaagactgtattaatcactaa

SEQ ID NO: 84958 - DNA, 804 bp, Citrobacter koseri
atgcataaaataattgctttatcgctcagttcagtcgctctgcttattccatctatatcttctgcattgacagttcacggagatatacatcccgaacgttatacctttttcctgacccaggaaggtagtagccaactaaaacaggcgaatgatcgactagccaggaatccacaggcctacacgcttgacgtgaaccatacaggcattcagccctttgatgcagtccggtgggatggtaagcctgtaaaggccgtcacctgtgtgctggtagacggcattatgatggggaaaaaagctacctggtcacaatgcaaagatgaaagtggtgcggaatatttcggtaatgcgggatggcctgtacgtgattacgtagcaaaagcgtgtgaagtaggcaaatcagattgtcctgtttaccttgtgcttcagacagatcctccaacaatgcgcagcgatatggctaatttcgttcctgcccctaaaaactttaatgcttctgcaaacctgacggatgaaattaaaaacgacggatgtcagatggctaacaattcctttgaatatgcgaaaagcagtattcgttgttctgcaatcaacaccgtgcgttttattcgcaaacaaaataccgaagccaaatatgaggctgatctcaccacaacttcaggcgaaaacctaacaatgactgtcgggtacacctatgggaatgcatccagcaaagaaccaagctggcgtaccatttctgtcaaagaggggggcattattactgatatccgcaaacagggccaatggatccctaatggctacaagtag

SEQ ID NO: 84959 - DNA, 450 bp, Citrobacter koseri
atgtctgaaaatagcacaggaaaacttcgcagccttacagaaaagctgaatttcccacgcagtaaagcatctgccgaaaaccaggatatatcttctgaatgtttaccggaaagcacggctaaacctccggtaagtggcgctgacaaatacagactgttactggagaatattgtcatcaatggcctgctgaatattgccgaggataaacttagtgatgatgcttttgttgaagttgttttcagcaaagcatatgagcttttgcctgccccgatcaggatcgtcctgaagcgggaatggtgcctgagttaccttcagtcgcaaaaagcgccgattctgatgaaactgcaactttaccgcgaaggaaagcttagtcctaccgaactatctgcattgccgttaccagattcagaaaaggctgcatcgcagatacaaccttcggtattgccttaa

SEQ ID NO: 84960 - DNA, 474 bp, Citrobacter koseri
atgcctgaactgattttacctccggccttcccggtgaatgaacagcgtattatccgccgcgccatgcgcctgctggagaaatacctgcgccagcctggtgagcagtttcttgccacgaattgtacgaaaacctggctacaactgcatctggcgcgacaggaacgagaagtctttgtcgtactctacctcgataatcaacatcgcctgctggaacatgaaactctgtttctcggcacgatcagccataccgaagttcatccccgtgaaattgtaaaatctgcactgcgctataacgcagcaacggtgatagtcgcgcataaccatccgtccgggattacggatgcaagtaaggcagacagaaccatcaccgcccaaattgtaaacgctctggggctggtcgaggttcgggtgctggaccatttcattatcggtaatggcgaaatattgtcttttactgaacggggctggctgtag

SEQ ID NO: 84961 - DNA, 327 bp, Citrobacter koseri
atggataaacacgatcccaccgaatgggggcttcgacgcgatatcacgccgcgtgtaggagcacgactggtacaggaaggaaatcaactgcattacctggctgaccgggccagtatcaccggcacctttaatgaagctgatagccgcaaactgaatgcagcatttccgcatttcgtggagcagatggagttaatgctactctccggggaactaaacccccgttatgcgcactgtgtcaccctgtaccatgatggatttacctgtgaagccgatacgcttggctcttatggttacgtctacatcgtcatttaccctactcaacgctga

SEQ ID NO: 84962 - DNA, 342 bp, Citrobacter koseri
atgaaaaccttacctgcaacaactcagcgggcggctaagccatgcccgccgcccgtggttgtctggcaaacgctacttacccgtctgctagagcaacactatggcctgactctgaacgacacgccgttctgcgatgaaacagtcattcaggaacatattaacgccggtatcacactggctgatgccgttaactttttggtggaaaagtacgagctggttcgtatcgatcgcaggggatttaactgtcaggaacaatcgccttatctgcgggctgtagacattttgcgggcgcagcaggcaaccggcctgttgcggcgaagtcatcatcctgcgacgcgctga

SEQ ID NO: 84963 - DNA, 789 bp, Citrobacter koseri
atgcaaaacaaaattaaagaacttcgtactcaactatcaatcactcagcgtgaattggcggatatggttggtaccagccagcagcagatccaacgtatagagacagggaaagttgcggccaagttaggactggcgcaggcgataagcgctgtcttaaagaaacctttgaatgcagtttttcctggtaacgatactttattgcaaaaagtgcgcaatcaaagtagccgtagtgatgatgatctggaaagcatcgccgctagtggtattgaaatggatggctgcatttggacggtgaaactctggttacgagggcagcaaggttattttctgttacccatttccccggctgataagcgtcgtttttactcatactttcaggaaagagctgcgcctggttacgagcatttctttgttttcgactctgaacagcatcgttatgccttaaatgcgcgagaggtgattttccaccaattcttgtttgatggttttccacctatccctgatgaagaggcaaatgaaggaagatatgggaacgtccatatcaccatggtgaacggtggtccggttattgagctttactgtgagccagatgagtccgaggacgaaagtaatggcgatatcggtcagttgaatgcattttttgacattttggaatcagagccggaatcaaccgagaggtatcagttaaccgacatagatggagaagatgctttcatccgtattggttctattgcgatggtgcgaatcgcgcttgacgcgttagagcctgtggaagacgatgaggagtaa

SEQ ID NO: 84964 - DNA, 126 bp, Citrobacter koseri
atgaagctggacgttgacggcaactacaaaatggccgcatctccggctttttttgtttataacgcctcgggccggatcttttcactcactccctgttttgtcaatctctctccacgcaacttctga

SEQ ID NO: 84965 - DNA, 807 bp, Citrobacter koseri
gtgattaatgaaataaaaaaactaaccgaccagattgcaataattagtgatagtaccacttcagaaaatttatcatcggctcaagtaactgaagcaatcgaaactgaacttgaacatttacgagaccaacaagcaaataacgcagagttaatactacttggcatggctctttccgtagtacatcatgaatttaatggtaatattagggcaattagaagtgcgctaagggaattgaaagcatgggctgacagaaatcctaagcttgatattatataccaaaaaatcagaactagttttgatcacttagatggttatttaaaaacctttacaccattgacaagacgtttaagtcgctctaaaacaaatataactggaactgctattttagaatttatcagagatgtattcgatgatcgtcttgagaaagaaggaattgaattattcaccacctcaaagtttgttaatcaagaaattgtaacttacacatcaactatttatcctgtctttataaatctaattgataacgcaatatactggctcgggaaaacaactggagaaaaaagacttatacttgatgctactgaaacaggatttgttattggtgatactggccccggagtttcaactagagatcgagatataatatttgatatgggatttacacgaaaaacaggagggcgtggaatgggattattcatttccaaagagtgtttatctcgagatgggtttactataagattggatgattacactcctgatcagggtgctttctttattattgaaccatcagaagaaacaagtgaatag

SEQ ID NO: 84966 - DNA, 234 bp, Citrobacter koseri
atgaaaattgaattaaccattgatcgtactaagaaacttcctgatggcgcagtgctagcattagaagctgaactgttacgcagactcagtcagagctatgaagatgtgaaactgacagttcgtcgcgccggagctgacggcctgagtattctggggggtgaaaaaggggataagcagtgcattgaggagattctccaggatacctgggaaagcgctgacgactggttttactaa

SEQ ID NO: 84967 - DNA, 213 bp, Citrobacter koseri
atgctcgaaggttataatatttatgacaatgatgaggcaacgaccaagatgaaccgcttaatagcggtcagggcagctttggaaattgcaaaggcatccgtagttgcgccaacagcctctgtatattgccgcacaggcgagcatcttgaggccgtctcgggacaaattgaaagtcttgcgtcagcaatccaaaaagccgtagaaaataaataa

SEQ ID NO: 84968 - DNA, 207 bp, Citrobacter koseri
atgacaacgataatagggcctatcactttaactcttgatatgagagagcaggttgcgcgctctcgcgaagtgcttgaagaattgcagcgtcgagttggtgagcttagccctcgaatttcagaggaggacgccctgcgcattctgctcctcgatatgacctttgattatctgaagtccaagagcaaggcagaacaaacaacggagtaa

SEQ ID NO: 84969 - DNA, 279 bp, Citrobacter koseri
atgacgacacttaaatctgtactggcggcaatcggagttgcgatcctgatggtgcttggtgcgtttggtgtgggccgttttcgcggtcgtgaacaggctgaagaaaaagcagaccggcagcgcacagaagaaaaggcagcagccattgagtcagtagccgaacgccgtgtagaagcaacgaaagaggccagcaatgtacagcagaatgttaaccgcatgcctgatgacgatgttgatcgcgagctgcgtgacacgtggaagcgtcccggtggtggttga

SEQ ID NO: 84970 - DNA, 543 bp, Citrobacter koseri
atgaccaaagacgatatctttaacaccatcctcggcaaagagggcggttatgttgatcaccctaatgataagggcggcccaacgaactggggaattactcaggcaaccgcccgagcgcatggttataccggtgatatgcgaaaccttacacgtgagcaggctctggctatccttgagtctgattactggtatggcccgcgctttgaccaggtggcagaagtatcccctgccattgccgccgaactatgcgataccggtgtgaacatggggccatcggtgcaggttaaatggttccagcgctggctgaacgttttcaataaccagcagcagctctatccggatctgatcgccgacggccagatcggcccgcgtagcatcagcgcgctgaagtccttcctggcgaaacgaggcggagaaggggaaatcgtattgcttcgcgcactgaactgtagccagggccagcgttatcttgagctggcagagcagcggccggctaacgagtcattcgtttatggctggatgcgcgagcgggtgagcctatga

SEQ ID NO: 84971 - DNA, 690 bp, Citrobacter koseri
atgaacagtcagcaactggaatacgtacgtcagcagctcattgtggcgaccgcagatctgagcggggcgacgaaagggcaactggtagctttcgccgagaacgcgcagttcaccgcgacggcgcgcagccggggccggaagaaaatcaccgatccggtcaccggccgaaaagttaatccggacggcccggtgatgagcggcagccagtcgcgcgccaaaggatcatctatcgcgctggtgggcccgttggagttcgttacggcatcctggcgccgtgctgtcctgtcgctggaagaccaccagaaagcttggctgctgtggaactacagcgaaaacgttagttttgagcaccaggtggcgatcactcagtgggcgtgggcagaattccgggagcagctcggcgcgaagaaagtggccggcaagacgatggagcgcctgaagaaactgatatggctggcggcgcaggacgtcaaagcggatttggcgggcaaggacgtgtatcagcatcaggacctggccgctctatgtggcgttaaaccagataactggtgccataactacgccgactactggcgggccatgtgcgccatcttcaaacgccttgatggtgattctctccgttgcactgtgagaacacgatcacaacaaaagacgactttttcgcagcagggtattgcaaaagtcaattaa

SEQ ID NO: 84972 - DNA, 180 bp, Citrobacter koseri
gtgagcacccataacaccctcgctttactcaactggtaccgctcaaagcatgtcgctgcggtaaagactcccgcaggcattgtattcatggggatgcgtaacatcacggccgagcagcgaaggacgcttctggcaatcccgcaagttgagctcgaagccgcgatgaggattcagcaatga

SEQ ID NO: 84973 - DNA, 639 bp, Citrobacter koseri
atgcgtaaacctacccgtcgcacctgcaaggtctgcaaacagaagttcaccgccaccttcgacaacgtctggtggtgctgtcctgagcatggcgccatctacgcgctggagttgagggcaaagcagaaggtcaaagaggccgctaagcgtatcagtgaacagaaagaggcagagaaggccggacgtaaacgccgtaaggccaagcgcgagtcattcaagtccaaatcccagtgggataaagaggctcaatcagctttcaatcgctacatccggatccgcgatgaaggtaagtcatgtgtcagttgcggcaatccactcatcggcaaaagcaattacctgactggcagcgccattgacgccagccattaccgctcacgcggcgctgcctcacacctcaaattcaacgtgtttaacgtccactccgcttgcacccgctgtaaccggcagttgagcggcaatgccgtcgagtaccggatccgactgattgagcgtattggcctggagtgtgtcgagcgccttgaggctgacaacgagccgcgcaggttcgatatcccataccttcagcgcatcaaatccatttttacacgcaaagcccgcgcactggaaaaacgccgggcccgtcgacaggaggccgcgtga

SEQ ID NO: 84974 - DNA, 138 bp, Citrobacter koseri
atgtccactatgactttcgtcgttgagttcgaagatggcaaagagccgccagtacacgcgcatatggaggtgtttggcgggaaggtggtcgcggttgctttccgtgacgcgttggaagaaccagaagaggatgaataa

SEQ ID NO: 84975 - DNA, 855 bp, Citrobacter koseri
atgagcactattaccagagaacaggcgaaagaccttcgcaacgcattcgagtgctggcagcaggactatgacccggcagcagataaagagcagtacgaaatgtttggccttggtgtcgtggcgatggatgtactgcttgcatcgcttgacgctggcagtgacagcaacaaccacccggctagcggcccgctctcaaatgatcgcctgcaacgcattcgtgaaatcctgagcaaagcagcagcgcaaagagacggcggcaatcttggttacgcaatgtctgatgctgtgaaagcgattgatgaactgctggaacgccgcaaggctgatagcgagccagattacatccgctatgactgcggttgctgtgggtgggaaacgctcacggactggcgtgataatgatgtctgccctaaatgcaatcataagccgatgggcaaaacggagttattcaccgccccgccagcgccggtagtgcctgcaaccctcccgtgcgccgttgagttaaagccaggtcttattatcggcaagggctgtaaaacagagaccttgctgacagcgctgcaacgtcgcaccaattattacgctgagattgacgccatgacgccggaagagcgtgcagaacatgaagccaatatcgaagcattcaaagccatgttgccgcagccatcgctggtagtgccggatggcgtggcgcggaaggattttgaagtctgggcaagaagcgcaggttttaatgaagattggtatttcttcaccaatacgcaccctaaccactacgatgatgaccacgtcaacgatatgtgggccgcatggaacgcctgccgcgccgcaatgctcaacggaggtaaatcgtga

SEQ ID NO: 84976 - DNA, 621 bp, Citrobacter koseri
atgagcaacatcgacaaacgcgcattacgtgaagcggcagagaaggcgactcctggccgctgggaatactacccgggaaacacgagcattgaatataacgttgactctatggatgaaggtcaggggtcaatcgtttatgtcgacagcggtgatttcacgcaaaagcagactgacctgaacggcgagttcatcgcatcagtcaatcccgccaccgtgctggcgctgctggatgagttggaagccgcaaagcaggattcagccagatggttcaaggcgttcgagaaatccgtttccgttggcgctcgatatgaggaacggattgctgaacaacagcgcagtttagaccagcgtgaatttttgctgtcaagcaccgatcaggtgcagcgcgaatatgccgaggcgctgggatgtgctggcgataacgagtcgattctggaagctatcgacgacatgaagaagcgcatagcagaactggaggcgaaactccaaaccgctgacaaattgcaggacagcgcgtttcgtcatggtctccagcatgggttcagccttggtcaaacagataatcaggctgggtatgagcaatgcctggaggcgtacagctcaaagggaaaaggagagtga

SEQ ID NO: 84977 - DNA, 192 bp, Citrobacter koseri
atgagcatgaaagctgatatcactgaactcccggcaaacattggctatggcgtacgtcagcgctggcacgctcagcgtgggcaacgaaatggtcgaggtgggagatatcagcgtctgccgtcacgacacaatttaagaaaatggattgcaaagcgcttgattgcagaagttttagcggaggcctcccaatga

SEQ ID NO: 84978 - DNA, 138 bp, Citrobacter koseri
atgttagcggcggaatatgaatcgaaaatcgagccatataaaaatcacgatgagtttatgaatgctcattacctgaaaatgcaggccattgaagcgcgcaacttcgccgcccagcttcgcaaaggagtgcagtcatga

SEQ ID NO: 84979 - DNA, 252 bp, Citrobacter koseri
atgaaaccgacatacgaagaacttgaagcgcagattaagcagttggctgcggagaatgcggtgctgaaggcgtttggcgacaagctatacagtatgtacaaaggtctggagacttcaggcggtggcttccatgacgagcagtcaattccctatcagcaagcagcattggatgcagcaatgtcggcatttgaggaaatagaaaccccggctaccgacgctttcctggccgaagtgcgggtgcagggtgtgtaa

SEQ ID NO: 84980 - DNA, 570 bp, Citrobacter koseri
atgcattcacttgcgtatcaagagaataccggattcacggcgaatccgatgatttcgaattatcaaggcgttccgcgcaataccagtaagctaactcgtattcgcgaagccgttcgcgcctggcagagggcaacgccagggcaggctcaggtccacatttcgcaactggtagccaaagagtggctggcacgaggcggtcgtgggttattgctggccggttcagagcacaacacaaagcagaacttcttccggatgattaacgatccgggcccgaagaacgataaagggttggtgctactgatccccgtcattgtcgatgtgatggcgcgggataacgagcaggtagcgcgtcagttcggcctggtgaacggtaaaacgaaagaggagttgattgctgatgccatgaaagagtgcgcggaagcgcatcaggcgaagctacttggtcagccgatacaacgccttgagaaagaggtgagggaagctgctgaatcgctgctgagatttctgccaactgaatcaattgctgcggtagtgacaagtttggccgctatggcaccgggagttatgtaa

SEQ ID NO: 84981 - DNA, 228 bp, Citrobacter koseri
atgacgaacaaaacaatccagcgcgccattgatatcgctggtagccagaagaaattagccgacctgtgcggtgtggcgcagccaacggtatggcgctggttgcacggcggtggaatcgatgcccgttacgtaatgaagattgtgtctgcaaccaacggcaagctcaagcctgcagatatccgtccagatctcgcccagttactcggggcgaataacacggccgcctga

SEQ ID NO: 84982 - DNA, 651 bp, Citrobacter koseri
atgtctcagggcgctttagctaaagcggctggcattgctcagcccactatctggaggcttaccagcggaaatgcgcgtggctcgactaaaatcgttgagatcgccaatgcgcttggtgttcgcactgagtggctttcaaccggaattgggccgatgcgtgccgatggtcaaattcctgaaatttcgcagccaaaaacagagcttgcacctactgacacttttagaattgaagcgctagacttttgtgtgagcgccggaccgggcgccatcaatagcgagtttgtagaggtgcttagatccgtggaatattcagtcgaagatgctcgccggatgttcaatggcaggaaggcagaacaaataaggattatcaacgtccgcggcgacagcatgtctggcactattgagccaggtgatctgttgtttgtggatatcagtgtccagcattttgacggtgacgggatctatgcgttcatctacgacgacacttcgcacgttaaacgcctgcaaaaaatgaaagataagttgctggttatatctgacaatcagacctaccgtccttgggagccgatcgaaaaagaagaaatgaataaaatctttgttttcggcaaggtgattggtagcatgccacagacatacagaaagcacggttaa

SEQ ID NO: 84983 - DNA, 282 bp, Citrobacter koseri
atggaacgttttgcaaagttatttgaaagccacggacggcagattttggtgaagaaaggtgaaaacagtgacggtgacaacgccctgtgcatctcaaccatgtttgacggtgctgagatgtctttcaacttgggattcggcgacaacgaagaagcgatggttcgcgcgcttgaatccttcacccaagagcaggctgatgtgtttggtaagaaattcgaaggccacgcgagcgcgtttgaggctttcaaggcgctgacaaataccagcgaaggtgaagaataa

SEQ ID NO: 84984 - DNA, 387 bp, Citrobacter koseri
atgagtgatacgtaccaggctgtatatgacgcagtgagaagcaaaattagcaatgcggacgttggttcggcgatagagagtgcaatgcgtgatgcgcaaatcagtttctattttgaccgtatggcttgcgctttcgatgagtatgcatctgaacaagcaagaccttgcgtagtgttcaaaccgacactgtcgcaagacggtaatgcatggattgctgttctcggtgacatccctacgggtgtcgtaggttgtggtgattcacccgcagaagccatgtatgacttcgataaaaaatggttcaaaaaagaagatgaaaaccacgcgcctgatgaacaaagcgtcactcatgaaaaacgggaatattatgacgcaagtaaggactattga

SEQ ID NO: 84985 - DNA, 777 bp, Citrobacter koseri
atgacaaccggcggccatccaccgcccattagcgcagaagtcctattcgttccgtcagccgaacgtcatcggcatcacaaggaaataaccatgactaaaaaattcgaactcgtcgccgaattaacgaaagagtttttcggcagaaaattattccgcattcgtgcagttgtctctttcggcgatgtttccgaaggtgatttgggtggttgggtggaaaaagaaaacaacctggatcaatccggcgatgcgtgggtgtacggcaatgcgcaggtgtacggcgatgcgcgggtgtacggcaatgcgcaggtgtacggcaatgcgcaggtgtacggcgatgcgtgggtgtccggcaatgcgtgggtgtacggcaatgcgcaggtgtacggcgatgcgtgggtgtacggcgatgcgcgggtgtacggcaatgcgcaggtgtacggcgatgcgcgggtgtacggcgatgcgcaggtgtacggcgatgcgtgggtgtacggcgatgcgcaggtgtacggcgatgcgcaggtgtacggcgatgcgcaggtgtacggcgatgcgcattggatcactatcggcccaatcggttctgagaatggatttctgactgcttttcgacagaaagataactcaattgttgtgagccgaggatgtttctcaggaacgatcgacgagttcgagtcggcagtaaaagagcgacacggagacagtaagcacgctcaaatctatctggcactaatccccgtaatcaagctgcgtctggatgaggtgagtgatgaataa

SEQ ID NO: 84986 - DNA, 1005 bp, Citrobacter koseri
atgagcgaagtaacggatttaactgtcatcgaaatcaaaccggagcaggcaccagcgctttaccgcgcgggtggcctcaatggttttctcgagcaaatacgcgaaatggctaaagaagtgccagacgttaccactaaaaaaggtcgtgaccgcattggtagccttgcacgcatggttggctccagcaaaacggctattgaaaagcctggtcgcgaatacctcaagcgactgaaggaggcggttaaacccgctgaggaagagttgagagtgttcacccgcgagtgtgacgtcattcgtgacgccatccttaaacctcgcgatgagtgggaggctgagcaggaacgcatcaaggctgaagaagccatgaacgctctgcacgccgaagcgctggagatgaacatcaagttcgatcaggagctggcggccaagttcgaagcagaccacgaaatggctctgctgatgaatgacgcattcgatcgtgaagtggcagagaagaaagcggaagcggaacgccagcgacttgctcacgaagaagagctgaagcgtcaggcagcagaacaggccaagcgtgaagccgaagagaaagctgcggctgaactggcggcggcacagaaacgcgaagccgacgcgattgcagcaaagtctcaggctgaattactggctaagcaggccaaagaacgcgcagataaggaagctaaagacgccgcggagaaagcagaagcagataagcaagccgccatcgccgccgaacagcgcaaggcacaggaagaagcggatcgcattaagcgtgaagctgaagcgaaagagaaagcccgcctggccgaagaacagcggaaagccgacgagcaggcaaagcgtgaagctgacgtgaagcaccgcaaagccgttggcactgaaatcgttaacgcactcaccgctaataccagtatctcacgcgaacaggcgatcgaagtcctgaaggcgttgatggatggcctggtaccgagagcacaaattaactactga

SEQ ID NO: 84987 - DNA, 726 bp, Citrobacter koseri
atggatctgaataaattagatgagccatttgccagtgaggatattgagtggcgcattcagcgggctgggaaaagcagtgatggaatctgggccaaagtgctggcctatgtaacaaaccgcgcaatcatgaatcggctggatgaagtatgcggcaaggctggctggcgtaacgagtaccgcgacataccaaacaatggaggggttgagtgcggtatttccatcaaagttgatggtgagtggatcactaagtgggacgcggcggaaaacactcaggttgaggcagtgaaaggtggtcgatctggcgcaatgaagcgcgcagccgtgcagtggggtatcggtcgttacctgtataacctggaagaaggtttcgcagtagtttcagcgacacgcgcaacaggttttcagtatgcaaaatcaaaagaggttggcgtgttttactggaaacctcccgcgcttccatcctgggcattgccttctggtgcaataaaccaatcggcagagcaatcacgcgatgaatcacaccaggaagagcagataacccaagctgtagaagctgacaaaatcctcgccgaattcacgcagtacgccagcaccgaaaacgacagcaaaaaactacatgagcagtacgcaacaacgtggtcacgcctgaacggttttgctgatcatcaggctaagtgcaaaaacgtgacaggtattcgactcaaagaactgaaacaggttgcgtaa

SEQ ID NO: 84988 - DNA, 282 bp, Citrobacter koseri
atgactcctgaaaccatcctcagcattctgcgcaaggacgcgcggaacaatatcactgcgttccacagatggaaaacttcagcaggcgcactaagccactcagaaggaatcaccctcaattaccacgagccatattacgagggatgggcccctaacttagagatgcaacaaacattcatctcaggcccggccctgaaaaaaatacaacaacacctgatcgctgagaaatggggaaacggaacgatcggcggctgcgtgtatcgtcttaaggagaaccaatga

SEQ ID NO: 84989 - DNA, 459 bp, Citrobacter koseri
atgagcgaactttggcaaccgtgggaaaatctctttctgcatgaagttggtggaacaatgccggtatcggtcattgctgaaaagcttgagcgcacggaacgtgccataacaactcaggcatcacgtatcggcgcaaatattccatctcgaatgaccggcagacgctggaccaaagccgaactgttccttctcagtcgcttcactcctgaagaggtcgccacggcaacagggcgctccatttactccgtacgcagcaaattacagtctctgaccagaacgtcaggaggaaaagtcatgcctgaatggacagcagaagaaattgcattcctgtggcgccacacaaacgcagaagtctctgagatgactggtcggagtatcgaagaggtcggagataagcggctacaggtgaatattgagcggaatggctgggatgttaacgatccggagcgtgcatcatga

SEQ ID NO: 84990 - DNA, 516 bp, Citrobacter koseri
atgagctatacaacagtaattaaagtctggcctggcgaaaagcaggaagaagatgaagagcttcgcaatggctggggcagcggaccagtgatttgggacgacatggcaatgcgttatctcgcgctgcccaaacacgcctatatgtcaaaaattgacgacctttggcctctagctaaccgcctcgatatcccataccaccatcgcgcagtccttgcaatgacatatgaccgcatgtatgtgaaagctgagcattacaagctggctgctgactgcatccgcgattacctaactgacttcccggctgatgatagatatgtaaaccactggccccgcattgctgaaatttttgaaagctcacctgagtgcccggctattggtttatggctcacttcggtatgtgaaaacccatttcttggcgagtgggatgaagaaaccgaagattacaaacagcctgattggtctcgttactggagcctttttgatgaccttgacgcaagcgaaagtggtgccgcatga

SEQ ID NO: 84991 - DNA, 123 bp, Citrobacter koseri
atgaccttgacgcaagcgaaagtggtgccgcatgaaggcactaatcgccaggtcgctaaagctccctttttattgctggcgttcaccttcaaccgaattaaccgacagttccgggagcattga

SEQ ID NO: 84992 - DNA, 219 bp, Citrobacter koseri
atggccgatatcatcgataccgcagcagagattgaagagcttcagcgtaacgctgccctttccgctcaccgcatcgaccacaacgccgtatcagctgagcgttgtgaagaatgcgacgaaccaattcccgatccgcggcgcgctgccgttcccggctgccggacgtgttccagttgccagtctgatttggagcttattcgtaagcaaagggggctgtga

SEQ ID NO: 84993 - DNA, 201 bp, Citrobacter koseri
atgcaacaccaattacagcccgattcactggttgatctgaaattcatcatggcagatactggtttcggaaagaccttcatctatgaccgtatcaaagacggctctcttccaaaaagcaggctcatccacggccgcgcccgctggttatatagtgagcattgcgcattcaaagaaaaactcctgaaccgccacgatgggtaa

SEQ ID NO: 84994 - DNA, 699 bp, Citrobacter koseri
atggaatcacaatattcacttaccaacgaagaaatcgatgacttggtagaaatagcctccagaaagtatagatcacccattgacctcaatattctcaattcactgcttgaaatggtctacaacacgctggagcagcataaccggatactggctattcgtactgacacgaggttcgctctgtctcatgtaccgggagagcctgatctaccaatatgcttccagcgcgaaggtgcgcaggcaatcactcgcttcttcgagtcactgaaaagtcagctacgggtagatcataaccggtccaagagaccgggtgacccgacatttccatcttatgggtggtgtagagaacgttacacaagtgagcatccccattaccacctgatgctgttatttaatgcagatgtgtatgggtacttgggcaattaccaggaactaaatgctaaaaacatggctacccgtatacagaaagcctggtgcagtgctctaggacttgctcacgaagattacgcaacattagctgaattcccaccaaatgctgtttacaggtttagcagatttgatgcactggatcgtaacccagtctactggaatttcctgattcgactggcgtacttcgccaaaaccaggactaaggatgtccacagcggttaccgcaactttggcacaagccagtgcccacgcttaggcagattaacctgttaa

SEQ ID NO: 84995 - DNA, 1515 bp, Citrobacter koseri
atgtctaaaaaaaacagttcaacgaaaaataaagaactcgtactcaaatttcagacactgcccacttttgcacaacggttaataagctacatacattataaaacaggagccgccgccgaacttattttaatagtgttacttggggtaatggcacttgcctgccaggacaaatttgatgttcagcttaaaaatgggagaacctttacatcactttatctcatgctattggcacgctcaggcagcaggaaatcaacggtattcaggctgttgatggaggaaatttatcaactggaaaaagagctgcgaaatgattttctgttaaaagagaaaattcataagcttaaactattatcctgggaaaccgagctaaaagagcttaaaaaacaatttggcaaagctgttcgtcagaaggttgatgtaactgaggcacttgaggcgttggaggagtgccaaagaagaaaaccatctgtcccagaaagaaagtatcttactaaaaatgattcgacaagtgagggacttagaaaggcattagcgctgggttctccatcattgatgctcggttctgatgaagctggaggggtgtttgacagcaatctttttcgcaatatatcagttctcaactctctttggggagaagggagaatctctgacagcagagcatctcgtgacagctacgatgttgatgatgtccggctgacagtattgctgttgttacagcctgaattatttgacgactttataagtaagcgggggaaaaaattaagaaaatcaggattcttagcgcgtttattattgattgatctggagcaacttcctgaactatgcgacatccctgatgcgtattcatggtctgatgaaccaggacttgatggttttttctccattctcgttaaacatttgcaagacgggatagagcgtagagaaaaaaatgaaaaacgtatctgtattactttttctgaagaggcgaaagcgttatgggatacgcaaagtaaacgaatcagggaactcatgcaaaaaggagaggagttgcatcactatgatgattttggttccagaattatggagcaagcaacgagaatcgcagcagtaatgcaaatgtttattacacccaactcaccaacaattaccaaggacactttaatgtcagctactaaaataacacaatggattattaatcaccttatcactaaggtcgatactacccgagaacctacagcggcagaaaaattggtatggttcatggaggatcatcttgttagtaatggttcttacgatttcaagaggaatgatatcattaaaaaaggtccatattcagtcaggcgttcagaaagtctaaagtctgctttagaaaaacttgaatctgaaggaatagtacaactatttgtacgaggtgaggttaattatgtcaaatttattggttccaaaatggaacctagtgaactagctgaaaagactaatatcccgttgttagattcaggaacagttgcgatgagtaaactacgtttacccaaataa

SEQ ID NO: 84996 - DNA, 858 bp, Citrobacter koseri
atgatatctcttgataggttgtatggaaaaagcagacgtaagtttaaacagctctcgcaggcgatgactggttgcgaatggaaggtacacgctcacgcattggatgaacattgcccagcgatgcaggaggagcttgcaagaatgaaattggtgtattttgatcctgcaaggatgggtacagaagtatcgtcgtatgttgagctaccacaaggagtatccagataccatcaggttaacggagttctgcaaagaaaggacgagtacaatgcaatatataatcctataaaagaatgttggagagatttggaagatcggatttttagggagacaatgagaccatttgtcttagatagttcgatagaagatgtattcatctcacatttggtgtacgcctcaatgtcgtatcagtggggagtatccattatacaagatgatgaacaagttgcgtttgatgcactacttatggcttctgagctattagataaatgtctcggaatggtttggtttaaaatcgaagatgataaaataaagaatctttctaagatcaggtgttacgcaggaaaaaaaggaggtactaagaaggccaatgtatataaaattatacagggagagcttgtgaggttaatttataaaaattctcctgaggatggttggaaaaacaagatcgctgtgattgatgacatcataaatccattgtgggatttcatcgaaaaaaataattttcaaggttcacatgtaagcagtgaagaatcactgcgcgagataatcttaaaaagatggtcattacagattgatgatgtgaaacatgcctttaatgctaaggtatcaaaaaataacaaaactaagatgcttaaatga

SEQ ID NO: 84997 - DNA, 780 bp, Citrobacter koseri
atggcagacactagttttgttacatacggtggattgattgctagtacattatcagcaattgcggcataccttgcaattaggcaaacagtagttcaaagaaaggaatcaattagaccacaattattaattaatgatttggatttgctcacagtttcaatgaatgagcatcattattcagccatgccactagctagaatacccatagatgatatcaaacctgagttagttaactcagggttaggcactgccataaatgtaaagctattttgggaatatccagccgaagaaaaattaaattccatttcaaagatttttgatttaaagtatgaaactcgaaaaaactcaaacaataaatcaataaaaatatccgggggtggaataaccattccatatagcttagaaaattattactcccataattatctgctacccataaatatagaaaaaaaaccaatcagaactatccttcctccagtttttctaattatattgctaaacgaattaaattcattacgtattatgaatggtgaaatacccacaattgttgatggcccgtcattaaaaatcactttctcagatgcaaagggaaagaaattttctataagttactcaagccaatatcatctacgcgagtacggaaagcaaccctacgaaaatacttatcgcggcgctttaatgttccaagtatcaaaaaatagtaagactgcgcagatacagcaaaggatacgcaaaagctacgcggattttatagatgaacatgatttcaacaaaaacagatag

SEQ ID NO: 84998 - DNA, 552 bp, Citrobacter koseri
atgtcatttacaagtaacgcattagcaaagagtatagcaatactatcccctattcttatgctggtcgctttgggatcgatactcattcctttgaccttagaaataaaagataaagccacttcaatagtaaatgtttcattacctacatcttatgataaaaaaatagatacagatcatctcatgaacgaaataagcacctatagggatgagatatttcaggtaagaaacacgttaagtgccttaaaaaatacttcaacccttaccccagataatatacgaatagaagcgttggaagtaaaagttgatgacatacagaaaaagatatccacgcttaataatatacttggaaatagtcctgaaaaagcaatggctttacctctcatgaagaaagatatggagtcattgagcacatcattaaaagttatgagtgattactcagacaaacagttagaacgatttataacattattttattggattattggtgttctagctgcaggcataataagcatagccgcaggactttactttggactaaagaaaaccaactaa

SEQ ID NO: 84999 - DNA, 249 bp, Citrobacter koseri
gtggacgcaaacgaactgaagcacatcattgctctactgctggaggatgctaagcgagttcaacagctcgagccaaattccgggactgaatcgcgcattcagcttgcgcaaacagcattagaagaggtccagcaggacattaatggaaagaagcgcctcaatggagtcgaaattgttgaggcgattttagagcgaagggaaagagcggcacgcctcgattcagaacggctcggtagggtcgctatttaa

SEQ ID NO: 85000 - DNA, 435 bp, Citrobacter koseri
gtgtttagagtggagattcttgatgttagtgccagtgctggtggcggctttattcaaggcagcgacatcattgatgtcatcaggtcaatcgaatacaacaatgaacgtgcgctagcgatgttcggcggaagaacggcagatcaagtaaaggtaatcaacgttcgaggcgacagtatggctgagacaatcgagcctggtgatcttctcttcgttgatatctctattcatgagttcgatggtgatggaatctatgtatttggttttgatgataaaatttacgtcaaacgattacagatgatacctgataagttgttggtgatatcggataacccaaaatatagagaatggtccgtggacaagactaacgaacaccgtttttacatttttgggaaagtaatgataagccaatctcaatcattcaaacgtcacgcctga

SEQ ID NO: 85001 - DNA, 246 bp, Citrobacter koseri
atgcaatcaccgttacgaatcttgcgtaaatcgcaaggtatgactctttcctatgtagcaaaaggggttgatatcgacccgggaaatctaagtcggatagagcgagggcagcaaattgcttccctagatattgctgaacgtctagtccgtttcttcgcgggaaaaatcaatgagctagaaatcctttatccacaccgctattcgaactgtacaggcgcgagtacagacataaaaccacaggaataa

SEQ ID NO: 85002 - DNA, 858 bp, Citrobacter koseri
atgagcactaaattaaccggctacgtatgggatggttgcgcggcgtcgggcatgaagttgtctagtgtcgcgatcatggctcgccttgctgatttcagcagcgatgagggggtgtgctggccgtccattgaaactattgctcgtcagcttggcgcggggccgagcactatcagaacggcaatcgctaagcttgaaaaagatggctggctcacgcgtacacagcgccgcaatggtaaccgtaatgcgtcgaacgtttaccgcctgaatgtggcgaaacttcaggctgccgcattttctcaactgtcagattctgacacgtcaaaatctgacgcatcaaaatttgacgcctcaaaagctgacccgtcgaaatctggcaaaaacggcggttttgacccgtcagaatctggcggggatccgtcagtaaaatcaacacaagatccacaagtaacttcaaaaccctcttgtccggttgcggcgcaaccagaccctgaagtcgtgattactgaccaggcgatcttagttttgtcccatttgaatcagatcagcggatcccggtatcagaaatcaaaaacatccctggagaacattcgtgcccgactgcgtgaggggtacagcgttgcagacctgcaacttgttatcgacctgaagcatgaacactggcacgagaacgacgagcagtaccagtacatgcgcccggaaacgctgttcggcccgaagaaattcgagagctatctgcaaagcgctacccgctgggagcagaagggacggcctaaacgcgctgactggggtgcgaaaaatcgcgatgtgatggcttttggtccggttgatacaaggattccagaggggttcagaggatga

SEQ ID NO: 85003 - DNA, 882 bp, Citrobacter koseri
atgacgttaaacaaatattgccaggcgctggtggcactacgtagccaaccagcccacgaattgaaagaagttggcgatcagtggcggacaccggatctgcttttctggggtatcaacgcgctatttggaccattagttctggacttgtttgctgacgacgacaacgcgaagtgcccggcatggtacaccgccgaagataatgcgctgacgcaggactggtctgaacgtcttgcagaactgggtggcgctggttatggcaacccaccgtatagccgttcgcagtaccacgagaaacaggcgatcaccggcatgacgcacatcatgaactacgcagcagcccagcgcgaaaagggcgggcgttatgtattcctgataaaagccgcgccgagtgaaacgtggtggccggaagatgccgatcacattgtattcattcgcgggcgcattgggttcgatctgcctgtgtggtttgtaccggctgacgaaaaacagaagcccaccagcgcgttttttgccggtgccatagctgtattcgataagtcgtggcgtggtgagcggttcagctatatcaaccgcacagaacttgaggaaaaagggcgggcatttatggcgttggctcaattcgccgttggtaaagagcaaacaattgcaatgcaggcagccagggaaccagcagcaacaccggaaactgagtcacgaatctggcctctcgaggttggtctggtgtttaaccaggtggaaggcgttgatgtattgagcgaggcccagcagaacaaactgaaagccaacatcaatcaactctggctggaacgaacggccaccagcgaaattatcacaattgcgcgtggtcttgttggcagcatgcagggggtaacccatgcgtga

SEQ ID NO: 85004 - DNA, 852 bp, Citrobacter koseri
atgaaaatagataatcccgaaaatccacttgaacgaaacgattttacgatggatgacttccatcactacttaagggagtttgataaagctgtatgtgaagcgaatgctgtaagtcagggggttggtgtgcgaatggctgaggcttttaaagggtggtctacatacattttttcacgaatctgcattcatgcttcaataatgatttccaacgtaccaagatcaagatgggctaagcgggattatgacttttgggatttttcggcgattgcacctcatgtaagagcgattctggaagctgagttattgtttatgtatttatctgagaatccagattcaactgaggagtggtcagcaaagttgaatgtcatgcacatgaatgattgtgtaaagagaattgagttatttacatctagtgataatacgaaagcattggatttttatcatgaacaaaaagatataataactgagagacttaataacaaccctgtttttttatcccttgaacaaggaaccagaaaacgttgcttgactggaaaagcgcttatgattccaaatcgagatgagttattggttaaactgggaaaagatccaaagtcatttaaaataatgttcgattttttatctcattatacgcatatactacctatgtcatattataaaatggagccaaacggaaggggaactggttgttttaacaactatgactttggctatatgattatggggatgattatttgtactgaatccttgactaagtgtacagatagattagtagaactttttcctgatgttagacggttgcgaaaaggaactaaatcaaaattcacgttagggcctaaaccaacaaaataa

SEQ ID NO: 85005 - DNA, 240 bp, Citrobacter koseri
atgatgagcatggacaacatgattattgccggggtaagaatatatttcccgcctggcaccgatctccctgttccaacgcctgaactcaggacatttgccatcgtcagcaaagacctgcctgggcatctggtgcttgagtacaaaaacaggcagtgggttcctgtactgacccggctttttgatgattcagcacatgctatttcagcgatcaccagcctgagtaaaaagacatggcattaa

SEQ ID NO: 85006 - DNA, 240 bp, Citrobacter koseri
atgtttgtggaactcgtttacgacaaacgcaatgtagaggggctaccgggtgcaagaaacatcattcttaacgagctgacaaagcgcgtacaccggatcttccccgacgccgacgtgagggttaagccgatgcaggcgaacgcattaaacagcgattgcacgaaaacagagaaagaacgacttaaccgcatgctggaggatatgtttgaagaagccgatatgtggctggtgaacgaatga

SEQ ID NO: 85007 - DNA, 369 bp, Citrobacter koseri
atgcataacgataaaaccacgaagctaattgtttcattaaataagttaacagtccaaaaaacgatgacttggatggcaatcgatgcgccagaaaatcttgttaatggtacacaggacataattcaagttgtgtttcatgctaaatataatgaaaaggattttgttatatacagcagaaaatatcgctactattttgatgaacatgaatggtcatgggctgaaggcttagtattagcaattgtaactccaagttataaaacgctttgggaaactgttgagcagacacaagcacttagagacttattcaattccgtatctaaacaggcatctgggtttaatgatattgtagaggatctactaaatatttaa

SEQ ID NO: 85008 - DNA, 462 bp, Citrobacter koseri
atggatatcctgacctggcccctatcacagacgataactgatatatccaccatcacgggtattgtcggttttgttgtaactgtaaaactttattttacgaccagatctttaaaggccactctcagaaacaaagttcgaatacctgaaatccatagcaaccttcaaaaaaaagcctcattgataaatgatgctattggagaatgggatactcgaaaagaaacgatacgtagggagtttactgagtgtgcagttctaactgaaagccttctaagtagactttccaccaaggaacgctcaaagattgatatctttttggatgaagtcaaacctaaaagaatctttcgtagaaaagaaatttctattaatatcaatgaccaagaacaagcctggaagctctatgagaagttgagtatactcaactcaagagttaacgaaattgtgaaagatatgcaactggactaa

SEQ ID NO: 85009 - DNA, 861 bp, Citrobacter koseri
atggacggagtaatgaaaatgaactcgagaatatcccatcaagtaacagaatcttcctcctcaaacatgacggaaccttccgaacgctatacggcaattgtacaactgggaaaaaagttggttgaagaactagcgttaaataattctgttgatacgttaggccgttggatggctcatcatattgcagaactgatttacgacgctgaaaataccacggatgacactgtgcgcatcgcgaaacacatggagattagggactctgtgtgggccttttggactaaccgctacgaattaccatttggcaataagccatttaaagaactagaacccatcctaaggactttagaaagtcttgatcctgaaaacctgctaccaaggtatttctttccctacccaaggctaactgatagagaaaaggaaacttcggagactcaaaagtggttaaaagttgccgaaagtatcgattcggcctcaaaaatcctgattgactattacctctctttagccgcagaaaattctattgataaatctcaagaatgggtggaactggcacaaaaagctggattagacgacgaaattgatctaattgaacttcgtattttccaattacgtgggaacccatccaacacaactaatcccagtagtgcacaacggcgagttctggaaaaacgacaaaaaaatcttgccgtatttctttcattagccactcagttagacgaacaactcaaatcacaacttgaagccctaccagtaattgaggataaatcagaaaaaggcgatgatgacgatgacgatgacgatgacaatgacaatgacaatgacaatgacaatgacaatgacaatgacaatgacaatgtttga

SEQ ID NO: 85010 - DNA, 141 bp, Citrobacter koseri
atgtcagcgtccagatttttgatagataacagcggctcaaatcagaacaatataaagatagccataagtaaagccaagcaatgtcggcaagtcctgccgaactgcgaaacgatgcgtttcgggcagagcaaggaaccgtaa

SEQ ID NO: 85011 - DNA, 1227 bp, Citrobacter koseri
atgtacaatgaagaaattaaagcttttgctcaaaggcaagagcagaaacttatcgcttctctggggcacagcagggagcattctgatccctgcaatgaagtaagaaacagggatgattatcagcgcgattatgcgcgtattctatactcatcttcatttcggcgacttcagggcaaaatgcagttgtttgaagttgatcccgaaaaattcaatagaaacagattaacacacagccttgaagtcgcgcagatagcgcgaagtatcgcatcagaccttgaactgaaacactccgtggtagttgaactggcagctctggcgcatgacattggcaatcctcctttcgggcactcaggggaaaagttgcttaatcggttatctgctgatatcggtggatatgaagggaatgcccaagcgcttcgtatcttaagaaaactcgaaaagaaatacgctcactgtggcggcctggatctgacccaccgaagcttgctctctgtcatcaagtatccaaatatgaaatccgttgctgagaaattcatttatgatgaagattatgagttctaccagcaattgcttataaagcataatcttgaactgcaggcaggagagaaaactattgatgcacagataatggatcttgctgatgaaattgcctacgcagcgcatgatcttgaagatgcacttagcagaaatatggtgaccattgaagacattgagtatgagttttttatctcagaaaagtacaaagatgctttgcccgactttaaagagatcgtcaagaagtcaaaggaaactgcagctaaagctgattcaatgaagtcgtcagaagagttcgccatgatttttcgcaaagagcttacctccaatatagtaaatcgtctagttatggatatttcagtcgtcatgagtaagcatggctttgaagagcttgggttcgaaaagttacagaaactatcagaaggtctgaaaaaactgctatttaaagtaattatgcgtaagaggaatatactgacttacgagttcagaggtaacgagatcatcgctgacttatacgagttttataatcagaaagacaatttcaaatttttgtcccctgaactgaagtttgcgataccggaagaaaattccgctgactacaccagcaaaaaggcgcgagctgttgttgactacatctcaggtatgatggatacgtttgccattaaagaatgggagacccactgcaagaaataa

SEQ ID NO: 85012 - DNA, 138 bp, Citrobacter koseri
atggtaatcatcaacacgtggataggaaccatggctgtgatgattatctctgtctcgataataacgccgtttgttccgctcatcttcttcccagttacgggttcctttaaaatcaaaatcatcgcgaataatgcgtaa

SEQ ID NO: 85013 - DNA, 285 bp, Citrobacter koseri
atgacgatggcaagcaaatcactgtgggcaattgttgatttccttcgggaaaaccagaccatcacgccgcgacaggttcagaacctgctgcttcacctgacacgcaaagcggtagttatccgtacaggcgagccgcatcacccggtttattcgctgttgcccggcggagagctgaatatcaagcgcttcaaatcgaccgtgagaaaaaacatggttacttcagtgtgccgcacaagcccggcgatgaagagagttctggcattttacgggagagcgtcagcatga

SEQ ID NO: 85014 - DNA, 1407 bp, Citrobacter koseri
atgcctgatatttcaacacccaatcttgactataacgacatggttgaggcgtgggacattaacgatgctctgatgggcggtacgctggaaatgcgccggcagggagaggaatatctcccgaaatggccgaatgaagatccggacagttataaagaccgcttggcgacagcaacacttctccccgcttatgaagaagcaattaagcagaacatcggacgagtgttcgctgaacctgtcgtgttgagtgaagatacgccggaaaccatccgcaatcttgccactgatattgatatggaagcgaatcgcctcgatgtctgggcgcagcagttcttcgctatcggttttcagtatgggctggttcatgcgctggtggattatccccgcgtcgatccagaatcggtgaaaacgaaagcggatgagaaggctgtcggtagcaggccgtatgccacaatgctgaatccccgtcaggttattggctggaagtcgaaagttgtcggcgggaaagtcattctcaccgatttgcgcattcgcgaaaccatcatcgttgacggcgatgattacgggcagacgaaggttgagcaaattcgtcacatcatgccccgtaaggcggaaatatggcggcgaagcacaggaagtgcaggggaggcggtctggacgcttcatgaagagtgggaaaccagccgcgatgatatccccctggtgacgctatacacgaaacgcaccggatttatgcgcggatctccgccgctgctgaatctggccctgctgaatatcaagcactggcagagccagagcgaacaggacaacattctgcatgtcgcccgcgttccgattctgtctgtgtttggactggacgatgcggaagaactcacaatcggcgcaaaagttgccacgaaattttcagatcgctcaaaacaaggggttgaatataccgagcatagcggtgcggctattaatgcgggaaaaatctcgctggaagatctggaaaaccagatgcgccaggcgggcgccaaactgttacgcgccgaaaacacctcgacaaaatcagtagaccagaccaacgaagagcggatgcaagagaattccccgctctatacgatggcgaactcactggaagatgcgctcgataatatcctgcagatcatggcggagtggatgggcgaaagcgacggtggcagtgtcgatgtgcgaacggaactggatgtatccgctcagacgtttgatgcgaccgcggcgaatgcagttcaggcgctccggcagggtggcgatattcgccagattgatgctgttcgcgcgcttcaggcgctgaaattcatcgacccggatgcgaaaccggaagaggtgattgacgagctgaataatccacctgtgacgctaacgggcaataacaatggcaacggcgaatga

SEQ ID NO: 85015 - DNA, 1113 bp, Citrobacter koseri
atggcaacggcgaatgaacgattaagcgatgaatcgctggcgcacgctatctgggtaagcaggtacagtaccggcgttgccagccgcatggtgaaattgctcaatgaaagtgacgctgagctaaccgcgcgactgctggtagcgatggatactctggacgcagatagtttcactgtctcgcgtctggaatctctgctggtcagcgttcgagcgctaaatcatgacgccgtgcagtcgatgtatgccgggctgtccactgaacttcaggagctggcccagcatgaagcgggctatcagatgagcctgtttcagtttgccatccctgatgatgtgctggcactgcatcctctggtaggtatctctcctgatgcggtttacgccgcagcgatggcgcagccatttcaggggcgattgctcagtgagtgggccgataacctcgaagccgaccgcatgactcgcatcagcaacacggtgcgacagggctttttgctgggcgacacgcacgaacaaatcgcccgcaaggtacgcgggcacgctaaccggggttatcaggacggcgcgttgcaaattagtcgcgccaacgccgccagtatcgccaagacggcggtggggcatcttgcggcgacagcgcgcgatcagtttgcgcaatcgaatgacgacatcatcaaggcgaggcagcagttatctaccctggacaacagaacctcttcacagtgccgggtaagagatcggcttaagtggacgctggacaaaaagccaatagggcacaaaataccttatctgcagggcgctggtcgcctgcacttctgctgccgttcaactgaaacctacgtcctgaaatcatccgaggaactgggtatcaaggttggtgaaatcaaggatagctcccgcgccagtatggacggtcaggtacctgcggatagcaattatcaggaatggttctcccggcagtctttcacccgccagtcgcaaattgtcggcgtgacgcgcgccaggctgattcgtgatggtggcatgtctgctgatgagttctacaacgacaggggcgaatggctgacgctggagcagttgcgggaacgtgacgaacaggcgttcaggggtgcggggatatga

SEQ ID NO: 85016 - DNA, 186 bp, Citrobacter koseri
atgaacgatagccaatcggatttaatgaaaatcatcgtcgatgggaaagatgtttttgtcccatatcgggttgaggtatctcttggtgggtatcgcagacagatcccccttattgatgaaagcaatttgattgaagttactacgttaggtagtgacgttcctgaattcgtcagttgccgaagttaa

SEQ ID NO: 85017 - DNA, 765 bp, Citrobacter koseri
atgaaactgaagactttagaagcaaacggcaagacctatgcggaagttgacgccaacggcttgccgatttatatccatgacgacggcaaagagatcggcttcgatgcggcgcaggccgtcagcaagatttcggcgctgaacggcgaggctaaatctcatcgtgaagcgaaagaggcggcggaagccagtctggcgaaattcgccaaaattaccgacccggcgaaagcgctggaagcgctggagatgatgaccaaaatcgaccagaaaaaactgatcgacgctggcgcagttgaccaggttaaagccgatatcaccaaagcattccagtctcaacttgacgaagccacgcagcgcgcgaccactctggaaagccaactctatcaggaaatgatcggcggtcggttctctggttcgcaatttattgctgataaagtcgccatcccgtccgatatgctgcaggcccgctttggtcagtcattcaaagttgaagatggcaaagtcgttgcgtatgacggcagtggcaacaaaatctattcccgctccaaaccgggcgaactggcttcattcgatgaggcactggaattcctggtggagcagtatccgcagaaagaccacatcctgaagtccagcggcaatcagggtactggctcacgccagacgcaacatgcaatgggtcagaaaacgatgaagcgcgacgcgttcaccagcctgagcccgaccgagcagcagtcaacgcttaaagacggcatcaccatcgtcgattaa

SEQ ID NO: 85018 - DNA, 1137 bp, Citrobacter koseri
atggctaacacgctcaccgggttgatcccgactatctttacggctctggataccgtgtctcgcgagcaggtgggttttatccctgccgtatcgcgaaatgcgaaagctgatgcggcggcgaaggaccagaccgtcactgcaccggttgcgccagcggcaaccaccgttgacattacgccgggggccacggcaccgaatgacggcgaccagacgatcggcaccgtcgatgtcaaaatcaccaaatccaaaatggccccggtcaaatggaacggtgaagaacaactggccctcggccctgctggcacctacaacaccattctggcggatcagttcaaacaggcgtttcgcgcactggcgaacgagatggatgcggatttggcggcgctgtactacgcaacttcccgcgccgtcggcactgctggcactgcgccattcggtattgccggtgatttgtctgacgcggcgaatgcgcggcaggttctctctgataacggttcgccgactactgatctgcagatggttctcggctcttcggctatcgctaacctccgtggtaaacagtctgtgctgttcaaagtgaacgaatccggcactgatgcgctgttgcgtgaaggcgttgtgggtcgtctggagggtttcagcatccacgaatccgcgcatgtcaaaaaacatgctgcatctgccgctgctgattatctggtgaatggcgcaaaagctgagggcgagatcctgattgcgattgataccggcacgggttctttcacggctggcgatatcgtgacgttcgatggtgacagcaataaataccttgttgctgccgctactgcgtccgtgattaccctggcggcgccgggcctgcgtcaggatctggcggataacgccgccgttactgtcgtcggtgcgtacaccgccaacatggcgtttgaccgtaacgcgttcctgctggctgcacgtaccccggcaatgccgcagggcggtgataccgcggatgacgtgatgaacgttaccgacccggtatccggcatcacctaccaggtggcgctgtaccgccagtaccgtcaggtgcgctacgaagtcggcctgtcctggggggttgcgccagtcaagacggaacattctgtgttgttgctgggttaa

SEQ ID NO: 85019 - DNA, 213 bp, Citrobacter koseri
atggccggattaaccaaagaacagcgcgcgcagcgagcggcggaaaagcttgcagcggagatggcaactgatgacgccaccggggtgaagactctgcaactggtgacaatggtcatcgatatcccggcattccccggcgcaccgactaccgccgatgttcatcctgaagaggtggacaactggaaggcgcacggctggcgcgtagaggggtga

SEQ ID NO: 85020 - DNA, 411 bp, Citrobacter koseri
atgctcacttacatcactgttgcggatgttgatgcgcttctcggttcgacctggacggatgacagcaaaaaagccaaatctgtgctgatggctaacacctggctgaatggtctcagcctgaaaatgcccatcgataaaacaactcacgaagtcattattcccgacgatgtgaagctggctggcgcatatgcggcgcaggcggcagcgaatggcgggctgtatcagcagaaaaccagttctggtgtactcaccagtgaatccgttgatgccgatggcgtgagcgtgtcggaaagctacgctgaactggcaacaaacagcacttctttgctggattccgatctgcaactggcgctggcgatgctcaagccgtatggcgttaatacctctcagatccgccttgtcagggggtga

SEQ ID NO: 85021 - DNA, 552 bp, Citrobacter koseri
atggctaagggctggaatatcgacccgtcggcatttgcgggtctcgtggcggaagacgtgaaacttcgtcagcgggctatcgctactcagttgctgaatgaaattgttcagcgatcgcctgtaggtaacccggagttatgggctatcaacgccacagcggttcagtacaacaaagcagtgggcgagtggaacgaatctctgtatgccgacccggaaaacctgactaaaaccggacggctcaaaaagaaagtccgcgttaacgacagtatggatatcaagcgtccggcgacatatcgcgccggaaccttcagggcatcgcattttgtcagcgtcggagagcctgactattcagttccgactgaaccggatccgcggggaacggctacgttcctcaacggcaaaaacatcattgaccaggctccggcttattcggtgatctatatccagtcaaacctctcgtattcggtttcgttagaaaacgggcattcaacgcaggcgccggcaggtgtctacgcagtttcatttaacggtgtcgtccaggccaacaaatga

SEQ ID NO: 85022 - DNA, 612 bp, Citrobacter koseri
atgcgcgcattgcctcgcagggtaacaatagcccgtcgcaacctggaactttgctttaaggcgttacctgtgaaggagcgtgagaaattactgattaaaaattttgagtcggtaggcatgggggtacttgaaaccggtatcgcctggttctggtcagacaggcgtttacgcaaatggtttacggttacgggttatgaacatatggaaagtgcgcgagctgaaaataaaggcgtgcttctcatcggtatgcactttcttactcttgaacttggggcgcgcatatttgggatgctcaatccgggcattggcgtatacaggccgaacaataacgcgctgtatgactggttgcagacgcgaggacgtcttcgctcaaataaaaccatgctcgatcgctatgatttaaaaggcatgatacgagtgctcaaacaaggtgagattgtctggtatgcacctgatcatgactatggcgctcgtaacagcgtgtttgttccttttttgatgttcccgatgcggcgactaccgcaggcagttacatgctcgtcagaagcgcgcgaccggcggttgtaccttttgttccccgacgtcgagcggatggaagagggtacgagctga

SEQ ID NO: 85023 - DNA, 342 bp, Citrobacter koseri
gtgtgtaaagtgaaaggcaatggcgtcaatcaacatgtcctggcgatcctttccgctgacctgcaggccgatctcgcccaactcgcaaaccatctcggcggactaagagcttcgcttgccagccctgccgaggtggatgcgctgaccggctgcgtctttggcgcgattcccccttttagcttccaccctaacctgaagctggtggccgatccgctgttgttcgagcgctttaacgaaatcgcgtttaacgccggcgtactggaaaaatcggtcattatgaataccgacgattacctgcgcattgcgcagcctgaactggtcaactttcgccgagcgcaataa

SEQ ID NO: 85024 - DNA, 147 bp, Citrobacter koseri
atgaatgaagtcgctaaggggatcacggctcaccagcgtttgattacccttttatcgcaggaaggcgccacttatcgtgtactcagtcacgaggcggtcggtaagtgcgaagcggtttcggaaattcgcggcaccgcactaggctag

SEQ ID NO: 85025 - DNA, 237 bp, Citrobacter koseri
gtgacgtttatacccactgcaacaggattgcccctacaagatctggtgatcggcgcatctgtctatttccctccgcttttcaaagcattcgcgcttggatttgttatctggctgctggcgcatcgcctgctacgcgactggatttactcgggtgaaatctggcatcccctgctgatggaactgtcgatatttgcactttgcgtgtgcctgagccttattttgctgattgcgtggtga

SEQ ID NO: 85026 - DNA, 255 bp, Citrobacter koseri
atgaaaaaagtattagctctggttgttgccgctgctatgggtctgtcttctgctgcatttgctgctgaaacggcaacgtccacgacggctgcggcacccgctaaaaccgcaccggcaaaaaccacgcatcacaaaaaacaccacaaagcagcggctcagaaagcgcctgaacaaaaagcgcaggcagcgaaaaaacacaccaaaaaagcggtaaaacatactgcggctaaaccggcagctaaaccggcggcataa

SEQ ID NO: 85027 - DNA, 246 bp, Citrobacter koseri
atggtttacgccctgccaggccgttttcggattaaccacattgattcatcatgccggaaaagtacaatccacagcggctggcaaccgttctatattcattcgcactatcgaacgatcgccagctggccgcagttgcgttcttgcatacgacgcaactgcggcaaccctaacaccttgtcatttacaatgattattgatttaactcccaccgaaaacagcggtttggtgagtatagaaaaagtgtga

SEQ ID NO: 85028 - DNA, 1182 bp, Citrobacter koseri
atgctcaccgatacacaatgccgcactgccaagccgaaagaaaaactctatcgacttaatgatttcaacggtctctacctggaagtgaagcccaatggcaaaaaggcctggcgttatcggtttaaactcaacggtaaatccagcatgtttgcactaggtgagtacccgacggtcaaacttgccgaagcccgcgagaaatgcgagcaagcgcgaaagcaggtcgcagatggagttagcccaacacaggctcgtcagttagataagattcgcaaggtcaacgacgcatccaacacctttgagctgatcgccaaagagtggttgcagatgaaagactgggccgaaattaccaaaacgcggcgactggatatgcttgaacgtgtggtttttcccgcaatcggtaagctcccagtcagagagatcactccacaccatatacttaaaattcttcaggaaacggctaaacgaggagcgccaacagttgccgctgaagcccgtcgcaccatttcatcagtttttgagttggcagtcgcgacacttagagctgatagtgatcctgtctggcccgtgcgcaaagctcttccggccaataagacacagcataaacaagcactaaatcctcagcaaatcggaacgttattaagctgttttgacaatagtcgtggctcgtatcaggttaactattgcatgtggcttatgtggtggacattggcgcgtcctgcagaagccaccgaagcagaatggaaagaattcgatcttgataacgccctatggaccattccggcagcgcgaatgaaagcccgcagagaacacgttattcccctacccttccaagctgtcaaaatgctcagaacactacaggggttaaccgggcatcggcagcaccttttcccgggcagagataatccgctagggccaatgacatcgcactcgctgcgccagctacttaaaaatctcggctggagtggcacttatagcccccatgccaccagaactacagggagtacgcgtttaaatgagatgggttatcggccagatgctatcgaggctcagcttgcgcatgctgatactaacaatgttcgtcgcacatataaccatgcgacctatcttggtgaacgtgaagtgatgatgcaggaatgggcagataagcttgatgtatgggtaagcagtactgatgtttcgtaa

SEQ ID NO: 85029 - DNA, 858 bp, Citrobacter koseri
atgacggttgtcacgattgttgagaagaacaaagatcccagcatcgccagtttcaaaaaaaatctccacgaaataggcaaaaagctgaaagaggaacaagagagaagtaaagggatacaaaaagcggcagatgacttcaataatcgtggttttttggggcgttgggctggcagtctcacctcgagtaatgacactgacttagcgacgatgattgcaaacctgggcggcagtctgaatatcacccaggaagtgatcgagtgtttattacaaatccagtcagaaaaaaatgtcgtgctaaaagagtttcatctggcgttaatgaatacgattcgagacttgaaacacaacgacacgatgctggatctcagcagccgcgaaaactcactggctattcttgaacatctgaaatcccaggtggaagacaaactggaacaggcacagcgtgtcgaggaacatgaagaggagattaaccggttacagtcattgagctggcagcagcaggagatacttcaacgtttgcaggcaagtcaggatgagcacgcaacacagcttgccctcctgaagcaggttgtcccaaaattcgagcgacagcagcaggagcaatggcaacagtcagggaagctggctctggcccttgaagagcaggcggatcagtaccagcaacagttggccttactgatggacaagctgaccttgcaggaaaacgtcgcaacaggcatggcagcgcgggtcagcgaattagagaagacgtctcgattaaaacgtgcaggactgcgcgattacttgctgtttgcgactagcgctcttgccgccggactggtcgttatcgaagtgatgcgttttaacggcgttatttaa

SEQ ID NO: 85030 - DNA, 1482 bp, Citrobacter koseri
atgtcatcacctaccatggttcaggaatacccggaactcaatactcttaaccccctgctgaacagtattgttgataaaaccgttgataatgttgcacgaaaactgattggcggttttcgtaataaacgaaattctcaaccgaatgccaaggcccccaacttcagtacaacggtggatgatacgcttaacgccacgtcgtctgcgagtgtgcttgccgtagcgaatcggggtgttcagtggaaggaaatgataagcaaaagtttcactcatggcatttcatctatttccaccatgaagtttgatggccagttcacgatcaagaatggtgtgccggaaggcctgaaagatgttcctaattccccgggtgtctatgtggtttatgacagcgccggtgaggtacggtatatcggcgatgctaaggatttacagaaacggtggcatgccgggcatcttaatgaaaataaaaacgccaaaaagaatggcaccgaatacaaaatggaggcggagtttgaagagggctgcaccgtcaaatttatggtgatggattcagcagagacggctgcagcggtcgaggctaacattttaaaaaatgagaaacccccggtaaataagaaagaagagctgtgtaaagaacagggtacgcgttctaatatcgaagcaaaaaaaatgaaagatgcggcaaacgaggcgggaggtctggcctttggcgcagggaaagaggcattaaaaaatgtcgggtgggatgtgtttgaaacgctcagtaccacgatgattaaagcattgaaggatgaagttgttgacctgtttatcacacagaaagcgcaggtgaaaatccgtctgaaacgcttttttgataaaatatggcaggttatcgttaacctgataaaagccccgttaaatctgcttagaggtttattcgagttcgtgttaaatgcactgtctcaggccatcggcaaaatttatcagttagcaaaaaatatctatgatctgggcatggcggcactctcgctgatgaagggtagcaaaaccatgaccatggaagaaaccatctataaagtctctgaggtcataatcaccagcgggactctggtgttctgggacgcggttgaaccggtgattgaatccggtatggtggctctttttgctccactggctccctttgccccttatatttctgcctccctgtgcgcgatgggatttgggctgagcagttacctcttggccgatatcgtccctaaagccgtcagcctgatactctcaacggaacctgcctataccgcaaaaggacgggaggctttccagcagttgattactaaccatgaaagcagtgtgggtatggtggctgaactgcaaaaatatgcaggtagcacggtgaatctgatgagtgaaacccgggagcatactgcagaactgaacaatgatgtcatcagactgactcgtttctctcttgccgaagagattaaaaagctgggagcgcactaa

SEQ ID NO: 85031 - DNA, 1158 bp, Citrobacter koseri
atgaaaggggggcactgttactgctatgagctatcggaacagaatatgacgcaacaatttaatcgtaaacgggtaacatccttacgtgacaaaacctcacttggagttaatggtgcaggccagtctacgcatggcagtatagacaaaatagcatgggtaacggacatgcatgtccaggaagagaatcagatactcagacagcgtttgtttagcctcgcttcaggtgggcgctacctgatcaaagttcgaccggctggtaagtatgagtgtggcgggcactatcgctgggtggtggaaatccgactgaaagctaaatcgcgcaagcaccccatattgctggcaatccattttgccccaaccagtagtcagcgtggatttcagcgaatggaacttagtccccagcactattctgcgaaacagataacggacttgtttgtgtggctggggcggaagggacgcatcggcaagtatctatatcggggattacgtaatgcctggataacaactattcattacgcgctggatgtggtgggaatgaagatccacgactatttaatcaggctggttggtgcaaggagcggcgactttaatgatttgcatggagagcaggaaggattacggctggggtctacgactatcgtcgcgtcaatatatgaaaaggccgatgctccgggtgtggcaactgagagaaggtatgaacaagctgtccttctgcttaatgagcaacagttccgacggtttctgcgactggaattgcgtttatcacccggcaagcaaaagctcatgctgaacaacctgctaaacatggagaatctggtatctaaactcgcattttatgaccgtaacgcgctggtagattctgagcttgaacctgatttttctcgcctgctacgtgaatatgtcccttacccggttgccagagcggattaccagccttctgccagcctgaatggtaagcaggtcagcccggcaaaaaaagctgctgataagcgcgttgataaactcatggagcgctaccgtgtggaattattcgattcagaggctgtatgggctatgttaccgcttgttgtggcaaaacttgggattctcgcgcaaccgcaatactggcaatttaagcatcgccagaagtggcttcagttgcgactgaacgacgggtaa

SEQ ID NO: 85032 - DNA, 201 bp, Citrobacter koseri
atgaacaccaaccgtattctccgcaaaaaagaagttcttcacctgaccgggatctccaccgccacgatgtaccgactcatagctaaaggagattttccaaaatctaagaaactgactggagacagtgggcgggcagtgggatgggaatcaaatgaaattcaaagctggattgagtcgcgcgggattagcactacgcagtga

SEQ ID NO: 85033 - DNA, 450 bp, Citrobacter koseri
atgaaaacgattaaacgtgaaacttctgcatccacaataaagttaacgccgtggtttgaaactatggggcaacagattggtttatcgcaacgcaccatcgatgccattatagcggataatcagtcgcggataagaaagctcaataaggaaggatcccgacacgttcgtatcagtatggaggatcatgaaaactacaaacaagttgcgtgggggattggaggggccggccagttagcaatgatactacagaggtgcacatacattccttgtggaagtcaggcctgttcacagtgtgttacagcaaaacaactacaccagcaagctattgatttatacggtgattttaatattcatcgcaaccatgttatcgtcaggtacagcagcacagatttgtcggcgggtgatttgctcgatatgcataacctttcatggtctcataatggtaggtag

SEQ ID NO: 85034 - DNA, 615 bp, Citrobacter koseri
atgattggtaaccaaagcaacaaggctgacgctaaatgccaccgggaacggaaaagcagtaacgaggtctttgaatttctggagaagaagctttatctgggacgggatacccggcaaaaactggcactgattgcccggaaactaacgggagcgggttttagcccggataaattcgacgcagagaaagcggcggatgtgctaagtgcctgcgtgaatcacatgtttaatgacctgctcaatgagggagagctaaacgggatttatgggctggaggagcaccccatgatagttccggccaggtccccaaaggcactggaaatcaacactgtttaccagcttgtaaaaggtcgttttgacaagcttcatacaggggagtcagatcgtgagaaatatgcttcggtagcaaaaaaacttaatgagtatggaatatggaaaccccggttaaaacgtctctctgacggtaaagaatgggcgcgtgaggatgttgcgtggatgcttcagcctgaaaatatcaatgcactgattaaagtccagaatcaaaagtatgcgcggttaagtgctgaagataaaaatgaagccgagtctggcaacggctcaacagctaaaaacacctga

SEQ ID NO: 85035 - DNA, 930 bp, Citrobacter koseri
atgaacagggctgcgttacgtcaggtcgtttcggtggtacaaaccaccgtgctggacgcctatattggcggtctggccccctcggggcggagaggtatcatcagcctgttaaaccgctgcgctggcatacttaaacacggtgcggatgcagcagactatccgtgggaacaacttaactacgccgccgtagccaaagtgcgcgcggcactgctggatgacggttacgccgtgtcatcggtcaacatggcattgtcagcacttcggggcgtagcgcagacggcctttaacctcaattgcatggatgccgaaacgctagcacgtatccggtcagttaagcgcgtgagcggcgatatccagcgcaagggaagggcgttagacaagtcggagatccgggcgctgattcaggccgcaaaacagcatccgcaaccagtacggcactgccgtgatgtcgctattgtgctgacgctttgcggaacaggcctgcgggccggggaactggttaaacttgagcgccgggactatgacaatggcatcctgacggtcaggcaagggaaggggcgtaaataccgtgaaattcacgtggcggatgcggtggacaaggccatccgcgcatggctgaaagttggcgcagatgaagctgacagcgcactgttcaaccgtatccagcgcaacggtaaggtcgccagccagccgctgactacgaccgggttaacgggtatcctggctgagttacagcaaacggcaggtatagcacgtttcaccccgcatgatatgcggcggaccttcattacccgcttactggagcagggtgtggatatcaacaccgtccgccagttggcaggtcacagcgacatatccacgacaacccgctatgactgtcgtggtgagagcatgaaaatcagcgccagtaaacgcatcaggtgtttttag

SEQ ID NO: 85036 - DNA, 423 bp, Citrobacter koseri
atgaatattgtccatcaggaagggctagctatgcccgtcgatcaggaattaataaatatcatattaaatgaagcgggaaatccaccgccgcataaagccagaattaccgctgttagtctgttatttaaagatctgacttacagcgccgaaacgggcggttaccatcctgtcgaaatacggattattacacgcaatgacgaatggtattttgattacattaccgacttcagttatatgggagtggtataccccgaactggaaaaggaaattgatatcagctggagtcagcaatatgtctttcttgctcatgttggtgatctgcctgttaatgcaggaagggagttatttgaactctggcaatccaactttattcagtatcacaccatgaacgtctacaccattaccgtcctgtgggaaagctaa

SEQ ID NO: 85037 - DNA, 153 bp, Citrobacter koseri
atgtccgtggcgcaaggccgtgactgcgtgacagtgacgccagcgttaaccctcgcttgtgaagtgctgccacaatatcggcacgatgccagttccctgaacttcctttgctttgctttttctgcgatgctgttgagttacgcacagtattaa

SEQ ID NO: 85038 - DNA, 363 bp, Citrobacter koseri
atgatgaagagaattgttactgcattagtactgacagccttagcccttccggcaatcgcagcccaatacgctaagccgggtgctgtcttaacgctaaaaccagggaatggtaatgcagagttcagcatcaacgcatcaaccaaagatggttcagggacctgcaacatggacggtacagcacaacaaatagctgctggtgagaatcagaaacgccgttggatctggaacgacagttccagtcagtgtgttgcagtgctgagtgaaatgaaaaatgggaaaaccagcgttatgactcgtggttgcgaaggatactgcggggcttcggcagcaggcgcaatggatggtcaatacagcaaaaattaa

SEQ ID NO: 85039 - DNA, 336 bp, Citrobacter koseri
atgaaaataaatatacttctgttactgattgcagcgggtttaatagtagcctgcggcgataagacaccaaaatgtaatagtgatgacgctaagaacctggtcgttgatatagcacgtaaaacgatagagaaaggaatgaccctagataaggatgtgcgtatttgggtcgagaacgtcaggacggtaagtcatgagtcgggtcttgatatctaccagtgcgccgccgatttaactttcgccaaaccaaacatgaaagactcattacctattacgtaccgggtacagaaaacagaggatggaaaggggcagttttatataaatgtatatggcttataa

SEQ ID NO: 85040 - DNA, 1800 bp, Citrobacter koseri
atgactgatatggtaatgacttatcctgatcttataaaggaagcttttataaaacctatccgtaacgttactgttattgatgatgagtatcctacgcttatttcattgattgaacaaagaaatcaagaggttgttggtggtgaggaaactcttgcattagtaggtgcaaatacagagagactcaagaaaataattactatgtgtcactctacttataagtggagtatagatgttttcaatggtggaacaccaaatttcggtggggatgaagagatacctccacatattcatcatagtgatctaattgtgttagactatcatctcgatggagatgcagccgcagataaaggtattcgtgcccgtaaaatcattcagtcgcttgatcagaataatcactacaatataactctggtgcataccaagggatatgtaggtgatatagaagatgtatttaaagaaattttaatagattttattcatattgatcctgctcatccgttgattccctctgaagatacaattgaaagaatgaatgagtggttggatgcgcatgaggacggaagggattaccgttgggtcaatgaagaaataaaccttcgtgaagtatttaatgtttatttttcggattcccctgaaaagtttatcaatccacgaaaaccaacacatccactaaatccatttttatccgagataaatgatgttgttcaagagtctggtttaacttgtatcgatctaatgaaatggcgttttcatgagattttggtgagaaatgaagttaacatcgacggattatctagagctgatttacaatggcattgggatagcgataccaattatattagcacgggtaaaaccttcatttcggttatccgaaaaagtgaggaaaaccccgagcgcgaacttattgacgcgcttatcgtggcgttaaccaaacataatgcttctcccatgcatcttttaatggcaaaaatgcgttatgaattagatgaaaatgggatagaacaagcttctagaattataagtaatagatatgcccaagcaggttggctctacaatcttcttcaacatgctaatgatgattcagctcatgacaaggcaattaacttacattgggaacaattagcaacagcctcacgcttagtactccgtgatttttctaaaaagataatgtcagttgctaaaaatgacagcccaaacgacggtaaagaatttgttcagaaattctttagtgaatgtatgaataataaagacttagcgttaggacatctaaatgccttctcttgttctatggaagtaaataatgatcatcttatcactggtacagttttggatatcgaaggtgatatatgggtatgcattactcctgcctgtgatctggttcctgggcaaaaggtgactcaatggcagtcacgtattggggaatcacacatggtttttaaagcggttagatttaccaatgtgaacttagaaacagcaaatagtaaagcgaatcggaatgaatatatttacctcaacattgatggtacaccgaaagcatattggttgggtacagataacccaccttgggatacattttatgccaacaacctaggtcgatatggagacggacataaagtatctgtaaccgctgttcgtgaagattctgctgtcgaaggtaaaccattagttatacgtcccttagctgcttacgctgtagcagagttgcgttatgagtatgctctgaatctgttgcataagtttggtgtatcgcaaacccgagtagggcttgatttccaagaaaatactaatatgtgggtttaa

SEQ ID NO: 85041 - DNA, 1341 bp, Citrobacter koseri
atggcatctctaataaatcttgtaaccacattatctgaatttaaagataatctggcagggagattgagtttagattcaattgatgagctacaagcgcttaagaaaactaccgatgaatttattgagaaaattcagggctattcattgagtcctatacctacaaatcttggtcgtttggaagaagattatcgagcttataggaaagaagaattactttgcaaagagatggtcaagggtctctcatatgtaataaacaaagctattgcagattctacacaaaaaagtgactacgaaaaagcacatgaagtttatcgcagcaaattggcaagtatcaataatagcattacaagatatgcttcccgcggtaaagaaatgcttgtcaagcagcaggttgaactcgaagagttaattaaaaattgccgagagcaatataaacttgttatggaagaaagtcttgaggacttaaaccttaggagaatatcattaccagtagtgcttgagaaattagatcacgaacaagagaaaattgaaatagaaaatgctcaaaaattatctccatatgtcacagcacttgagcgtattaatgaacagattgatctggaaggcctcgccatccacagcatgaatgagtccgttcgttatagagatgaattagctcggttgcattcgctagcgcagctcggaattacagtcgaaattatcggtcatgaacttgatggattagatcaagagcttacctatgcattgaaagtgataaaagatgatcagttgactcctactcaagcgaaaaatatcgatgtggcattaaattgccataactcattaattgataagcttaaatttctttctcctctaaaactatccgggaagaaagagattcagaaaattacaggtttaggtatagaggaatatataacaggatatttttctaaacaactctcgacagcaggtataaagctttcatgcactcctgaattcaggaatatatcgattatggatttgcagtcaagaatcttcccagtatttataaatataataaacaattccatatattgggtgcagaggagtgaaggcaataaaaaagaaatattactatcatattcggataatgaggtgtttatcagtgatgatggtcctggtgtagatgttgatgatctcgaaagtctctttaccctgttcttcactcggaaacaaaaaggtgggagaggtgtagggctttatctatgtaaacaaaacctaatggctggtggacatcgtattcgctatgaggctcgagactctttcaaaaaacttaacggtgcaaattttgcaattgcgtttaaaggattgatcaatgactga

SEQ ID NO: 85042 - DNA, 1578 bp, Citrobacter koseri
  misc_feature (1519)..(1528): n is a, c, g, or t
atgactcaacatgttacgtttcagactagagcaaggacgattgatcatctagggcgagagcagatagctgactgtcctacagctatatcggagctttggaagaacgcttatgatgcttatgcaagacaagtaagtcttcacatctttgatggggatttgaagatttcagccattgttgatgatggccacggtatgaatcgtaacgaatttgaatcaaaatggctcattgtagggacggaatcaaaaactaatggtttctctattcctgaaaatgatcgagatggtttaccggagcgtccaaagcaaggtcaaaaagggattggtcgcctgtcatcggcagctttgggaccactgttattactcatctcaaaacgaaaaaacagtgattatgttgcggctcttatagattggcggttgtttgaaaacccgttcttatttttgaatgatgttcaaatccctgtcagcgagtttaaccataaaaatgatctatcagaggtacttccaaaattatttgaccagatgatggggaatatatggggcaactcagatgatcctgctcgtacaaaacggatagcggatgcctggaatgcttttagcaaacaagaaaatgaagatggattagaagttactactcaagaaaaaatagaaaaaacattgatacaagatgtattcaaagaaaaccattttagtaaatggggtgtatggtcaggtgattcttcacatggaacagccatgtttatcgctgatgttcaatatgatatttatatccagttatcaaatactgagcttaatcaagctgatgacactgaaaaaagtactcgggagcgattctttcaaacactttcaaatttcactgaccctttctcccgtaataatgatgaatcggtaatagacgatttttcatatagcgtcactggttggattaatgatgtgccgaggacaatcattggagaaaatcgagagtttgatctaagaaatcttgaggatttagagcatatcattgaagggaaagtagatgctgaaggttatttcaaaggtagaattagggtttttggcgaatggattgaagaatattcaataaaaccgaaacaagtgtacaaaacacgaaaagatagcgcttttggtccatttcacttacgaattggatcttttgaatggaattataatagttcgtcattgaatgattcccagcatgcatattttattgaacagtcagaaaaatatggtggattgaaagtttatcgagatgggctaagagttatgccatatggacgggctgacagtgattacttctcaattgaagaacggcgatctaagaatgctggacggtacttttggtctaaccgtcgtatgtttgggcgtatcgctataacgcgcgaagacaatcctaacttgaaggacaaagctggtcgagaagggtttattgaaaatcgcgcctcaaaactgtttcgtgaaatagttgagaagattctcttagattcagcagaaaaacactttggtaggcttgctaaagagcgannnnnnnnnnagacagaaaaagcacaattgatgatctcagagaaaagaaagctcagttaa

SEQ ID NO: 85043 - DNA, 1212 bp, Citrobacter koseri
ttgaaagcaattgatttatttgctggtgcgggaggtttttcgctagcagcctttgaggttggcattgatgttcaagccgcaattgagcttgataagcaagcctctgatacttactactataaccttgttgagaagcttggcgcacagactcaggtgttttcccaagacatcaatgatgttgatattggctctatgatgaagtttcagggcatcaagcagggtcagcttgacattttgctcggtggtccgccatgtcaagggttttcatcacaccgcattaatgatgcaggaaaagatgacccaagaaatgctctattgatacgttactttgatttcgttaagaatctaagaccaaaagtatttctggttgaaaatgtgccgggtctcctttggcctcgccatgcagagtatttgaacaattttatcgctctcacgagagcacatgactatcaaatcgttggtgatcaacccttcattcttaatgcgagagattatggtgttccacagagccgtaagcgtgctttcatactcgcagtaagaaaagacatatgcactgatggttttgaatggcctccaaaagcgactcataccaaatcgggttcaagggcgtgggcaacatcttctactgtgtttgaacgtcctcctcaatcagtattgattgagctaaaagatagacttattgagaaatttgatttcacaatggaagacgctgaaacctgcattaagtcgttaaattggggtcaacccgtagattccaatgatccatgtcatgttcatatgatgcattctcctgaactgacttctctgtttgaaaacacccctctcttaggggacagaactgaatcgggaaggatattggattgtcataaaaattacagtggccatctggatgtgtatggaagaatctatccccatataccatcaaatactgttactacgggttgtaataacccttcgaaaggccgttttgttcatccgtggctaccgcaggggatttctctcaggcatgctgcgcgtttacagacattccctgacgattatgcctttttggggggatcaatgtctgttgctaaacaaattggaaatgctgtccctgtggaacttggtaaagtgctgctgggaacaataatgaaactactatcaacgcagccttcccatgaggttaaaaataattccagggaagtagattatggtaaggaatgtacaaaatga

SEQ ID NO: 85044 - DNA, 714 bp, Citrobacter koseri
atggaagaaatagagcattttaccgatgatcggcacaaagcctggtgtatccattgcggttcgcccattattgatcgtcatacaaacagagatcacgttccgacaaaagggttactagaaagacctctgccgccccatgtaccacaagtcgaagtatgcaaggaatgtaataccagcttttcattggatgaagagtacttcgttacttttctgagttgtgtggaggcaggaagcacagacccttcagcgcagaaaaatccaaaaatcgggagggcacttacacgtaacccatccctggctgctcgactacaggcagctaagcagattacagtggatgaatatggcagacagcagattctttggctacctgaaatagaacgcatacatcgggttattttgaaaaatgccagaggccatgctttctacgagtacggagagccaatgttggacgatccagtctctgtaagtgccgttccgctaatgtctatgaatcaaaaccaacgtaacgacttcgaagaaactggtggaccctttgctggctggcctgaagttggaagtagaatgatgactcgtgtcatgacaggtcaagacttagatgatggttgggttattgttcaagatgacatctatcgatacgtggtatttcaacaaggcatactgacagtccgctcagtaatacataactatctcgcaactgaggtggtttgggaataa

SEQ ID NO: 85045 - DNA, 516 bp, Citrobacter koseri
atggaacgtgtcaaaagtattacttgtaatttgctgttaaacacagtgattttatttgcggtcacgtcagaagcgtctgccgccacatcggacaagttgcgtcaggcgcataatcagcgctgtgccaaaccggtgttttacgcgcagaccacaaaccacaaaaaggaggtggagatttgtattgtcactccgtcggtttcatattcgttcggtaaggtgggggaaaaaagcaaagagatggatatcaccgtcccggcgcaggcaaccaattacgcgtaccagagcaatcatgtcatcaatattcaggattttacggtcagaaatggggatacaacctatcaggtttcagcgggttcgaatgattcaggggagccttttgcatcgctttatgtatataaaggcactccggagactggaaagctgctggccgaaatcaaactcgacccgaatacggtagccaacaatatcagccattctttggcgaatgatggggtcgctcagacagacggcctgtga

SEQ ID NO: 85046 - DNA, 552 bp, Citrobacter koseri
atgaaatcctatccgtttcttcgtgcggacttatttgcctggtgcctggcggttgtccttccgctcctctggattgtcctggccctgaattttccacagactctcgcgcttgtcatttatatggtcgtagccctgatatgggtgttgctggaccggacaaacctgatgaggcagagcatgacaccaccttcatggttgtggtttcctctgaattttgtctaccttcgccagcgcgaccagatgcagggcaaaccgtggcggcttctgcaggtctggttgctttgtacagtgctgtcattcgtggcgatatccctgcttaaccggcagtcaggcacagaaaatctggcgcagagtgcctgcactttggtaacgaaaatcctgcatgaggaggggtttgacgaacgctgtatccgtgtgatggatatgcaggaagaagtgcgtggccgtttctggcaggcacaggcgttgctgaacaccggcgctaaggagtcggttaccattgagcgcaggggccgggatatttatgtcgtattacccgaagcgggggagtaa

SEQ ID NO: 85047 - DNA, 882 bp, Citrobacter koseri
atgaagaagcaatccccgacagacactccattcaggcaaatcctctcccggctgcctgctgaagcagcaaataagatacaccgccaactccacagcatcattaattatgaaccccgcatcggtctgatgggcaaaaccggctcaggaaaatccagtctgtgcaatacgctttttgctccgccaccagctattgttgatgccgtaaaaggatgcacccgccgggtgcaacgctggcatgtcagccataataatcgcatgcttcacatcatcgattttcctggtattgccgaaaatccggagcttgatgccctttaccagagaatttaccggaactggtcgtcaaatctggatgtgattgtgtgggttcttaaagctgatgagcgtgcctggaatgatgacatccgctgctatcgctcgctgatagaagccggtattgctccgtcgcgctttgtttttgttctcagtcaggctgacaaaatcgagccctgccgggaatgggataatgaacagcatcagccatctgatcggcaggttattcatattcatgctaaagctgaacttgtcagaacacaattcaccgccgtgcatccggttatcgccgtatcggcaacagaaaattttaaccttgagcgatgggttgaagtcctgatcgacgcgctaccgataaagagtgctagtgcctttatcagtcaccttgatcctgaactcagaagtcagcgtgtacacaagaccgcacgggaaggttttatccgggcctcgggcgacatttttgatgatgcagtgtcagttatacaaacctccggaaaactgataaggcaattacatcatcttcgtcagcgatttttgtcagtcattcgtgccatctggcatctcctgttctga

SEQ ID NO: 85048 - DNA, 870 bp, Citrobacter koseri
atgaccagtaaaaacagaatcaccgttaatttcaaaaaggagcccttccggcttcttgaaagccttgccagagagcatggtccaagcctggccgggctgactcagagtattgtcactgctgcagtaaggaataacgtggcggataagctgtatctggagaagctacgttccagtgccgcactgatgaaatatagtgataaagaaaatgatgacaccggcaaaatactactgcagaccagtaaacgtgatgaatacggtaatgagaacatcgtgctcagagcctgcccggttaagcttggtgattatatttcgcagccagtatttttatcggagagagacgctgcggtgattttaaaagagagggtgagggagtgtcttaaagaacatatcaaaaattgtatccctgcggttgtggggcaactggggggaactccggacatgctccatcttttcgtcaaaagagcaaatgttcgttgcgacaaaacgcaaaaagacttctggagtattcgcattacccctgaacttcatgttatacctgttttcaataatgatcttcatagaagcaggcttgatttcctgaatattagatatcgtaatttcagggatgtggccgttaagggttgggataaccaaaaatatgaaaaaatgctgcttattgataccgcgtcccgctctcgttccggaggttactttatcggtgtttcatggtctgatattgattatttaagctatggctatgaggattttctacctaaagaaatctctttttcacgtggtaaaaaagaattactttgtcaaatacatatccataaccgggatgtaagtgtgaaagttttcaacgaaagcggtgacaaaattctctgtcggtaa

SEQ ID NO: 85049 - DNA, 705 bp, Citrobacter koseri
atgaccgaattattaaccgagaatcccttcccgttaaatccagcaactcacaactaccactatatatatcgatttggcagcactatccgcaatgcgttaatcatccatccccgcttactggctattcggatcgacctgcgctttcccgatgactacgaggtggaggggaataaagctatgaagtcgtttatggcggcagtcacttccagacttgaagcaagatactggcagaaaaagagaacaaatcccggaaaacatgtccactactctgaactgaattatatctgggtgagggagcataaccggtgcggaagtaaagtacattatcacgtggcgctgatgtttaatggcgatgctttcaactcaccgggtatctactggaacaagggcaacctaacagacctaatcatcaatgcctggctcagtgcgctcagaataaaaggcgaccaacatcgtgggctggtctatttcccgaagcattcatgttatcgcctcaatcgaaaaaatctgggcagtacatctgaatttaacaaactgatgcagcgggtcgagtacatggcgaaacaccggagcaaactgtacggcaagattcgctccatgggatgctctgtgtatgacgaaacagaactgaagaacaaaaagaaaagaagcctgtgtggcaagcaggcttcttccttgaaaacttcgctgccccagttgcagtga

SEQ ID NO: 85050 - DNA, 207 bp, Citrobacter koseri
atgaccaccgtacctgccctgtttaatgaccagcttgttgatatggcattcatcacaacctacaccggtatgaccgacaaatggttctacaagctcattagcgaagggaagtttccaaagccgattaagctgggaagaagctcccgttggaaagaaagtgaagtgaaggaatggttactagagcgtattgaacaatcgcgtgactga

SEQ ID NO: 85051 - DNA, 228 bp, Citrobacter koseri
atgattaaagtccttgttttctttaatgctgaatcctgtaaagtcatgaccgttctggaaggtatatcttctatcaggcaggaatatccgaacggtgaagaaacacatcttcggattatgtctgcaggttttccttccttaactggcgatcatggtattgtttacgtggctactgacagggagttaacgtcacaggagatacttgatgcggtcaggaaatatttatag

SEQ ID NO: 85052 - DNA, 405 bp, Citrobacter koseri
atgtcagatgctctcacgcagttgaacaatatccgtaccttacgttcccagactcgtgaaatgtccttagatgtgctggaagatgttctggaaaagtttaaacttattcttatagaacgacgagaagaagagacattacgtcttgcaaatgaaagtcagcgccgcgataaactggaatcacttcgtcagatgatgcttgatgagggtatcgacccatccgaacttatggctgctattggctctccgggtaaggctaaaagaacgcgctccccccgccccgcgaagtatcgatatactgacgaaactggagagtcaaaaacatggtcaggtcaggggcgaatgccgaagcggatctcaaatctgattgctgaaggtggggaattaaaagatttcgaaatcagctaa

SEQ ID NO: 85053 - DNA, 219 bp, Citrobacter koseri
atgaaatttcaaatcacaagagcaattggcctcagtaagttctctccacgttgggttaaggttatctgcttacggttaattaaaaatgatattgaacgctctctcaacgttcttctggtcaaaatcgatgaatctgaactctctacggagcaactcaaagcgtttaaggaatgcgttgaaagaattaacctggcacggggtaaggggatgcaggcgtga

SEQ ID NO: 85054 - DNA, 336 bp, Citrobacter koseri
atgttcagaacagaatacatcatcgatgagataactcaatggattgattcaaacttacacaagccgctgaagatagaggatgttgctgcgcgggcaggatactccaagtggcatcttcagcggatttttgtgcaggtgaaagaagtcagccttgggaagtacataagagatacgaaacttagacttgcaggaatagatcttattaatacttttattccagtgttgggcatagcttataaatattggtttgactcaatacacacttttattaaacctttctctaaagaacataatttctcaccaacaatgtatagaaacgcaaaaataaaagtatag

SEQ ID NO: 85055 - DNA, 687 bp, Citrobacter koseri
atgagcacacgatggttacgtattctggcagtcctgctggcgctggcggggtgcagtcacccacagacgtaccccttacagtcgaagcaggccgccagcggcgactggtctttaccctacgggaaatggagtttttcttttatcactccctggcgacttccagcacgggtgaggcaggctcgggtgattgatacagacgggtatctctatacttttaacacggttgaccatacggacaaagatccggattcggttaacaaatggaagacaaatctccataggggaggggtgacttttaataaagttaataaaccaccacagtatatgatcttctgttgggattcgttcattgaccatcagacctacgaaacccgcgtgatgttttctcctgccatatggcagaggatgaagaccccagcagaccatactgatcgttcaggagatcctttctggtacaacaatattctgttcggccttgcgcctggtggcaaggtcaggatctggttccctgatgcaggagattatcctgccattcctgtaacaccccggaaaatccacaccctgtcgggtaatgaactgacgatctgtaaggagggggcaaacagcgacttcctgcgcgaataccgttattccagcgatacagaagcgtttatcaaaggaaaaacctacccctacggggagtggtaa

SEQ ID NO: 85056 - DNA, 330 bp, Citrobacter koseri
atgaaaactctacctgctacaatttcgcgggcggcgaagccctgtctgtcgcccgtagctgtctggcaaatactactgacacgcctgctggaacagcactatggcctgacactgagcgacacgccgttcagtgataaaacagttattaaggaacatattaatgctggagtatcgctcagcgatgcggtgaactttcttgtcgaaaaatacgggcttgtccgtatcgaccgaaagggattttcgtggcaagaacaaaccccgtatatttccgtagtggatattctgcgagcaaggcgctctaccggcttgctaaaaactaatgtgaaataa

SEQ ID NO: 85057 - DNA, 219 bp, Citrobacter koseri
atgtccttcaccagcatcaggttcaaagcaccaggcccgccagaccattcgaccttcagagtcacgagccaccaggcggaagtgactaccctggtcgtcttcaatgccgatgttgcgataccggcgggtaaccgcttcggcctgctgtcgggtaaaaggtcccggtggcagcatgtgagattcaggcattcggtgtaccttaaaaacaaaagcccctga

SEQ ID NO: 85058 - DNA, 741 bp, Citrobacter koseri
atgaatagtgataccttacgaacattaagcctttgtcgatgtagttcagtatccttacctttcctcacggtatttttagtggtcgccgtcaatggatgcggggattatgtagatcgaaattcatacgaaaggaagcaaatcatgccgagaaaaacattcttttcttttcactatcaagaagatgtatggcgcgcgtggaatgtcagaaacagttgggttgtgggcagagataaagaatcagtgggattctatgatgctagcgttttcgaagcatcacagaaggaaagcgacaacgccctaaaaaattttctacgcgatggactaaaaaacacgtcagttacttgtgttttggctggtcagtacactgctagcaggcgttgggttcgatacgaaattgtacgcagcgttttgaagggaaatggtctgctgactgttgacattcatggcgtaaaaaacaatgcgaatattttggggaaaaaaggaatcgatccactttccgaagtcggagtttactgttcgaacgggcaaatttattttgctgaaattaaaaacggtaaatgggtaaaatacgaggactacaccttagctattcctgcatccgatctgtggtttaaagcccccactaccttgggcgtaacaaaaatttcagaccatgccctgagatacgattacgcagctcagaacggcagagaaaacatatctggatggattgaaacagctgctggacttgctggtcgctag

SEQ ID NO: 85059 - DNA, 1617 bp, Citrobacter koseri
atgctagttaaacaacgcctggcgggcgtgcgaatccacctttcgggctcgaacaaagagcaaaacgaagatattgaccattttgtgagtaagtttgcggcaaagatctttgcagaagggggaacgatagtacatggcagccacccttcgtttaacgctcctctaaagagggcagcagaaggttttattgatgcaggtggggacaaatgtgcgctcactctggttcgagcaaaaagcttcgctacagctcagtatgctgctgaaatcgatgatcaacgaatgtatgcggctgtcgagatagttccggcagagtccgcagatggaaatccgataagtggtttgactcccatgcgtgattggatggctgatcgctctgatgcgattgtctgtgttggtggtgcctggtgggatgtcaataaagcgaatgcgggtgtgcccaatgaactagacaccatgctggagcttggaaagcctggattcgtcgcagccgggtttggcggcgcgattgctggctatctcaatgaagatccgtcgctaataagacgcctaaaaaacggactgggtcaagaggctaacgaggtcattgcgcgtggcactaatgttgatttggttgtcgatctgattgtcgagcagctcaaaaatttgcccctctcacgaaggaatgtaactcaaggccgaaatttccgaattttggctttagacggtggtggactgagaggcacatttactgcagctgtgctggccaagtgggacgatatgctcaaagctggtggaggaaatggcatcatctctcatttcgatttagttgcaggtacatcgacaggcgctatccttgccatcggtctagcccttggcctgaacccaagtgaaattctggctttttacgaagaaaagggccccaaaatttttcctaaggatcgaaagctgagacattggctcaaatccaagcatgattcaaccaccttgcgacagctacttacagaggtgtacggtaaaaagacactggctgcagattcatgctgtcgtttggtcatacctacggtaagagctaaacagggacaagcagaagcgatagtaacgcctcacagtccagatcgtactgcgtatcgcgatatctctgccgtcgatgcggcattggcttcgtcagctgcaccaacattcttcgacgagtcggcatgggaggggccaatcgccctcgaaacgttccttgacgggggagtttgggcaaacaatcctattttgcctgcgcttgcggaagctgtcagatacctaaaaattccattggatcgtatcgatgtgctgagcattggaacactcagcagtgaaagcgattttactgaccagttggggaagggcaaagccggatgggcacctcatagcgctgacctgttttttgctgcacaggagcacggggcactcgcacttgctgaaagtttcctgggacccactcgtcatttgcgcatcaaccaacaaacccctgtcgaaatcaagcttgatgacagagaggcaattcaggaaatggctgcgcgtgggaatgaagcagcaaaagaacactttgctgaagtgcgctcaaggttttttgatggtcgtcatgccgatgaatgggagcgtttttaa

SEQ ID NO: 85060 - DNA, 837 bp, Citrobacter koseri
atgttcttggacttgaaaattgaaaatgtcgttgcgtccgattcagaatggagtgattctgacgtcgcatcctacaaagcgaaaaaagacaacattgccatcaggcttgaagagtacctgctgaatggtaacaacctgctggatgcagagaaaatccagcaaagcgtatttccagagacggagattgatgtattcatatcccactcacataacgataaagatcaggcaatccgtattgctttaagcctagaaaaaattggcctgaagcctttcgtcgattcatgcgtttggggctacgctgatgagttgcttcagaagattgataacaaattttgtatcccttcgggttggaaaaattatagctacgcactgaggaacagaacgacaactaatgttcacctaatcctaaacgcagcgctccagcagatgatccatcgttctgagcttttcgttttcttaggcacggaaagttcgatcaagattgatgaatacatgtcggataaggagcgactttcctctccctggattttctccgaacttatgtttgcacaaaatgtaaaacggacagagcgcaagcaattcgaacttgggggattggagagttatgggaaattgaatgaggcggtgtttgataataaacctgttgagtttagatacttactcccgcagtccacttactcgatggattatgagcagtttattggatggataagtacctactcccagccggatgctcacgatagcattagacggatccgcggattcgagcatattgataagctttatgtggaactgggggttgatacgaagctactagaggcacctcgattcagatga

SEQ ID NO: 85061 - DNA, 1143 bp, Citrobacter koseri
atgcttcctatctatcagcttgctgttataggctccccttcagacgcgcaacttcgcgatttggaggaagcggttaaaactgcagtggagatgtacgggctacgactcggtcaggagatcagttgggaaatagctcctggtatgtttacaccaaatcagttgcgatcgagcgcggttgtcttttttggaggagagggcgtagatcacccaagtttaccaagcttgcttcgcagcggtactcctgtaattccaattgtatccgatctacgacatgtatctgcggagattcctgagctgctgcgaccgctgaactgtctggcctacgcaaatggtggtgctaagcgagtctcgatagctcttcttgaatgcgctggattgcttccgaaacaacgaagggtcttcgtaagctaccgtcgggatgaggccagagttgccgcgctgcagatgttcgatgctctatcagcacgccatttcgacgtattccttgatactcatagtattgcgccagcagaagattttcagaccatgttgtggcatagactctgcgattctgacgtgctgttgatgctagatactcctgactattttaatagtcgttggacatcagctgagtttgggagggctctcgcgaaaggtatcagtgttcttcgagtcgcttggcctgaaactaagcagtctcgtggattgggtactgcaagccttgctgagttagctgagggcgagttggacggcggaacaggacgtatcgagaattccgctatcgaccgcatttgtctacaacttgaggcggtgcgcagcaaaagtcatgcagtgaggactatcaacctagtcagcaacttgcgcattggaattgaggcaataggtggtgaagtcattggtatgggagtggggcgggaaatcaaagttcgtctgcccacaggacgaattatagtggtctacccgacggtcggggtcccgacgtcatcaaccatgcatcaagcctcaatgaactatccagatgaatcagttgctatactgtatgaccacgtgggtctacatcctcagtggctgaatcatatggattggctcggctcgcacatccaggcaactaagtgggtgaaagcatgcgaggccggctggcagtttgcagattgggaggtttaa

SEQ ID NO: 85062 - DNA, 588 bp, Citrobacter koseri
gtggattctatttttctctcagcaagcgtcccagtcaatgggcgaggtgattattacgaaactgctgatccgttcctgattcagtgtgctgtacgtgagttagccatcgcggtcgtaagaaaaatgaaaatcgtatggggggggcaccctgccataacacccatgatctggagcatttgcgaagatctgggcgtcgattacacacactctgttgtattgtaccagagccgctttttcgaaggccagtatcctgaagaaaatgagcgattcgacaatgtcgtttacaccgatgcagtgactgatgatctagctggcagcctacatcttatgcggaaggaaatgttgtctcgatgtgacttagttggcgcagtctttgtcgggggtatggagggagttcaggttgagtatgagctctttaagcaatttcatcctgacgcaataattctaccggtcgccgcccctggaggcgcagcactgagcctggcaagggatcatggctacttagatggaggccgtctggaagacgtggatttcgcatctttattcgatcgttatctaatcaaacctctatgctctcaagccaattga

SEQ ID NO: 85063 - DNA, 663 bp, Citrobacter koseri
atgttaatagaaaacaactcttatctttatgcctattcaataacccgagactttggttttgcgcctaacccatttcatggagtttgtaccttagcaacatgcaaacctagaattagaaaggctgctaacattggcgattggattctggggattggcggggctaatttaaaatacgttaaaaaaaagtgtattctactaatgaaggtgactgaaaaaataagttttaatgattattgggaagacaatagatttgccatcaaaaaaccagcgagaaatggtagtcatgtgcagattttgggagataatatctatcatcaagatgacaataatgattggattcaagaagattcacatcatagcaatgctgatggctcattcaatatgacaaatcttgaacgtgatactcgtactgaccaggtgctgatttcaagacatttttattattttggtgataaagcagttgatatagacttagactcaattggctatcacagaattagagattatataaagctttccttagatcactctatccctgcaaatgatcttattaaaaaaatagacgctgagtttcatagtgataaaaatatagttatatctgatccatgccagttctctgatttctataaacgtgtagatcagggaactggtgtgctctcttaa

SEQ ID NO: 85064 - DNA, 609 bp, Citrobacter koseri
atgtcaataaagaatccagagtatgttttttttagcgccgcgtatatacttggcggacctaaagttaatttcgggagatttttagaagaaaaagagcataaaacggaaatgaacatgattatcaggatgatcaagtttgttttttataaccaagataaaatagtaaagggcgtaaaattagcggcaaatcagttagaagtattcaatcatcttaaatcattcgcggggattggcgattttcttgcttatcaaatatttgtagatttaacatacatagttgactttccatttacagaaatgaattttgttatttctggccctggctgtgaaagagggattaattggattttttctgatagaggaggaatgaatagcgaagaatgtttattttggttcactataaaccaaagcaatattgcagaaaaatataatgaagagtgggaaatggataaaatatttcactttttgcctgaagaagaaagaatatatacgctaatggatatggaaaatagtggtgcctgtgaaatagataaaagatgtagaacaaagtttggtggcaaaaggccaaagcaaaaatatcattatcataataatatgaggctattttaa

SEQ ID NO: 85065 - DNA, 141 bp, Citrobacter koseri
atgaaatgtaataatttatgcacaaagttatccacagcgcgctttgcgagcgatccagaagatctacaaaactttttcgacaaatgcggcgaaaaactcatgttttcatcctgtctgtggcatcctttactcataatctga

SEQ ID NO: 85066 - DNA, 1158 bp, Citrobacter koseri
atgtgcagtatttgtgtggattcttttatgctcgaaaatggtgagagatattgtcatgtcgtaaataaagatactggtgagccattgtattatccaaacttgtatataacaacacaagtcaggaatcggtcagagtctatatcaacaatgaaggttattgccggtagcatttcattgttatatcgattctttatgagaaaaaatatcaatattgatgaaagaatccagaagaagctgtttctcgctcctcatgaaattgaggatttgattgaattcacttcattaaatttccgagatggaggggatggtaattttagggtttcaaatgtcaaaaaaccaactaagtattttcgcattacaacagtcgctaactatcttgaatggttgtgcaaaataattctttcacatgcagggcagaaaaatactctcaaggaagtaatggctttcattaataacataaaaagaaagaaaccaaggaataatgataaatataatatggaaatcgaaaaaagcttagacaaagcacaactagattctttattcagcatactttcgccagggagtaacttgaacccgtttacggaaaaagtgcaacaaagaaacaatctaatattccttctattacattgctttggtttgagagcaggtgaacttttgaatctgcgtattggcgatatggattttgcagaatcaacaatcgcaataagaaggagagcaaatgataaaacagatccacgagtttatcagccattagtgaagacgtgtgagagaaaattaattgctgacacaaaacttatatatgaaatttcagattatattttgtttattacctataaggaagggaagacccaagggcaacctctgtcattttcctcataccataagatagtgagtgttgttcgtcaatcatcctcacttctaagtggattaacaggtcataaattacgacacacatggaattatgagttctcaaaaacaatagacaatgcccaagatatatccgatgaaaaagaacagcaaatccgttcttatctcatgggatggcgacctggttcagatacttcaataatttataatcgcaggcatatttttgagctatcgaaaaaaactgcacttgaacaacaagagcaactattcaaaggaggatttgatgaataa

SEQ ID NO: 85067 - DNA, 294 bp, Citrobacter koseri
atgagctacgagaacgaaagtcaagtaaccaaatggttaaaagaaaatacaaaactctcttggacccgtactggaagcgacactccagcagttaaacttgatagactatatacaaatcgaagcgaaggttatgaaatccgcgatgtaatacttcgattttttaaagataataatgtcgggcataaggatgaacattataaaattatatatgacggcattattaattacaaaaaaggtcatcgtgtagaaacatcagacttacttgaacacttaaaaacctacttgaaaaaataa

SEQ ID NO: 85068 - DNA, 726 bp, Citrobacter koseri
atgtatagagtaaatcaaatcatcaaaactataagcaaaatgaactcctatgccccctataatcagataaataaaaaaagtaacttacttagaaaggttcaagtatattcattcattacatctctcttttctcttattttaatggtcataatggccgttatctacaaagtctttgaccttcccaaacaaccatttattttacctgcattggttttgtatgccctcaattcaattgccggtataatatacttatttacccctataattcctggcgtgaagttcatgctcaacttcaaaaaggaaattttcaacgacctgatttgtgaaattgataatgatgaacaaaacatagaaaaactgatgccttactcgttgactgaattaaactattcaatagattggttaaatataaagatacaaagagtaaaatcaaggataaatgatttctttggagaaaaaactgctgttttatcaataattggattagcatactctgcagttcaaggttttggtgggttagacaaattaggtgataccatatcaaaagggctcttcaactctggcacaacaaatacactaattgtatttgggttggcttttcttttagggttatcacttggagcattagcacttaaaaatgttgcaaatcatttgcaatatctaaaagaagtgcttgaattaacgaaaaaaataaaagaaaaagatgcatcagcagagcgagagtaa

SEQ ID NO: 85069 - DNA, 1764 bp, Citrobacter koseri
atggcggtggaaaaactgattgtcgaccatatcgacacctggaccacggcgctacaaacccgctccaccgccgggcgcggcagctcgggtaagattgacctgtacggcattaagaagctgcgcgagctgattctggagctggcggtgcgcggcaagctggtgccgcaggatccgaacgacgaaccggcgtctgaattgctgaaacgcattgcggcggaaaaagccgagctggtgaagcaggggaaaattaaaaagcagaagccgctgccggagattagcgaggaagagaagccgtttgagctgcctgcggggtgggaatgggttgcattacaagaaatatgttcattagaaaatggtgacagaagtaaaaactatccgaataagtcaacactagtagagacaggaataccatttgtcaacgcaggtcatcttgaaaatggaaatatacgacaagaagacatgacattcattacaccagaacattttagcattctccgttcaggaaaattcctcaatggtgatattttattttgtcttagaggttctctaggtaaatcagcaattgtacaaaacctatcaggagcaattgcttcatcactagtaatcgttcgtgtttttaagcctacatttaataaatatattcatttatatttcgatgcgccattatcttatgattttataaataaatatgataatggaacagcccaacctaatctggcagctacagatttagctcgttttttagttccattaccaccactagatgagcagtctcgcattgttaataaaattacggagctaatgacactctgcgaccaactggaacagcactccctgaccagtctggacacccatcaacagctggttgaaaccctgctaaccacgctaaccggcagccagaacgccgaggaactggccgaaaactgggcgcgtatcagcgagcatttcgatacgctgtttaccaccgaagccagcattgacgccttaaaacagaccattctgcaactggcggtgatgggcaaactggtgccgcaggatccgaacgatgaaccggcttctgaactgctcaaacgtattgcgcaggaaaaagcacagctgataaaagacgggaaaattaaaaaacaaaaaccgttgccgccgattagtgatgaggaaaaaccttttgaactgccggatggttgggaatggtgtcgaataagcgatatttcaacagtaggtacaggagcaacaccttcacgtgatgagcctaaatattggctggatggtgaaattaattgggtgaccagtggtgaaaccagtaaaccatttattaaaaccacaagtgagtgcgttacaaaaaaagcgattaatgatactaatgtttcgatatatccaccaggaaccctcattattgccatgtatggccaaggtaaaaccagaggccaaattacagaattattaataaatgcaggcacaaaccaagcatgtgcggcaatccaattaatcgcaaatgaagatagccatcgtaaatttataaaaattttctttgaaaaatcatatgatgacttgagagcattagcatctggtggtgctcagcccaatttgaacgtcgcaaagatttctcaaacggttattccactaccgccggagcacgaacaagcaagagtggtattggctgttaattctttattgaatttatgtagttcattaagaaaacatatccaatccgcccaacaaacccagctccacctggccgacgccctcaccgacgcagccataaattaa

SEQ ID NO: 85070 - DNA, 1029 bp, Citrobacter koseri
atgacaaaatttagcgagacccttattcatcaggacgtgcgtttcctgaacgtccgcaccctgcttgacagggtagattcaggacgccttgatgccaagccaccttatggctcaatgcctgctttatccatcgccattcgttctcagatgattgagtcattgattctggggctgtcaactgaaacgttctgggcggagcaggatggtttaggcaggacaatgctactgtccggatttgagatggtttcagcgatagccgcctttgcctggggccggtttgccctgaaagaccttcgggtgttaaagcaccttgaaggtctttcttttgataatattgattacgctgacagacggcaatttgaacagatggaactgattttcataaccatttcctacgattcaaatcctttactgaagtgcatgctggtcgagaaaatcaacagaccaaggcatggttcaaacgcagctcagtttgcccgaaatattattttccctgcgtgcgcggaaaagatattggacctggcaacatattgtcttgagcggcacgatttttcaggacttcccgctgaaaaaaacatgaacaggctgttgctgcggatgcagaccgatctgttttacggccttctaatctgctttgtgaaaagccactggtgggacatcagtgggcatcatgatttgggacatgatgcgttttcacgtagccgcgcactggaacgcttgtattcgcatgacatcgcgccgtctgacgatctggattatgcgttaaacaagctggcaatgatgctggatgaaggcaactgggaggctcaacaagcattcaacaacattgtcgattctgtccggttgattctaaatgcacgcacattcggtgcacgcactgtcgggaaaaattatatcactcgtattaaacattctgatcctgatgagtacagccttctcgattatctttatgaaaatttcactggcagagtgccgccgctgaacttaacccgatccatgaccattcacgatcttgctggaattccctga

SEQ ID NO: 85071 - DNA, 1089 bp, Citrobacter koseri
atgatcaagcaattacatctaaaaaatttcaaatgtttcactgaacaacaatttgagttttcgccgctgacagttttttgtggctcgaactctgctggtaaatccacggctatacagtctcttctgagtattgttcagaacagtgatgcgatggcaaatgggaagttcagactggatggaaagctgttcagctttggaaaacttaaagatctgttatcgcatcatccggttgataacgaaattatcattaaaaccgactctttcagcgtgacgttgatcgctgatgatcttaacagtaaagagtgtctcattcaggacggacatatcacggatctggggtacctgacatccctgctgaaaaatgattttgtctatctgtgtgctgaacgatttggcccccgttcgagctttgagataggtacccgtgaagacactctggaaatggggatatttggtgagtttgcgcttgcaaactatcacaaatatcaggataagcctgcaccaaaccaggcatttgccagtgtagtctgcgcccatctattcgccgagcatgatgcaaccacgcaagttgtgtatacagatgctctggtccgtgaagcgatgaataaagtatgcccagggttcgcaatgcaggtgaatgaggcggaggagatagacaggatatacaatctttacacctcgggttcagagaacatcagaccaatcaacgttggatttggcgtaagctatgtgctccctattattatcagcgctgcgttaattcatccgggcggcacgctgattgtggaaaacccggaggttcacctccatccccgcgcgcaatcctctctggttcagatactctgtgcgctttcacagacgggcgtacaagttattattgaaacccacagtgatcacatcattaatggcattcgtgtcttcgcaaaggataattcctttgatgaacgggaaaacatcattcattcagtgacggacaaaggggggaaacggcaggttaaacccattcacattgataaggatggcaacctgaccgccgttgatgagggattctttgaccagattactaaagacttgatgaggctgttctga

SEQ ID NO: 85072 - DNA, 822 bp, Citrobacter koseri
atggatatatccattaatgacttgtcttttaaaggacaatttacctccttcagcgagattgaagcgtgcgtgaatgatcttatggctgtcactcaggtggcagaggagcttgccgggtataaacctattcgacgtacgcgtgggctggctgagcggatgctgacgaggacagagagcctgcggtcttatatgaacagtttgtacggcactggacgcgctgcggatgaaaagctgcttcaatctattctgctgacattcgtcaaagggccttttataccagatgatgccttcgatgatcaggtccgtggcgctgtgagtatctgcggtgatgtcgtggacgatacggccctgcatgcctgcttttcgcgaaaggatgaatctgttcatgcggtgatttcggcgccactccatccgtatgattcagttccagagatccgggttgccggcaacggctgcacgcaagtgccagtacttaattttgtttcaagcacacagtgtacttctttgctgaggtgttacgatgccaatccaaagcatgaactcaaaaccgataagcttgttaataacaatgtacatacgaaaatggatctggacagtgacactgctctggcctgtcttagagacggtatgcaggttatcggggatcggtatgtctatggatattacaatgagaaatggtatgaatttcggcctcatgaaaacgggcgttaccatggtttcccgatagtggatccgggcaatgaaggcacactcaatcgcattatccgtgtatttggtgagccgccttactcccctgcaggataccagttctgcctagcataa

SEQ ID NO: 85073 - DNA, 681 bp, Citrobacter koseri
atgaagtcaccttatgagttaactgatagagagttcaaattcctaaaacaggatgctgaagaaaaatatgattctcgtatatcaagctatatgcttcgtagattgcttgctgtaatatctaactatctggaaaattataaccggatattcgcattacgcgctgacctgaggtttgctcagtcccacgtgcctggagagccagacttgccgctctgctttcagaacgatgatgagaaggccattactcgggcaatagaatcccttaaaagccagttgcgggaagagcacaagcgttctggcagggcgggtgagcctacaccgctcggctatagctgggctagggaacgttttaccggggaacgccctcactaccatctggttctgctgtttgacagagaggcctatgcctatcttgggaattacactaaagtggatgctgataatatgggaacccggatacagaaggcttggtgcagcgcaatagggcttgattaccctgactatgccagccgggttcatttcccgaagaatcataccgcttggttcactcgggacgctgcgttaacgttaagtgatgattattatgactttctgttacgaatcgcttacctgacgaaatacaacaccaaagacttaaatgacggttaccgtaacttcggtacaagccagatcctaggttga

SEQ ID NO: 85074 - DNA, 1515 bp, Citrobacter koseri
atgaagaaaatcagtaaaggcaaagttaatcaagagcttaatctgagatttgatcgactgcctcgccacatcagacgatgggctttgtacctccaccacatcacaggtgtgtctgttgagattatcgtcgttacgttattagcatttttggggttggcctgccaggatatgttttgcgttcaactgggcaataaacagcgttttcctcttgcgttatacatgttgctgctctccagatctggtagtggtaagtcaagaatatacagattgctcaagattcctgttgagcaacgggagcggcgatttgaagacgagtattgtgtcgagcttgaggagtatgaacgaagggttattatctggcaggcagagtttaaagtattaaacaagctttacaaaaaagcgctgagtcacgggggcggtacagctgaaacacgcagaaaacttgaagagtgtatcctccgccaaccgcagaaaccagtaaggaaatccattattttaacaaacccgacaagcgaagcgctcactaaagaaatcgggatgggatatcagaataaggctctttttaacgatgaagcagcaggtgtgtatacgagtagtttgtacaacgaccccacacctttcaatacattctggtgttgggataaagtcaccattaacagggtgtcacgggaaagctttgttattgaaaattatgtattttcatctttattaatgatgcagcctcatccgtatgacaattccagcaaacggaaaagggccaatatcagattcacaggattgctggctcgtaccctgatgatagatatggagcagattacagagccatacaccattaatgatcacagtgccaaggatgaaagcctgcttcaggagctgtattctgtcatgtcacagcttatggaagccggtgttaagcgaagagaaaatggcgatgagtatattgcacttacccttgccccggacgcacaggatctaatggatgaaacatcgttgagtttgcagcagcagatgaaacctggcggtgccttgtatcactatgacgatatagccgctcgttttatcgagcagagcctcaggattgcaggtattattcaggttactggtgaccctgattcgacagaaatcacaagtgaaaatctgttatctgctttgaatctgactgactggtttgtcaatcattccattacaaaaattgattccacaagagaacttagtgatgaggaaaaattatcattctggatggaatcaaatcttgttaaaaatggctcttacatttttaatagaaatatcattataaaaaaagggccgttttcaaccagatgctctgcgcgattgatgccagccctagaaaggcttgagtcgaaaggacaagtgcaattatacgaagaagcaggcgtaaactgtgtaaaatttattggttcaaaaatggatcctattgaactggcagagaaaaccaatacgcccatataccaagctggatcactgacactaagcaagttagccatgtatgaataa

SEQ ID NO: 85075 - DNA, 1086 bp, Citrobacter koseri
atgcacaccatctacggagatactattaacgatctaatgatgaaggtcatagaaaaagtgctctttgagggtgtcaacataccgactaggaatgggaatgctataactatctatgatgttagtatgatcctgcagaatccaagatcaaggcatttaagtttagtcggtcgaaaaaacaacatattctcaactttcgctgaggcaatgtgggtttttgcaggggataatcggattcatccatatttaactttttttctgccaagagctcctaaatattcagatgatgggatcatttggcgagctgcttatggagaaaggctttacgctcatgggcaactagagaacgttgtacaacaattcaaaaatgacggaatttttactaggcgagccgttatcagtttatacatgcctgatagagacactaatgacagtcttagaaaaaaatacaacttagaaaatagcgttgacataccctgtaataatttaattcatttctttatcactccggataagaaactaaatattaaaataatccaaagaagtggggacttaatattcggtgtaagcaatattaatatttttgaatttagtttactgcaagagattgtactatctatattacagcgagaagttgatagtcaaatcaaactaggatatttgcatcattcaataacaaacctgcatatttatgaagataggatagagcaagctagagatatttttaactgtaaggaaatacaaataaccgatttagtcaataatgatgaaatttcattcccatcatcattacttggtataaaaatgttattctgtgaaatagtctcatttcttgattcgaagataacaggctcaccgcatagtgttaaaactttaactcaggaagttactaagctaaaaaatatatttgataaacactctgtgaaaatagaaaacaatctattatggggatatgcagaagctgctttatcatatatatatcaagttagatttggtgagccaatagcactgagcacaaaattaagttatgagttcagtttaagcgtaaattcaaactactttaataaatccaacaagggaaatctatga

SEQ ID NO: 85076 - DNA, 1230 bp, Citrobacter koseri
gtgaagggtatgcggaagatcaagaggggtaagagcttcgctggtgttgttcgttatgtattgcaaccgggagcacatcataaaagcgatccagtcgtaattggcggtaacatgttaagtggatctgttcttgaactgatttccgaattcaatgacacaaaacagcttcggccagatgttcagaaaccggtttggcacaactcacttcgcttacctgatggtgaatcattatcgaatgaccaatgggtaaccatagctgacgactatatgaagaggatggggttcagtgatactcatcttcgttgctatgtgcttcatgacgacggaggccagcatatccacattatcgcaagcagaatcgacatgctcggtggtaagctttaccttggcaggaatgagaaccttatcagtactaggatcatcactgaactcgaaatcgatcatgctcttacagtgaccaaggcagcatcatccctctcaaatacaaaaccaaagcggaagagaatctctcgcaacgaacagatgttatcagaacgaactggccttccctcccccaaagaagctctccaacagatacttgataaaagtttggcagatacacctgatcttttaacttttatcaagaggctggaagaagcagaagtcggctggacggcgaatgtcgcttctaccgggaaaatgaacggcttctcattttcttaccgcgatattgctttcaaagcttcgcaattgggtaaaagctattcttgggcaaatctcagtaatcggcttaactacgaccccgaccatttagaagctatgcgaaccggcataccaccaaaagaaccccttgctcctgctcctgctcctgctcctgctcctgctcctgctccagctcctgctcctgctcctgctcctgctcctgctcctgctcctgctcctgctcctgctcctgctcctgcaacagttttgataaacactgagagaaaggaaagtatcagtgaaaaaatttctgaactcgaactacgactcaaagaagacagaagaaacgaaatcgtagaaaagattcttcaaaaaaactcagtacaacagcaaaagcatctcaggcttatcggctggattccatttctcagaaggctcgcagagcttctcagaagctatgggaagagcattcttcacaaaacccatatgaccttctcaaatatctccgcaatgaaacctttaaacaaggcgagaaaaatccgtttatag

SEQ ID NO: 85077 - DNA, 438 bp, Citrobacter koseri
atgagacaagataaaaataataaaagcagtaatggaaaatttcactttgataaaaaagataaggatattgagactaaaagcattacaagtttgagaactcactgtattagtgtaaggttgaatgaaaaagaattagatatactcaactctcagcgtaaaatatacagtaaaggtgaatggctccgtatggtattacttcaaaaatcacctcctgttataccaactatcaataccgaagcctggaaagctttaactgacatatcacaaaagctaaatcgagttgcgatccatatcgatggtaagagcaaagatagccagcttactcatacagagcttttcgcagtgaagcgactactcgtagagcttcgcaataaccttctaagaactgattttgggagtatatatcgtgaagggtatgcggaagatcaagaggggtaa

SEQ ID NO: 85078 - DNA, 909 bp, Citrobacter koseri
atgtactcattagccccttactttatccgttgctacaacaagaataatgaatcgaaaaatgttgaagaacgttacgattttttgaacagaataggccagtatgatttattctctttactcgaacaatttatgttgttgcataaagattttgaaaaaattgacgatagcaaagaaacatataagtttcatcatgtcacttcgaaacctaaagaaagattcatttcgggctggatgagtttaggccattatggtattaaaaatgatattattaatactgatgataatcaattagctttctctaaggaagaaaatcatgctgatgtcaaaaactattatttccggttttatattcctttagagtcaagaaagggtatctgtctattatatgcttataagaaggatggtataaaatcgattttccagacagagttctctaagtttttcaatgccatgacaaataaaaacattcaaataaatccacttacatatgataaagccgtgcttccctggctggaagccgaaacaaaagaaataagagttattggatttactgcccccaggtctattgaagatagtatttcatcgcttggtgacattgatagagaatatgttttaaaaccgaaaaagaatggtacctttggtaaatttaaaaagttcaaaaataaagggagtgagcaaggcaaactgatcgagatgttgagtgaagaatcaactcaaattaaagttaaagttgttatggaagggggaactaaaactttcaatgttgggaaatcagaaagaagcactatgtgccaaattgagattgatttagaaaaggttaaagtaattgcgggtaatcctgagtttgactcattggattcctgggcatctgatttaataaaagacttacgtaaacaaattggtctataa

SEQ ID NO: 85079 - DNA, 1152 bp, Citrobacter koseri
  misc_feature (1051)..(1060): n is a, c, g, or t
ttgactaaatcggttctttcattttttactggtgtcgggttactcgatatgggtttccgatcagccgattttgacatcgtctggcataatgaaatcaacaccgatttcatcactggttttaagcatggtcatagcaaactgtatggagttaatccacaagacatcaatcttttcgaaggctccatagaaacaataagtaaatcaattgtcagagaaaatgtatcgtctggattaatagataataatgattttggtatcattggcggccctccatgcccggatttctctaatgcaggtaaaaacttaggtaaagatggtgaaaatgggaaacttacaggtatctttgtagatatcataaatgattttcaccctaaatttttcacattggaaaatgttaaaggtttaattcagaaaagcacacacagaaaatatcttgctgacttgttatataaattatctaaagaatactgctttgatattaaggtactaaactcattagattatggcattcctcaagatcgagaaaggctatttgttgttggtttcaaaaaaagcttcatttttgacaaactgggttatgcaagcttgattgaaattgagaaaattaatttacaactaataattgagctaaaaaaagaaaaaagctcaagtttagaaaagtttaactggtttagctggcctgtaaatcctctttatacaaatgcaaggggaagatttacttggccccaaagaacaccttatggcggaaatccaaccaaacctgatgatttacctaatagcttgcttgtacaagatgtcgttttcacctcatctatagaaaaccttccaaatcaaaacgacgtttttaaagcgtatagcgataaattcaatataattgatgagggcgatataacaggcaaaagttttaaacggttacacagatggcgattcagccctactgcagcttatggtaacaatgaggttcatttacacccctataaaccaagacggttgtcagtacgtgaagtcatgcggatacaatctgtgccggataaatttgagttacctgatnnnnnnnnnnctctttcaagcaaatttaagactatcagtaacggtgtgcctgttgttcttgcaaaagaaatagcacaaagtatatctaacttcattgagtaa

SEQ ID NO: 85080 - DNA, 315 bp, Citrobacter koseri
atgttcagttccaatttaataagtgccaatgagaatttttttgatatattaaaatttgtattttttaaatatctttcagagcatttctttttgtttgctattttgataataataacattctctttagtatattatttcttacccataaactcaattaaacgtcttagcgatgataaactgtcatcgattagaaagagcattttatgtgcgcttgtttttttattatttataaacgcatatgaatttaagcaaacttggtataaccatgtttcatatcctgtaaatgattatggtcagtataatagaataaaataa

SEQ ID NO: 85081 - DNA, 132 bp, Citrobacter koseri
atgaataaatgggttatggcgaaattaggcaaggttgttgaaagatataaaaatgataaaatcttcttgctattggatctaatacttttcggttgtgtaataaaaatatttattataattgcagttgaataa

SEQ ID NO: 85082 - DNA, 1320 bp, Citrobacter koseri
atgttccgaacaagaatctctaagagccaatttgatctctatttaagaacggggcaagatttatcaaactatgaaactgaaattatatgccttttggctggttccgcacatagcagaggttcatgcaactgtcattgtagatttacgccacgcttaaatataatatacaaatatgatgaatatcttttatccatttttcagtcagtaaataaaaccagtaatttaaaatctgagacactccctgttcggcagcaccgggttcagaaaacaagacaatcagttgaacctggtttttgtatagtgccagatcaaacatcacctaagaagtatgaatgtgagttaatagtcaatccaccatcaggggtaaatgagttataccgcaagctaaatccagaaatggaaaaaaaaccaggctctatattgattgttgttgatcctgaaaagcaagatcagaagcaaattcaaactctgcaaaacgcacgagataaaattgataaagcccttgaacctcttactttacaggaagcaaaattattgcatgacaacagaggggcagtagatgcattttcatatcaactttttggggaatacttaggaaatgctggtgatggttttggatatatcagtgaagcaggtaaaagttattatgaagaaatcaataagacgttaattgaaattcaagaattatataaaaagacatatgtgcataataatggaattatatctggggaagaattttttggtcaacgggcgagattatttaaaaagttagatgctatcttaaataaattttctaaaacccaacttaatctggaagaatataatagcattaaaaaaactttaggtttatcaataagctcaattatgcataaatgggataaaactggaataaataatattgaagggtatgctacgtatattgaaaactcagctaaattaatgaagctaatgaaaaccgttggttttgtgggaataggtttagattttgctgggtacacatcaaatgtttatgatgcttgtgcaaaaggtcgtgaaagtgcttgcaaaaaagccgccattactgaatacagtaagtttggtttcaaacaggctagtagtatgctgactggtttagtcgctggaagtgccgcaaatgcggtttgtacatgggtattagggctatctacagtagaagcaggaggcgtaggtgccgctttatgttttgttactggagttggtgtgactattgcatcaagcaagttcgtagaaaaatacggcgaaaatgctggtgaatatgtgggagagcatattatatatgaaaacatttttaattcaaaatga

SEQ ID NO: 85083 - DNA, 753 bp, Citrobacter koseri
gtgtcgtccggtgagggaaacctcatcggcacactgattttgaagatgaaggcaatgcaaaaatacgctgcgcaccattacccgattatggccctgctggtggtttcactgacaggatgtgcctggataccttccacaccgctcgtgcagggcgcgaccactgcacagcccataccgggcccgactccggtggcgaatggttccatttttcagtctgcgcagccgatcaactatggctatcagccgctgtttgaagaccgacgtccacgcaatatcggcgatacgctgacgattgtattgcaggaaaacgtcagcgccagtaagagctcctccgccaatgccagccgtgacggtaaaaccaacttcggctttgatacggttcctcgttatttgcagggattgttcggcaacgcgcgtgcagatatggaagcctctggcgggaactccttcaacggtaaaggcggcgcgaacgccagcaatacctttagcggcacgctgaccgtgaccgtcgatcaggtactggcaaatggcaatttacacgtcgtgggtgaaaaacagatcgccattaatcagggcactgagttcatccgcttctccggggtcgtgaacccacgcaccatcagcggcagcaactccgttccgtcaacacaggttgcggatgcgcgcattgaatatgtcggcaacggctatatcaacgaggcgcaaaatatgggttggctgcaacgtttcttccttaacttgtcgccgatgtaa

SEQ ID NO: 85084 - DNA, 639 bp, Citrobacter koseri
atgaatgtgctgattatctctcgctgcaccaaacgcgctcgcgaggagagttgccgtatactcgatcagtttgctgagcgaacgggagacgcggcctggcaaaccatcatcaccttagaaggcgttaacacgctgcgccgtttattacggaaaaccgcaaggcgtaatactgcggttgcctgccactggttgaagaaaaacgggcaaatggaattgctatggattgtcggcaatatacgtcgttttaatgcgcaagggcgtgttcctaccaaccgaaccacacaaacgcttatcacgaacaccgatgaacatcggtggcgatgtgcggaaagcattgcgctgttagcagcgattgcgggcttgtttcatgattttggtaaggcagggttctgttttcaggaaagcctgacaaaaaaacagctaaaagttatcaaccttatcgccatgaatgggtttcggtacgcctgtttcaggcgtttgtcggtgagcaacatgatgaacagtggctggcaaaactcggtgagttgtctgcggatgacgacgctgaacttctggcccgattgcgcaaggataacccctgctattctgatagcccttttcgtacgcttccaccgcttgccagcgtcgtcgcctggctga

SEQ ID NO: 85085 - DNA, 1545 bp, Citrobacter koseri
atgacccgtaagaacagaaaagtcaccattcccgtcagtatcggctacgggctgacggatatcatggggggcggcgcatttaccgttatcggtgcctggctgcttttcttctataccacctttgttggtctgtcgccgattgaagcggcgtctattgtggcgatcgcgcgtattgtcgatgcgatcgtgagcctgtttatgggcagcttcacggaccatttctataagcattatttgggcaagaaatttggccgccgccgtttcttcctgctcattggcgcgccactcatgctggtttacatcctgttatggatgaacggcatgaacttctggttctatctcgctgtgtacctggcctttgagattatcgccgctatggtgctgatcccgtgggaaacgctgccgtctgagatgaccaaagacttcaatgaccgtaccaaactgtcaacgtgccgcatgttcctgtcggcatccgggacgttccttgccacctttattccgggcctgctgatcggctggctgggtgaaaacaacgcggatgcatatctgatcaacggcgttgtatttgccgtgctgtttacggtctgtgtgtttatctcctggaaagtgacctgggaacgtgaactgacgccggaaatgctggcggaaatggaaaaagagcgtcagccgatgaccgctggcgaaaaactggcggcgtttggcaacctgttcaaagagtatgcctcaacgttaaaagtgcgcgcgttccgtaaacatctggcgatctatctcttctcctttaccgccaaggatgtctacaacaccgtattcgtctttttctgcgtctactgcctgaatgtttcatcctcgctggcgggaacattgctgtcgatgagtatcgtcggcttgccggtcacgctggcggcgggcgtggcgattattaaatatggcccttctcgcctctatgtcttctcctacagcctgatgatgctgtgcctgggcgggttcttcctggtttaccagttcccgaccgacaacaaaatcgtattgctggtgattctcgccggggtttaccaggtcgggcgctgcattctggagttcacgccgtggaacgtgttcccgttcatcccggatattgacgaaatgatcacccgccagcgccgtgaagggctgtttgccgccgtcatgacgttctcccgtaagacaacggtagctattgcgacctttgccgtgggcctgcttctgcaaagcggcggcttcgtgaaaggcagccagacgcagccgcaggaagcgatcacgaccattgccatgctgctgttcgttggtacggccgggcttctgatcattgcactgtggcaagcgctgaccttccatctgaataagcgcacgcacaaaattttcgtggacgaaattgaacgtctcaaagcggacggtcttaaacaggatgtgacgccggaagcccgccatattgtggaagacctgacgggctacagctatgactcgctctggtgtcaaagcgctcctgaacgggtaaagcccgctgaacccacctccatactgagctga

SEQ ID NO: 85086 - DNA, 258 bp, Citrobacter koseri
atgcaaaataagctattacacgcgaaagccaccgttccgaattgggatcgcaacgcgctggttccgcgaattgttcacctgggattcggcgcgtttcatcgtgcgcatcaggccgtttatgcggatattctggctgcggaacacggcagcgactggggctacaccgaagttaacctgattggcggcgagcagcagatcgccgatctgaaaaatcaggatcgcctctatacggtggcggaaatgtcggccgatgcctga

SEQ ID NO: 85087 - DNA, 846 bp, Citrobacter koseri
atgaaaaactggtcaacggaacatacgaaagagatcaaatcttggctcgacattgatacttaccgcaaattcgaagagcttacacttatacggttctatcatgagctatgggcaaggacgttgttcttcaaaagctacagagaaaattttgagagcaaagctcttatgggatacttctcgaaaatctttagtgggaatccttttcttatagaagaggaaaagcttgggtatatgactcccgaaaacaagttgtttcaaccacctcatttcttgcttactacaacagatgatattgcccgattaagcatacttgctatgaaaagagaaatgtatttctggagtggcggggatgggtatgctgtaaataaagagtttgaagaaaaacctgtctctgagagtatgccagatcagtttccccggacagttatgtttgaaatagatttagcaagtgggactgacgaggaaattgctgaatcacttaaggctgcactaccgcaatggagaaaaattaaaggtatagaagaaaatcccctggagtcagttcggtttgggtatggaactatcaagaaaatgatcaactatcgtgtaatacctatgctggatattctggtctgggccgccattaaaaaaatccgcgtctctgacgacagactatctaggttgctatatacagacgacgacgcagaaagtgaaatgagattacctcaacaaatcaaggataccgacaggcctttggcgcttaaagcctgcacgattgattttatcaggcaatttcattttttcatgaataagaataatcatttgaaagaaataaaggtgtctgatgtattaaaattaacagattaa

SEQ ID NO: 85088 - DNA, 903 bp, Citrobacter koseri
atgtttgaaaagttattcgaagtattttctaggcgagaaaaagccagcagtattgttgaagtgaaaccattaacagaagaattcagaaatcgggtgttattgcttctgcgtgataaactccaatatgatttcaccccatttcttagtgaacttcatcagcaagccacttatctttatggcaagttcggtctatcaggatcaactgctcactcctcaccagcagatgatctggtgaatttcttccttacttgtccagatgagaattgtttggatttgatagagatcattttccgttcaaatctccgtggaatctcttggccagataatcccctaatacccactattaatcagtttttcagtattgatgcacttccttatcacctgactaattattctatagaagaatatgaaaccatgttatatggttcacctgccacaggtatgcgcattgctgagtatccacaaatcatttgcaaagatagtgaattagtgcatcaaaatgcgatggaacccgcgctccgtttgcttacagcgccaatattcaaaaatgctaatgaagaattcctaaaggctttggaagatcatagaaagggagattatagagactgcctaacaaaatgtggcagcgccttcgaaagtgtgatgaaagttctttgtgagaagaactctttaccgttcaagtcgacagatacagcttcaaccttactaagaacgttgctagctaatgggcaattggagcagttttgggaacaaccattgatgttgattgcaactttaagaaatcgtttaagttcatcacatggtgctggaactcaagaaaagagaataccagaatatgtagctacgtacacagtcaactctactgcttccgccatactactcttatgttccgcttttagatga

SEQ ID NO: 85089 - DNA, 552 bp, Citrobacter koseri
atgcgtcatccaattgctgcgcagttagctgcgcctgaaacaaaggaattttgccaaaagattgttcctggcatccaacccgtattactgaacaacgttccttttccgggagcggaagagatggactgttttttcaatgtcgaacgggctattgaacagtatggcggcaaggccatctacggttgggctatctggcagataccaggagtttatattgaggcagagttccactgcatctgggagaatgatacaggagatatgctagatatcaccccatacccttataggatggacagcattctgtttctccctgattacacacgaatttacacaggtaagcaggtcgataatatccgtcaagctctggttgatgatcccgacgtgatcaggtggttgtaccttgccagaaaacgatttgaaatcttaaatactggcgacctagcgaaccagcatggacgtattgaattgccatcaaaattagccaaagagtacagcaaagttatggatgagatagacaggctaaactctcgactaaaacgcaggtattcatga

SEQ ID NO: 85090 - DNA, 309 bp, Citrobacter koseri
atgaaaattaatgactttgcaaaatttgaaaactatggagttatcatcagtgatggtatctttgaggatattttttatgtggactatgttgaagagattgaactaacagaagagaatgagaaatatattgaatggttaagctacttctttgttgccgaaatgcaaggtgctttggatgaaattagcgagctggacatgcttgaacagatttctgtttttgatttctggtttaagatcattcagtcaagagatgaagtagaagcactggcaagaactattatctattataagtcgggaatgcttgtttga

SEQ ID NO: 85091 - DNA, 204 bp, Citrobacter koseri
atggcatcagattctgatcgtaccatctaccatgtcatagaaacggggggcctgtcgatgcggaaatttgccagacggcgccaggccaagaacaaaaaagcccgcagttacgcgggcttagaggtgttttactgctttgacgtgcaggctgctgccagacgcgaaatcattcccactcaatggttgctggcggcttaccgctga

SEQ ID NO: 85092 - DNA, 876 bp, Citrobacter koseri
atgatctctgacaaaaccctgaagcaagcgatatcaaatatcaccatttggcgcaaaggcgaacagcgtgcgccacataagccattattgctgctgcatgtcctttcacgctatcggcagggtcatgagcgcctgtttaactatggttctgaaatctacgagcccttgttggatcttctggaacgttatggaccgcagcgccgtgaccagcgcccggacatgccgttctggcgtctgaagggcgatggcttctgggaactacaaaacgcggaactgtgctcaaccaatggtagccgccagccgccccgacgtgaactcatcgaatataatgttgcgggtggatttgatgccgatagttttgcgttggtggccaagaatcataggttaattgatacgctggcgcagcagcttctggaggcacatttcccggccagtattcaggaagacatcgctgatgagatggggtttgatattcgcacctctctccgtcaacgcgatccgaagtttcgtcagatggtgctacgtgcttacaattatcagtgcgcgatctgcggcttcaacatgcgccacgacaatgcgccaattgccctggaagctgcccatatcagatggaagcagaaccatggcccttgtgaagtacctaatggcctggcattgtgcgccatccatcataaagcgtttgatcgtggttcgattggtttggatgaaaatatgcgtgtgatagtttccaatgcggtaaatggtggtggggtggtacagcggctgttctgggattttgcgggaaaggcgattgcgttgccgccggttaaagaaaattatccgggcgagcagtttatggaatggcacaggaaagaggtgttcagaggagagcattga

SEQ ID NO: 85093 - DNA, 168 bp, Citrobacter koseri
atggacagagataaatatgtaattatcccggcaaagcgaaccattcactttagcagatatattaatttccgcttatcgctcgaagcaagccgtcaggtttgcttgtgtgctaccggtgaaaactgccaagtcaattttgagctaatacaattcagtcttaatgactaa

SEQ ID NO: 85094 - DNA, 2457 bp, Citrobacter koseri
atggccaaaatgattccggcattcggacccattgataatgatagttatggagaaaaaacggtctatgccctgttaaaagaagggctgtcagatgatttcaccgtaattcatagtctcccgtggttgagttcggcggcccggcatttgggtatgaaactacccccaagtggagaaatagattttcttgttctccatcctatctatggtgttctggctttagaggtaaaaagtgggatatatcgcgtagatggtcctatttttgtacatctcaaaactaataataatgtcgatgtagtgaagcaaacacgtaacaatgttcatggattagcccgttggttaggaggagcaacaacgttacgattgcgtattggttatggctttatttttcctgatagctatttcgataataacgttataaatacagcaatggttgatgcgtctgtaagaccatttagaaaaatattcgttgataaaaatcaactcccggaaattgcaaagtacaccattgagataatgcactattggaaatctgcattaggaaataatgatttaggaagtgaacggcttcaattaataataaaatctatatgcccgcaatttgatggcacgcctgactggggaacccgaattatttatgataatcaactctggttaagactcacacatgaacaaattaaagtcattgaactgctgtcagaatatcaacgatttgttgtgactggatggccaggaacaggaaagactttgattggaattgaattcgccaggaggttggttaaagaacaaaaaaaagttttatttattactttcaataaccgtctttctgaatacattcgacaacaaactccagtttcattatgcgatgtttttacctggcacaaactatgtcatcaggctcgtaatagattagccctgcctcccgagtctccaacaggctggtttgaatcaggatgctgcgaggatttacttagtgcattaaagaaaaacaagctaaaggattatgatgctttaattattgacgaagcacaggcgttacattattcgtggttggaaaccttatatttttggtttgaaaataaaagaattattgcattttgtgatgaaacccaaacgttctcttttgaaaaagggacgaatcacattgatcttcaacggataattaattcccaattttcctttagtttgactattgttttaagatgtcccaaagccgttactgattatttaatggctatcaggccttcatcatatcaaattacgtcccccagaaataacgaaccagatacgctaaaagaattagttgttaacgatccactttccacattgcttaatgaaatcttaagactgaaagaaagttctgtgccatctgatgagataaccgtccttgtccctacagatttagtgaaaaacttcctccagaaagacatgaagacttttgatataaatattgaaactgtatctcgttttcgtggtatggaatcacctgttgttattacactggattccgaaaacatggaggatgctcaattattttgtgcttattcaagagcaacaacggctttcattgcaatttatgattcggagaaattagcatggagagaaaacaatagctttctgcataaactgattaatagagaggaaatccagagagcaattaatgaagcaaaacataactcatcctccaaagttcttatggctaatttcttcagcgaaggggatctgaaactcaacactgtaaaattagcatggtcaaaaaacctttcttcttggcttattgaatttgatgaagaaaattctccagcggaaatgtgggttgattatttatattcccaccacgcttacccaattatatattggttcagcaattcacggagagttgtttattacattgcaaatcaacaattcgaattaaacacattaggcataggaacacaattatcaataaaaatttgtgccatatgtgaaaagatgataccttttgattctgagaacaattgtatgctttgcaataagaaaactgaagaatcgtccccaaccagatatgaaattaataaaattcgcgatcttgatttaacaatttctcaggataattttaattcagctgttcaaaaagaaaagagacgattattacccataccgttagctgcggctagtgcccgaagagtggcatttgaaaaaccatatagaaataaagtactaagcgaatcattacctggcggaaaacttctctacagaagtgcattagcttttatccaggcttgggttgcattattaccacaagataagatactagtattggatgagataacagatgcactacgtaaacgctatactcatcttgagcaattagatcgctctgaattaaggaatgctttagcctgtgcattgtcaacttgctacaataaaaagcatcttattaaagttgaaaaagggaaatatttacctgttgacgactaa

SEQ ID NO: 85095 - DNA, 1194 bp, Citrobacter koseri
atgtttaaagtcgatcagcccagcaatagcctgcaaccccttcaggaaaccaccttcagtcaagcgggtttcaccgaacgctaccacttgcaggaatggctggcgaagcatccgcaggcattgacccgcagaagcgatgacgagttactgatcattcagaaagagtttgccgggtttgatgacaccaaagagcggcttgatctactggcgatcgataaagacggcaatctggtaatcatcgagaacaaactggatgattccgggcgtgatgtcgtctggcaggcgttgaaatacgcgggttactgtgccaacttgcgcaaagaacatattgttgagatcttccagcgttacctcgatcagaacgatcccgaagaaacccgcccagcttctgatgtgttggcggaattcctcgaacatgaaagcctggatgaggtgcaaatcaaccagagccgttcccagcgcgtgatgatggtcgcggcaaatttccgcaaagaagtgaccaatacggcgctctggctgatgcagttcaacattcgtgtacagtgctttaaggtcacgccttatcgatatggaaacgatgtattcatcgatatccgccaggttattcccacaccggaagcggaatcctacatgatcggtatggcgcagaaagaagcggaagaacagtcaaccagtggtgaactgaaacagagccaacgcctgcgcaaagccttctggacgcaaatgctggagaaatttcatgccagcgactgtacgctatataacaacatcagcccgtctatggatcactggttatgtgcaggctccggcataagtggtatgccatatagcctaatattcagcaagaaggaaatccgcgtagaattatggatttcgcgagcatcggcggatattaacactatggcgttgcagtggctggaacaacaccgggcatctgtcgaagcggtattcggcaacccgctggaatggctggcgctgcccggtaaaaaagcctgtcgtattcaatatcgtcaaaaaatcgatggcttccagcaggaaaactggccgcaaatgatcgactggctggtggagcatatgacccgttttgagaatgcgctttcaccgtatttgccacagcttaaccagttgatcaagcagacctttaacgggcatgatgaagctgaaattaccactgaagaagccgaacacgtttaa

SEQ ID NO: 85096 - DNA, 1413 bp, Citrobacter koseri
atgagatctaatataacttatactcttgatgaaattgccgagatttatgatggccctcatgcaacgcctaaaaagttagaggcaggggatgctatttttttaagtatctcttctattgagaatggaagattaaatttggaaaaatcatcctttatttccgaagatgattttgttaaatggacacgtagagtaacacctcaagccggagatgtcgttttttcttatgaaacgaaaattggcgaagcatcaattattcctgaagggttacgttgctgtttaggtagacgtatgggattgctgagagccaaacaagataaggtattacctcagtatttgttatatgcttatttatctccagcatttcaggatgtgattagagaaaaaacgatccacggtagtactactgatcgtctttcaatcaaagagatgcctactttcgagattgaactacctgatatacatacacaaaaaaaaataattaagattttaagtccaattgataataagttatctaaaaatactgaaataaatcaaacgttagaacaaatggcacaagcccttttcaaaagttggtttgtcgattttgaaccggtaaaagccaaaatcgaggtgctggaagcaggtggttcgcaagaagatgcaacgcttgctgccatgacggcgatttccgggaaaagtgttgacgcgctggcgatttttgagcgtgagcaccctgagcaatatgctgagttaaaagctacggcagaattgtttccgtctgcggtgcaggaaagtgagttgggggcgattcctaaaggatgggggatggcgtcaattagtgagatggggaaggttacttgtggcaaaactccgtcaaaaaaagaaccagagtattacggtggtgatgttccattcataaagataccagatatgcatgggcaactctttgtgcttaaaactaatgaatatttaagcgaagtcggttcaaagtcgcaactaaaaaaacttgtgcccgcaaactctatctgtgttagttgtatagctactattggtgttgtttctatcaccaatgaaccatctcataccaatcagcaaataaattcggttacaccttataagagttcattactttattatctttatttttgtatattgggattgaaagatcatcttcacgttttaggtagcgcaggtagtgcaactttaaatgtcaatacatctactttctcaggaattaaaatcgctcagcctgatgctaaagtattggagttatttcatgccaaatgtacacatttatttaatgagattaaatcgctcagtgtacaaactgaatcactagcccaactacgagacaccctgctccccaaacttctctccggtgaaatcaccttgccggaagccgaggaattagcaaaggaagctgactatgtttaa

SEQ ID NO: 85097 - DNA, 411 bp, Citrobacter koseri
atgtataaacctgtctatgtgccttttgctgttacacaacatggcgaaagggtcgaaccgaaaacggcgacacaagaagattacgatactctgctctgcgaattctgtagactgaaaatcagcgtggttattgacgaacttactggtgtaaaaagttttgttcatacgccactgcgactggaggcgacaatgcgacttacaacatgcccctacaacaaaactgcaagcaagttcggcgatgggcagaaagcagaatacggtcccttaccgccagtaaaaccccgccaacctccccgcaatacaacgatacaaaactggcagtgttgctggtgccatctctgttggaatggtgaaaaagtatgtccgcaatgtggcgaatggatttatacgcttgaagataatcatttataa

SEQ ID NO: 85098 - DNA, 1077 bp, Citrobacter koseri
atgtattgtggctatattacgaatgtgaaaaagatgagtaaaacagagggtatcttccagaactgtgctgagattcataacgaaaacaattcaataataatgtccgtaacagacaactgcattaatattgaaaaactccatcacacttatgtgttactgaaaaagataatacgtaaaaaaaccttcccttttagcatattgcttaataactcaggatacaagcaaaccagtcgaactattgatgttttggaggttatacatctgcttgaccagatacctgatatgttcctgcaatttcgtaaacttcatccactaataacccgtttccagcaaacgctaagtcggtacgatttttattgcagagttcataacggtgccatcaccaaagtcgatgcaacaaatactgccgcaatgctgaataagttggtaagtgaatatcgtgacgaggtgagcaagtcagcattcaggcaggatttgagaaaataccagcgtaattcagtaaaaaacctgaaagggataacgcattatattcaacatctttttacccggcatgcaagactgttggtaatacgtctggacctggcttggggaaaagcacattcaggcagcattacccctgaaatagcgaaacaacagcgtcagcaattgctgcgtaatatgaaacgaaaccgaatattcagacacgttttgggcacggtatggaaactggaatacgggcctgacagaggcttccattaccacatcttattcttccttgacggcaataaatcccgctgtgggatcaatatctgcgagcagtttggcaaatactgggtttcggctattacagaaggaaaaggctcgtacttcaactgtaatgtcagacctgaacgttatgagaaatctggcatcgggatggttaagtatgacgacatcctgaagcaggaagggctacaacgtgctgtgaactatctaaccaaaatagatacctttgcacgcctggcgttacccggcaacgtaagaacttttggacgaagtgaaattaaagcatgcaacccaaagggcaggcgtggacggagacgcgctcagccatcgtaa

SEQ ID NO: 85099 - DNA, 207 bp, Citrobacter koseri
atgagtatgattgatattcacagcgaccagatggttgatatggcatttattgttcgttttacaggtatgactgataaatggttttataaattgattcaggaaggaaagtttccgaagccaattaaaatggggcgcagttctcgctggttggaaagtgaagtagtcatgtggtttaaagagaaaattaacgaatcccgcattgagtaa

SEQ ID NO: 85100 - DNA, 1302 bp, Citrobacter koseri
gtggaaagctcacttcactatgtcaatataaagaacaaaagagatctcagattgtttctttggtatctctccgctaaagatattgcggttcttattagcacgttaggatcgtcaaaaagcgtttataatgaaggtgatatatttggaagtaatgttgaaatcgcatcaagtgctgttaatcaagccctcttactgatcaaggacaaaattgttaaggggatttactccacatcttttaattactttaaatcacttcaattaccccctgctgagttttcatggataaaaaaatctcctgatgcatgctattttttatggttgtatataaaaactatggttcatgactcaaacagtgagttacaacttattcctgagattgccgggaaaataagaaatactgattacactgctgccagacatgactttttgtataagagattactgataaatccctatcctgtggataataaagaacgaatggttgcaattgaggatttttttgatcgcgcacctaccactctgagaaacaaactcaatttgatgcatcgcattcgaaataaatgggacgatctttattatttaagtaataactttccactgactccaaaagagaaaaagaaatgtgattgggcttgggaatacatacaaaaagacaggagtaacatgcgtggtaaaagaaaaaatccggatggcacatattctgattatttaaatgttccatctgaaactaacagtaacatgctttccgcattaagaccctcaggtgcttatgagaaatacatggctgtaaaattttcatatatttttaaattcgtaaaagatgatttatttattcagcgattcaaaaaagcatggggactacataagtacaggctttcagctgcatctaaaaagaataagttatcaaaacgctacggaactgaaaaagaaaatggtgtagcaaaatctgtaacttcgggaccagggctggacggttataaggatttcttgtctgagaataatactcatcaattcaaccctgatttagcacagcctctgcacagtgaacatgacatagggagcattgtggaaccaggtgaagcatatcaaaattataaaaatgagaatgttaaagttatgaagccaactcaaccagggagtagcccaaaaggtataaatccccgtggaatagtaattaaatatttgcagccttcctccctgaaaaatacttttccataccagatgataagcatggtaagtgacagttttgacgcaatagtgaaaacggcgagtaaaatcaaggataagaaaaacatcaagtaa

SEQ ID NO: 85101 - DNA, 435 bp, Citrobacter koseri
atgttgaagactacctctaccttgcttttcagcgctgctttattcagtaccactgcacacgccgttatccaggaccagcaatgggggaactggttcggtaacatcagtgcgatggagtttgaaatcaatacccaaaacaactcaggtgaagtgctcacactaatctgtacaagcggaaagttagctgttgcttatagcgttcccgcagaagactaccgcgtttcttccctgacaggacttgcagaaccgggcatcagcgttaacggtacaaatcattctctggatgaaacggcctttactgcactaaaagcaacaagtgaaaaagacgtaataaaaatcacctctatgaattcagctatctctaaaaaattcagtgctaaagggctgaatgaagcgctggccgatacctcatggcaagactgtattaatcactaa

SEQ ID NO: 85102 - DNA, 456 bp, Citrobacter koseri
atgtctgaaaatagcacaggaaaacttcgtagccttaaagaaaagctgaatttcccacgcagaaaagtacctgcagaaaatcatgatacatcttctgaacacttaccggaaaacacgattaaaccctcggtaattggttctgacaaatacaggctgttgctggaaaatattgtcatcaatggtctgttgaatattgctgaggataaacttagtgatgatgcttttgttgaagttgttttcagcaaagcatatgagcttttgcctgccccggtcaggatagtcctgaagcgggaatggtgcctgagttaccttcagtcgcaaaaagcgccgattctggtgaaactgcaactttaccgcgcaggaaagcttagtcctgccgaactatctgcatcgccgttgttaccagattcagaaaaaactgcatcgcagatacccccttctgttttacctaaataa

SEQ ID NO: 85103 - DNA, 474 bp, Citrobacter koseri
atgtctgaactgatattacctccggcttttccagcgaatgagcaacgtattatccgtcgcgctatgcgactgctggagaaataccagcgccagcccggcgagcaattccttgacacgagttgtacgaaaagctggctgcaactgcatctgggacggcaggaacgtgaggtttttgtcgtgctctatctcgataaccagcatcgtctgctggaacatgaaacgctattccttggcacgattaaccacaccgaagtccatccccgtgaaattgtgaaatctgcactacaccacaacgcggcagcggtgatcctcgctcataaccatccatctggaataacggatgccagtaaagcagaccgaacgattacttcccggatagtgaatgcactgattctggtggatatccgggtgctggatcatttcatcatcggtgatggtaatgcgttgtcgttcgcggaaagaggctggctgtag

SEQ ID NO: 85104 - DNA, 222 bp, Citrobacter koseri
atgaaaatcataagcaaacgtcaggcaatggcgatataccgccagcattctgaatcccggttgtctcgcttctgtacgggcaaatatcgctggtccggcagcgtctgccattactacggtcgggaagtgcaggatattcgcggtgtgctggcagtttttgctgagcgccgacaggaccgtcagggacctcatatcatcctgcgctgcatcagcctcaattaa

SEQ ID NO: 85105 - DNA, 345 bp, Citrobacter koseri
atgacagaaggcacagccaacgaagtagtggatacgctgcgatggggactgaaatgcgacatcacaccacatttcggagcccgtctggtgcaggaaggcaaccgcctgcattacctcgccgatcgggccagcataataggtcagttcagcaaagctgatttacgccatctcaaccaggcttttcccttgttggtgaagcaaatagaactcatgctcaccagcagagaacttaatccccggcaccagcactgcgtcacgctatatgcgaagagattaacctgtgaagccgatacgctcggctcctgtggctacgtttacatcaccatttacctcactcaacgctga

SEQ ID NO: 85106 - DNA, 342 bp, Citrobacter koseri
atgaacacctctcctgcaacaaatcagcgggtggcgaagccatgtccgtcgcctgtggccgtctggcagatgttacttacccgtttacttgcgcagcactatggcctgactctgagcgacactccattcaatgatgaaggtgttattcaggagcatatcaacgcaggcgttacacttgccgatgccgtgaactttctggtggaaaagtacgaactgcttcgtatcgatcgcagagggtttagctggcaggaacaatcgccttatcttcgggctgtagatattttgcgggcgagacaggcaactggtctgttacgacaaagccataatcattcgacacgctga

SEQ ID NO: 85107 - DNA, 681 bp, Citrobacter koseri
atggtattcatcccaaactttcagcatgtagcgctggaagcaatgacaaaaatcgacccaactcttgcttgtaagtataacaaagtaatttgtttcctagctgcatatcctgatgcagcctctgcgatgcgagggaattctgccccaagtattggctcaacagattatatcgttaaaaatgcagctaacttctcctcagctcgaatgcccagaattcccaaaccaccatctacaattcctgatgagatggtttctataatcctttcttcgtattttaatgttcccgaatcggatgtagaacgaattaaaactgaacatttactttctatgggggctgaaaacctcgtcggagacttacttgagcgttatcttgcgtctgtaatggagcccagaggttgggtttggtgttctggagcgatggtaagagcggtggattttatcaagcccccgagctctaacggcggatcttggactttattacaagtaaaaaacagggataactcagagaattcatcgtcgagtgctatcagacttggcacaacaattgataaatggcatagaaccttctccagaaaagaaggttctaattggtcaaatttcccggacatatcccttcgtcaatacttatcagaagatggatttaaagcttttgtcggggattatttacgctcattacgctag

SEQ ID NO: 85108 - DNA, 1479 bp, Citrobacter koseri
atgtctaatatacccaatcttataacaaccaaggaagtagcggagagaatcaaggtatctgaacaacgaatcagaacgttgctacgttcaggagctatagaagggcagcaagtaggtaaacagtggttaacaacagaaagagcagtaaatgagtatctgaaatcaggcccattagagcaaccaaaagatcgtaagcgtaaacagggagctttaccagcaataaaggcgctttccttcttctccggggcgatgggtatggatcttggacttgagaaagccgggattcatgtgcttctagcctgtgaaaatgacaagatttgccgacggacaattacagcgaaccgcccagaaatagggttaattggcgatatatggaaatataatacagcacaaatttatgattatgcagggctaactcagaatgatgaaatagatgtaatggtcgggggccctccatgccaagctttttcaacggcaggcgctcgtcgtggttttaaagatgaaagaggtaatgccttacttcgttatgtcgagcttattttggagattcgtccacgctttgctgttattgaaaatgtccgaggccttttgtcagcaccaatggttcatacaccacatgctgaaagaggggctgattggatgccaaatccagaggaaaggcaaggaggagcccttatgcatgtggttgatatgctccgtgctggggggtatgaggtatcatttaacctgtataatgccgctaactttggtgttccacagtctcgagagcgtgtgattatattatgctcgcgggatggtaaaaaattacctcatcttgttccaagtcactctaaggatggctcgtttggcttaccaaagtggcgtaacctccgtgaagcatttgatggtttagatccaatgtctggagatcatgaagagtttcctgaagatcgcctacgtttttatcgtatgctaagctccgggcaatattggaagcatttacctaaagaacttcatcgtgaagcgctgggtaagtcgttagattccgggggggggaaaactggttttttacggcgtttagactgggataaaccatcatgtacacttgtgacatctccaaccatgccagcaactgatatttgtcaccctagtgaaaataggccgttatctgtgcaagaatattctaggatacaacagtttccagacaattgggtgttttgtggttcaataacagacagatacaagcagattggaaatgcagtgcctgttggtctcggtgaggctgttggtcgtgtaataatgtcccggattaaagaaaaggatattgcgcctcctgacggatttccattcagcagatataaagataatgatgagatttcgtgggaaaggcgtactcgtgaactaatggaatctggctctgttcctaaaaagttaaaatcgagccctcaagaatcttctaagtcgaaaaaaattgctgactcccagaactcattattttga

SEQ ID NO: 85109 - DNA, 1218 bp, Citrobacter koseri
atgaaaaagaacaagttgcttaacaagaagaatgttgaatttagtccatcagataagatttgtgacagccttgaggggcatgagatgaagctgcgcatcgactggctttcaatcgtatcccgcttccacagtgaggatgagaaagctgagtttgttcagaagttgcagtctttaccggatcgggagtggaaaaactatgttgtgcagaagaaatctccccggaacgcaacggggacatgtcacccttacaagtatggtttgtgcattttacgtaatgaacctgatgcaccaatgctggcatatctcatgtgggggccaaaagcaccaggaactggcgggttcagtatccagtttcatccccaacacatgacgggtaaacggatggatctactgcttaagtggttgagtgaccgtctcggtgaaacttttgctcacttgctggcgcgagcatgggtcacccggcttgatatcgctctggatatctatggatgcaacttgaatgactatctttggggtttaaaaaagtcatcgatttataaagactacgataatgataaagggctgccggggttatcccttggggcgttagactcgaaactttcagttttaatctatggcaagattaatgctgagcagtttgagcggattgccttccctgagcgcgcaggatatgtaaatgaaaaagggaggcgtaaacgggagtacttccttgaaattgacaaggaagaacatccgcactttctacgtgttgaaatgcgtgtacaacctgagtctattggtcccggtaaacggggattcaggcaaaaagcactaatgctttcggacctggcaaagctcgagcatccctttgagcgtttgttggtgtataagcgcaagctggagggggaactaatgaatgctgtttttaccaatgaccgccctaaaactaatgggatcaaaggatggaccaatacgttgagtgatggtgattcaaaggggcgtctgacccgtaaattcgccaaactcctgtaccttaatgaggttgagctgttcgacaaacatgaagtctggtctttttggctgcctgtttgcatggttaagttggggcaggttattggcggattaaagccagaatttgcgaccgagaaagagatggctgtcagccagcttgttgaagatacacgcaagcaaaaacgcaaaacgcggcgtcaaaaacgtcaggagcatccaaaacgttag

SEQ ID NO: 85110 - DNA, 501 bp, Citrobacter koseri
atgcccaaagtcgacaggagtacgttatcccttgaagcactcgaaaccctgagagagaaggagcgtggttacaaaaaaaccagcaggaaaaagagaggattgattgaggttcctatcagcagggaaatgctgttaatgatacaaaaagtaagtaaatcgctaagcctgtctgcgccgtcatcatcaacacatggtcgattggaaacgatatcccaagtattcgagtatttgcttaaaaaagaaatgagttctgagccctacctgataacaaaaatcgcgcctaaaagactgtttaacctgcaaacgacggtctggtacctgaaaaatgcaaagggaatgagcgaggaagaaattgccgggcatatgacggaaaaggagaagctgacaccacaggcggtgcttgaagggagtaaagatcgggaatggtctgttaagcatgtccactatcttctggataaggaaaaagtagccagaagaattcaaaagctgaatgaagagtaa

SEQ ID NO: 85111 - DNA, 945 bp, Citrobacter koseri
atgtcctaccaggtacatatagactcattaacacaaatggctaatgatctgtcaaaaacaaaagacgatttggagcgaaagtttcttgcaccttattttaacgacccattagtggaacctgaaacttttaaattagatgttaagtcatattgtgtcctactgcatgccgctattgaagattttatcgaaggagttgttttaagtgtctataaagcatcacatgatttgtttttagaagatggtgttataacaattccatttatgtattcattacatttgtccggggttcttgaaagaagattatctgagatcgcagatgatgatgttgaaatatcaaaaggtgaggtgctttatccagtatcacccatagagtattttttgaattccaattatacttgtgagccttttattcattcaatgttaacttcaaaccatggtatatcacgtaagtacataaaaaaaatagttatggtattaggcatacatgttgattttagtgatgttatgtattcagattggaaatcaattgcagaatatcgtggtgcctatgctcattcagatatatcatatatagataaaacaaaagccaaaaaacctctttctccagaaaaatgccgagatgctgggaattcggctatttctttctcatataaattagtcgagtgggctaaagaatccttaatgaaagagtacaaaaactcagttagttcgcttattatcaaaaacaatgagaaaaaagaagctcgagtcaaaaatgaaaaattaaaagaagaggaagaaaaaaataataataagaagaaagaagaagaaaaggagaagagggaacatgaaaaagaaaaagcacggttaattaatatagaaagaaccaaaaagctggatattttgttggaatgggcccagaagaaacatccagaagtatatcatgatatatttggagagacttga

SEQ ID NO: 85112 - DNA, 138 bp, Citrobacter koseri
atgactgcgaaagatcagtttgctgctcatgttggtctggactgggcagataaaaaacacgatgtctgcgttcagtttaaaaacggtgatcgcatatttcatgtgattgaacatacgcctgaggcacttgatatctag

SEQ ID NO: 85113 - DNA, 1032 bp, Citrobacter koseri
gtgtatgcactccagaagtacccatttgtcactgtttttccagtacacgcgttgtcactggcccgctaccgacaggctttctggcccagcggtgcgaaggatgatccgcaggatgctgagctggcattagacctgatgctacgttatccccacaagataaaagccattgaagccgacaatccggatatccgattactccagcaattagttgagcagcgacgactgctggtcgaagacaagcgtcgctttgttaatcggctcatcaatacgcttaagcagtattacccccagctcctggaatggttctcccatcgggacagctcactgttctgtgagctaatcattcgctggccgagtctgcaacaactcaaacgtgctcgcagcgatactgtccgtcattttatgaatgctaaaggtggtcctgctgttgcatataccgaacagcgggttgcaagtattgccagcgctattcccctgaccacagataaaactgtcatcgaggcaaatgcattgatggcaacagcacttgcatcccaaatcaaactgacaggcgacctaatcagaacctacgacgaacgtattgaatccttattcgatacgcttccggatgcagaactgttcaaatcactccctggaatgggcccgtgtatgagcccacggatgcttgccgcactgggtgataaccgcgaccgcttcaacagcgcagaagaaattcaaaactacgctggcatcgcaccagtaaccgagcgaagtggtcaaaaatcctgggtacactggcgttggcagtgcgcaaagttcgtccgacagacattcgtggaatggactgcgaagacggttaactcatcgtactgggccagactttattaccagggccagcgagaaaaagggaaatctcatcagtcagcgatccgggctctggcgtttaaatggataaggatcatttaccgttgttggaagaccaaaacccggtacgacgaagcgaaatacttgctggcactggaagcgcgaaagtcgcccttactgaagccataa

SEQ ID NO: 85114 - DNA, 777 bp, Citrobacter koseri
atggaaatattctttaaatcgtatcagactgaagcctgttgcttatgcgggtctagtggttctctcaccggagagcacaaaataaaagcttcggcgttgagaaaaatttttggaagcaatgcaatggtcattggaaattttgatgatggtggtattcttcgtgcagcacaaggtcctaagtctaaggctttccatttttcggtacgaatgtgctctttatgcaatggctcacgcacgcagcctgcagatcaggaatttgatcgatttcacactttagtgtcatcgcttttatcggaaggcagggatccttccgaggtgtttaatatgccacagtataatttggactcagaagcttacctcaatgtgtttagatatttttccaaaattttatgctgccaaattgcagaagcaggcggccctcgcccattagaagcttgcgaatttgctatagggaaaacaagcaggaatattatttttctacacattgatatagatccaatctaccagacttatcgagatacatacggagaacatgattttgcaaaacatggaggacttattgtcccttttgactcaaaaacacacaacccaacatgtttccagagctcgttaagtttgggtgcagtgagatatcttttttgggttagatttgatgcacttgttggaattgagttacgtacatcccataatgaattttggctcaaatgtgaggcagcgtatcaagaggctataaaaaatccactatcggatgaacagcgatatcgcttaggtatttaa

SEQ ID NO: 85115 - DNA, 1623 bp, Citrobacter koseri
ttgaaatctttacaactaaataaaactggagttggtaacataactgtagatattgataatggtgatgttgttttccttattggctcaaacggctcagggaaatcttcactagttaatcatttccataggcaattaccagataaccatgtaaaaattataagtgcacacagacagaattggttcaatgattcagttattgatatgacaggtagtgaaattgagaatataaatcaaaacaatagacactatcgtacactagtcgattctcggtggaagttatatcaaggcgaaagtactaacagaatggtagtggcaaaattaaaaaggcacattaatcgaagagctagagaaatagaatctgcgtatgatagaaatactttaaatgatccggagtttaaagctccagaatcgcctcttgtagtaattaattctctgatagaaaaatcaaacatggatatatctattcatgttgataaagatgacaatttcattgtcaagaaccgtagttataatgatgatgtcacatacagtattgctgaactgtctgatggcgagaaaaatgcattgcttattgccgctgacgttcttacgtcatcacctggtacgctcatcattatggatgagcctgaaaggcacctacatcgagcaataacactccctcttcttagtgaattagtctctttaagaagtgattgttcatttttaatctcgactcatgaaattctattcccgtctttctttattaattcaaaagttattttggttagatcttgtgagtatgtttcgaaagatccatcatcttggactttggatatattggatggtagtgatgacatacccgaagagataaaagaaagcatattcggttcaaggcgaaaggttctctttgtagagggtgatcaaaatagccttgatttatctatatattcatctttatttcatgattttagtgtaataccaaaagggagctgtaaagatgttgaggcttctgttgttggtatcgcatctaaccgtagtcttcagtgggttgaagcctatgggttggttgataatgataataaaacacaaggtgaaatttcctctcttttatctcggcgggtttataccttagatgttcattctgtcgagtcaatttattatcatccagaagtcatacgaattgttataagtgcatatgcagactatcttggaatagaaaataaaaatgaagtttttgatagcataaatgaagaaataattaaggtgatgaatagcaacaaggatcgtttgtgctcaagatctatagaaaaaatagttagaagtaaggttttttcaaacataccaactcaggctcatataaattccaatgaagactttcatttccatctaaatataaatgaaattcgccttgctgaagttgatattttcgacacggctattcaaaacaatgatgtcgttactttgatgactagatatcctatccgagagactggcttgctaaacaccatagctaagaaactcggttttcctgatagaaaaagatatgagttaaatgtgagaaacatcatcagaacccatagttcagcccaatcattgctcaaatctctacttggcggattgtacgaagctatttaccccatgtga

SEQ ID NO: 85116 - DNA, 1278 bp, Citrobacter koseri
atggcaggaaaacaagagggaaagccactttcgtttaaagcggtagaaatgatgaagccaggcgataaagataaggctgatgtaggcgaaaatcgaggcttacgtgtctcctgtggtgcaactggggttaagtcttttttctaccgttacacaagtcctctgactggcaagcttgctcaggttaaaattggtaacttcccgcagacttctctcgccgctgcacgtcttaaactccacgaattaaagctcctccgacaggaaggtcggtgcccagcatcagaacttaaacaagataagctccagcgtgcaattgaagctgaacaggctaagatccctgaattgaccgtacggggattggttgaattgtatcttaccgagcgtattgaggatcgtaaaacgaaggacggaaagatcatagccggtgccagaaaaccgaaagggcaggccgaagtccgtcgtactctttatggtgatgccgtcaaaagtctgggaacacgaaatgctgctgagattacgcgccaggatatcattgatttaatcaatggcattgtagcccgaggggcaaccgtacaggccggtaatgttctgagggaactttcactcgcttatgagtttgcaattggccttgggcgctttgatgacagttttgcgaatccagcgttgttagcaaaatccagtttacgacagaccagaatcaagctcacaaatggacgtggaacacgagtactgagcgaggatgaacttgcaaaatttcttaaatggcttccaggttcggcttatacgccaacgatcaaaaacgtgttacgtctgactctctggaccgggtgtcgtaccggtgaggtctgtaacatggcgtggagtgatgttgatctggaaaaggggacgatatacctgcgtgagactaaaacaggtgttgaacgttacgttcagctatctacgcaagccatagatttcctaagtgtacttcgtctcaattcggataagtatttatttccgtctacacgaacaagacttccaatccagcaaaaatatctgacagagagtgcgtggcgcttacgtgaatccggccagatgttagatataccgagttggactccgcacgatttacggcgtactgttcgtaccgggctgtcgcggcttcaatgccctaacgaagtggcagaggcgattctgggacatacaaaaggtggtatggaagggatttataacctatacaagtatgattcagagtgcaaaagatggttacaggtctgggcaaactatcttgaaaccgtataa

SEQ ID NO: 85117 - DNA, 375 bp, Citrobacter koseri
atgaaaaaaatcatcatcacaacattagtatctctggctctggtcggttgttcttccgttggtaatcagtcattgaaaaatgaaacaaaagagagcgtgaagtcgaagattgtgaaaggtaaaaccacaaaggaagatgtattggcttccttcggtgaacctgacagccgttccctcattgacggtgaagagcagtggtcttacacgatgtataacagccagtcaaaggcaacatcttttatccctgtaattggattgttagctggcggcgctgacacacaatcaagctctctcaccatcatgtttaaaggagagaaagtagattcctacgtttttaatgccgggaaaagcaatgtcaaaacaggtattttttaa

SEQ ID NO: 85118 - DNA, 729 bp, Citrobacter koseri
atgagtattttcactatgaggcggttttggcttgcggtatcccttcctgcacttatcgcgttattcacagggaaaagtggattgattcttaccggagtcgcctggatgcctgtcagtgccttgctacttatctgggcatttttaacatacagacgtgataataaagaaaaatccgaactggcaaaaaacagttatcttagcgctcagaaaaaagaaatcactacgcctaaatttgagttccagagtaaaacctatactttcaaagaaactttttcaggcaccgttatcgatgtttgtgatggtcatatctgggtcaaaaatgcagatggagttgaaaaacgttttaagatccgcgatgtacctttcagaaaaggtcatcatatcagaaggtacgcacttgttcaatacattaaggatggtgcatatcgaacaattaataacgcgcttatcattaatgacagtaccaacaatagagaaattactgatttttcagaggatgtgttcacaccatcttattttacacctgttaacattattctttacattaccttatttgtttctttttgcgtatgggcgttcacactaaattacggacacgtcattctttctgcattagctctaatttatttcttaagaaaaataacaaaaagaaatcgtcaaaaatttagagctgaagtccatcagattgcaaacagacttgacaataaagaactaacaactattgaatag

SEQ ID NO: 85119 - DNA, 1206 bp, Citrobacter koseri
atgatggggagcttcgctaaagagctaataactgagtttggtgctacaaaaacgcttcgccctgatgtagctaaagcagtgtggcacaattcgcttcgtttgccgaaaaacgaagccttaacaaattcagaatggacaaccatcgctgatgactacatgaagcgtatgggcttctctgagacgcatctaagatgctatgtccttcatgacgataaggccggccagcacatccacattattgccagtcgtatagatctatccaatagaagcctttacttgggcaaaaatgaaaacctcatcagcacccgtatcatccaacagttagaaatagatcaccatctgaccaaaactaaagggccagaattggtagcatcaccatccccagcttcgctatccagaaaatccccgccccaaaaaccgataatcgcaataccgaagcctaaaaagctatcgcgtaacgaagcgatgatggagaagtataaaggagagctatcacccaaatcggttatccaggaagccctggaagcattacttgtcgataaaccatccaccactgattttgtgatgcagcttgccgccaacaatatcaaagcgcttccgaatattgcctcaacagggaaaatgaatgggttttcattcgaatatcaagggattgctttcaaagcttcgcagttaggtaaaggttattcctggtctgccttacaaaacaggctagattaccagccggaacgcgacaatgctttcctgtttgcattgaaaatgccctcagtcagtaaggcaccgattagcgaagcgcctgatagtgccatagcaacacatccccatgaaatcacaacagaagacgttaacagtcctgtcgaatcgcttatcctcgataaccatgctggtcaggacgaatacactaacacctctgtaaagcagcttcacttagaagttggtgctggtgctaaggaatcgatagcaatcgaagagttaaaagaggcttccaagcgaagctatacggtctcatcgtttagatggcttgaaaccataccctatctccaaatcatcattggtatgttgaaaaacctaaaaatcccaacgctgcaatgtcctaaaaaacacaaaactatcactggcgtgagagtggtagaaattacgcccccaactactgcaaccgacattgaaatgccctcaattcatcgtagaccatcgccaacaatgtaa

SEQ ID NO: 85120 - DNA, 426 bp, Citrobacter koseri
atggtcgcaagtaatacttttaataagatcgttataagtaagcattcccgtaatggaagcgttaatgaagcgaaattctcacacaaccagcttcgttctcattgcgtcagtgtcaggctaaataatgaagagctaacgcttctcaacgagaaacgtggccgtcatcgtaaaggcgaatggcttcgcttatctttactcaataaacttcctgctgtcgttccagcaatcaatattgaagcatggaaatcgcttagcgaaatttcacagaagctgaacaagcttgtggttcatcttgataacaagagccatgaaagctctctgacgcaaacggaactcttcgcggtgaagcgtcagatctcagagcttcgcttgcatttaattaccgctgatctgtggagagcaccttctgatgaagggaatgcataa

SEQ ID NO: 85121 - DNA, 1617 bp, Citrobacter koseri
ttggcggtaatagctgcaataagttttatgtcttttcaaagtatgaatcgtgattttgaagaaaaacaagctgcttctattggagaacaaataagaaatgtaggaacgggcgtaaataattatatcgttaaccattatgatgtattatcgaaactggagaattctactggtgggcctcaagatccaggatcaagaacctgctctactgcaacatctacttgtgaaataaccacacaaacattagtcaatgaagggatgcttccccctgttttcaacggtaagaatgtttatggttctggatataagatcataatagccagaaaaggtagtgctccatactggaatatttcagcactggttgctactgacacacctttatcaagaagtggtagtattagatatgatttattgggtaaagccatgcagactgctggtatagatagcggcatgaccaggacatcatccactaaagtagaaggttataaaggttcctggtctgcaactcaaacagagtattcaaatataaacaaacaaggattactagcgtatattacgggttatggctccaactcctattcagcttttcttcgtcgtgatggaacccttcccatgacaggtgatttgaatatgggaactaaaaatatctatggtgctgccaatattactgcatctggaaaaggaacattcggtggtgaagtggaagcaggtgcatgggttcatgcaagaaatggatacggggaattactgagtattggcggtgatgcttccgctaatgattatgaaataagaatggatgccgataaaccattaagcatccatatgaaaagcaatcgtaatgatattacagcactgaatgttacaggtggggttgctgtagctgggattttaaatacaactggtaatataacggctggcggtcaaatcattgggcacaatggtggtggtgatgcttatgttattggtggtggtgatgccaatgattatgaattcagattaggttcaaataaaccattaaccttatggcgttctggtggttccagttctgaaactcgttttcaggtatggggaaatcaaaataatgctggtgatttttccattgtgccaggtagtgatggcaatacaaccggaagcatagcagcttctggtaatattaaagcgaaaactcttgaatccactggcagaatcactgtcggagaatttttacagattaatggatgggcttctataggcaatacatgttcccctaatggactacaaggtcatgcttcatcaggaatgccaatatattgtgtcgatggtaaatggcagtcaatcgggtcaatggtaaggattgttacgatttctcaaaatgctgcggatgccgtaacgatggcttgtaatagtaatgaggttgcagttggtggtggaggaaaagctaacaatggtgttggtttcaccgatgttcaggggaaatatgctgcaccggggatagacatatcaatgccagcaggtgctggaacaacaggtgtagcccctacgggcacggtacccgacagatgggtgctgagtggtgtgcacaatgctaccaataatcctgaaaacttagttgggtttgttgtatgtatgagaaaatggtaa

SEQ ID NO: 85122 - DNA, 894 bp, Citrobacter koseri
atggaactttttgcgattacagacagcgagataccgactagaataattaagattgacatagatgctcccgcacaaacggtagtagaaaatctatttagaactcagagaagtgagtttataaatgaagatatcgaagagatagacttttgtgcatcttataatgttcaggatggtgaaatattttctatcaatccatttgatgacgaaataggcattattaatgcaatcgaacggcctgatgctgttccggtttgggaccctgatgatgtgtcagttcattattttaaagcgttatttacgggtgagccaacttcgaatggtaatcctactcaggtttggcttcaatgtttcgacagacgacaaataattaataatgaaaaatcctttttccaagtagtaacacagcctggaaatagattctcagtgtccactcgtcctggtttttcgcttagtgatcgattaactgctatccttgtgggtgataaattattgtttaagagtttctttatgctccggcgattttttaacatggaagagtattttaatgaagctactagagaggatttagataactttatcggtaatgatatatttcatgtggaaaatgctgaggattttatgacgtttgcagattctgcaattaaaaagaaagtatctttgataataagttctggaatactcaacgatcagcctattgaaaatctaattgagtgtgcccagaagattggatatcaattaggtataactaatgtgaatggtgacaataaaatcactatgccaaactcaaaaagagaagtgaagcaactattatatttcctcgatcagggctacttcaattcaataatcacaaatgagttaatgttgacgaattcgaagcgaccaataagaatttga

SEQ ID NO: 85123 - DNA, 573 bp, Citrobacter koseri
atgaccacggacttcatgtatactggttttttatacagttatggtgggtggtgtatgcttaatggatttgctcgctatgctttgactgctagttcggttgccccagtttgcctgacattggcattcttagcttatattaatgataattataagattcttgtttcctcaattcttttggctgtcgtaagtgtggttttttgtgtctttataatcaaacaagcacaaaaatataatccggtcacattgaaaaacttagaatcggcatctccggcagataaggaaataaccaactatttcttgacttacttatttccacttatatctggaccgaccacttttatggattggcgattagctctatttttttatttaagtcttttcttctacataaaacactcgtcttcgtatagtttcaatccaattttgtctattatatttggattcaagttctatgaagccgaagatgacactggggtgagctttgttcttttgtcaacaaaacctcttaccaatgcgaagatcaaaggtttgagggtaaagaagcttactgaacatacctatatgattgtataa

SEQ ID NO: 85124 - DNA, 414 bp, Citrobacter koseri
atggaaaaatctaaacatgacgatcagcatcgtgatcgatttaggaaagataaaaatctaaggttgttacgccatttttgtatcagtgtgcgtttgaatcagtcagagctagagcttttaaacaacagaaggggcaagcataaaaaaggggagtggttaagattaacctttttaaatcacaccccaaccaacatcccgttagtaaatgttgaagcttggaaaatgttgtcagacatatcgcaaaagctaaatcgaattgcgatccatatcgatggtaagagcaaagacagcaagcttactcatacagagcttttcgctgtgaagcgacaactgcaagagcttcgccagcacctactaaatgctgacatatggagcaaaccctatgaagggaatgcagaagatcaaaaggggtaa

SEQ ID NO: 85125 - DNA, 1185 bp, Citrobacter koseri
atgaagggaatgcagaagatcaaaaggggtaagagcttcgctggtgttgttcaatatgcattgaagccaggctcacatcataaaagtgatccaatcgtcattggcgggaacatgttaggtgattcagcccttgaactgatcgctgaattcgatagcaccaaacatcttcgccaggatgtcgcaaaaccagtttggcacaactcgcttcgcttacccaacggtgaatcactaacggctgaacaatggtccagcatcgcagatgactatatgaggagaatgggattcggtgatacccatctccgttgctatgtgcttcatgacgattcggctggtcagcacatacacattatcgccagcagaatcgacatagctggtgggaagctctacttgggtaggaacgaaaaccttataagcacacgaattattagtgaactcgaaatcgctcacggtctgacagtgaccaagacagcaccttccattacaccaaagcaacagaagcgaagaaaggtatcccgtaatgaacaaatgctttcagaacggacaggccttccctcccccaaagaagctctccaactgatacttgataaaagtttggcagatacacctgaccttttaacttttatcaaaaggctggaagaagcaaaagtcggctggacggctaacattgcttctaccggtaagatgaacggcttctcattcgaataccgcgatatagcattcaaagcttcgcaattgggtaagagctactcctgggcaaatctcagtaatcggcttaactacaaccccgaccacttagaagctttacgaaccaacacaccggcaaaagaccactctgctcctgctcctgctcctgctcctgctcctgctcctgctcctgctcctgctcctgctcctgcaatagttttgaaaaccgctgagagaaaggaaagtatcggtaaaaaaattgcagaactggaactacggcttagagaagacaaacggaacgaaatcgtagaaaagatccttcaaaagaatgcagccaaacagcaaaagcatctcaggctcaccggctggattccctttttacaacggctcatagagcttctcagaaaatatggaaagagcatcctccacaaggttcctacaaacttctcagaagtctattcaacacatcatctgaaacctacaagaaaaattcgtttatag

SEQ ID NO: 85126 - DNA, 273 bp, Citrobacter koseri
atgtgggaaaagatattacaaaaaaatctttattctgaatgggttatccgaaacaccctatactggatgactcctgtaagtccatggaaacttgaagaaaacacatcctattggattatcttctttgagataagtggccctgaatgtgagtttgaattcggaaggctgttaaacgattttagcctccgcgagaaacttcatcatcaaaccggtcaattgcgtgatgccattgtcagcaaggttctccgaagcatagatgacaggcttgcataa

SEQ ID NO: 85127 - DNA, 2031 bp, Citrobacter koseri
atgtttggtggtgtgttggctatgtatactttgctggttggtactatgagtactgctcatgatggtgaaatgcctggtaaaagatggtcaactctttgggttcctatcagaaccagcttaggtgtggcaatgatactacctataaaaaatggtttctgtgcggttcagataatcatcatttggcttgccactcagggaataggtcttgcagatatggcatggtcagcttttgccgctcaacctatgaaaggtgctgtttatcattctccaggattaaagtatcaacttgctcctttatatacgactataatgactaacggtgcttgtgtcggagcagctaataaatcattaaatgaattaaaaaatggagagggggcaacatggaagaattttttatatactatgaatcgtgcttacaatggtggtaaagaacctttgtttggagcaactcctatcagtaaaactaatgctgtaggttatgcttttggtgatacaaatgatgctttacctggtccagggaaaccttctgaaatttgtggaaccatagaattaccattgaatggtaaggaatcaaatgccggacgtgaaataaataacgctcctttatcagcagataatttagttgatatggatcaaattaaaggtatgatcaaccagactcataagcaagctatgggtgcatttgtaaaatcggcttataacatgggtttaaaaatagcttctggaagcaatgttacaggagaagaagtagctgctgaaatgatgagtgctgttaatacttatgaaaatacaatcatgaagtcagctaatagcgaatttgataaagcagtaaacgttaatgctataaaagctatgcaggaagatggtatcgctggtgcaggtgcatggttctatagacttgttaaagcacagaatgaaataaaccaagaagtttctaatattccagtaggacaaggaacatggagtgaaactaaaaaatccatactaggaatgttatcaagcaatatagagggatctatcaaaaaagcagttgaattgggggttgaatcatttaacacatcaaaagttggtataaagagtgctggaacagaaggctcgatttcgtggtttacagatttctttattaatagtggtggtataccagactggtctggtaataataatatgaaaaacaacactgaaaacccaatgagtgctactgttggtataggttctgctatgttaacaggtataggtatattatggacagcaatgatctccgcagtttttgttactggaatggttaagggtaatgcggccggggcacttgctggtttagcagtagcttaccaaagtacaataatattaatagctcctctaattttaacaatgactactgccttactgattccagcattattcatggcttattacttacctatgatgccatttataatatggacgggtacactaattggatggttagtgcttgtagtagaagcattatttgctgggccattatgggcagttgctcacttagctccagatgctgatagtatggtaggtaaacaaggtcagggatacatgttaatattatcattgatattaagaccattactaatgattataggattcatagtttcattaagtttaatggttccatgtggtatgtttgttaactacttctttgctttcgctacatatggtacaacaaatggccttgctgcatttttcgctggtgctgcatcggctatagtttattgtgtaataatgaacaatataataaaaagattgttatctataacccactctttaccagattcaatattacaatggatcggcggtggtggtagtagaattcttggagaatatggtggtggtattgaatctgattctcgcggtggtcaagctgctgctcttggtgctgcaattggtgcaagaggtgctggcggtggtggtaaaggtggtattcttggaaagttgagaggctctcatgaggatcttaaggatgcaagaaaaaaagcatttggagatgaatttaaatcaaaatga

SEQ ID NO: 85128 - DNA, 1500 bp, Citrobacter koseri
atgagtccgattaaaccagaggaacagtcaaatcgcatatccagtaaagcagaggaagccaggataaaaaagctgccagatgaaacggctttgaatacaatggccgagatcttctccttaccggacgatgagcttagcgaacgagaccttttcactacttctgtgtttgctctgctgatgtgtgctccttcaaggatttctgaaattctggctctgtcatgtgattgtgaagtcaatgaaaccgactcgaagggtgtccagaagtatggcctcaggttttattccatgaaggggtatggagcagatataaaatggataccggaagtaatggttccggttgctaaaaaggcaatagaaaggttgaggaaactttcaaaaaatgcccgtgagtttgcactgtgggtagaaaaccatcctgagaaatttttcagaagagagcactacccggacattgcggaagatgaagtattaaaaccaaatcagatatgtgaactgctgggttataatagtgacagtaaaggggggaggaaaaagtatctgtatcaggtaaatatttatgattgtaatgaaacatacagtatgaaatccctgtggaaaattattatgtcaaagttaccatcaggttttccatactattataaagatataaaatacagcgatacgctttgcctgttgaacgttaatcagttagataaagttaagataacaataatgtatgaattacaaaaacccagcaaaaatatttttataccagacatttcagtgactaacaaggagcatgtcaggttcgaaaatatatttaccaggcatggctatgttagcccggatgggaaacctttacacctgaggagtcatcaaccacgccatttgcttaataccattgcgcaacgaaacgggatgtctaacctggatatagccaaatggtctggccgcgcgaaggtttcccagaacaaagtttataaccacgtatctgaggacgaaatacttcgtaaagccgaggcactggatatcagttccattggttcacaggccttcatgatcgattcagtggagccaaaccttcctgttacgaagggcatgatcaatctctgggaacacggggcaattcatactactgagttcggctactgtgtccatgactacatgatgagtccctgtgataagttcagagactgtatcaactgcaacgggcaggtttgcgtaaagggagatgaagagaagctccagcgactcgaagaaagactcaatatgactgaagggcttctctccaaagcaaaagagtcgatgacggaagaagagcttggcgctgaccgctgggttaagcatcatgaatcgacgctatcacgattgagagaacttatctcaattctttctgacgatgcgatccccgatggttcacgaataaaactgggaggtgaagaaagttttactcaattggggcgagtgttaaataaatttgaaaatatcgaaaacaaagggaatactaattatataaattaa

SEQ ID NO: 85129 - DNA, 399 bp, Citrobacter koseri
atggcaagacatctgaataaaaacgatatagcgataataataaatgtgattgtgcagtgggatgaagataaaatcacctgggatgggatatgtacggctgtcgaatcattgattggtaagaagccgacaagacagtctctaaatatgaataaggacatcgttgcggcataccagatcaggaagaaaggcatcagagctacagacaatgccatcaggcgaccagcgaatctgaagatcgcagctgcgagaatcgctagtttagaaaagcagctttaccatctggaagagataaataagaacttaaaagagcagttcatccgatggcaatataattcatacaaatatggtttgaaagaacatcagctaaatgaagatatgccgactatcgacagactctaa

SEQ ID NO: 85130 - DNA, 1200 bp, Citrobacter koseri
atgaaaaaaacaagtataaatacatttattatgagtagtggtgaaagattttgtttggttcttgataaagaaacgggggtacctcttttcaacccgacgctatatatcacaactcaggtcagaaaccaaagtgattccatatctacagtagaactcgttgccggtgctatatccttattctgcaatttcctgtttgacagaaatattgatatagaggggcgactccgcacaggagagaaccttgctattcatgaaatagatgctctgagggattattgtgagaggaaagtaaggctgagaaagtctttaccttatgacattcagaaagcgagacttgtgaacaatgcaacgagacacttcaggttaactcatatagcgagttatctgagctggttaggggagagattgaatctgaaacagagtaatacaaatgagatggtagaaagaataaaacagagacgaccgaaactaaaaaggagatcaagaaaatataagcaagacagatctctcgatgaaaaacagataacatcattacttgaaatcacaatgccgggatctacgctgaatccatttaaaaaggatgttcaggttagaaatagaattattatacttattctgtattcgctgggaatacgttccggtgaacttctaaatatccgtattactgatattaactttagagattcaagtctggaaattcgccgccgagctgacgataaagaagatcctcgaattaaacaacctctggtgaaaacactggaaaggaaactttcattatctgctccattggtcaaagaaatacacaactatattgccaatattcgcagaaacttcaaaaaatccagaaagcatgaatatctctttgtaacccacaaatcaggtcccactcagggtatgcctttgtcatcgatggcatatcataaaataattgattcaatcagaaatgtggcacctgaaatcaacaggcttactggtcataaactcaggcacacctggaactatgaattctccaggaagttagatgcaatgccagatcctataagcgaagccgaacaggaagatatgcgttcttccctgatgggatggactcaaggttcaaagaccgcgcagatatataacagaagattcattgagaataaggcccagactgtggcattagcacttcaggaagacattaataaaaagggagatagaaaatga

SEQ ID NO: 85131 - DNA, 228 bp, Citrobacter koseri
atggcagctaggattttcattaaacttcccttcttagagatgcctgatatagaaaaggatattgttccaattgacctccaaatcaacacgctggtagattcattaaatttatctgaggcatataataagatcagcacagcgaataaacaaactgatatgaatttagaaatgctaattgaggaattaataaatgaagaactggaagctatcaaagctgagaataaataa

SEQ ID NO: 85132 - DNA, 876 bp, Citrobacter koseri
gtgaatattccgagaattaagcagggtttagacttcagggaggagttcagaacattcaggattaccaaagagctttataaacttgtctgtaaacaggctaacgaatcaataaccttgttatctgtttttatgggaagagaccttactgcggaagagattaaagatgttcctcttttcatttctactgtcaaatttcgtttgatagatacgaaactaagtttgggtggttatttaaaaaatgacaagttacattattacagaggaaaaacaaataaagttttgaaaaaaattatcgggaaggaaaagatctactcagaacgaacaggagaacttttatacataaatgcaaggaggttccgttatacgcttggaacacgagcggcaaaagagggttatggagaaataatcatcgcagagctacttgatcactcaaccactgataatgtagggatctatgttcagaacaatgtggataatgcttataaaatcgataaagcggtgggaaaatctctagcagatatctcggatgcttttaaaggacaagtaaagcgcaaagaagatataggttatgagataacaccattagttaaaataaaaagtcatgatggtgaagatgccgggagttgtcagcaatgttcgtcatgttcagccaatgtacctatcccttgttatacctgtatgcatttcactccgtggctgaacggaccgcatgaaaaggtttatgagtatttaatcagtgaaagagagcgaatacataatataactcaggacagaaatgtgactgaatcactcgacaggaccattactgctgtggggctggttgtaaatcactgcaaagctatgagggatttagaacagaggagagaaaacatatga

SEQ ID NO: 85133 - DNA, 213 bp, Citrobacter koseri
atggttaacagaatgagatctattgtgagaacggcgacagacgaatctggtaagttcaggactggtgtcttagaagcggcccttgcccactcgaagaaagatgaaataattgcagcttacaatcgcccggaatatctggcagaacgagtgattctcatgcagtggtggagtgattatgtcattgctcaaaaatttaaagctattgcggcataa

SEQ ID NO: 85134 - DNA, 183 bp, Citrobacter koseri
atgtatgatgttgaaacatgggatgatattgattttagtaaattcccgacgagaagaagccacttggatagttatttaaattgggcaaaagtttatcctaaatatttagagcacaataaagaggctgcttactgccttttacttggttttaagacatttattgaagatgctaaaaaaccgtag

SEQ ID NO: 85135 - DNA, 168 bp, Citrobacter koseri
atgaagtttaccgaactacctgatcatgtaattgaagcagcagcaaaaacgctttctcgcgaacttgaaggggtatcgacgtgggaagatgataaacgaacggaaaaggccaaagctgttgccgaatccgttcgtgagagctttatcaggctttgcgatggatattaa

SEQ ID NO: 85136 - DNA, 2673 bp, Citrobacter koseri
atgacccagaacgtcggtgatattgaatacgttatcaaagctgatacatctcagttgctgcgtgctgataaagaagttaatgatgcaacaagcggcatggaatccgggttcaagcgcacagataaggcagcagaaaaagcgggtaaagctattgttcgtgcggcagacgatgcgagtgatgcggcaaagattatcgaaaggcttggtaacgagattgcaatattagaagaagcaaatgaaggtggagctaagagtgctgctgtgctcgcggctcaacttgccgcctctggtgatgcaagccaaaagcaagcagaagagataggggttctcgcaggaaagctatacgatttgagatctgccgctaaagaagctgcaaaagagtcttcagaatcagctaaaatcgcatctaaacaagccagcgaatccgcaagattacgctcaataacccaggatttatcaaagcagattgcggtattaaaagaagaacagcgtaacggagcaagaagcgcagccatgctttcagcccgccttcaagctggctcaaacgcgacagctgctcagcgtagagagattggtgaactagctgggaaattatacgatttaaaaagcgctcaggatcaagcaagtagatcttcttcaggactgaaaacaggcctaactgccattgcttcagctatcaccatttcccaaatggccaggtacggaaagcaattccttgagcttgcagatgcgatgacacaactccaggcaaggatagccaggctttcaactgatgcctccacagcaaaagaaacgtttcaatcgttgactcaaatatcgtcaaaaacaggcgccagtctgtcagatacaaccaagctgtgggaaacattgacatcgtctcttaaggaagctggagcatcaaatgctcaggtcttaaatcttaccgatacgctgcaaaaaattgggcgcataggaggaaactcaacagaagaaatgtcgaatgctcttcgccagtttggacagtcaattgcgtcaggaactgtcagagcagaagaatttaactcaatcctcgaacagatgcctgagttagcaagacagattgctgctggtatgggtattagcatgggcgagttgcgtcagcgaatgctcgatggaaaattgacagcgcaagatgctctgaatgctatacaggacagaacggcagttgttaacgaggaatttaataagcttcctcgttcattatcacaagctagcggctctctcgaaacatcatttgcaaaactcgtctcctcaataaatgacgcaactggagcatcaagcgcagcggttactgttattgatgggttggcgaaatacatcgagctgctcggagactcgtcaacatcaactgcggataaactatgggctctcgctggtgctatttcaaaacttaatcctggatatattggaaaacttttagctgacgggcttataggagatgaacctccaaaacaagtcgatgtattaagcgagaaaattgccaatcttaccggggatttaaaagagctttctgggcaggctgaaaaaacagcgcatgtggagatacctcagaccgataacaataagggaggaaagggaggtggcgggaagaccaccaagaaacaggccgacgaagcaacagagtctctcgccagacagcaagccgcactcgatcgcctgaacacaggatatgcagaaggatcactagagctagctcaatatgacgctgttgtagctctgggaaacaaggcgactaatgagcagatagctaaggcgaagcagcaggctaaagccatatggcaagtaaccactgccattaagaatcgcgctcaggctgaacaggctaagcgtttcacagatcaggaaatcgcgactaacaaaacaacgcctgacgctgtaacaggcgcggtgcaagaccctgtagcccagataaatcttcaggagcagcagaaactggcggcgttagctcaatatcagcaaatgggcgtcttaagcgttcagcaatatgaagatgcaaaaacggctatccaggagcaggcttctaatgccaggaagaaaattgcacaggaagaagctgacagccagatagcatccaccatttctatactgaacgcagcatcatctggcttcgatagcctggccggaataatcagtaatactgctggaagggctaatagtgcttatgtcgcaatgtttgctgctgccaaatcatttgcgattgctgctgcaacactggattttaatggcgcgctgctcaaggcgctgaacgctcctgattcattaactaccgcacagcgctttgctaactacgctgctgttgcttctgctggagcatctgttctttcaaacattgcaagcgtcagcatgagtggcggtcgtcgctacggcggtacggtatctgctggaaacgcctatcgagtaaacgaggatggtcgttctgaaatcttccagactgctggtggtcagcagatgttcattccgaaccagtcagggaaggtgatatcggctgataaggcgggtgggggcggcagtgtggttcagcacatcacctttgaaatcaacaccaccggcggcatagacgatgcgactatggcgaagatgacgcagatgatgaagcaggtgagccttaatactatccgcgaccaacagcgccctaatggcttattacggaggtaa

SEQ ID NO: 85137 - DNA, 255 bp, Citrobacter koseri
atgggttctatgttagaactggaaaaaatagttgcagatttacaacgtgaattacagatagaaaaagcaaccaacaaactagttttttcgctgataattgaaaccattaacaaactgtcaccaaaacaaaatgttagagaagtaatgatggaagcactgaaaggagttacgccacctgaaatttcatcggctcctgatgctagcgaagcaatcaagagagttgagaatataattcagaagaaacaaccgcgttag

SEQ ID NO: 85138 - DNA, 216 bp, Citrobacter koseri
atgactttagaacaacgtgttgaagctctggagaaaattgtaaaagtgttaacagtgggtgagctaacggtcgatgatgggcaggcattcatcaatgaggcatttattcaagatgtggctattaaaacggcccgctatcgagccgctgatgaagatttaattcaggatatcactaacgcggttgtttcttctgaattatattctcaactctcttga

SEQ ID NO: 85139 - DNA, 1623 bp, Citrobacter koseri
atgagaaagcgtaaatctgtggcagatattgaagatatccgcctgatgaagctcaagttttatcggttggttaaaagtgacaattcaagtgagtgcatgctgtggtctggtgctttgaactttgatggttatggtcaattttcatttgaagggcgtacttggtctgcacacagaatggcatacgagattgctaatggtcctatcgctcaagatgcgcaaaagtggtgggttctccataaatgcgacaatccagcctgttgcaatccaaatcacctttatcttggcgatgcgaaagacaatgcgaacgacatgatagacagaaaacggcagcgaatgggtttcaagcgatatggcagcggggaagatattcgctttgggagggttttctatgaaattggcggtgaaattagaacattacatgagtgggctgagagattaggcgttaacccaagcactctagatcagcgattatcagcaggatggccggagaaagatcttggtttgtcttcaaaggtgttcaagcgtcacttaaaaagtgatggtcaaacaaaatacaggagattttctggtttagaagaggtagagaattacaaaagtgaagcctcagtagcagcaactaccaaggcttctttatcaacaaatcgtgatggaaatattgacatgacaagtatagcaattcttgaagcagttaacacctcttacgtgccgttcaacggacaacagattattactgctatggtggcaggtgtggcctatgttgcgatgaagccaatcgttgaaaatcttgggatgagttggtcaactcagatgcgcaagctgatgaaccaaaaagataaatatgggtatgctcatatgagcataccttcaaaagggggaattcagcagatgctttgccttcccttgaaaaaactcaacggctggctgttcagcatcaatcccgaaaaggttcgtgcagatattcgtgacaagctgatccaatatcaggaagaatgcttcactgttctgcatgattactggacgaaaggtaaagcagagaaatcatgcggcaatgcagataaaacatcgactgatgatcgtactccactgcgcgggttggtgaatcgcatcatggggaaaacaggaatccactatcagccgctttacaaaatgatccaccgcgagttcggcgttaagcatattgatgagctgacaccgcgacaggttacagaagcaatggaatttcttgccgggaaagttcttgaaggggagtttattggtaagcaggaagcacttcctgccccgaaagttaatctcgatatgccattaaaggtctggtatgaaaattgcgcggcgctgcgagtagaaaatccacctcgcgttaaaaaaccataccagtcggtggatctgaatatccctccactcactttctatggcgatgggaactggtcaccgactatggcactcgtgaaccgacttgaggcagatggtcatgacctttctgcgtgccgcatcgaggttgccgtaatgcggaaaatcatctctaagctagacccggtggtaaaggaagttgacgctattcgtgggcgaagaacaattcccctgatgcgcgttctcggtgagaagggcgatatgattctctgctaa

SEQ ID NO: 85140 - DNA, 393 bp, Citrobacter koseri
atgactaaacatgatgattttgcatctcgcatgattgaacggcgcgcgcaattaggttggtcgcaagaacagctatcgaaagaatctggcgtggcagctgcacagatatcacgttatgaggccagggttaacaaaccacgagcgaatgtgattgccaagttggctaaagggttacttgtgcctttttcttggcttgccaatggtgatacatcagagtttgacattagcgacgccccgagcgggttctttgatctgactatccagttaccggaagacttagctattgcaataaaaaaagccgcggcaagcagaggcatctctgaggatgaatatataattcagtcgcttgctgagtacaacgacattgataccaaaagcaaaaagcccacctga

SEQ ID NO: 85141 - DNA, 492 bp, Citrobacter koseri
atgcttactgttgagtttttaagagagatattatcctacgatcctgacaccgggattttcatttggaaaaagacgctatccaaccgcaataaagttggcaatgtagccgggacgattaatgatcgcggatatgttgttatcactataaaaagaaaacgcctcatggctcaccgactggcatggctgtactacttcggcactgagcctaatggtgtaattgatcacttggatggggtttacgccaataataggatctctaacctaagagatgttgagcaagttcttaatactcgcaacaaccgcttatctaaaaacaacaccagtggataccccggagtttacctcaacaaaaggaacggcaaatgggccgtgcaaatatggcatggcatgaagcgtaaatgccttggttcatttgaacacaaagagcaagcgatccaagtaaggaaacaggcagaattggaacttggatacaaatcaagaatcatgtcatga

SEQ ID NO: 85142 - DNA, 177 bp, Citrobacter koseri
atgacaccagatgaaaaaagaaagatgattttcgagttaacagctcaaatcatcgcaggccgtgtgacttcggaacgtataccacacccagcaagttatatatctaatgatttcaaggctatttttgaagcattagctgctgagtgggacaaaagctacgttaagaatctccgttaa

SEQ ID NO: 85143 - DNA, 378 bp, Citrobacter koseri
atgagcaaggtaaccgcaatcatcataactgtggtcatctgcatcattgtatctcttggctgggctgttaatcactaccgcgacaacgccatcacctacaaagaccagcgcgataaagcgtcggtccgggcggaaacatcagaggcgatcaccaacaatatcatcaccacgatgaacctcatccgtgacatctcacaggctactcagaatgcaaagaacgaactggcccaaaaaggcgaaacgcgcattgtctacatcaggcaagcgcttgaaggcgatccgtgcgctaaccagcttgttccttcttccgctgctgacagcctgcgggaatacgcagacagtttacgttccggccccggtggtgccgataagcgctaa

SEQ ID NO: 85144 - DNA, 837 bp, Citrobacter koseri
atgcaattcaccaaagagcagttaatagcaaaacttcagcaccggcttacagtagctgcaaaatacccagaagttgaagaggctgaacttgatgcggctatcttcaaaatcgctctggcatcgctggacgctggcagtgacagccacccggcgcacggcccgctctcaaattaccgcctgcaccgcatcagcgacattctgagcaaagccgcagcacaaagtgacggcggtaacatcggttacgcaatgtctgatgctgtgaaagcgattgatgaattgctggcgtcgcggtgctctaagcctgtgtatcagtaccaatccggcatttacaacgaggataacggcgaaacagactggtattgggatgactgtgacatcggattctacgagcagtatgcggcagaccgtcgcaggattctctacaccaccccgccagcgccggtagataacacgttcatccccaaaaatctggacagagcgttaggcgtcgttggtgtggcgttacctgagtcaaaagaggagtttaatttccagatagagcgctggatacaacgactcattgaccgggttattcgttactcagatgaatttaaagagcagacagcccagccagatattgaaatgttgtcctctgcactgagaaatgcacctttagcgccatcagatagccagggcagaccgagagcgccggtatctatgccagaggatgtgtccagtgcaatagagagattgaagcagactctggctgactgcaaccgctacaactactgctcggatgctgttaagcgcgtagagagcgcctgccgcgccgcaatgctcaacggaggtaaatcgtga

SEQ ID NO: 85145 - DNA, 765 bp, Citrobacter koseri
atgaaaactaaacctgtgatcgcagtctggttttcatgcggtgcagccagcgcagtggcggcaaagctaacaatcgaaaaatacggacaaacacacactatccgcatcctgaacaatcccgtagcagaggaagacagcgacaacgtgcgttttcttcatgacgttgaagaatggctgggtgctgaaattgaatctgtaattaatccaatgttcccaaattccagtgctgttgaagtatgggaccaccagcgttatatgtctggtatctcgggggcgccgtgcactagggccctgaagaaactggcgcgaaagcactgggaaaggagtaatcagtgtgattttgtcgtcctcggatttactgctgatgaggctaaccgcgctaataattttattaaaaacgagcgcagcgacttgctgccagtgctgattgatgccgggatgacaaaaggcgactgttttatggcacttcttgatgctggcattgcactccctcgcatttatgaacttggttacccgaacgctaactgtatcggctgcgtaaaatctacttcgccaacctactggaatcatgtccgaaaagtccacccggaggtgtttcagcaacgagctgaacaatcacgccgcctgggtgtaaggctggttcgttacaaaggtgagagactgtttcttgatgagctaccacaagacgcaattggcgcaccgatgaaggatatgaatttcgagtgcggtattttttgccagccacgcgaagaggatgcggcatga

SEQ ID NO: 85146 - DNA, 624 bp, Citrobacter koseri
atgaaagagcttggcataacgcaagaaatgctggctgaagagcttggaatgacgcagggtggcgtgggccactggttgcgtggatctcgacacccatcactagatgaaatcgggattattttccaatatcttgggatttctaatgtttcatttaaccatgacgggacattctcagtaaccggtaaagtatccaattctccagtaaagaaacaatatgattatccagtattttctcacgtgcaggctggaatgttctctcctgaatttagaacattcaccgaacgtgatgcggaaagattgataagcacaacaaaaaaagccagcgataatgcattctggctggaagttgatggacattctatgacggctccagctggttcaaagcctagtttcccagagggaatgctgattcttgtagacccagaggaacctgttgaccctggtgatttctgtatagcgcgtttgggtggggatgagttcacattcaagaaactgatacgtgagagcgggacatcatttctacaaccactcaacccgcaatatcctctgatcacctgtgacaacaactgtcacattgtaggtaaggttgtggcttctcagtggccggaagagacgtttgggtaa

SEQ ID NO: 85147 - DNA, 1008 bp, Citrobacter koseri
atgagtaagagtgaaccaacaggcaaagctataggtggcaaagctagagcattaaaaatgacagcagccgagagaaaagcttctgccataaaggccgcacagacaaaaaaacactacgctacgctgcctactgctgaatatggtaacggcaccacagttcttaaagtgggtgacattgagattccctgctatgtcttggatgatggacgaagagtattgtctcagggcggcttgcaagctgggattggcatgtctaaaagtggcggtgtgcgcggcgagcagcgaatagttacttttcttcgttctcttgaatcaaagggaatattaaacaatgacttagtcgcacgctgcgcctcacctatcgagtttagagttaaaagcggtggacgctcaatttatgggtttgaggctgaaacattagccgatatttgtgacgcggttctcgaggcgaattctcgtggttcgttactgcctcagcaaaaacactttgcaaaacagtgcgaaattttagttcgaggctttgctcgagtgggtattgtagctcttgttgatgaagcaacaggctatcaaagggatcgtgcacgtgatgcacttgctaaaatccttgaggcatttgtagcaaaggaaattcagccctacataaccacgttcccagcagactactacgaagaattattccggctgcgcgggcttgaatatccaccatcaaaccctcgttttaggccacagtattttgggctcctgaccaacgatatagtctataaacgtatagcgcctaacattctggaagagttaaaaaagcagactaaaaaagcggcaaagggaacaaaattattccagtcattaaccccaaatattgggcatcagagacttcgtgaacatctatcctctgtggtaactattatgaaactctctgaagactatcctgacttcattcaaaaactcaaccggctccatcaacgctttgatgatacgctacccttagatttagaagagaaagataagtaa

SEQ ID NO: 85148 - DNA, 324 bp, Citrobacter koseri
atggatgcacaagcacgccgccgcgaacgtcgcgcagagaaacaggctgaatggaacgctgcaaatcccctgttagttggggtaagcgctaagccagataaccgccctgttctgtcgctgactcgaaagccgaaatcacgcgtagaaagtgccgtgaacccgattgatttaacggcgctggctgagtatcgcgaagaattagaaaaacgcgctgcggtagttgagcgcaagaatcatcgtaattggtacagcaagccgggagagcgcggcattacctgccacggcacacagaagatgaaagggaaatcgataccgctgatttga

SEQ ID NO: 85149 - DNA, 705 bp, Citrobacter koseri
atgaatctgcatggtagaaacgaccagatgttgttaaatgatgatgagataaagatctcttactggcaacttgttatggtgaaacaagaacataaccgttgtatcatctctgagcatattttatatgaaatggatgataaaatggactggaatgatttaatatcgaaagtgagtgttgggattattactggattggtagctgcatatttcacagcgcattatactttaagacgcttttataaagagagatggtgggataagaaagttgatgtttatatgcaactagttaattgcatacatacaattttagcttgcacagagtattttcatcaccgggaactggagaagcaaaccggctgtccagaactttcaatgattaagagtgccgaggaagaaatccttcttaactctaataaaagcaacgagattgataacttaaagcgacttggtgatctagccacacttattttaaataacaagtgcggggagataattgaagagttcatcaataatgaaaatggtttgatctcagaatacgaatatactgatatgactctcgaaaagacattatcaaccagcttaaataacacacagaaattattgaaaggtattatcaacgaagccaggtcagatttaaaacatgaccaaagagacgtatgggaaaaaataaatgatttttcaatagggcttgaaaaacacaactaa

SEQ ID NO: 85150 - DNA, 249 bp, Citrobacter koseri
atgagcaacccaatcacagtaggtttttcaggcctgacgaagcgaattttcgcgggtcgttcaaagccgagcaaattgtcgctcggcgttcgtgaattcaccggtgagaaatttgatgtcacagacgaggcgctatttgcagtggctcatcttctcgcagttcgtgatgacatcctgatattcccgacagctgatgggaaagagattcacctgcgcgccgacatcaaagaaaagcgggaggcatcatga

SEQ ID NO: 85151 - DNA, 210 bp, Citrobacter koseri
atgagcaaactcaaacccggaaacgtctatatcgaaatatcccacaaccaatctggcggcctatccctgtgtgtcagcaatgacgatttcgggtgtcgtatttccggtgacaaggttggcgggtgcgacactttgaagcgctttgaggtagatgcggaaaagttgatttctgaaattcgagagcacctcaacgaccgggaggaatcatga

SEQ ID NO: 85152 - DNA, 915 bp, Citrobacter koseri
atgagcttcgacctgattcaattcgttaaacaacaggaaccgctgtttgtcggcgcactgaccgactcctcactgacttgggcaaaggagtgccagttcgcaattcagcttttccagcgcaaccagaagctggctgaaacagctgtcgccaacccaaccagcgcgcagaacgcaatcatcaacgtagccgccattggtatcagccttaatcctgccagcaaactggcttatctggtaccgcgcgacggcatggtttgcctcgacatcagctacatggggcttttgcacatcgcgcagtcggctggcgtcatcaagtgggggcaatgcaagcttgtgcacgccagcgaccagtatgaaacgcttggtctcgataaggcaccagcgcacaaatacgctccttttgccacgcctgatgatcgcggaccggtgatcggcggttattgcacggttaaaaccgccgacggtgattacctcactgaagagatgagctacgccgagattgaagagatcaggaaggtgagcaaggccggctcatcaccgaaaggcccgtgggtcaatttctggtctgagatggcgagaaaaaccatcgtgaagcgtgcctataaatactggccgcgcgctgatcgtcttgataatgccgtcgacattctgaacgaaaccgaagggtttttcactgaaccggtgatggcttacacacctgaaagtgaagtgatccagtcggaagagaacgcgaagcaggaaaaagccaaccacgtccagtcgctttgtgaagacatgaagcatgccaagacaatgcatgagctcaaaacccacttccaggcagcctacaaaatgacgtccggcatgcagctacagcaggacgttcaggctgtttacacccaatgcaaaacaaaattcgaagaggttactcaatga

SEQ ID NO: 85153 - DNA, 483 bp, Citrobacter koseri
atgacagccctttaccaaatcgcgaatgatttcgccaagctgactgattccggcatggaaccggaaatgatcgccgacactctcgatggcattgagtgggagctggaaacaaaggttgagcagattctcgctgtctgcaaaaacgaaacggcttatgccgaggcgctgaaagaagaaagcaagcgccttgcagagcgcgccaaagccgctgaaaaccgggtagcaagcatgaaagattatgtggctacctccctcgaaacggcaggcaaaaaatcacttaaggcgggcatccatcaggtaacggttcgtgcgccttcaaagtcagttgagataactgacgccagcgcactacctcctgaattcgtcgaatacgagacgaatattaaacctgacaagctggctatcaaacaccaaatcgaagctggcgtagtgatccccggcgcgcaaatcaagctcgggaaaccttccttgatcatcaaatag

SEQ ID NO: 85154 - DNA, 165 bp, Citrobacter koseri
atgtctgaatggacaggcgaagagctatccctgccctggcgttacaacaatgagcaggtcgctgaaatgaccgggcgcagcgttgaggaagttggggatcggcgtttgaaagccaactacgagcgcaataactggcctgagttcgacccggagcgtgagtcatga

SEQ ID NO: 85155 - DNA, 483 bp, Citrobacter koseri
atgagtgatttcagtcttctggatatgtgctgtggcagccgcatgttttggttcgacaaacaggacgagcgcactgtgtttagcgacatcagagctgagcagcacacgctttgcgacggacgaagcctggtcattagccctgatgtgatcgctgacttccgcgcgctgccgttctctgattcatccttcccggttgtggtttttgatcctccgcacctagaacgagtcggtgataacgcctggatgggaaagaaatatggtcgcctcaacaaagaaacatggcgtgatgatctgcgtgctggcttcgtagaagctttcagggtgttgcggccacaaggagtgctcatcttcaagtggaacgaaacgcaaattccggttagccagattatcgcgcttacagaccagaagcctgccatctggcagcgcacaggcaaggccgataaaacccactgggtgatatttgtcaaagggggtgacgtgtga

SEQ ID NO: 85156 - DNA, 228 bp, Citrobacter koseri
atgagcaaatacgtaaatcttgatatcgcgataatgagcaagcttagcgagacgccttctccgttcagccgcctgttctctggtgacgtaggggctgagtgcgtggatatagcgcaggatgaaggggataaaaaagagccgttccgcatcctcgaccgccgattacaggccttgcgtaaattgggggtgattgcccatgtgaaaggtaaaggatgggtgaagttatga

SEQ ID NO: 85157 - DNA, 222 bp, Citrobacter koseri
atgagcgcagaaatcatcgaccaggccaacgaactggctcagttgtatttagaccaggccattcaggagcgccgcatcgaccgcaacgccgtatcagctgaacgttgtgaagaatgcgacgaaccaattcccgagccgcggcgcgctgccgttcccggctgccaaacctgcgcggagtgccagggtgtgatcgaattgaggaataagcagagaggagtttga

SEQ ID NO: 85158 - DNA, 246 bp, Citrobacter koseri
atgagcgaaatgaccttaatcgtgcccaacgactgggtgactgagaaaaaactgatcgagattactggcttacgcccgggaacgatagaagctgccagaagaaactcgtggttggtaggccgcgaatatgtccacgttgcaccagatggaaaccctaaagaaaacagcgaatgcatgtacaaccgtaaggctatagacctgtgggttgagagcctcaaaaagaaacagccgggtgcgcgccaatga

SEQ ID NO: 85159 - DNA, 399 bp, Citrobacter koseri
atgcgattaattgataatgaccagctcaaggtattatatgaacaagctgagcaagcagaacgcctgcgctctcaccttttgatgcacagttcgcatcaggataaggtgcaacggctgctcattgctttggtcaaaggcagctatgtagaacctcattatcatgaacttcctcatcagtgggaaatgttcatcgtcatgcagggtcagcttcaggtctgtttgcatggtaatgatggagaggtcattaagcagtttattgtcggggacaatacaggaataagtgttgtggagttttctccgggagagatacacagtgtcgaatgtttgtctcggcgtgctcttatgatggaagtaaaagaggggccatttgacccttccttttctaagtcgtttatttaa

SEQ ID NO: 85160 - DNA, 1212 bp, Citrobacter koseri
atgaaacttgctttaatcatagatgattacttgcccaatagtactcgtgttggtgcaaaaatgtttcatgagttggctcaggaatttattcggcgtgggcatgatgttacggtaatcacccctgacgcatgcctacaagaagaggtgatttttgacatctttcagggagtcaaaatatggcgtttcaaaagcgggccgctcaaagacgtgagtaaaatacagcgtgccatcaatgaaacgcttttgtcctatcgggcttggaaagccattaaaaatcggataagcaaagagacttttgagggtttagtttattactcgccttccattttttgggggcatttagttaagaaaattaaagctcgctgccaatgcccggcatatcttattttgagggatatgttcccacaatgggtgattgacgctggcatgttgaacgcaggttctccgattacacgctattttcgtcactttgaaaaatcatcttatcgtcaggcaaatcgtatagggctaatgtctgaaaaaaatcttgatgtttttcgggagacaaataagggatacccttgtgaggttctgcgtaattgggcatcgctcacgccaacgatacttcccccggattatgtatcgttgcgtaagcgtcttggtcttgaagataaagtcattttcttttatggcgggaatataggtcatgcgcaggatatggcgaacttgatgcgccttgtgagaagcatggtggtacattcgcaagcccattttctgtttattggccagggcgacgaagttgaattaatcaatttgctagctgctgaatggacattgtcgaatttcacctatctcccctctgttaatcaagatgagtttagatttatcttgtcagaaatggatattggtttgttttctctttcagccagacattcttcccacaattttcctggtaagttgttaggctacatggttcaatcgctgcctatactaggtagcgtgaatgttggcaatgatctacttgaaatcgtcaatcaaaataatgcaggattaattcatatcaatggtgaggacgacaaacttcatcagtctgcgctgttaatgcttcatgatattgatgcgcgtcaccagctcggcatgggggcgaatacgttgttgaaagaacagttctccgttgagtctgcggcacagacgatagaaatgaggctagaggcgtgtaatgcgattaattga

SEQ ID NO: 85161 - DNA, 1131 bp, Citrobacter koseri
atgaaaaaattaaaatttatgtctgttgttgggacgcgtcctgaaattatccgtttgtcacgcgttttggctaaacttgatgagcattgcgaacatattcttgtccatactggtcaaaattatgattacgaattaaacgaagtgttttttaacgaccttggcgtccgaaagccagattatttcttaaacgctgccggtaaaaatgtggcgcaaacaattggtcagatcatcatcaaagttgatgaaatattagaaatcgaaaaacctgaagcaatgctgatactgggtgatacaaactcatgtatttcagccattccggccaagcgacgtaaagtgcctgtcttccacatggaggccggtaaccgttgtttcgatcagcgcgtacctgaggaaaccaaccgacgtattgttgatcatattgctgatatcaacatgacctatagtgatattgctcgcgaatatctgctggctgaaggcatcccagcggatcgtatcattaaaactggtagtcctatgtttgaggtgctctcatactatatgcctcaaattgataattcggatgtgttgtctcgcttgaatctacgccctggtgaattcttcgttgttagtgcccatcgtgaagagaatgtcgattctccgaaacaattagtcaagcttgcgaccattcttaacaccattgccgaaaaatataatctccctgtcatcgtatcaacacatccgcggacgcgtaatcgtatcaatgagcaagggattgaattccattcaaatattaacctgctgaagccgttaggtttccatgattataattatcttcagaaaaattcatgtgctgtgctgtcagatagcggtaccatcactgaagagtcatcaatcatgaatttcccagcgataaacattcgcgaagcacacgagcgtccggagggcttcgaagaagcatccgtgatgatggtgggactagagtgtgaacgcgtacttcaggcactggatattctggcaacgcaacctcgtggtgaaacccgtcttttacgacaggttagtgattacagcatgccgaatgtgtcggataaagttgtcaggatcgttcactcttatacagattacgtcaagagagtcgtctggaaagaatattga

SEQ ID NO: 85162 - DNA, 1104 bp, Citrobacter koseri
atgaaaatcctgattactggagctgatggctttatcggacgtaacttgtgcttacgccttcaggaagcagggtatactgaccttgttaagattgaccgtgattcaagtgcggccgagcttgagattggcctgcaagaagctgattttatttatcaccttgcgggtatcaatcgacctaaaaatattgaagagttcatagaaggcaacagcaatcttactcagcagattgttgattctctgttagcgaagcagaaaactatacccattatgatcagttcttcgatccaggcagaactggataatgcatatgggcagagtaaagcagcagctgaaaaacagattgaacgttatgcagcagaaagcggtgcagcatattttatctaccgatatccaaatgttttcggtaaatggtgcaaaccaaactataactcgttcgttgcaacattctgccataacattgccaacaatatcgagatcactatcaatgacccgtcagtgcgggtcaatctggtttatattgatgatgtatgtactgatgcgataaagctgctcgcaggagcgattgaaagtggatataagaccgtcgagcccgtttattcaagtaccgtagggaaggtggcggaattaatttatctcttcaaggagagtcgttctactcttgtcactgaagctgtgggaactggattcacccgagcgttgtattcgacgtggttaagttatttgcctgccgaaaagtttgcttatacggtgccgttctatggtgatgctcgcgggatcttttgtgaaatgttaaaaacgccttcagcagggcaattttcattctttactgcgcatccaggtatcactcgtggcgggcactatcatcatactaaaaatgagaaattcttggtcattcgtggacaagcttgcttcaagttcaagcatgtgattaccggtgagtattatgaactcaatgtttcttccaatgagttcaaaattgttgagacggtgcctggctggacccatgacgtcacaaatattgggaatgatgatttaatagtcatgctttgggcaaacgaaatttataaccgtgatgagcctgatactattgcgagacctctttaa

SEQ ID NO: 85163 - DNA, 756 bp, Citrobacter koseri
atggaagctgttaaaactaatgttctgggcacagaaaacgtattagaagctgcaattgcgaacgaagtgaaacgtgtcgtttgcttaagtacagacaaagcggtttatcctatcaatgccatgggtatctctaaggcaatgatggagaaagtgatggttgcaaaatcccgaaatgtaaatagcaataaaacggtgatttgtggtacacgttatggcaacgttatggcatctcgcggttcggtgattcctctgtttgttgatctgatcaaagcaggtaaagcactgactgttactgacccaaacatgactcgtttcatgatgactcttgaagatgctgtcgatctggtgctttatgcatttgaacacggtaataatggcgatattttcgtacaaaaagcgcctgcagctacgattgaaacgttagctattgctctgaaagagctcttaaatgttgcaaaccactcggtcaatgtcatcggtacccgccatggcgaaaagttatatgaagcgctgcttagccgtgaagagatgctcgcggccatcgatatgggggattactaccgcgtaccacctgatttgcgcgaccttaactacggaaaatatatagaacaaggtgatagccgcatctctgttgttgaagattataattctcataatacacagcgactggatgtagaagggatgaaagctctgcttcttaagttgtcgtttattcgcgcactgtgtgctggtgaaaattacgatttggactcctga

SEQ ID NO: 85164 - DNA, 1038 bp, Citrobacter koseri
atgttatatcataaacaaggtcagcttaataaggttttgcgtcgagaaggtttaacaaaactttctggaaaaaaagtcagtcttttagcaattaaatatattatatgcttgttgattgggaagatggctcataataataaatttgaaaatccggtcaatacacttggtattagttggtctccattgcattataacattctcaaaaattacctacctagtgaacatatatactcaataaattcacctttgtcgtataaagatatcagcattgttgcaaaatttgaatcattttggacggtgtttaaaaacacactcaaataccaaggtgaaaacagatttgctttttctttgatagtgacagtggagagtatgttttttaggcatcttctgaagctaaagaaggtgaaggaagtctgtatatcaggtcattatgatcggtatgtttgctcaattagcgaagtcgcaaaggagtgtcacaccgagctttcagtttatcagcatggggcggtcgcggctttgagtgggttacctcaatttcaggcctgtaatatttatttacagtacatgatttctaaaaacacattcgattcattttatatatgtcaaaattatattttgtgtgaagcacctgatataaaacgtattaagaatgggattggtttacctgaggataaattgtcaatcttatttatagggcaggataaatcacctgaatttaatatccaaattgttacagagttggttcgtgtactatcagggtttgaaattgattacagaatttaccaccttaagcatcctagagatcagtatttatataatattgatggtaattatgaagaaataacaactacaccgcgtaaccctgatttggttttttcaagatattcgagtctggcatatgcttatcacattttgaactacagtgtatattttattaacttagatgatgtagatgcggattttatgagtgattcaacagttaataaaatatcactctcgaaactaatagaaatggagtatttaaagaaaaatgtttaa

SEQ ID NO: 85165 - DNA, 723 bp, Citrobacter koseri
atggcgagaactaagggtgctgtagcaaaaggggttgataatacagctgtacgcattttcttacgagggtatggctctttgggggagttgccacgcattgtggaagattgtatctgcggtgcattggggcaggaagaagagacaagaaggttcaagggagagcgaattcttgcaatcttagaacaactggatcatatcgatacgccaacagtacatcggcagatgtgggattataatatttctcaaggtaaaaatactgagccatccaaacggaacacggaacgcatgacaagggttctaagatgtgcttctagggcactgtatcatcatttgaaattgtgtaacggattgtcgcgtgaagacgaggtggtccagatttccgctcccgatctcacggtagatgagatcgaacatgcccgtcgtttggctctggtaggtagaattgaagagttcacacaatttgtgaactcttgccggagcgtgatcaaaaactatgagccgccagtgttcaagtacacaggggaaaatgtggtcgctttatcttcttgtacggaggtatctttaaggactgcggttagtcgtccgtattatggttatgttaaaaaagccgtaaaagatgaacagccagaagacctatttacagtcaaaggcagcaatacgaacctccaaccactgattgaagaggttgggcgatcctacatggtagtggaaaatgtagcttag

SEQ ID NO: 85166 - DNA, 492 bp, Citrobacter koseri
atgactacaaaaaagaaatcacaggcccagatttcgccggaattgaaaacttatctcgacaacatcgcagcgaagtacaaaccagatccgggggctctaaagcgtcaaattgataatgcggaagctcgctacagccgaacacaacagttttctgacattccagcgcggctggtggttaaactccagagcctgatcctagacggctggcggttttgcccttcagctaattctttagtgctttccaatgctgcgatgatttctgttaagttgcagaaaccggaggccttgatcgaagaggagttgaagacgctacgctccagagtctccaacgcttaccacgatcaactttttaaagcgatggagcgtgagattgacgaactgatacatgaagcagcacaggacgcacaacagaaagcagttcagcaagcagctgccgaagaagctgcaatgcgtgaccagttgagggctgccctcggtatggtgaaagcatga

SEQ ID NO: 85167 - DNA, 258 bp, Citrobacter koseri
atgacacacaaaatttgtccagtaacaaaccgcccaatcaaattgaatcgcggtgggattaaacatatgcctcggtactgcgttgttgatggtaaccgatatgagagctttcaccagttcggaacaagcatattgaaaaaatcagtgagtgagattattgaactgcggaacgagcacttcattgaaaaacataaatccacagtctgcggctacaccgtcgaaatgttttacaaatgcgacgaaccgaaaaaaccttag

SEQ ID NO: 85168 - DNA, 627 bp, Citrobacter koseri
atgactacacaccaaatcacgacccacgcttacctcagggcatccactgacgatcaagacgctacacgcgcacttgaaaccataaatggctttgttgaggagcatcggctaacaagtgttgagtattatgtcgaaaacttttctggtgccaagctggagcgcccggaactctcccgtctgcttgccgcagccgaaaagggtgactttttgctggtggagtccatcgatcgcttaacccgactccccgctgtacaatatgaagccctcaaggctcgcattgaaaagcagggcttacgcgtcgtcgttgtggatctgcctacatcgcacgatgcattaaaatccgcagcaggtgaccgcatcattgagcttatcaacggcctcatgatggatattgcagcccattacgcacacgaggactacaccaaacgccgccaacgtcaggcacagggcattgctaaagcaaaggctgaaaataagtacaaaggcagaccagcggatacagacctgcgacgcaagattgagttgtatctcaccaaaggtgggaatacatatgcagagattgcgaaactgtgtgattgctccgttgggatggtcgccaaggtaaagaaaatcctcgaaaccgcctga

SEQ ID NO: 85169 - DNA, 684 bp, Citrobacter koseri
atgcctgaaaaattgctatttaaagctccttgcccaaaatgccaaggggactgtaacgcatttgtccatggagagacttctactgagtggagtgatgacagcgatcctgataactacatgtatggtggaacattccataagcttttagaatgctgtggttgcagtaccgtcttttacttcactgattcatcccatagcgaggaatgggattttgacaaaaatggacagatgtacctgatccacaacattaaaaccttccctgcacgagatcttagaccaaagtggtttgattcgctctttcgcaaagattatatcctatatcatattttatatgaggtttataatgctgtaggtaacgaatcatatattctcgctactatcggcctcagaacagcctttgatcgagcaattgaaattatcggtatcgatccagagttaaaaatgtaccaaaaggttgatgctgtcttgaaggaaggttttgttggcgaaacagaacgcgagcagctcagtatagtcaccgaggcaggcaatgctgcggcccatcgcggatggtcgccaaatagccacgaatttactcctttactacaagcaatcgagcgttttatagaaaagtcggttatgcgtgataagcgcattgaggaactcaaagaaataatcccaatgaaacaaaaaaaacgcagatga

SEQ ID NO: 85170 - DNA, 783 bp, Citrobacter koseri
atgaaaaaaattattgggttgtctctggcgttctgcgctttctcgtccgtagctggtgatgctgcctcaggcgaaatccagccatatcctgaatacctgtctgcctatgtcaaaacgcttgttacagccagttgcgaccaggtactttcagatgatggaaagaactccattgatagagtcatcaaatccatcagcaccagcgccaccaaaggaatgactaccgacacggaaagctactacgctgtttacaattcaatcgtctttggtgctgagatgggggataagctaaaaaatgctaagaaacagaaaatgattctggcaacgaaagacaaaattggaatagatagttgcggtggtgttggtgcttatgcattgatacagaaggattttagaaagatgacccttacggggctaatgcctttagccacgcaagctggtgtcgtaaaaccgaagacgacaacttctgatgagggcatttaccgtacaacagcaaaagctctggcagaactgtacagcgctaatgaagttgcagcggatgacaagattggtggtcgtaaggtggaaatgaccggaactgttcaggacataacaaaaaatttcgcgaatgatgtcgttcttaaacttgaaagtggtaatcgcttcatgcctgtcagcctgagtatggctgattcagagatggcgcaggcgtcgaagctgaagaaagggcagaagataaccgtgacttgcgaaaagatgcagcttttcatcggtgcaccgtctggcggcaactgcacctttaactga

SEQ ID NO: 85171 - DNA, 210 bp, Citrobacter koseri
atggtaagaagagtgttgttgatgggatttattcttgctgcgttcagtgccaatgccgggcgtataactatgagcaacccggagcagtcaaccacggcgaacgggcaaaccttgtgtgtctattccaacagtatttacacctttacctacgtcacgaagtcgaaacattgcccatatagcaaaagtttcaacacggtcgaaagtgagtaa

SEQ ID NO: 85172 - DNA, 1113 bp, Citrobacter koseri
atgagtaatcctgttgatgacggtaaacgtctttttaatccatcccggctcaagctggcacggatcagacgcaaactgaccctaaaagaactggcagaaaagatgggactttccagccgtatcgtaattgagtacgaaaaagcctattgcctatatgaacccacgccagagacggtccaggcgtacgctagggctctgaaatacccagagtccttttttttcggggatgacgttgaagcaatcgatccactgacggtttcattccgttctttgcgcacgacaaaagccgccgaccagcatgcggcaatcggggctggtgcgctgggagttatgctgagcgagtatttcagcacccgtttcactctgccgcagcctgaattgccgaatcttcgtggaagtgagcctgagatcgctgctcaggcggtgcgcgaagcttggggtattggcaagaagagcatcaccaacgttgttcatcttctggagaagcacggcgttaaggtgttctggctctcggaggaaacggcgagtatcgatgcattttcgttctggaaagatgatgtcccttacatcttcctgaacactcgtaaatcaggtgaacgcagtcgtttcgatgcggcacatgaacttgctcacctggtgctccaccgtcatggtgacgtcaaggggcaagatgcagagcgtgaagcggatgcttttgcgtcggcatttctgatgcccttggaaaatgtgatggctgttaagatgacgttgccgacgttcgacaaaatcgtgcaattgaaatcgctctggaaagtctcggcgatggctctgattgtcagaatgcgaaatctgaacatgcttacagaatggcagtacaacagtctgatgcgcgatgcgacggcaaaggggtatcgaaccggtgagccgggaggaatcgagcgtgaaagatcgctcattattgaaaaaatgatgaccgctctggctggtaacggcattaatctgactcaattgagtgatgagcttaacgtgcctcttgatgaactgagtagcctgctttacggtgtggcggcaattagtggtggtaattgcggaacatcaagctcactgtcaaaggcctctctccgtctggtgtga

SEQ ID NO: 85173 - DNA, 672 bp, Citrobacter koseri
atgaccatgccttactgtatcctgcataccgaagctgattcagatgttgtacttaatggactgggcttttcagaaaacgatattcatgctgctctgacatctgctttgtacgagcgccgcaaatccagcaagctacaccccgctgtcgatgcagggttccgtttctggagtgaaatggttgccgcgacacgccgtgtactaattggtaagggtaacggctggtcccctgaagtggtaaagcgaatggaaatggtcgctaactcagcgagaggggttaatctgattatcacctcgggtgacagacacaccgggcgtcctgatggattgccgaaaaccaaaaatgccaaaggtgaggcaacgcgctcgattgttcacaacaatcctggcacagttgatatgttccagacggatgcattgtattcaggcaaatctgaaatcactccgatagatagcactcgcacttatatcgtcctgtactattatgatgcggctaacaaagaggttcgctgcgaggtgtcttatccggtaggaatggtgaatcaggacggatttgcccgcgtaagcgcatggagtgagcgtattattttgagtcctctgccatttgaaggtgcggatattttccctgatgaggatttcaatgatgacatatcaattactgttgaaagcaaatga

SEQ ID NO: 85174 - DNA, 954 bp, Citrobacter koseri
atgccaactcgtagaatcgcttatgcatactacgatcctgattggattaaaggcgagcatacgcttctcgccctcaaaaggaatactgtcgagccgcttgcttattcactgtctatgaaaggatatattttttgtccttcttgctatgaacatataactcgagtgcctgccgatcctgacaagggcatgactacgaatgaagttccggcctattacaaacaccttaaagatgataatgcgcctttctgtagtttgagatgtggccccattcagtacaaaaaatacgcatctcaagaggatgcaaaaaaagccgttgaagatgaagagcttatagtcataagcggttttctcgagtctcgtcctgataacaatccaaggatcgattctgagggcagtgaggtacctgtcgattctcattttgagagaaaaaatggcaaagaggtttcattgcctatttcccgccatcatggtgagtctttcaaggttccgagccaagtaactagtgtccagtctttatgcgttaatttcgatcataattattaccgtgagatttaccttgttggcgcagatggtaaagcaaagcgctacagattttgtgactcactaaaagaaatcaatgacataactgagggttctcctgatccagcattcttttttggtacgttttggaaaattgagacgtttacaggccatagtaatgtctggttaaagatcaaccaaggaacatcatttagggatttcagagtacgtatcactaatgataccgctgaagggagaggattttttaatgataaaaatcgtgggaggataaccgttttttatagtcgagtagatgaggtcggcatgggttatatgacaccccagttagggtggggggaggtggcacttttgcctgcaaaatatgatgattttttaatcagtgattatgcgtcatcttgcaaggacaatcattaa

SEQ ID NO: 85175 - DNA, 342 bp, Citrobacter koseri
atgaaaactctacctgcaacaactccgcaggcggcgacgctatgtctgccgcctgcggcagtctggcaaatgctactgacacgcctgctggaacggcactatggcctgaccctaaacgacacgccgttcagtgatgaaactgttattaaggaacatattgatgccgggattactttggccgatgcagtcaacttcctggtagataagtacgaactggttcgtatcgatcgcagagggtttaactggcaggagcaatccccttatcttcgggcggtagatatcctgcatgcacgacaagcaactggcttgttgcgacggagccgtaataacgctgtatcgtga

SEQ ID NO: 85176 - DNA, 342 bp, Citrobacter koseri
atgaaatctactgactcagagaacgattcatttctccagtggggcatgaatcgtaatgtggcaccttgctttggcgctcgtctggtacaggagggaaaacgactgcactatctggctgaccgggcgaacattaccggtaaattcagtaaagctgaatatttgaagttggatgaagtattcccgcattttatcagtcagatggaattgatgttgaccactggtgaaatgaattctcgccatgcccactatgtcaccctgtaccacaacggtttcacctgcgaagccgatacccttggcagttgcggctatgtatacattgccgtttaccccactcaacgttaa

SEQ ID NO: 85177 - DNA, 441 bp, Citrobacter koseri
atgaatacacaacaccttgagttcgctgagcaggcagcaataactgcctcagtagtccccgatgaattacgtatcgacttctggccgcagcactttggctccatcccacaatggatagcccttgaatcctgtatctttggctggatggaccgtctgtgtgccgattaccacggtggtatctggaacttttcgacgctcagtaacggtggcgcttttatggctcctgagcccgatggtgaaaaatggacgttgttcaacccgatgaatggcaacggcgtggagatgagcggagaggctgccggtattgcggtctgcctgatggcttacagccaccacgcctgccgcaccgagtgtgacgcgatgactgaacactattatcgcttacgcgactacgcgctaaaccatccggaatgcagcgccattatgcatctaatcgactga

SEQ ID NO: 85178 - DNA, 876 bp, Citrobacter koseri
atgaaaaaatcagaaggtctgcaagccattgagaaaccgttagcgtcactcccacatgctatcggcaaacatattcttaaccatattcaaaaactcactcactacgaacctatcatcggcattatgggcaaaacaggggctggtaaaagtagtctgtgcaatgctctgtttcagggggaggtcacgcccgtcagtgatatcaacgcctgtactcgtaatgtacttcggttccgtctgaacagcggtgatcatagcctgatactggtagacttacctggtgtaggcgagagtgagcaacgggatagcgaatatgaatctctgtaccgaaatactctccttgagctggatttaatcctgtgggtcatcaaagccgatgatcgtgctttctccgtcgatgaacttttctaccagcgagtgatgaatggcttccaacagcgggtactgtttgtgctgaaccaagccgacaaaatcgaaccctgccatgaatgggatatccgcaccagtaccccctcagcacagcaatgggcaaatcttaaggaaaagcagtcagctgtgaccgcgatgtttaaaccacatcatccggtctgcgtagtgtctgctatgagtggctggggaattgaggatatggtggagacgatgatgcgtagcctgcctgatagcgccaccagcccgctggcaacccagttgcatggcaggctctgcacggagccagtaaaaaagcaggctatggacagcttcagccatgcggtgggaaaggtgtttgatggcgttgagtcatcccctctgcttctggcaccggttcgggcggtcattcgtaccgtgcggaaaaccgttatgtcagtcgcacgggtcgtctgggactggatcttcttctga

SEQ ID NO: 85179 - DNA, 588 bp, Citrobacter koseri
atgaacgttaatccatacttaaatatccctgaatctcaatggcaagaactcacttcatacttagttaataatcatcctttaactccgcacttggttagtttggtcatggactcatggagaggtttatttaatacatcctttggaatgcatgatctaaaaattggtgtggatattttccctaagcctcaaatcattggtgccattctgcatgagttaattccagctgctatcgaagctcaatttcctcagcaatggagaaaagaagaaaataaaaatgataaggatatagtttgtaagtatgacaactctctttcaatagagttgaaaacttcttcaaattccagccagatttttgggaatagaagttatgcacagccgcaaaatggagaaggaaaaattaaagatggattttatcttgcagttaatttccaacctttctcccaagcaaacgccaccccacaaattttaaaaattcgatttgggtggcttgcacatacggactggattgcgcagtcatcaagcaccggtcagcaggctcgtttagcctctcatacttaccagaataagtttatcactctctatggctaa

SEQ ID NO: 85180 - DNA, 876 bp, Citrobacter koseri
atgactagcaaaactatgaaaaaacaagtatttgaaaacattattgatacgttgggtcaaccattttatagggatgatcgaacagcgctttatcatggtgactgtattgatattatgtctcaaattccccataactcagtggatttgaccattacttcacccccttacaatatcggtaaggcgtatgaagaaatacaagatgttcataaatatgttgaatggtgcattacatggttgaaaaatatttatgatattactgcctataatggtgctcttgcattaaatgtgggttatctagaggtgccaaacaaaggatatgctgtaccaataccatatttattatgggataaaacaccattttatttacatcaagaaattgtatggaattatggggctggcgttgcttctcgcaaacgtctgtcaccaaggaacgaaaaagttctttggtttttgaaagatcctaagaactatacatttaatttagatccaatcagagacccagatgtaaagtatccaaaccaaaagaaaaatggaaagcttaagtgtaatcccttaggaaaaaatccgtctgatgtctggcagatcgccaaagttacgtctgggaaaaataggtcatctcaggaacgagcccctcatccagcacagtttcctctggagttaattaacagactgatgaatggtttttcgaacgaagaggaaattgttctcgatccgtttttaggatcaggaacaacagcagaaagttcaatgataaatggtcgctatgttattggcatagaaataaataaagaatatttactctatgccaaaaatagactacagcgtaaaacagaagatatttctctaacattggctcaacaaccattgttagtttag

SEQ ID NO: 85181 - DNA, 3315 bp, Citrobacter koseri
atgagcacagcacgtcgcaatgggaacagagttcggctatttatcggagagcgtatagaacacgcctcggatcgcgatgttttggtcaccgtttgcgatgccttagaaaagggctccgagtgggcctacatattcgccaatttcaacgttaacggtcgtcaggttgatgttgcggtcttttccgccacaactacgcttgttattgaagccaagggatatacacaacccatcaaaggctgtgtcaacggccgttggacccaggccggagcgtatagcagtcgacagctacgcaacgggtacactcaagccctaggtgccaagaatgcgttgcgtgacgcgatggccgcgctattcagcgatcttaccggctatcccaatgctttgctagccattacacctgtgattccgtcaggctcctcattgccaccgagtgatttcaaggtagtcactggcggactggatgcgatcgagattgctctcagttcaatgtcaggagccttactaaatgaagtgcaatgccaagcgctcgcagcccatttgaaccttgaacgcatatcggaaagagatgcagcaattcatgaaactgtgctcatatcggagcaaacagtgtcgagttataaatccgctttcttggagtatcatgggccaactggtgcacgactggtagaggaccaatacctccttgatgacaaactgatctcggcatctaagattcttgagatggctctgtcgtcgcaatctgcacttctgatcagaggaccgtcaggatgtgggaagtccttgctaagtgcgcgtatcgccacagaatgtatgcaggctggtgtgctgcctatccacatccaaggcaaagacttcgagggcaagcttcagaaaataattgatgccgagcttagactactcggtgcttccgtgcgcgatatattaagagcaagtcgtctccttttaaggcatattgtactgtttctcgacggctataacgaatgcccagagcatttgcgaattactttaacgcgaagccttcaagtattttcactacgctatggtgcaggccttgtgattacctcacaaggcatcatggccaggcaagagcttctgtcagtagaagaggctcttgtcagcccgccgcaatccgcgttgaagtcacagctcgcaaaacttagccaagaagatgaaaacttcataaactgccagtctctccttgaaatagcactctctgggcttgaagctgaactcattgggcaggcagcagcttcactgcccgctggggcaagtacgttcgttctattcgacacggttactcgcatgcgcctcggcaacttcgcaacggcgggaattcgcgttcttttcgggtttgcagaagaactgatctctcaaactgcatttagtgtgtccattcgagagtttgacagattttgcgatgcggcaagtgtgactgacgcggcacggtacgcggtccttgagtcgcggcttgtgtcacagcgtggtgacagacttagcttctctcatgaaatgtttttctatttcttcatggcggaatctgtaatccgggtagcgcgtaaagattctgagcgaatacaagctattctgcgatctccacggtttcatggctctaaggctcttattctcggcgcagtggaggacgattcgacactaaaggatattttggaaaaaaccgctgataagggcatcctggagtcttgcgtccgaggagagtgtggagaagccgcgagacgtaccgtcaaagcaaagcttgatgtgctactcgccgaaatggtcgcagagatttctgaactgcgcttcctgatcaatggcgagggatggcatagctgttcgattgaaactggctatcatcggccaaccctctcgaagtttgaagtttttcttcctgctattggctggcttctaatgcagggagtccatttagaacaaatcatgacggcatgtcgcgtcatggaaggaaaaattgccgaagccaatcgggagctttataaggaagcaagggccaaaaaggtaccacttctgcacgagacatttagccaagcctatgtgttcaatcgtaagatcgcgctttcgcagcttgtgtccttcgtccatagtggtggcctaagttttcgccatagtccagggagcgaatttggtgaagctctgaaaaaatcatggaaggaagcgagcacgcatagcgaattctacgtccttctcggaatcaccaagttcacgaagcacgctccgtgggcagcgccatgtgtgctgaatcttcttgagagactgcagagcttgccctaccaccttcagctagacacgatggacttttgtgtacacttgagaaatgtggatgatgccgtaaaagcaaagatgatcgcggcgcttgaggactccatggacaaattgggcgcgtttatgaattccatgatttttgatgcactgaagggtttaggtggattagaaaccgaagaagaaaactacagaacggtggtcttagaggagatcgaaagtgtgtgctccgagacgggaccgcaggccgatacggaagcatggaatatcttctctcgacaatttgatcatccgtatgacgacatttattgggaagagataaataatctcgccagcgctcagaagcggcagttccttttcaaggctctcaaaggggcaagcaccgagtatgtttcgtttgtcgatattctgattcgtcagctcgcagatttcggtgactcatcagtttctgaggctattgaaccttggcttaggctgccagccaaaaagtcggttatgccacaagatactgccgaggtgtttttcgcagcacacgaagcgatggggattttggacctcccacttcctgccactgtgacatcgcctatcgatgttgatgaaactatgcgggcctgcggggaattagcttactgggcttgccggttaagcatttgcgaactcgagtcttcacctcagactctcggcgcacggactacattactggattactcctcttcggcaagtgccggagcactgtggtcttcaacatctcgaatgttatctacggatggtacaagaattaacgttgcagcgcgctatccgaaaacagccctagctatctgccgcgatgcattgaccaaccatgggtcgcagaagacgtaccacgaacacgggttaatgaatgatctggcgcgcatagcttccttttccattcaagtgattgggcagtttggtgacgccgatgacctaggacgtttacgcagtctttgcgacgaagaggaactaggtcatgaagcacttaacgcgatccataagattgaagaccgtattcgttatcgaaaataa

SEQ ID NO: 85182 - DNA, 627 bp, Citrobacter koseri
atgaaaacgtataaaggctcacatggggatcacgttctagagtatcagatcaagattattagattgcttagtcgcttgactgaccgttaccccagactaacagcggtacgtgtggatatccattatcccaagatagtcgataacggtgacaatatctgctgcttccctaacttggaaccaggagtgatatcccgaatgcgtgagtcccttaaagctaagctggaagctgaccgtatccgtaagaagcgtgaaggtaagcgtatttaccgttgccctttatttattatgtgggctaaagagtattccgagtcgggtaaatgccactaccacatttgcctgctgttcaacaaagacgcttactaccatctcggggactacgaacgggaagacaacctgagaggaatgattacagaggcatggtatagtgccctggggttgcaacgggatgattgccctgatctggtgacattcccggataactgtcgctatatactggataacgaatcccctgaatttgaggagcagtaccaagcgttgctaactcggttggactacctaaccaaagtcgaatcgaaagtgtttggtgaaggggatcgtaacttcggttgcagccaaatcgatctgtaa

SEQ ID NO: 85183 - DNA, 570 bp, Citrobacter koseri
atgcgttcatttttttacaccatgtgcagtgctggacagcaagagagcattgcagatcatcacctgcttacagagatcagtcagaagtttaaaattctaccagaacatgttgtgatcgagcaggtagacgttaaggaggctgttttaaaacaacgtttgctcaggcaattgattaaccatgaaatgaaccggcaggacacgcttgtcattcctgatttaagctgtcttggcaggacagtggatgacttacagaagattttatttttttgccttcaaaaagaaatttttatctacagctaccatccagcctcaaggatagagccatctgctgaaagttgcgtgtcttttttgattgctcgtcaggatacgattgacatccacaatctgaaatccaccaaaagtcgatatcgacatgtaaaaaataaattaggaagaaaggagggaagtaaataccgaattgatataacaaaacttaaattaggcagatttacacaggctgaggctgcaatgaaactgggtattagtttatcaactgtgaaacggcactggaataacggagttatcggttaa

SEQ ID NO: 85184 - DNA, 756 bp, Citrobacter koseri
atgtccaagcgagcttccgtcacatttaaaaataaatcaacactagaactacttagcttctattctaggctaatagggaaacctcttggttcagtaatgtcagatgctctggatatggcagcccccatatttgagaaaagcattcggcatcaatgctcaataaatgagatccaaaatgatcttttgaaattctatataaaagaaagcataagtcgaggtaggggatcttctgaaataacattggaagaatattgtttattaatctggaatacgaatatcaaaagtcctttaaaagttcctgtgtcggatttctttcaactgaaagtcaatgatgaattcatggggaaagacgaaaagacagtaatatatgaaagacttgcttcgctaagagaatcttacaacatggaaaaagcaatctacatttacaatcaaaggaggtttgacgtaaaaaaacaaagcatctcaggtgattcaaatattcttcttatccacaaaaccacctttgaggagtattactttgatgctggatatgttcaactcttgcctgcatccaaattaattatattcggaataaacaaagttctgagacgaaggaatattgtaatgccttgcccggttatttgctggatagatatttaccatgtcaatgagatggtacttatgctgccagtgatccgcaaaacagatgcttccaactgtgttaatgcaccggatgacataattataaacccatactcacaggagagcagaaactaa

SEQ ID NO: 85185 - DNA, 237 bp, Citrobacter koseri
atgagtacaatatttattacacctaccccagaagaacgcctgaaaatcctgcgcaattacggtgagcaaggtgatcgcctggtacgtgaacgggagcgtcagctcatcacgtccatttctcgttctaccgcttggaagcttgaacgagcaggtcagttccctatacgcaaatctattgggacaaaatcttgtgcctggttactgagtgatctgctttgttggataaacttccgatga

SEQ ID NO: 85186 - DNA, 789 bp, Citrobacter koseri
atgatatcaaagcagcccgatttttatcctttgtctatggcatctgaaaagtgccggataatgcctgacaatatactgcatgactggcttgatcataaggttccactctacgttcggttggatgctataccatgccggattgtccgatatattggcggtgacagttttcttttgaagcattggaaacagaaaataaaaagtggagtagattattatcaacacgaagccatgcccgaatttaaaataagacagttttacccagagaaaaatgcagaaatagatgcccaacttttggagggggacctgggattatgtcgttatacctataatggtcacgcacatggttactggcgggtaaaggctacgccagtaacccgttttgctgaaggccattacgtgctggcggatatggatactgtcagagaaaataataatattgcaggtgcgattgcggtatatggtaaagacgactgggattatttgatatttccgagtgaagttttccgagacaaatcagaactgttttttgatgcaaatgagttgtcaccacaaagcggagaaagcatgtccggtgagaaaaaagaaaaacaaacccgcatttcaaggccagaaagaacagctctgtatgtcatgctgaaagagcattatcttgatagcaatggtgaggttaatttttcaaaaatggcggaaatgcttacggtgactgcagggaaacatgtagttagtgacccatttgatgaggacactatcgctaggtggataaaacgttttgaggatgataatcaatag

SEQ ID NO: 85187 - DNA, 750 bp, Citrobacter koseri
ttgaaaaaaatagcaattattccagcccgatctggttcaaaaggattagtcgataaaaacatattgattcttttagacaaaccattacttgcatacactattattgccgcattagagagtggtgtattcgagagggttatcgtttctactgattccgaaaaatataaatcaattgctgaatcgtttggtgcagaagtaatactgagagggacccagtattcaaacgatattgcttcaacttatatggtaattgagcatgctctcagcaaattgaatgaaagttatgactattttgctcttttgcaaccaacctctcctttcagaagtgccactcatataaaggaagcagtggataattttgagaaaagaaaagaatttgattttttagtttctatgactgaaagttcggtgcagtcctctttaattaaaccaattgatgatgatttaagtctcaaacactataatttagattatagtaattataggcgtcaaaattgtatcgaatataacccgaatggtgcaatttttttgggaaaagttgcaccatatttacagcaaaaacatttttttggagcgtcaactttagcatatattatggacaagcaatcatcagtagatattgatgatagactagattttgaattggccattacgatagccaataaagctaataaggaaaaagatttaaaggataatataatttctagaattaatgaaaaaaaaaaggaatatgttatcttcagttgctaa

SEQ ID NO: 85188 - DNA, 1041 bp, Citrobacter koseri
atgaaaaaagtatatattgttgcagaaattggttgtaaccataatggcgatttttctatcgcaaaaagaatggttgaagaggctaaaatagcaggcgttaatgctgtcaagttccagacatttaaggccgaacttctcatttctaaatacgcaccaaaagcagaatatcaaaaaaaggtcactgatgcggctgaatcgcaacttgaaatgacaaaaaaactagaactgccatatgatgagtatataaaacttgaaaaatatgctcgttcattaggattagatgtattttctactccattcgacatggattcgatcgattttctgtactctcgaaatcaaaaaatgtggaaaattccttcgggtgaattattaaatttgccatatttggaaaaaattgcaaaactgccaattgatggcaagaaaattattatttcaacaggtatggctactgttgaagagataaaaatgtgtctgtcggtattcgataataatgaaatcgcgaaatcggatatcacaattttgcattgcaatacggaatacccgacgccatttagtgatgttaatttggcagtaattaatagttttaaaggcattttccctggttataacatcggtttttcagatcattcaccgggattttatgcggggatcgcatctgtttcttttgggatctcattcattgagaaacatttcactcttgataagaatcttcctggaccagatcacaaagcctcagttacacctgatgaattaatgatgctgtgtgaaggtataagatgcgttgagcttgctattggaagctcggagaaaaaagtaacaaattctgaaaagaaaaataaaattgtcgctagaaaatccatcgtagcaaaaacaaaaatcacaaaaggtgatatttttactaccgataacattacaactaaaagacctggtaatggcataagtccaatgttttggtatgaaatacttggtaaggtttcggaagataattttgaagaagatgagttagtaacccatacagccttccaatcgcaagagatttaa

SEQ ID NO: 85189 - DNA, 636 bp, Citrobacter koseri
atgaagtcaacttttatgaaaaaaatcgttatttttggggctggtgggttttcaaaatcaattattgatagtatagatcatgattcatatgagatcgtggggttcattgataccttcaagagaggtaatcatcaaggttatcctattctggcaagcaccctggaagaacttaataataaaaatgcctactactattttataggcataggtgagccatcagtacgttatcaattttataaattattgaaggaatataatcttaagcttattaatataattgataagtctgcgcttgtttcaaaaaatactattctaggcacaggaatatatatcggaaaaatgagtataattaaccctgataccaaaatttcagattgtgccgtaataaatacgcgttcacttgttgagcatggaaatagtattgggtgctgtacaaatatttctacaaatgttgttttgaacggcgacgtgaccgttggtgagcttacatttgttggaagtagtagtgtcatcaatgggcagcttgctattggcaaaaatagtattgttggctctggttctgtagtcatcagaaatgtgccggataatgttgttgttgttggagctcctgcaagggtaattaaagagcgtaaataa

SEQ ID NO: 85190 - DNA, 675 bp, Citrobacter koseri
atgaaggcatccatccgcaggctgctgcccctgttgctgatgacctcatcagtgtatgccggtgaggtgccggatgtgaagacgacggtggaggccatgaatgtttgccgacaggagcatgccgcactggagcgcctggactgctacgaccgcattctgtctctggagcctgattctggttttgccggggcgctggtgaaggcgcgttatgacggtgaggcgcgcaggtgggctgttgaacaggagaagcagcgccaggataactccaccgaactgctgcttatccgcacagagggcgttcgtccgatagtgattatcaccgcacccgctatcggcagcctaccgccgcgtccggtgctgatgttcagctgtgtggacaacatcacccggatgcaggtggcgctcaccgcttcccggcaggaaagcgatatcccggtcacgctgaatacggagaacggtcagttccgctcgcgttggtttgtgcgtgaaaacggctacctgctggaagccagccgaggcctggcggggattgatgagattaaacagctttttagcgcgaaaacgttaaccctggtggcagggagcggcaacgctggaaaattgacctttaacattgacggactggcgcagaccatcgcgccgctgcgtgaagcctgccactgggtagggaaataa

SEQ ID NO: 85191 - DNA, 663 bp, Citrobacter koseri
atgacgcattgcgagggtgagtcattcgtatggaatacaccagtaaatattactgcaatgctaaaagaaaatgatgagagttttgtatggacatccccttgtcggggagttttttttccttctggagagatgggggttgtgacttcatcgattaaagcaggtagtaatgatgtcaccactttcttatgcagatttaatggctatgatcttacttctaaaaaagtgatgttagctcatcctgatacgggtggggaagtaggtatgcatttgctaccaaatggtaggttgttagccttacccagaggcttaaaaacctctgataataagggggttcagttattattttgcagcgatgacgcatacgtttcttggaccaagttatcatctgttgttacatcagatgtcaaaggtgatttggtttgttttaatgacggattatctggaagtcctttatgggctttaacagttgcaaatggtgcaaatgacaatggccttgggcgctttaaatatagagtgtggtttagcagggatattattacatgggcgaaatcaccagtatctacaatacatgatgttatagttagctacatttccacatattcagcaggcgatggagatggatttatatcagcaacggaagttagtcagtatcaggggatatga

SEQ ID NO: 85192 - DNA, 1041 bp, Citrobacter koseri
atgcaagaagaaaaattaagatatgactggatagattacctaagatttattgccatgttctatatttattgggggcactttggtcatgctgctggaaaactctatcctttcgtttttacatttcatgtgcctttattcttttttatatctggactacttgtcaaacgagcaaaatctagcaaggatttaaccagcataattattaagtcatttaaaagaataatgattccttatgctgtattttcaataattgggattgtgtttcttacaataaaagatcagcgttcgccaactaatatatcgcaaatgattgaaatgagtatttatggagttagaaataacactcctttagcaaccttatggttttttccttgcttatttatggttgtaacttactacaacattttgtataggttaataaatagcaaatttattttatttatattcggtttgattgtctatactctgacccccgtatggtttgggaaggcaattccaacattattctggaatgttgatagtgcatggtatttcttcgtattttttgctgcgggttcgttcctttcagcccctctaaacgtggcaatgaaaagttttaaggatgtaaaagcaaaaattactgtgacattactaacaacagtatcgctagtttatttttatttttgctatcagtacgggacgttcagtttttataaagaaataaagagtcttgagcttaaatattttatttttttctttgctgctctctttctttttgttcctagcatattgcttgctaaatatatcgagcacaaagcaaaatcatttgacatgaatccattactggttttaggtaggaatacccttgtattgtgtggtactgaacaaatcgtaaaatatacgatcgtggccgtgtttggtatgcttggattgagtcttgcgccgcataatccacttgaagctatattgcttacttctttatgctttttcgtatcatacttcacaaccataagatggtatcattttttctcaaccaaaacacttcataaacaaggtcgatga

SEQ ID NO: 85193 - DNA, 759 bp, Citrobacter koseri
gtgtcgcaggcgtgggctggtgccgggtttggcaacctcgccatcccacgcgtgggccaggaagtgatagtcgacttccttaacggtgacccggaccagccgattattatgggccgcacctaccatcaggacaaccgttcacccggcagcctgccgggaacaaaaacgcagatgaccatccgctcgaaaacctataaaggcggtggatttaatgagctgcggtttgaggatgcgacagaccaggagcaggtttatatccatgcgcagaagaacatggatacggaggtgctgaacaaccgtaccaccgacgtgaaggtggaccacaccgaaaccatcggtaacaaccagaaaatcaccgtgggtctgggacaaacggtcaccgtgggtaaggagaatgccggagggcatgaccagaccgtggaggtgactcatgaccagagtatgagcattgggaatgaccagaagcttaaggtcacgaacaatcgcaccaagacggtgggtaacgatcaggacagcaaggtaacaggaaatgatactgaagcagtagaaaaatcccagacgattaccatcggtgaggcgctttcggtcacagtcactgattccattgaatttgtatgcgggaaaagtacattgcgtatggataaagacggctacatcactatcaatggacatgagctatctcttggaacaacaggcgaacagtattacaaagcgaatggtgacataaatctacaggcgaaaaccattctggagaactaa

SEQ ID NO: 85194 - DNA, 519 bp, Citrobacter koseri
atgcattctgacacttcagtttcaccgtctgcagacactgacgaaaagtacaccgaattattggatgagatcctgaagcaagatggctcccagccttctgtcaatcctcacgatattatccttgggcgaattagaaaaattgatgactcggaaataattgttgaattcgatggcatcgaatccaaaaccacttctatatgccccctaggaaaagaagatgtcgataagacctgtgcaatacagtttattcagggagatttgaacagaccgctggtaatgggacttatccattcaacgatgtctgttaaatcgaccaaaaaaacagatactggcgatatgctggtgacaaggcagggaaaacaggtggtaattcaggctgatgacgaactggtgctccagtgtggtgagtcctgtattgttatgactgcagaagggactgtttacattcgggcactttatatcgacagccacgcccaggccacgcagcggttgcgtggagggtcagttcaggttaactag

SEQ ID NO: 85195 - DNA, 1134 bp, Citrobacter koseri
atggaaattatcaatggtgcccggcataccatcgcggatattaccaccgtcacggacaagactggtcgggaacatattgtcatcataatcaaagcaacatattgtattcctgccaacggtaaagcccctcgccccatgctcccacctcagccactgagtaccgaagacaagttcgcaggtgagtcgggattatctgcaccattatacgaagtggactttatacgacataaagaaaaatgtgatgtattgtttaatgcccaggctcactcccctgaggggaaccccgttacagagctgcatgtcacagccaaagtaggcgagatgcaaaaaacattacgggtagttggacatcggcagtgggaaagaaaatcgcccaatatagtcagcaaaccagaacctttcacggtaatacctctgacctacgataatgcttttggtggtattcagcactccaggaatggaaatgacgtcctgccagatatttttgagaaaaacccagttggtaaaggttatctcaccaaaaaaggagaagatacctcgcggatacttcctaaccttgaaattatcgacaaaccactggccttacctattgataattatgaaccaatagcgttatccgcagtagcccgtaactggataccacgtagactttatgccggaacctacgatcagcactggaaagacgagtgctttcctttgctgccggatgactttgatgagcgttattaccagtgcgctcccgaagatcagcagattgattaccctgtcggcggcgaagacgttgtgttacgcaacatgatgacaggacgcgaggaagtaaattttaaactccccagactggataatctaccagtcaaagtactgacatctgattatcaggtttataccctaccagttgctgtagatactctttactttgagcctgatgaaacgcgtttctccgttgtctggcgcgccagtttgccagtaaaacgccggggacaagggattcaaacagtggcagttggacatgtttgcagtagttggtgggaagccagagtggcgggctcttttggctgtacaagctgttcagggcaaacaagtgaaaacacagtagataaatcgcgctcttccgacagtggagatatgaaatga

SEQ ID NO: 85196 - DNA, 1032 bp, Citrobacter koseri
atgacagccttacatattactgcaacgggaatgtgctgtgcggtgggatattcaacagcctccgccgtaccagctattcgggctggtatggatcacttcagagagacgcagtttgttgaccagcagggggaacctctgatcggagcgcaactttatggcattgatcactggggaacggcacggatgagatggatgtttcagaaagtgcttgctgaatgcctgcctgtcggtaacaacgcagattttcatgatacggctcttgttttaattattcctgaaccggaaaggcccgggatgggggaaggctggtcagataagatttatcgggactgtacgacacagtatacttttcatcctagttcctgtgtactaccgctagggaaaacaggtttgatatctgcacttgcattggcctccactctccttgcagaaagtaaagttcagcaggttttgattgccggagttgacagctattttagttccgcagcaattacacactatctggaacagcaacggctattatcaagagataacagcgatggttttattcccggagaggctgccagtgccgttatggttaccagccccaggaacaggaataaaaaagggctgctgattacgggcatcggtcaatgtagtgaaagcgcacatattttacaggatgaactccctaaccggggaactggtttgaataaggcaattcgccaggcggtggtcgatagtggtagccctctgacggagacgttattccacataagtgcagtcagccacgagtcattctatttccgggaaacggagctggctgttttacgctcactggaacataagatcccagactatccacatctgatgttgacttccagtactggggaagtgggcgcggcttctggtccattgatactggcatatctggcatccgttatgtcccgtaaggacgggccggggaaaaaagggctgattcatttaagtggagattctggtcaacgcgccgcagcgattgtgaactggcaggaatcaatatctgacatttaa

SEQ ID NO: 85197 - DNA, 1581 bp, Citrobacter koseri
atggatacaaacgtttttattaacagacgcgaagcctgttccagagcaacagacggtaaatcagcgggtgcttttcctgatccctgctggtctcccccaccaccgccaacagggccaatagtcgttccctattccaacacagcatatgcgcgtgatttacagaatggaaccgctactatttttatttgtaaaacgatggtagcgcagaaagatcgttctttcttttccaccagccagggggatgagcctgcaactccaggatttcagaaaggggtatcctccggcgtgattaagggaaaagcctatttcaagtcgtggtcaccgaatgtgaaattcgaaggtctggaggttccacgtcatgatgatttaatgactcataatcatggctccacggccaatacaccgccacataaatatgttgataaagaggtattagtagacgaatgtaagaaaaatgtggctaaggttgagtcagcctgcaaaaaagatcccaatcaaaaacccatgcttgaaagattattgggggaaaagaaatataaaaaattcgagcctttgcttaagaaagttgggatggagtcagccgactggatggagcattgtgatggtttatgggtgaaacccggctcatttgaactgtcgaaaattaaggaagacttatcagaattactcggcgaagtaaaaaacattctgaatgccgagattggagatatagcaaagcaggttggggatgagattatcgaccaggctatagaagcaggggaagatattgctataagaaaagcacgtaatgccggaattcgtcatgtcgcagctttgggcggagctgctgctggtggtgttggggctgtagtgacagagggggtggcggctgtctggaccgttggcgactcagcctggggggtaattgaaggtggaatggaagcttatgcagcctgggatgttataaacgccgcaaaggatgaacttggacgtctgccagagaaagtcgagcagatgttaaaagatgccattgataaccctgaaaaagcaataaccgacatgatgtcgctgctcagtcggctcaatccctgtaccagagctaagaaatgtatctttgttccatataataaggctgaagatttacgagggcatggatgctgcccagggcaaaccgggcatcatgttttacccggcgctatgttctatgacaataggaattgtccaaaatatagaaatgatgaaagtaaagctcacaaaaatgcaccaacaatttgtgttgaaggcacaacaaatgcccctgaatggggtagccatggtcaattgcatggtaaaatgaaaaacaaaataaacaaatacaagaaaccgggtgtttttaaattcggcgatcgtaataagattgattatgatgatgcccgggatatggcgattgattccattatggaaacttttccggaatcgctatgcaagcgtaaatgtcttgagaagcaattagatgaatattataacaacatgtgtaagcctaatatattaaatgcaaatagtggcatgggaggagcacaatctcgcccatactcttattctgataagaataaatcaaaataa

SEQ ID NO: 85198 - DNA, 1011 bp, Citrobacter koseri
atgattattactcaagacgaatacaatgaaatatttaaagggtattatattaatggtgttgcagtaagagacactggttatatttatataaccatacgagaaaaaagagacgatatagaccctgcattggaagaacatctggcaaggaaaaaattcgtttcctttttttttgacgaaccactaggggagcaatggggatacagcggttatgaaggaatggacaagatattttccactacaaccagtattccttttagtcagtatgtgggcgttacaatggaaaatgaagtttttgctataggtagcggttttgaagggcttgaagatccgatcccatatgaatttgctattagcaatacacggactattggtggacgtgtctatgctgtaggatgtgcacgcagtgttgttcgcaggatagacagaaataattgggagatgttaaataagggtatccatctacctgaagaaaatgaaattaaaacaatccgtgaacaaatgctattcctagacactgctggattcagttgcgtggatggtttttctgaaatagatatttacgctgctggtggcaaaggtgatatttggcattttaatggtgaagagtggagacagattaattttccaagcaatatggtcattgaatctatttgctgtggcaaggatggctatgtatatattggtgcacaaagtggtaccatatttaaaggtcgaaaagagcaatggaagatgatccatcggggagagttaaccttaccgttcagacaaatggtatggtatgaagatcgcgtctgggcgacatctgattatggtgtgtggcaaattatcggagataatgttgttcaaccagatttacccggtgaagtaaaaatatgcgctggttatatcagttgtacagaaaaaacactggttctggccgggtattatggtgcagcacgtctggaaaacggtcactgggatatattaattaattgtgtgcgggcagaaaaaggtgatttcagttctgaatag

SEQ ID NO: 85199 - DNA, 1257 bp, Citrobacter koseri
atggatattgacactataaaaccactgatacaacaacatgcaagagatgccgtattttactggcagcaaatcaatacagggtgtttttctccattaattaccacagaaaagcaccatcattttcatcgccaattaaatgcgcaccttgatggtttacgggcagcaggtaatgatggctgggacgccgcattgaagaactatgcgagatggaaaacgcaaggtgaagcttttatttgctggttgctggctctggaaaaaaataaccaaccgcatattgatgcattaaaaaagatagccgttgggaatgtagaacaatcagtacgaggcatgactgaagctgtagcttggttatccaataatcaagccagattaatacttacccactggcgtcaggaagctatactggatgaacaaatgcttgaagcttggttacgtgccacaggaatagctggaattgttccagaagaagacctgagtccattactgagacacgcaaatccacggatccgcgcagcctgttgtgaatctgtaggtaaattacgtctacatacctaccagaagtcaatcattgatatgttgtcagagagcatcctgcatatcagggaagaagcgattctggcacttgcctggctgtcccctgaaattgatattgttgatgaactacatgctctgctggtttatcatcttcaacatgccccatcacgaggcctggcggcacttattattaaacggaaactggagtatattgcatgtataacagggttatgccttcaccagagggatccccgtttagaggttattctggcagcattacctgagcgcttacgtttaatcacacttgcttatcatggcgatccaatacagcttccaattctttataaagctatggaaaatgaagatacagttcgtcttgctttctgggcaacttgctttatttcagggctggatatgaccataccagaaaattatgattcaacatcaagattaacgaaaatagatgaacaacaattaagcttcagatctgatgataaagatattggtttaatatggccagatgtacctaaagttgtttcaaattgtcattcactaaaattacctatgggtcctcttattcttggtaaaaaaatatcaactacctattgccatgaattactgaatacagaaaaccaagccatacgttttgcagcaacctggcattttgctaaaaatgatataacaactcgccgtatagatactcggatactaaggagtgattaa

SEQ ID NO: 85200 - DNA, 399 bp, Citrobacter koseri
gtgagcatggaaaaacattacttgacccccgaaaaagatgccgacaaaataagtaagatgctcaatgaaggacagcgtttggttgcttgcttttgtgcggactggtgctcatcctgtcaggcgtggcgggataacttctctcgactggctcaaaaatctcctgaagattgtttcgtctggctggatattgataagcaccctgacatgattgcagatatcgatcttgatatattacctgtcatgttagttcaaaatgaagaaaaggtttattttcttggtacaataaaacctgaattatccatagtggaaaaaataatacagagtaagagtttaataatgaatgtacagaaacctggaatcagagattttttactggaagatggagtacacattgattga

SEQ ID NO: 85201 - DNA, 291 bp, Citrobacter koseri
atgcggattgtgtgcgtgccgtcactgcggcctggcgctgtcgttaacggccagcgggttaagcgtatcgatctgactgatgaccagatgtcagtcaaatgggcagtaacagacagcaaaggccgcgaggcgcaaaaatcgcaattccgccgccaggctgaaaaggagtttccggaactggccgcaggtttacacctgccgaaaattggccgcgttgaggctatcagcgacacgaccggccatagcgacatatcagctccattccgtccgcgctttgccgtcaacgtttag

SEQ ID NO: 85202 - DNA, 348 bp, Citrobacter koseri
atgaagacgggaaacggtgcttttaaaaacctttttgtctacgcagcaggtgggaaaaaagacggcctgcaaattatgccattcagccaggtggcggcgaaggatgagtttaccggcatcaaagacgccacccgcgacgacctgttagccgcgcaccgcgtgccgcctgttctgatgggtgtaatgccgaataactccggtggcttcggcgacgtagagaaagcggcgaaggtgttttccatcaacgaactggccccgatacaagaaagcctgaaagagttaaacgactggcttgggatcgacgtggttcgcttcaacccttacgcactattgcaggcagcaatctga

SEQ ID NO: 85203 - DNA, 639 bp, Citrobacter koseri
gtgattgttctttctgacaatgatgtcattttgaagctggcccagtgcaatctgttatcacaactgccagtggtttttaatcaaccccccgaacagatcttcattaaccctgctgctcgttttcagcttctgccgaaaaatcctgataaagcaatcaggaagtgtggtagccaggttgtttacgagcaggtgggagccttcattgaatctgtacaggatatcccggaagttcaagattcccagcttattgagcttttggggagtgtgcccggaattgatgtaggcgaacagctattgcttgcctcgtgcatagagaaccctgaagccattttcatgactggtgatcgccgctgtttgactgcaattgttgcaaaccaaccggccctttccgtgattcatcagcgtttactggatgcagttgttacatttgaatcgtcgcttttgttatgtgtccacggtacagatcaggctcaagtttatgaaaatttggtgagcaatcctaaacctgacggtatgttgaaattggctctttcaaacgctggcgctgcaatgtgcgaatgtattttttcccatactcgtgagttttacgattaccttgccttcaaagatcgacttcctgatcgggagtggggaaggtaa

SEQ ID NO: 85204 - DNA, 999 bp, Citrobacter koseri
atgacgaaccataatcagatgagtcagatatattctaaattcggccgggccgggtttaatctctcttacatccgcaggttgttgcctgactggtgggatgagaagcttgctgacaccccatcagggcgccagtatgcgtgcctgcaccttgcgcgtatgtttagcattctcccggatagcctgaaagatggtagcgaaggagtatgctttaattttggtggaaaccataaatataaacatcgccaaaatgtagccgagaacgatttagatatcgctactgctgttgcctatactgcggccggtattgtcgcgtctaatttcaaagtcccttacgatgccagtgcagtgctggatcctttggcgataagaacccagattcttactaaggaatcatgggtgtcgctagatagcctagtaacatactgtcattcgattggcattcctgttgtttatctaaaatgcttccctcaagctgccaaaaaaatggccgggctggcgctaatgagtcacgggcgcccggtgattgttcttactcagcctcagaaatacggctatatgctgtttgatctcgcgcatgagttaggccatatcgccagagggcatctgaacgcagaaaacgggcagtgccatattgatgcaaaaattgagaatgcttcgacggacaacgtagagaaagaagccaacgaattcgccttccaggtcatttcggggcagaagtctttacgtatcgttcctaccgctggcaggttgaacgggcctggcttggctcgcgcggctcaaaagtttggaagtgataatcacattgacccgactcacatcgctttaaattatggtttcgcgcagaactgctggggcgctgctgttaacgctgttaaatcactctgcgctggtgaagactcagatcaggattttgtgagggccatgatgaaaagcgggatggatttagagaatatccacgaagatgatcttaaggttttagaaaatctaatcggggaataa

SEQ ID NO: 85205 - DNA, 732 bp, Citrobacter koseri
atggccttaaaggattctctcaagtccacctgtttgcaggttttggaggctggccccgtgctttgcgcgtcgcaggatggccggacgaccgcccagtatggacagcaagttgcccatgccaacctttcagccaggcaggcgaaggaaaacaatttgatgatgagcggcacctatggcccgccgttcattggcttgcaggccagcaacgccctgtcgttatatttggcgaacagtcttcaagcaaagatgcagaagtctggatcgaccttgtacaaactgacatggaaagtttgggctatgccttcggggcgtcggcgtttccgtctgcgggcgtcggtgcgccgcacatccgggagcgtacttactggctggccgactccacggcaagaaaagcgggaactggcgcagcgattaagtgacgatgtgcgcaccaagcgaaaaacgcggccaccggaacgggaagagggagcagggctatcagtcaaagagcagcagatcagtgaactgctggcgctacgtgggattgatgctagcgctggaatggtcagatcgatgatggccggtgcgtcagtggcgtgcggcgatcttgttatgaccgtgcaggacgggcggctggtatcgcgcaaccgcgcagcgtccgggctggataagctgccgtcgcaggtgatggcggcgaagcaaaaaacaagtgatcttgtgaacaggatgaaagcagcattttcgcggaactaa

SEQ ID NO: 85206 - DNA, 321 bp, Citrobacter koseri
atggcaaaaatctatatcgctggcccgatgagcggtttgcctggattcaatcggcaggcttttaaccgttcagccgggcacgtagtgcgacgcggaaacattgcccttaatccggcgattttgccggatggattagagcaggcggaatacatggatatttgcttcgccatgttgcgttgtgctgacgggatcttcttgctggatggctggctgcagtctgccgggactaaagcagagcacgcgcttgctgaaaagctgggtttagaaattcagtaccaagtaatcgatcggtgtagccgaaaggcggaggggcagcagtga

SEQ ID NO: 85207 - DNA, 198 bp, Citrobacter koseri
atgagcggcacgatcgatttatcgcagctaccaccgcccgtggtggttgaaccgctggacttcgaaacgcttttcgcgcagcgcaaggccgcatttattgcgataaacagaaggcaaaaacgaaaacttgggacatatctagcgataccaaatcggtattttatcgtggcaatgtcatcgagttcgtcaaagcactga

SEQ ID NO: 85208 - DNA, 207 bp, Citrobacter koseri
atgaatacaacaaatcaaagcttaattcgtttaccagaagtcttgaaacgaactggtttcggcaaggcttggatctatcgtctgatcagtgaaggtcgttttccggcacctgtaaagattggtgtccgtgcggtggcctttgtggatagtgagattgatgagtggattgaaggagtcattaacaactcaagatctcatgcagcataa

SEQ ID NO: 85209 - DNA, 309 bp, Citrobacter koseri
atgaatataaacgattttgagcagtacgaaggttattgggaaattatagatgagaacctttttgacgaagttttttatatggatcttattgaaaaactggaaccgacagaaaaggttattaaggccattgagttgatgagctatatattcacagacgacagaatggaaattctggaagaaattcggatgatggatatgcttgctcaggccgatatgtttgatttgtggtttgatataataaagtcgcgggattatcttgaatcagtggcgaaaacagtgatttattatagtattggtatgcctgtgtga

SEQ ID NO: 85210 - DNA, 564 bp, Citrobacter koseri
atgtcaaataccaatatcattttaagcagacagcaaaaatccgttatagcaaaagcccttgacgtcagtcctgaagaattagaagaaataagtatcaaaaccagcatacacaaaaaaacgtcatttcgtgacgacttctcactggtattcaaaggtaacattgccactctcgcgagaatgaaactgacacccacgtcatttaaaatcgttatctatctgttttcgattctggattacggtaacattcttattaatttttcacagtccaaaattgcaaaagaactcggactatgtaaatccaatgtttcacgtgcattcagagaattatttgagaagaaaatactgcttcgtgacaccgaacatgaccatgtttacctgaactcaaatctctgtgtaaaaggcattccgcgccgcttcaatgaagagcagatggataagtttaaaaaatccaggatagatactgaggattttgacgatgccttcaatctttaccattcgggcaggaaagcaaagccaaacagaaaacccggaaacctgtttcctgcggacgacattccattttaa

SEQ ID NO: 85211 - DNA, 423 bp, Citrobacter koseri
atgaaagatgatcatactcaggatcaggaagaaaaatttctatgggtgattgataaatacattaccagacactgtcatagcccaaagggcaatgacttttaccgaaaattctatgtgttgtttgtcggttaccatctgaagtatttttatgcgcaggcgaagtacagcaattcctgttttcacgtcgataatattatgcagatgttctctggcgttgcgtcctgtctcaacggcaatctgctcagccagttcacgaacggtaacacactgctgcagtcgctcaactcgctggtaaactacatttcacaggatgttgccggggcggaacgcatctatgctgatttactggcacagtatgagaaaaagcgtatcgcgggttcaatgacatacactccgcgccctggtgccaggaaaaggttatga

SEQ ID NO: 85212 - DNA, 321 bp, Citrobacter koseri
atgaaaacatatgcatttaccacactcattgcgtccattcttttgttgagcggctgtaccggtgaaccgtctgaacaggatatttacactgcaatgaataaggtcgtggagcagacgaatgccatcgttaaatccatagttggtaaagatgtcccgaaagacacactgcgggaattaaaatctgtcaaaaagcatgactgcgtgaaagtatcggataaaagctataaatgtaatgtgacggctgttgtcaataacgacaaggccaccgccgctgtcacactggtcaaaacggatgatggttggcaggtcgttgacaagtaa

SEQ ID NO: 85213 - DNA, 1236 bp, Citrobacter koseri
atgaaaggaatgcagaaaataaagaggggtaaacagtttacaggtgttgttctctacagcctgaaatcaggctctcaccacaaaatcatgccttatatcattggcggtaacatgaccggcagcaacgccgctgagctaatcagtgagtttgatagcgctaaaaaaatgcgcccagatatcgccaaacctgtctggcacaattcgcttcgccttccagaaggagaaacgctgacggtcaggcaatggacagcatttgcggatgagtatatggcccggatgggttttactgacacacatttgcgttgctatatcctccacgacgatttttgtggccagcacatccacataatagctaatcgcattaacatggccggtggaaagctgtatctggggaaaaatgaaaacctcatcagtacccgcattatcagcgagttggagatagtgcacggactaacccaaaccacgcaagcaaacggcgttcgtcgtcagagtaaaaggaagccttcccgcaatgaactgaagatggaggaacggacagtagctccctgccctaagtcacagttgcagactctgatcgataatacattaacctgccgccccgatttactcacctttgtccgtttactggaacaggaaggcgtagcctgcaaacctaatattgcgtcgaccggaaaaatgaacggtttttcatttcagtaccagggcattgcatttaaagcctctcagctcggaaaaaaatatggctggtctaccctgcaaacattgatcgatgttacaccagagcacctggccttactgaaaaaagaacaacagcaggctgtgccagtaccagtgccagtgccagtgccagtgctagtgctagtgctagtgccagtgccatcatgcgagtctgaagaacaggctgcaaaccgggaaacgattctggagaaaatccttcagcttgaagaaaaaattcgtctggaaagacaacaagaaacagtgagtgtcattcaactcagaagcaaactgcacaatacagctcgtcagataccccgccagcgtcgtctaaaggcgtggcttttattactcagtcatattgttgtgctactcaggcgtaggggactgtcactgctacataccactacacacccctttcgccagattctgcacctgcacctgttggcaccagttcttttcacagcaggttattctcttcaggaacaatcagttagcaataatcatcaccactctccataa

SEQ ID NO: 85214 - DNA, 225 bp, Citrobacter koseri
atggcatccctcaacaaaatcccaccgctattacctgaaataaatcatgaagcctggactgaactcggcaggcttgcgcaatatttaaatcacctgttaacgcatctcgaccacaaaagccctgatagtgaactgagccgtactgaactatttgccgtcaggcgacagataaaagcccttcgtgaacatcttatcccttccactttctggagtggcaataaatga

SEQ ID NO: 85215 - DNA, 807 bp, Citrobacter koseri
atgattgacaccctggttaaagcaggaatagattttaaccattctgataactatggtcacaatgttttgtttcatcagcgaaatcctcacatactgaaaaaatttattgattccggagtagatatacaccacaaaaatggtctcggccaaacctgtttatgctcgttagctgacaatatatcctgttgcaaaaccctgaccaatgctggaattaatgtcaacaatgtggataaatgcggaagaacaatacttttttacgtaaaaaatcactctatctttgatttgatggtacaggccggttgcgatataaaccacagagataaccaagatcacggtgtttttgaaatttgttattcattaggcgatttcaaagccaaaatgctcattcgtcatattagtaagaaggatagcagtccagtaattttcaactacctcaacagcgaaagtctgcagataatggatttgcttcagaataaaaaccttaactttactatctctgataactgccagatttatctaagtgccaatgaaaatgaaatgagctctttcttcagcgaactaaagaataagacagatatcagcaacacacattttcgccatattgtactgcgaggttatgatttacgcggggacattgaaaccattaaatggtttatccgcaatgacatcaaaatagataaaaaacaactcgaacagcatattcgacatgatgagatttgtaaatatatagcagagcatgagagaaagaaacttagcgaaattatgaaacaaacaatctctttaatgccagtaaaacgtagattgtaa

SEQ ID NO: 85216 - DNA, 138 bp, Citrobacter koseri
atgaataacaacgcaataaatacattactctcttgtaaaaccccaaaagacattcaggcttgcattgctgcgggctccgatattaatacactggattcatttggaagaaatatactgttttactgtaaaaccccatga

SEQ ID NO: 85217 - DNA, 441 bp, Citrobacter koseri
atgaagaaaacaaactacccaagcctgactaactatctcgccaaaacaaaaaagaacgcagatctttatagattatataatccacaattttcttttttctgcaaaagtgacgctcaggagcaaagattttatttcgattatttctcaagacatatggtctcgaagagaaatattctaaccgtattctctatctatacattcacctcttataacatgaacaaaaaagagacaataaaaaatttcattctatttctcaaaacaacgaatgaaagtacattccataatgctttttcatttcgcggtggtaacattttgtatgtaagcaataaaaacatgttgaaagagatctcgtggttttcactcgctcgaatttacgaagacataaaaaatttaaaggaatataaaaccaatcatgacaactatatcagattagtcgcttaa

SEQ ID NO: 85218 - DNA, 321 bp, Citrobacter koseri
atggaacagttaacgcgactggcggatacaattgcagaaacgtatacccgtgatttgaagcgagagactggcggcaataccgttgaatataacggtgtatcggggcaggtagtaccacaccgtctgtcatccgggctggtggacaatgttatctctgctgtgcgtgatgacgccgacaaagaggcagcggcttataaattgctgctacgactaattgatattaccggacgtgaatatcgcttgacggagcgtggtgttctggtgatggaaagtatgatcaggaatggcctgatgagtagcaataaacgtgtggttcactaa

SEQ ID NO: 85219 - DNA, 171 bp, Citrobacter koseri
atggcaacaccatcagtaaaaccagtcctgctcagtcgtaatcaaatcgataagcttaaagcgctacaggagcaggagcgaagaaaatccccactaggccttgccccatcaatccatgttatcgcgcgtcagattatggatcgcgccctgaatatgccgaaggaggcttaa

SEQ ID NO: 85220 - DNA, 777 bp, Citrobacter koseri
atgcccaccgtccagaataaagcctttcccctggctggcctgatgtgtaccttgcgcgggatcgtgcacgcgcatgagggtaaagctggcataacagtgccagctaatgccagctcctcattttctcgtcgtggtaacgaggagagtttcgagaccagtacgcgcacgggactttttgcaccagtacgcgcacgcgaggaaggtttttctgacatcactacgcgagggggaaatcattctactggcgggagttttcggagaagtacgcgcgtgcgcgaaggtgagtttctggagtccataaaaaagggcttgctgattatcgccaacccggtttatggttatagcgcaccagcaaaatctggtgccgggattggcgtcctgcaattatccacagcgcacaaccgcgctaaatgcggtttttttgtgtgcgtcgcacggctacatccttcaatggtgggctgggcgagggcatcgaaagatgcgccggtatctgtggaagccggtacgccaacctcgttcagttcaccaccagcgattggcgtctttggtggtgattatatacatcattccacagaggctgccgctatgctggctactacccctacccaaaatccgcaatttatctggttaatcgctgccgttcgccgcgacatgccgacaattaccgccaaaatccatcacattgctgctgaaactgagcgcgaagctcgccgcacgctggcgcgggatcacgtctgtttctttgcaggccgtatccgtctggaggtggccgcatga

SEQ ID NO: 85221 - DNA, 1269 bp, Citrobacter koseri
gtgcgaaggccggactcgaacatttatataactcattataaaataaggaaaagaaaagtaaacacacctctagtaccaacgttagtaccaaagttagtaccaacgttagtaccaacaagcgatactatctttagagatatcaacgccagtcatctgccaaaattaccactcttgattttcatagcgcttactactaacgcattgcaaatgaaacctcaacaactgtatattcaaacagtaaaaagatacttactactggataaaccctccagcgacatgctattcttactggcaaacttatccagtagaagaaagacaatggaaaatctactagaactaccaagctatacaccccacttctccggtcatgagactttcccactaaagcagatgtggctgaaaaagtcttatgatcaaaaaaacagtgataacactcttgacaaagctacgtttactcaggaggaggctatcggtgtgtttggcgtaggcaaaaatatggtgtcctccatcaaacattggtcgctagcatgcgggctacttgaggagtctaacaccaacaaaggcgttttcattattccaaaagaatgggatatgatccttcaggacaaaggattagatcctttttgtgaaaatccaagcacagcctggctcgctcactggcgtttagccggcttaccggcagctaacagtaaacatcgctctacaacttggtgctatatctttaacaatataacatcctcttcattttcacgcgataatatcgtagagcgtcttaaagattacgcagaagaaagaaatctaaaaatctcagaagcaacattaaagagggatgttgaggcctgcattagatcatactgcccaaaatcagataataatattgaagaaaacgcagaaccactattatcagaattaggtttacttcaagaggaaagtcgaggtttattttccttcaagagaggacagaagtactccctcagtgaccatatttttattttttcactcatcgagttttgggagtcattatattctgaagctaatacgttatcttttgaaactatagcatatggcccatcatctccaggaagagtatttaagcttgatgaagactctgtcgcggacagacttgcaacccttgaagaaaaaacaaatggtttcttaaagtggtctgactcttcaggaattagacaagttgtaatatcaaatacatctgataaacaattagctaacttgaaaattgaacaaattattatggcttatggtgatttataa

SEQ ID NO: 85222 - DNA, 3300 bp, Citrobacter koseri
atgttaatggacaaggttaaaattactcaacaatatcaacgctctgtccgaatagatacagacttgggacgcatggattcattagatggatatatttgtaataaatcggcacagaatgtttttaataatctttgcactcaaataatcaactctgaacaaagagcttttaccttaacaggtccatatggtagcgggaaatcatctcttgcaatcacgcttctttctacgttgcatcctaatgaagaaataaggaataaagcttacactcgtctagataaaagtattttaccattatttaaaaatgcttttcctatcaccaacggttggaatattttaccaataactggtaaaagaacgaatattgtacacgaaataaacaactcgctggataaacaaacaaaatctaacaagaagaaagaaattaaaccatcaggtattgatctcattgaacggttaaaagttcttagtaattcttcatcatatgatggtttgattatagtcattgatgaaatgggaaaattccttgagtattcggctcaagaagaaagcgatatacatttctatcaggatcttgctgaagctgcttcaagaagtaacggcaagttaattgttattggtattctgcatcaagcatttagacagtactcatcaaaattaggtaatgagatacaaaacgactgggctaaggtgcaagggcgctatgcagatataccattaatttcatcaagtgatgaaaccattgaactattgtctaaagcgatttcaattagcgaagattttaaaaatgatcttgatgtaaatgctgctcaaatagtagcagatgaagttagaaagagaagaccttcgatcagtgcacagttagcagagtctttaattaaatgttggccattacatccaacaatggcgactatcttaggacctgcatcaagaagacattttggtcaaaatgaaaggagtatttttggtttccttagctctccagaacctcatgcgttccatgatttcttgaaatcaacaaaatatagcgaagatcaaacatacactccagagcattattggaattttttgcgtacaaatcttgaaccggcaatactatcttcaccagatggtcatcgatgggctcagtctgtagaagcagttgaacgcgtagaagctggttccgacaagctaaaaatcagcttgataaaaaatattgcaatattggatttctttagaaatagcactggtctacctgcctctaatgaagtaattaaaagtatttatcaaagtaatataaattataatttagagacattattaaatgaattaaagaaatcaagtgttatcgtttacaggaaacatcttgaatcttgggccgtatttgaaggtagtgattttgatatagacgaggagatcaaaaatgaattaaacaatatatcctctcttgattacgaactgttgtctaaagcagcaggcattcgcccagttgtggctaaaaaacattattaccaaacaggctcattacgctggatggatatatctctttgttcattagaggtattcaaagggaaactaaaaaatttattccctattacctctgataaatttggagaactatttgtcatattcccagaaaaaggaatgactcattctcaacttaaaaaagaaattaagaaaagtagagataatatacctgaaaacattattcccggcgtacctattaagacagataaaattgtcgagaatggatatgagctgatggctttatataaaatccttgacagtaatcatgaaataataagtgattccgtagccaggagagaaatatatgcaagaataacggctctaaaaaatattattgaggaatcattaagagaggcattacgctattcagaatggttaattaatggttcatgggttaatatagaaaattattcatctattgcatctacatttgcagataaaatattttatgatgctccatgcctaaaaagcgaactaataaatcgcaatagtctttcacctaatgctgttaaggcccgtaaagacctgctctacaaaatgttgtatgctgaaaatcaagaaaacttaggactgtccggttggccagccgaaagaggcttacatgagacattattagttattcccaaaatccataaatctacaaatgggaaatttggattaactattccaaataataacgatgatgttgcagtcttgacacctctttttaaattcacagataaacttttcgcagatgaaaacaagcttatatcagtacaacaaatgttttcactgtggggcaagcccccctttggtgtgaagaatggaattcatccagttctctttttggtatatattttagccaacaaagataaaatggctttatataaagataattactttatatcaaagataacagacagtgaaatagatgaacttcttcaagactcttctcgtttccatttgaagaagatcctcattgataaaaataaaaacaatctactttctcaaattagtagaactttaactcaattgaatattccttcttcaggacaagaaccactggagatagcaagatcgctcgttggtatggtttatgctttgcctgaatggtctaagcggacttcgacattatctgaagatagcaagaaaatgagagatctgttgctcagagcatcagatcctcacaaactgttatttgtcgatttaccatttacattcacttcagagaatgatactgatctttcagcgaggatcgaatcttcaattaaagaattagttaattcttacaacaatctattacaaaatatacgcagaaaaatgctaatagcattggacgctaataataatgattttgctgagatcaagaacaggtcaaatactgtttcgggaatttccggcgatttcagatttgatgctttttcaacccgtctaaaagacttaaatgaaacaaacgaaagtattgaaagcattttaagcttggcagcgaataagccgccgagattatggtccgacaatgatattgatattgcattaatagaaatagcatcttgggctaaaaaattcaaaagaattgaagtattgtcttcgattaagaatagaaagcctacaagagaagcttttgcttttattttcgatgataaagaaaatggaacagtacaagctgaatatgatataaaatcatctgatataaaaaccgtagaagatctttcgcaaaaaattctcggtgaatttcatgataaagatttaagcaaaaatattttactggcagcacttgcaaaagttagtattgcaattgtaaatggtaagggtgattaa

SEQ ID NO: 85223 - DNA, 837 bp, Citrobacter koseri
atggcagaacgacatgttttaggtatctctggtggcaaagatagcgcagccttagcgatatacatgcgccaacaccatcctgaactcaatattgagtattttttcactgatacaggaaaggaattacctgaggtttatgaatttttaggtaaacttgaaggttttcttggtaaaaaaattgaatatttaaatcctgatcgagatttcgatttctggttgaaggaatacaaccattttcttccttcgccacaaacaagatggtgtactcgtcaattgaagttaaggccgttcgaactatgggtgagacctatgcttgcagctggtgactcagttaccagctacgttgcgataagggcggatgaggagtatcgcgaaggttatgcttcaaagcataaaaatctaaaaattgcactcccatttcgtgaaaatggtatagataaggctgcagtaggcgagatacttgaagcttcaggcgtaggctggcctgaatattacaaatggcgtagccgatccggctgcactttttgtttttttcaacaaaaaattgaatgggcaagattaaaagaaaaccatcctgaagcatttgaagaagccaaagattacgaaaaaaatgcaatggagcatggttcgccatttacatggtcacagggagaatctctttctgaacttgaaaaaccagaaagattaattcaaatttttaaagattatgatgagagaaaggcaagagttgcagcgagaaaaactcaaaacccgttacgtccggttgaaatagacgatattgatgatatatatggtgatgatgagggaaatggttcatgcaatatatgtcataagtag

SEQ ID NO: 85224 - DNA, 2358 bp, Citrobacter koseri
atggagattaaagacgtattcggagcgcagcccaaaagtgtttgggagtatctttgtgagaatggtcaaggactgtatgtaccagcatatcagagacaatattcttgggatacacctaaaataacacggttaattgaagatatatgccatggttttactactctcacaagcagggatgatgcaataacatttttagggactatcatagctattcatgacacaaatttagttacagtagatccgattgttaaaggtgatgttccatcaagagttatgacaataattgatggccagcaaaggttgacgacattattattagttaatacagtcctccatgaagagattaagttaagattagtaaaaaaaagaagtaagtccagcgatgaagatgcggatgtatggttaattgaagaatgcatgaaagttatcggaagattagctaaaacgttcgaggaaaataaggattatggagatccggattttcaatattatcctagaatgattagagcatatgatgactcatggtcacgtaagaaggataaagcaagttataaatctgccattggtcattatttacatacctatggtaaatatggaagagaggaaataaaaaagaacttcaaatatgaacctcctgagagtgaacaagaaaatagtagcaaatataaaccgctttctgaaggtcgaaaaacagtttataaactaataaagaacataagtaaatgtatcgattcgggagcaaaagtagctgtaaaatcagaacaaatggaattagaattgccagagtttactgatattcttgataatgataaatttcaaaatctcctacttaaatctgagtttccagaatctgtaaaagctaaactttcggacgttggtgatcattcttttgaggaattaactcgtctggttctgtttgctaattttgttcttgatcgtgtcgcaataactattgttactgctaaaaatgaagattatgcatttgacatgtttgagtcattaaatacgactggtgaaccattgacagcgtttgagactttcaaacctaaaattataaatgccgagaaactcagcggatatgaaaaatcgaaatcccatcagtatgttaaagcgattgaagattatctcgaaagtaccggaaaatcaaatgataaacaagatacgacgagtcggttgattgttacttttgcactggcagaaaaaggtgaaaagctttctaaaaggttaagtgatcaaaggagatttcttaaagacagctttgaaagttttccagggttagagcagcagcaagaatatgttagatatctttctcacgcggctttatttataagatattcctggcctgaagacaagtcgaaagctacaactatttcttctgctgaggaagctcagaccgacgaagttattttgtgtatagatttacttcgtaagtttaatcatacaataacacttgggcctcttatccgtttctattctgaaataaggcgagttgcgccagagtatcgaggacaagcaataaataatttcattgatgcagttaaagcgatcacagcattttctgtcctttggagatcttctcgtcgttcaactgaaaatatagattcacattatcgtaagttaatgttgaatgggtacgcagatgttggcttgaaacctttggcaagaaataataatgactttggttcagagattactttaaatgtaattgaacttaaaaaagcatttttatcaatacttgaacgagacggccatgtaggtagcaaggaagattgggtaaaagcaatttcaaagataccagcatattcaaatcaaaaagaaatcactcggtttatattattagcagctgctcatgatagtgtagaggataaagccaatcctggtctgacggtagcaggtaggcctgggattttacctctgctagatgtaaaaaattggacgggggagcaatctaaaacaattgaacatattgcacctcaagaaaaagaatcaaaaggctggttggaagatatttatgaagacccagaattgattgaccggttaggtaatttaacactgctaccaattagagaaaactcatctcttaaaaatggcagttgggaaaagaaaaaattattttataagattctatctgcaatgacaccagatgaactggagccattactggaacaaggcaaggcacagaatataaatttagcacaatcaacaaatgatttattgattgaatcgaaatatttaccccttgttaaatctgttactacggttgaaggtgattggacaaaagaacttatagaaaaacgcagtgtaagaatcgcggagttagcatgggaacgtattcatgcttggttagctgttgaatga

SEQ ID NO: 85225 - DNA, 186 bp, Citrobacter koseri
atgaatgtaataacatttaatgaaatagaatctaccgtagttgccaatgatcaggttgattctatttgcattgaattaacgacatttagttatgacaatgtcatttcttttgaagacaggaagaaaaataaagaagtcctcgatgcatttattgaaatcatgaatactgatataaattttgattag

SEQ ID NO: 85226 - DNA, 1596 bp, Citrobacter koseri
atggcagaagcagcaaaaaaaacatcgcaaaaacgggatgaaaaaaaagactccacatcagcatcatcaatggaatttctgagctcacgacaatcaaaagatatctaccttggattgtgtggatatgttggttgcggcatgagaacaataaacgaaatagccgaagaaatatccaaagagtgggattacaatgttgtgcatattcgaataagtgcactcctggaaagttcaatttattttgagccggcagcactaacggcatccaagagtactcaagttaacagacacttaaagcttcaagatattgctaataggcttcgtaaatattacaacagaaatgaattactggctgaagctgcgattgcagcaatcgcctcagagaaaaaaaacattgattatactaatgaggattataaaggcacagtcttcatcattgatcaattcaaaagaccagaagaagtagagctgttcagagttatataccagcacaatttttacttattaggaattttgcgcgatttagattaccgaatacctaatctcattgctgacgaatcaacaaaggacgacctccatttaattattaacattgataataaatcctctgaaccgcatggacaaagaacaggagaaaccattcttgattcagattttttcattaaaaataacttcagtcaaaaaagtgaattaaagaagaagattgaacgtttttttggccttattcatggtaaaaacggtttgacaccaacatttaatgaaaaaggcatgtacgctgctttttcaacatcattacaatcagcttgtctgtcgcgtcaggtaggtgctgcgctttttgatgatgaagggaatctgctcgcagtaggcaagaacgacgtacctaaagctggtggcggattatatagcagtgatgactttgataacgatcatcggtgtgttcataaaagtggtaagtgttataatgatacaaataaaataaaaattaaagaacgaataaaaaaagtattatcaaatgaagtcagtgctgtgttaggcatctccgctggacaagctgttgcagatattaatctgacacgacttttaaacagcttagacaaaattgcagaaggtatttacaaagacagcaagatttctagcgtgatggaatactccagatcaattcacgctgaaatggacgtaattacttcaatggccagaaaacaaaatggcgatactaaagataaaattctttatacgactacctatccctgccataactgtgcaaggcatattgtcgcggcaggaattaaaaaagtggtatatatagaaccatttgataaaagtcttgccctagacctgcataatgatgcgataacaaagaatgaagaatcatctaaagttatattttgtgactttgagggtgtatctccacgtcgctacaataaatttttcagaccaacggatgaacgcaaagatgataaaactgggactgcgaataaatttaatgtccgctacaaaaatcatatagatgttcaatatcttgatgattatcgaaaatatgagtctgctgttgctaagaaatttataacggaaatttctaaaccagaaccacagcaataa

SEQ ID NO: 85227 - DNA, 984 bp, Citrobacter koseri
atgcaaaacgaaagtaataaaaataacctcttccgtgtaaagtcaaaaaatggtgtccttcgttgccttaaggctggcgtggatataaatacctgtaatgacaaaggtcaaactgctctttttacctgtaatgtacctgaagctatacaggcaatgattgacgctgacattgacattcaccacttggataatgacagtaataatgcattattctatgctcaaaatgttgaaacagtagaacttcttgtcagcaatggtattaatgttaaccaccggaataagtcaggcacccttgcgattcaacatattgatgtttcaccagggttagtaaaatatcttatcaaagcaggactagatatccataccaaagatagctatggaaattcctttcttttcattccatttgaaggatatgtatacgatgcactcattgaggctggttgcgacattaatcataaaaatttaagcggtcagacagcattcgattactggcagtcagaaaaccacagcatagctggtaaatatactcactgggaatctaaaaacgataactacattcgttttcttatccgtaatattcatcttaaagacagttcaaaaattgtattcaagaacattacatttaaatcaattgagctgttgtcgttacttataaagcaaaaaaatgaatttgagataagtgataagtgcattatcacaccaacaaatgccgacgttaaaaaattaattttacaactaaagaaactgacagacattagtcatgtttggttttacataaacagtacatatctactgactcactatgtaggaagactgctaattaaatggttaatatgtcatgatataaaagttgatatagaatcactaaaagaacgctacttctatgaagaaatcctcctggaaaaatcacagagagagcaaaaggttttacgaacaacgcttcaaccagttaccagtaaagcaattacaaaaaaaagattatga

SEQ ID NO: 85228 - DNA, 498 bp, Citrobacter koseri
atgatctgggcattcgtcaaagcgtattggaaacagttgcttatagtcgcgatgcttgctgctctggtgattggtttccgcatcgtatgggtacagcacggcgatgcgcggtactccgccgggtatgcgcaggcgcagacagatcagaaacaggctgatgataaggccagggcacagcgtgatcaggagaaaatacaaattgaacgtgaagcacaatcccgtatcgatgtggcgcgtgctgatgctgagcatgctaataccgctgctgacggcctgcgcgccgagcttgacaaaaccaagcgactcgccgaacactataccggatctttccccactggcacgccagccagcaaggtcatcgatgtgctcgccgacatgcttgaagaaagcaaccgagtttacaacgcaacagcagctgaggctgaaaagtatcggattgcaggagaatcctgcgaacagcaatacgactcactgaagaagcgaaaatcggggtactga

SEQ ID NO: 85229 - DNA, 1032 bp, Citrobacter koseri
atgcgcaatgtatcagcagaccttctaagaatagtttgctgtatgcttgttataggcatacattccaccccaaattattcgttaatgattaagattaacgagactgattcaatcatttatcagtcaatgtttatgaaagcaattgtatcaattgggcttcctgtattctttattatgagtggctactttattcttaataagaaacaagggaatttactatccgagtacaaaaaacggcttacaaccttattgataccattttttatttattcttttttaaacttcttgtacttccactatcccgtttttgcgtctgaaggagtatttgggtattttagattgttgaccacttcgagagtagcaatttcaacacatctctggtttgtgtattttttgcttggtatttatttgatttctcctgcacttaaggttatcactgacgcaataccacaaaataaaagtatcatagcgataattgtcatcgctctgttgtgcgcgtggggacaatatgaaccccaactaaacaagcttattccattctataaacctttaatcccactaccaagaattgacgtttgggtagcttacttcgtaatcggcgggttgcttgcaagagtcaaagttgacagaaaaatagtctcacgactatttgtcttatctcttgcaattcattttatgcttacgtggctaagcgtgaatagacttggttttgacacaagaccatttgactcaggtatcagtatgttttttgtctcttgcatgttcacattattcataaccggtattgaaatgaataacactagcaatctttcaaaaatcattgtctggatcgcgccttacacttacggcatttacttgatgcatatgattatattggttttcatatcaaaaacattttcaataaacaccgtcgtagatatggtgattgtaaaaaccgttatattcatgccgttaattttcgcgttatcatttattgcggcgctagttattgataagttgttagttaacagaatagctagacttataaggtag

SEQ ID NO: 85230 - DNA, 543 bp, Citrobacter koseri
atgtgtaacccggctatcgcactggttgctgtcactgtggcatctaccgccgcatccatgtacagccaacgccagcaggcaaagtatcagtcagcagtagcagatcagaacgctgatattgctgaatcacaggcgcaggatgcaatcaaccgggggaatatcgaggcagatcagcgccgccgggagatgcggcagcgcgccggaaccgcagcggcaacaatgggggcaactggagccgagctaagcagcggaacctcgctggatatttttggcgacaacgctcagttcggtactctggatacgctaacaacagtaaacaacgctcaacgtgaggcctacggatatcaggttcagggaatgaatgccattgcgcaggggaatgcagcgcaatcagcggctaaatctgcaatgacacagactctgctaactgcgcccctgaaagcctatggcgcttatcagatgggcggcggcacctggagtccatttactcaaagtaacgcagcgcctatttccgctgccgttggcactccgacaggccgataa

SEQ ID NO: 85231 - DNA, 246 bp, Citrobacter koseri
atgaatattgacctcggatatttccaaaacgtgttcttcaacgttgcctctgactttcagattacttctgaatgcatgcgtgaaccgagtgttttgtacagaccgacacttagtcaggatggagataaatggcttgcgatatatggcgacctgccaaccggagttgtcggcgtaggtagcaccccagaagaagccatgcgggaattcaacaaagcatggttaacgccagtcacaaaagccgcctaa

SEQ ID NO: 85232 - DNA, 285 bp, Citrobacter koseri
atgagcgaagcaaaaccgcaggacggcagtaccataaaaggctaccgaacattaaccgctggcgacattgagagtatgaaccgactcaaaagtgtaagccgtcatttttgcatgctgattgatgcagagcgcatacctgtatttgctgaagttgtagagcgaggcagtcaggcagaaaatgagagagaagaagctttgcgctgcctggatatcgcgcgtaccaaaatgcaggaagcctgtatgtgggcctgtcgcgccgtggcgaaacctgatagtgattgttga

SEQ ID NO: 85233 - DNA, 552 bp, Citrobacter koseri
atgaccactattaccagagaatggctgctgcaaacaatcgctgaatacgaagccaatcgtgatgaaataccgtttggacttgataccaatagcgccattgagctacaggcgttcaaaatcgcgctggcatcgcttgaggctggcagtgacagccaccttgcacacggctcgctctcaaatgaccgcctgtaccgcattcgtgaaatcttgggaaaagcagcagcacaacgcgacggcggtaacatcggttatgcaatgtctgatgctgtgaaagcgattgatgaattgctggaagtgcggaaggcggagccagtagcagatgtcgttgcatgggcatcaccgaacgaggagcgaaagtgtgatatccggtggcgtcgtcatgacgttgcaccgggtccgctctacaccgccccgccagcgccggtatctgtgcctgaagattttctctgcatgcttactggtcgagctaaatatcttcgaggaaaaggagaagttaaatcacctgaattgttagaaagggccgccgccatgctcaacggaggtaaatcatga

SEQ ID NO: 85234 - DNA, 531 bp, Citrobacter koseri
atgaacggcaatatcattgagttagtgaagtcagggcatgatctggcgaaagaactgcattgtgctgagtctgccgcgctggtgagcgatctggcgtcacagcttgaagtgcagtatgtgcgcgctgaagaatcgcagcgagaattccgctcagttgatatcacaatgcagaatctggaggctaagtgcgaaaagctggctgcggagaatgcggggctgaaggcgtttggtgacaagctatacagcatgcacaaaggcctggagacctctggtggtggattccatgacgagcagtcaattccctatcagcaagcggctctcgatgcggcaatgtcggcgttcgaggaaatcaaaaccccggccaccgacgttttcctggctgaagtgcgggccagctgtgttgatgcggtcaagcagaatattagcgatgcaatcagcgggtgctgtcaggacgaaattgtggggcttgatgcagcagtcaacatcgccagcgagttcgccgctcagattcgcaaaggcggtgcagcatga

SEQ ID NO: 85235 - DNA, 771 bp, Citrobacter koseri
atggccagtagctggataaaagttgaggtaatcacgccagataaaccggagattttccagatagcggaaatcctgaatatcgaccccgacgcggtactcggaaagctcgttcgcatatgggcatgggcagatcaacagaccgttgatggtaacgctggcagcgttacaaaaggagtgttagaccgtatcgcttttattacaggattcgctgatgcactgatctctgttggctggctcgcttacgaaggcaacaagcttgtattgccaaactttgagcgtcataacggagaaagctctaaaaaacgggcacttacaaacagaagggtagcagctcaccgtaaaaatgaaacgcaaaaagtaacgcactcagcgttacaaaaagcgttaccagaggaagaggaagaggaagaggaagaagtaaaagataaaaacccccctaaccccccaaggggaagggagcctaaaaaatcatatccgtatcctgaacagctcaatgccgaagcctgggaggagtggaaagcctacaggtcagaaatgcggtttaaatcctacgcaccaactgaacggagcgagggggcggctatcaccgagctgattaacttatctggtggtaaccacgcgcgacagatgcagatcgtgaagcagagcatggccaaaggctggaaagggctgtttgagctgaaaggcggaacggaaaggcgcgatgtaaacgccatctctgagcctgactcgcagatcccaccaggattcagaggcggaccgacactctga

SEQ ID NO: 85236 - DNA, 1062 bp, Citrobacter koseri
atgacatccgccgcgtattacaacgaaatagacccattcgcggcgcaatggctgcgtaacctcatagccgccgggcatatcgccccgggcgaagttgacgaacggagtattgaagatgtcacacctgacgacctcagaggatttacccagtgccactttttcgccggaattggcgtctggtcccattccctccgcctcgcaggatggcctgacgatcgccaggtctggactggctcctgcccttgccagcctttcagcgcggcaggcaatggcgatgggtttgctgacgagcggcacctttggcctcaattcttccacctcatcagcgagcgcagacctcagcatgtctttggcgaacaggttgcaagcggtaacgcaaacacatggttcgaccttgtacaaactgacctggaaggaatgggatacgccttcgggcttgtgccgtttgcggcagcgggcatcggtgcgccgcacatcagagagcgagcttactgggtggcccacgccggtagcgaacacgaacccgcagccggaaacgaagcgcggcctgcagcatgtctccggagctgctcggttaacgggttggccgagtccgctggcgagcaacatcaaaaattgttaccaggactggaaaaaggtaatggcgaggaaggaggctggtcgccagccaaatctacaggactttgcagtgttggcagcctggacaactccgacaagccgggactggaaagaaacttccgggataacggcgcagcggggcgggaaagagcgactggaccagctgccaagacaggcgtacacatgcgggcccttgaggttaacggtttttggcgagatgcggactggctcttatgtcgagatggcaaatggcgtccagttgaatccggcacattcccgctggttgcaaggtttgccaaaagcctgggacacggcaagtcctcattacgagcaatggcaggccgcaacagaacaggccgacttaagggttacggtaacgccataaacgcgcaggctgcggctgaattcattcgcgcttatctgggggtgtcacatggccagtag

SEQ ID NO: 85237 - DNA, 303 bp, Citrobacter koseri
atgaacactcagcagattaacaaactgaacaaaatagcgaccatgttcagtaatgactaccagatgtcgtcagaactgtacgacagacacgttgaactgatcgacgcagtagcagcatgcgaaatggaagagtcattccagcgcgcaattcttcgtgccggtgttcgtcgtgaaattcttgaagcggcaaaagaaagctgcgagtacgaagaaacaatgtcggcactcaagcgtgaacttaccggaattattgcccgtctggaccaggcagacaaaatcgacagcgcgaggacagcggcatga

SEQ ID NO: 85238 - DNA, 873 bp, Citrobacter koseri
atgagtaacgatatcacaatcacatcacagccaggcgctaccgtcggcaccgccgcggcaatcttcagcccggaagggatggatcgcctggtgaaatttgccaccctgatggctgacagcaaagccaccgttccggcacaccttgctggtaagccagctgactgcctggctgtcactatgcaagcggcgcagtggggattgaacccattcgccgtagcgcagaaaacacacatcattaacggcaccctaggctacgaggcgcaactggtcaacgccgtcgtccaaagctctggtgccatcaaaggaagattccactacgaatacagaggtgaaggcgcttcgcttgaatgtcgcgtgggagcaattatccgtggagaacacgatattacctggaatgagtggctgtgcatttccagtattacgacaaaaaactcacctctatggaaaacgaacccgaaacaacagttcggttaccttcaggtaaaaaactgggcaagagcccatactcctggcgcgattttgggcgtttatacacctgatgaattgcaggagactgcgcctcgcgtagagcgtgacattacgccaccagcggcaacggctcaaggcatgaacagtctggtcaactcgaagccagagcaaaaagaccatcccaagaatgaaggtcgagatcctgacgaaatgctgaagtcattcaccgaagctgccagcaatgcggaaagcgtcgagaaactggacttgatttttaatggcggtacatggcctgacagtaagaaacgccccggcgcgaaagatgcattgtcaggtaaatggctggagatggctaccgatgtttacaccatccgtcgcgacgaactgaacgaagtaccgatgtaa

SEQ ID NO: 85239 - DNA, 645 bp, Citrobacter koseri
atgtatgcaataccgcttttaattattgctttaagtgttcaaaatctatcacttattgctgggatcgtattggcggtttcaataaaatttctgcgacttaaaacgataatcttgattcctctcatcttaattccaatttttactgctgctgtaaatgtgatcagtcaagagcagctggattactactcacaacgattgaacgtctctgaagactccagtaatacatctactctaactttaatgtcgggctatgagcaagcataccttgcgttaagagatagctatggtttcggttatgggttgcagcgtatgggttatccgaatgatcgcggaaactttgttgatataattggaaagttacgagatggaaatacggattctaatcttcatgatggtggattattcatatcaaaattatctgtagaatttggtatcttaggattgtttttctttatatataccatggctattggtattaaaaatgctaatacagaaaatttgaaaacgaaattttttagtatcgtactaataatgagttcaatgtattttttattaagaggatctggttattttactccctctgcgacaatgatatttttatcaatagtggcattgaaatcatataaaataaataaaatggtgtga

SEQ ID NO: 85240 - DNA, 1428 bp, Citrobacter koseri; identical to SEQ ID NO: 75990

SEQ ID NO: 85241 - DNA, 336 bp, Citrobacter koseri
atgaagcatatttttttattgttactagcgtttacctttaatgctggcgcagcgtctacgtatacgaaagaacagttgaatgatatggctgctgcggggaaatatccagagcaggaatcgccagtaaccaaaagtattgaggctgtttctttctctgaatgtaagagtagcactctcaatgtattgaatcaggtttccggtaattatccggcgaaagaagttgtaaacaccggagtattgtatgttgtgaagatttggacaaatgatggtgtaatcatggtttcatgttcagagcctgacaataagaaagtcgtaacgcaatcatcttataaataa

SEQ ID NO: 85242 - DNA, 747 bp, Citrobacter koseri
atgacgtcattaaatttagcaccaaaaggcggtggtgtcaccgagaaaaccatcgatagccagtacctgcttgaaatggttaatcaggcgcgtaagcagtgcggtgaaaaagaagtccgtaacaacgactttattgctcgcattaaagatgaacttgaaggtgagcactacgaaattttcgtagttcaaaaagcgaacaaaacaacgtctgaaaatgttgttatgtcaattaagcaagcactccgggtggccgctcgagaatctaaagctgtccgccgttcactggtagataaactggaagatatgcagtcgatccaggtaccggttcaaagtaactctggtctacccgaatatcgccgtgcaaaggcggagcaattgaaggcgctggcactggagaaaaacatcgcatcggctcgggagttgatgtctatgttcccgcgtcttggtgaatcagcgaatcaggtgatcgtggctactctcgttaacccgctactcggccatgaagtcgtgccgctaccggtgattgatgagcattactcaacggctggcgaggtggcagatatgatcggctgcacagctaataaggttggtcgcgtagccaacaagcacaacctgaagactgagcagtacggaaagttcttcctggataaatcgaagcactcagacaaacaggtcgaggcgttccgctacaatgcagaaggcatcaaagcattgcgccacctgatccacggtgcagatgtagcttaa

SEQ ID NO: 85243 - DNA, 633 bp, Citrobacter koseri
atgagtagtttagcaatatctaactttaacttccagggtgtaacgctgaagccagttgaaagagctggtgatttttggttctcatcagccgatttagcaaaagccctcggctacaagaaaactgatgccgttactcaaatctatagccgttacagcgatgagttcggagctaatatgtcaacgaccctcagggagagggtcgttagaaaaacgggttctgtagaaatgctggtgagatttttctctttacgaggtgctcacttggtggcgatgtttgcctcaacaccaaaggctaaagaattccgtcgttgggtgctggacatactggatcgcgaagttgcccactcaccgatcgccaagcagtttacggatcaagagctttgcgatttagcgtggttgtggcgagctggtgcagtgatgattactgcttgtcgcgatatctaccctttactgaaagtggctgagcatcgtcaggctggtcatttttactcgatcggccatgagttcacgcgaactcttaacaaaggtcgggagataataaagcgcgagaccacgcatatagaatttcaaccctggagggatgataactggagcagagtgcttccacacttgcgtcaggaaatgttgcagtga

SEQ ID NO: 85244 - DNA, 354 bp, Citrobacter koseri
atgagtaaattccctagccaagatatggaccgtttcaacgtgagattgccagcaggaatgcgcgacgccatagccgaacgcgccaagcgtaatggcaggtcgatgaactcggagatcgtgcagatacttcaggatgcgattgacctagaaatccgtgagcaagaagacgctaagctagatgctcaattcatgaaaaacagaaaaggacttcctgactcctatcaagaagcgttagcttcttttgatgctcgagttgcgcaactaatagaagaggcaacaaaaatggcaatggctcaagctggtttagaactcagcttaaaaattgaagaaatcgccaagaaaaagcccacctaa

SEQ ID NO: 85245 - DNA, 513 bp, Citrobacter koseri
atgcactatcctaccgtatctgtaaacggcgtatccgttcgtgtcgacaatgaagggcgctacaacctcaatgatctccatgcagcggctgtggctgaaggtaaagccactgaatcacagcgaccaggtgagtttctcaaaaccaagcaagtaaggcggttcgtgcaagccctgagcgatgcgaagaaaatcgcatcggttatgaccattaagggtggaccacttcagggttcctgggggcttgagcttatcgctatacgctatgcagcctggctcaatccactttttgaaatcaaagtctatgagacatttcaaatgctgatgcgtcgcgggttcgatgccatgtcccgcctcaacaaaatcgaccacgtgattaacaccgaaaccaaagcgattagccagtgtgccagccagatggcccggtggggtgttggtggacgcaaaaagctactccacgctgcgcgagatcgcgttgctgatgaagtgcagatgtatttgccgggtattgcgtaa

SEQ ID NO: 85246 - DNA, 225 bp, Citrobacter koseri
atgagcaaaatacagtacccaatgactaccgctgctgtctttgatgacgtggtgtatccgatccatcttgatggcgctcaccagatagagcgcgaggtatccggcgcaatcaattggttttgtcgctggaacaatgaggaaaaagctgtagtgaaagcgcacgtccttttcagttgctggggcctttacctgacgtacgaacagctaatggaggaggcagcatga

SEQ ID NO: 85247 - DNA, 648 bp, Citrobacter koseri
atgcgtaaaccatcccgccgtaagtgcaaagtgtgcggtgaatacttcgtgccgaaattccacgacatacggatccgctggtgcagcccggagcacggcgcaatcctcgctatggaagaacgtgaaaaggagaaggtgaaagccgcagctaagcgaatcaaggagcagaaagaggcagagaaggccgggcgcaaacgccgcaaggccaagcgcgagtcactcaaatctaaatctcagtgggataaagaggctcaatcagctttcaatcgctacatcaggatccgcgatgaaggtaagccatgtgtcagctgcggcaatccacttattggcaaaagcaattacctaactggaagcgccattgacgccagccattaccgttcgcgtggtgcggcctcgcatctgaaattcaacacattcaacgtacatagtgcctgcacacgctgtaatcgccagttgagcggcaatgctgtcgagtatcgcatccgtcttatcgaccgcattggcctggaacgagttgagcgtcttgagtctaacaacgagccgcgccggttcgatatcccatatctgaagcgcatcaaatccatattcacccgcaaagcccggttgctggagaagcgccgcgcacgtcaacaggagcacgcagcatga

SEQ ID NO: 85248 - DNA, 171 bp, Citrobacter koseri
atgtctactccactttcccgcgtcatcgccaacgaaatcttccgcgttccggctcaccgcaagcgtaagccagtggttaagccgtccgacatcccaacactgaaaggctacaccgcccgcctggtggatcagaaatggctgcgtctcgcggcacggaggaaccatgcgtaa

SEQ ID NO: 85249 - DNA, 456 bp, Citrobacter koseri
atgactctgccagtagacggcatcaaactccatcgcggcaacttcgcggccataggtcagcagattcagccgttgctggatgccgggcaatgtttccgcctgcaagtcaaaccttggcgcgagaagcgcagcctgtcgcagaacgctctcagccacatgtggtacaccgaaatcagcgactacctgattagctccggtcgcaccgacgccacccctgattgggttaagcgcaacctcaaaaaaacctatctcggcagcgaagaggtgacatacaccgacttcattaccggcgagaaaaccacgacctgggagccacgccacaccgccgatctcgataccggggaaatgcatatcttcctggtcaaggttgaaatgtggtgtgctcagttcggcctggcgctgactattccgaacggctgcgaataccagcagttgcgcgataagcaggaggcctga

SEQ ID NO: 85250 - DNA, 213 bp, Citrobacter koseri
atgaccaagaaaaaagtcgtcataagaggcagttctgctgatggtcaaagtttcatgcatgaagttagccataaaccagatgaatttggtgcctatgggtgcattgtcatagaaaaaagtcgcatactgggaacgcaacttacttattttattgagaaagatacaaaattaaatggagatcaatattttattgatttaaccaaccctcgttga

SEQ ID NO: 85251 - DNA, 630 bp, Citrobacter koseri
atgagcactattaccagacaattcaccaaagagcagttaatcgagcaagccaggaagaatattgaggttcttcgcggtgcggtggaaagaattcctggcgcttctgatgcggcggttattcacctcaagctagctgaaattacgctggcatcgcttgacgctggcagcaacagccacccggccagcggctcgctatcagattaccgcctgcaccgcattcgtgaaattctgagcaaagcagcagcacaacgcgacggcggcaatctcggttacgcaatgtctgatgctgtgaaagcgattgatgaagtgcttgaagtgaggaaggcggagccggttggtgaagttgtcctcggcgaatatgacgattgcggacgtcatcctgatgcaagggtggtgtgcatagccgctgatggtcaggctgactgggaaaacttcagggacggaacccgcttatatgccgtcacgcccgcaccggtagttccagaagaagccacgcctggcaatatcgagattctggcaagcgcacgcgttgatagcgtcgtgttccagtgggatgaagaccagcgaaacgcggccgccgattcctggaacgcctgccgctccgccatgctcaacggaggtaaatcgtga

SEQ ID NO: 85252 - DNA, 456 bp, Citrobacter koseri
atgaaaccgacatacgaagaacttgaagcgcaggtaaagcaactggaggcagacaacgaaaaggctatgtctgtcctgaaagaagcaaatgacgcggtactgctggctaaatcaaaatttgaggcgctggctgcggaaaatgcggccgctaagcatgcggtgcaggcattttgcgatgtcgttggtgctaacaccgatgctatctgcgaagaggttggtcaggagggagtgaaggccatccttgcagcaatgagcgcgacaggaaacatgcccgccaccgacgctttcctggctgaagtgcgggcgcagggtgtggagagttatgcagaacaacttaactctgaggctgaacgcgctaatgaaacaggctgggatggcgccgctaaattcctgcgctctgaactcgagaaggtgcgcgagttcgcagcccagcttcgccagggaggtgcagcatga

SEQ ID NO: 85253 - DNA, 156 bp, Citrobacter koseri; identical to SEQ ID NO: 17641

SEQ ID NO: 85254 - DNA, 786 bp, Citrobacter koseri
gtgaatatatcgaacagtcaggttaaggggctgcagcactctgcgcgcgcggggcttcgctcgctgtaccggccggcgccgcagacagcggttgagtgggcagataatcattattatcttcctaaagagtctgcctaccaggaaggccgctggcaaaccttgcccttccagcgcgcgataatgaatgcgatgggaaacgactatatccgcgaggtgaatgtcgttaaatccgcccgtgtcggctattcgaaaatgttgctcggtgtctatgcatacttcattgagcataagcagcgaaactcccttatctggctgccaactgacggcgatgctgagaacttcatgaagtctcacgtcgagccaacgattcgcgatattccttcattactggcgctggcgccgtggtatggcaagaagcatcgggataacaccctcagcatgaagcgcttttctaacgggcgcgggttctggtgcctgggggggaaagcggctaaaaactaccgtgaaaaatcggtggatattgccggttatgacgagctggcggcgtttgatgaggatattgagaaagaggggtcaccaacattcctcggtgataaacgtatcgaaggttccgtctggcccaaatcaatacgtggctccacgccaaaagtaaaagggacctgccagatcgagcgcgcggccaaagagtccgagcatttcatgcgttttcatgttgcctgtccgcattgcggtgaggagcaatatcttaaatttggcgataaggaaacgcctttcgggttcaagtag

SEQ ID NO: 85255 - DNA, 225 bp, Citrobacter koseri
atggaagagctaattacaagcatcaaaaacattcagaaagaagctgaaaacgcattctcatactgtgcgatgccatttgatcgtcgcatggacgctatcaacgaatggaaccgtcttttatgtcctgacaacgtaaagatgcttattgaggcgatcgaggaaaaagataaggaaatagaggagctacaagagactaactacctgcttcaggaacaaatcgaatga

SEQ ID NO: 85256 - DNA, 669 bp, Citrobacter koseri
atgacacagaaagaaatcgttacctacaaaggttttaatgcggatatgaagtgccgcgactatcagtttgaaattggaaaaacctaccaccatgaagggaaagtagaggcttgcggttctggattccatgcctgcgaatgccctttcgatgtttttggttattatccgccagcagacagtcgctatgcggaaacaatctcttttggtgtcactgaccgtgaagaggatggcgacaccaaaatagccagcgccagcattaccattaaagctgaattaacgcttccacaattcatccagcgcggaatcgaatggatctggagcaagattgataagtcgcttgaacagcagatcatgactggcgactggtcagcggcaaccaacactggcaaccggtcagcggcaaccaacactggcgactggtcagcggcaaccaacactggcgactggtcagcggcagaagtttctggatcacactccgtggctgcatcactcggcattgaaggtaaagcgcgagcatctgaaaacggtgcgattgtgctctgccatcgcgatgaagatggcgtgttgattcatatccgagccagtaaggttggtgaaaacgggattgaggcagatacctggtatcaactggatgagaacggtgaatttatcgaggttgaagatgaataa

SEQ ID NO: 85257 - DNA, 162 bp, Citrobacter koseri
atgacagtcacccacaacggcaagcagtacaccgtttcaagaatggccgacggtcatcactggcaactgacctccgtcgataaaccccgagagaaaatcacgatgaaccgctggcagatggatttagctgggttattgcagcaggtcgaggagaagccatga

SEQ ID NO: 85258 - DNA, 159 bp, Citrobacter koseri
atgacagcggcagaacggtgggatgaagagtcgttccttcgccttatgcgcgacgtgatcccagaaaagccagagagcgatgacgagccagtaaatctggcagccgagcggcagaacccgatgattagctgggatgaatttgccggtaattttaattaa

SEQ ID NO: 85259 - DNA, 867 bp, Citrobacter koseri
atgaaattcgaaaaagccatgaggaagaaagccaagctacggctggcacttaccgggccaagcggttcagggaaaacctatagcgcgctgattatatgcaaaagcatgggcggaaaaacagcagtgattgataccgaaaagggaagcgcatcactgtactccaatgaatttgatttcgatgtgctggaattggatcccccatttagtcctgagcgatttattgaagccattggcgctgcggaagcggcgggttatgacaacctcgtcatcgactcaatctcgcatgaatggagcggcgttggtggctgtcttgatgatctggacaccattgccaaaacaaaatttaagggtaacacccacgccgcctggagcgcattaaccccacgtcatcgcaagtttcttgacgccattcttcgtgttaattgccacctggttgcaaccatgcgtagcaaaacggaaacagcacaacaggaaggaagtaaaaaggttgtgaagttggggatgaagactgagcagcgagacggcgttgaatatgaatttaccaccgttctagatatcaaccatgaaactcacacagctacggcatcaaaagatcgtactggtttgttctcaaatgctgattacacggtgctggatgagtcggttggcaagcgtcttatgggatggctaaacgatggtcgttctaaagcagaaatagaccttgctcactttgtcacctcagcagaatcagcaccttctttcgaacaactgaaagcggcctgggctgaggctttcaggacattacgagacacaccagagcaggcgaaagcacaggaagtatatgaggccagaaaggcagaactaaacggcaatgaacaggtggcgtaa

SEQ ID NO: 85260 - DNA, 537 bp, Citrobacter koseri
atggctagcaaaggcgtaaacaaagtgatcctcgtcggtaacctcggacaagaccctgatgttcgctatctaccaaatggtggcgcggtagccaatatcacactggcaacttcggaatcatggcgtgacaaatcaaccggcgagatgaaagagcagaccgaatggcaccgggtggtgctgttcggcaaactggcggaagtggccagcgaatatctgcgtaaaggttctcaggtttacattgaaggtcagctgcgtacccgtaaatggaccgatcagtccggtcaggacaaatacaccactgaagtggtggtcaacgttggcggcaccatgcagatgctgggtggccgtcagggcggtggcgctccggctggcggcaatatgggcggcggtcagcagcagggcggttggggtcagcctcagcaaccgcagggcggcaaccagttcagcggcggcgcgcagtcccgtccacagcaacaatccgctccggcaccgtctaacgaaccgcccatggattttgatgacgacaccccattttaa

SEQ ID NO: 85261 - DNA, 165 bp, Citrobacter koseri
atgaaagcctggagcatagaagaactatcagcgctcatgcgctacacaaacgcagaagtcgcagagatgacaggtcggagcatcgaagaggtcggagataagcggctgcaggtgaatatcgagcgtaatggctgggataaacgggatccggagcgtgcatcatga

SEQ ID NO: 85262 - DNA, 219 bp, Citrobacter koseri
atggccgacatcatcgataccgcagcagtgactgaagagcttcagcgtaacgctgccctttccgctcaccgcatcgaccgcaacgctgtatcagctgagcattgtgatgagtgtggcgaggatatcccggcgcctcgccgcgctgccgttcccggctgccggacgtgcgcggattgccagggtgtaattgagcttcggaataaacagagaggtatgtga

SEQ ID NO: 85263 - DNA, 393 bp, Citrobacter koseri
atggattacagcgagttgagtgactatgaagttagcaagcgcgtagctatggcggtcggcggcttcctcgaagaggatttttgcgaaactcattcagtgatttttagacgtcatggtcggcatcaatactcatttttcgaaccatgtacaaacccatcagacgcatggcccatcatcgtagaaaacaaaattagccttaattgggctgaagttgaaaagtcatggtgcgcccatgttggtggggtgatgacggatggttgttggtgttgggattatgacccagaccatcatcaggacaacgtcaacccactccgcgccgcaatgattgtgttcctcatgatgcaggagtcagccaatgttccagttaattcaacggggtcagatttacgctga

SEQ ID NO: 85264 - DNA, 225 bp, Citrobacter koseri
atggaacatgataagaaaacagcacaagaagccatgattaaatcgcaaggtgtctgggatgatgatgaaaatgaagatacttttgcactagcaagggatgtcagtgaccagctatcaataatagttaacgcctttgacaaagataacgcacaagaaattattgttgcggcagcgggcgaaattcagtccttagtacaaaaagattgtattgaccggagccattaa

SEQ ID NO: 85265 - DNA, 657 bp, Citrobacter koseri
atgaaaatgagttcaataaagacggtttatgattttatgcgttactgccgtatgccgctatggtttcagcgttcaatcagggatatgaaagtcggtgacacttttattcttggaaaatacactcaacccgtttcttgcgacagtgattcattttgtgtacctccacgctattcggcttgtctggatggtagcgaggcttgctttgttgcggaggcatggatagaaaaagagcgaggcgtgtattcattttacgccacatggacattcccgacaaaaccagaacgtgcgcatgttatgacttttggggaattcagaatccacaaaggcggtattatagagtttgataataaaaacgttgaacttgacgataagaaccatgcggtaagaagtttcgcgcttgtatctcgttatctcgctcatatgctcaactgcatgtctgatgaagataaaaaagtctattttaagaataacagtttcccattattcaacggcgtatggctggatagtgattgtaatgaaaggagacagcgtgcggtagaagtagatgggaaaattaaacgagtatggattaattacaaagattatatgccaacgcatcagctttcagcaattgttgaagctgcctttgctactggcgcacttcagctggaggattaa

SEQ ID NO: 85266 - DNA, 774 bp, Citrobacter koseri
atgatgactgaatccgataaagaacgtttcaataaccgtatatgtgttggtcatgtgcttgtcagtgctgacatttatgtaacgcctgttatgactgaaagcgctgctgaggtggagttaactgtccctaacgataattatcaaaaggcaatggatttgtatgatcgtatttgccagtttgcattgcttcacggtgaagatttacaaggactattccagactagcagatattactacatgtcatgtttcgtgcgtgaaattgaagcatttaagaaagaatttgaaaaagaggaagaactaaaacctttatttaatcatggtaagggtaaaacggctgagtttcttatcagtttccccgaaaaggctaattatgatgataaggagcctgttaaaaaagcctttcttgaaatcacacaaaagcatgttgattcattagatgaaattacatggggtaattttgaacacagagcattcacaggcggaacggtaggttttggcgtcaacccccatacattggaacgcattaactttgatgatgagcgagacaaaataacaaaactatctcgtaaggatttcgtggcgtctaatctcacatcttctttcgaagatgatttttatgtcaatcctttgttcaacgatgcaaaaaaaattggtgagattgacggttatcccgtctttttcaatcccaaggggttttatttttactggaacaaagaaaccgaatacctgcttgagagttggttgacgttccctgcttatccgtatggctggtaa

SEQ ID NO: 85267 - DNA, 327 bp, Citrobacter koseri
atgaaagtaattaatgcacctgatgcaagaggtttgagaatcaccgggattgaaattatagatagtgtcaaaacggttgcttctgctttttctgaaatcctgttgtttatgttctggtttccggcaattgtctatgggctttatcgtgtagttatcgctttatgggatgcttccttaaaacctcaatcgctcatggagtttattaatttcatggttgagttatacagctatgtacttccttcgttggctgttatcgcagtagctttaatcgtcgctttatccctttttaaaagactctcagcaatatgggaggaaagaaaaaaatga

SEQ ID NO: 85268 - DNA, 873 bp, Citrobacter koseri
atgaggcttatcgtgaagacagtaacgggattaacgaaagttagacatagaaatgaagttggggtaactcttgcatccctttccctttcagcaaaaagagtgctttttctggctctttgccagattgatacaaaggaaatgttagatgatgatattttggaggttgatgctgactttttttcaaaagctacttctttagataaatatgcctcttatgcagctctgaaagagggagctaaagttctttcttcaactacgttagttttaaacagagatgatttaaaaaatttggctgatgaacttgggatactatcatctaagaataaaattcctgatcgcttggatttaaacttaacagaattctgtgcctattacgatcatcttgccactgtacggataaaattcacaaatacagctaagcgatatttctctaagttgattggttctgaaaatagatataccactcaggtcttgaaatcagttgtgttgttgaatagtgtaaactcaacaaacctttatcaagtcattaggaaatattacagtcagaatagttcaagaaaatcttttgatatatcagtggatgatttaaaagaggaaatggggctttatacaattgaggaaggggagaagaaatataagtatcctaaatactcattttttgttcgtgatgttatcaataaaagcattaatgaaataattgagaaaacggaaataaataaattatctttctctgttgttgggaaaaaaggaaggatggctcacatgcttagatttgagtttagtataaatgaaaaatccccatccttttcggaagatgatatggcatttttagaggagtttgacaaagtcgttccaccaaaaacgaataagtga

SEQ ID NO: 85269 - DNA, 3147 bp, Citrobacter koseri
atgattgaatggattatccgccgctccgtagcgaaccgttttctggttgtgatgggggcgctgttcctcagcatctggggaacctggaccatcattaacacgccggttgatgcgctgcctgacctgtctgacgtgcaggtgattgtgaaaaccagctatccgggacaggcgccgcagattgttgaaaatcaggtgacctatccattgacgaccaccatgctgtcagtgccaggcgcgaagacggtgcgcggtttctcgcagtttggcgattcttacgtgtacgtcatttttgaagatggcaccgatccctactgggcgcgttcccgcgtgctggagtacctcaatcaggtgcaggggaaactgcctgcgggcgtcagcgcggaaatggggccagacgccaccggcgtcggctggatatttgaatatgcgctggtggatcgcagcggtaaacacgatctggcggaactgcgctctttacaggactggtttttaaagtatgagctgaaaaccattccgaatgtggcggaagtggcctcggtcggcggcgtggtgaaagagtaccaggtcgttatcgacccgatgaaactcacgcagtatggcatcagccttgcgcaggtgaagtcggctctggacatgtccaaccaggaggcggggggctcctccgtcgaactgtcagaagcggaatacatggtgcgagccagcggctatttgcagaccctcgatgacttcaacaacattgtgctgaaatccggtgagaacggcgttccggtgtaccttcgcgatgtcgcccgcgtacagattggcccggaaatgcgccggggcattgctgagctgaacggcgaaggcgaagtggcgggcggggtggtgatcctgcgttccggtaaaaacgcccgggacgttatttccgccgtgaagacgaagctggaaacgctgaaaagcagcctgccggaaggcgttgacgtcgtgacaacctacgatcgcagccagctgattgaccgcgctattgataacctcagctacaaattgctcgaagagtttattgtggttgcgctggtctgcgcgctgttcctgtggcatgtccgctctgcgctggtggcgatcatttcgttgccgctgggcctctgtattgcctttatcgtgatgcattttcaggggctgaacgccaatataatgtcgctcggcgggatcgccattgcggtaggggcaatggtggatgccgcgattgtgatgatcgaaaacgcgcataagcggctggaggagtgggcgcaccagcatcccggcgacccgctggataacgaaacgcgctggaaggttatcacgaacgcctcggtggaagtgggcccggcgctgtttatcagtctgctgattattaccctgtcgttcatcccgatttttaccctcgaagggcaggaaggacgcctgttcggcccgctggcattcactaaaacctatgcgatggcaggggcggccttcctggcgatcgtggtgatcccgatcctgatgggctactggattcgcggcaagatcccggcagagagcagtaatccgcttaaccgctttttgatccgcatttatcacccgctgctgttgaaagtgctgcactggccgaagaccacgctgctggtggcggtactttcgatcctgacggtcatctggccgcttaataaagtgggcggggagttcttaccgcaaattaacgagggcgatctgctgtatatgccttccacgctaccggggatttcggcggcgcaggcggcggatatgctgcaaaaaaccgataagctgatcatgacggtgccggaagtggcgcgcgtgttcggcaaaaccggcaaggcggaaacggccaccgactctgcgccgctggagatggtggaaacgacgatccaactgaaaccgcaggatcagtggcgaccgggaatgacgatggacaaaatcatcgaagaactggataaaacggtgcgcttaccggggctggcgaatctgtgggtgccgccaatccgtaaccgaatcgacatgttgtctaccggaataaaaagcccgatcggtattaaagtgtccggcaccgtgctggctgatattgatgccacggcggagcagatcgaagaggttgccagaaccgtaccgggcgttgcatcggcgctggcggaacggctggaaggaggccgttacctcaatatcgacattcatcgtgaaaaagccgcccgttacgggatgaccgtcggtgatgtacaactgtttattacctccgcagtcggtggggcgatggtaagcgaaaccgtggaagggattgcgcgttatcccattaatctgcgctacccgcagcgctatcgcgacagcccggaaaccttacgtcaactgccgattctgacgccaatgcagcagcaaattaccctggcggatgtggcggacgtgaagattgcggcagggccgtcgatgttgaaaaccgaaaatgcccggcctgcaagctggatctatattgatgcgcgcgatcgtgacatggtgtcggtagttaacgacctgaaaaaagcgatcgcggaaaaggtgcagttgaaaccgggaaccagcgtggcgttttccgggcagtttgagctgcttgaacgcgccagccataagctgaagctgatggtgccgatgacgctgatgattattttcgttctgctgtatctggcgtttcgtcgggtgggggaagcgctgctgatcattaccagcgttcctttcgccctggtcggcgggatctggttcctgtactggatgggctttcatttgtccgttgccaccggaacaggattcatcgcgctggcaggcgtcgccgcagagtttggcgtggtcatgctgatgtacttgcgtcatgcgattgaagcggagccgtctctggataatccacaaacctttacggtagagaaacttgatgaggcgctgtaccacggtgcggttcttcgcgtgcggccaaaggccatgaccgtggcggtgattatcgccggtctgttacctattttatggggaaccggggcgggttcagaagtgatgagccgtattgccgcgccgatgattggcggtatgatcaccgcgccgctgctgtcgctatttatcattccggcggcgtataaactgatgtggttgcgcacgcatcaacataagcgctcataa

SEQ ID NO: 85270 - DNA, 516 bp, Citrobacter koseri
atgtatgagcaacttaaagacaacgctggtactgattgcgggcaggctggctcgttgcattgcagcgtggtggtcaaatgttcgcgcccggtgtatcgccgcgcgggtttcgtgttcgttcgcggaaaaaacaccctggaaaatgtttcgccggaacaactggcgaccctgcgttccgatcctgtgctttcactggtatctgaagcgccagtgtcgccggatgctctaccgggggggatggacgttctggatgtgggcggcctgaacgctgcgcatctgaacaccgtgcaggatgaactgcgcgacgttatcacgtctgctgtgacagtagacgtgccggaagcaccttctctttccgtgcgtatccgtcaggctgtcgccagtctggataaggcaaatgccgaccacttcacacagaacggatcgccccgtgtggcggctgtatccggtgtgctgggggaaaacatctcggcggcacagcttaaagccgcgctggaagaggacgccgcagaatga

SEQ ID NO: 85271 - DNA, 336 bp, Citrobacter koseri
atgctaatactgtggttctggatatgcctttttttgattagcgttattgttcatggttctgaaattttaaactttgctattgtttttggttatatatcattattgttttactttttggcaaaaaaagagtctttttttataatcagtagtttctttctatggtcaatccttacaacagctataagtggtttgatccttgagtctggtgtttttctgcctgaacttggtatgatgtcaacgctaaatggtgcgacggctattaatgttagtctcgccgttattacattacctgtctcttatacacatctgacgctgccgacgatactccttgtgtag

SEQ ID NO: 85272 - DNA, 372 bp, Citrobacter koseri
atgattatttgcgactactgcgggaataaagctgcactggttaccgggcgcaagatttatccccatcgacccgatctttttcctctgcggttctggcactgcgaaccatgcaaagcatgggtgggctgccataaaaacagtgacgctcaaccactcggcaggcttgcgaatgcagaattgcgattagcaaaaagtgcagcccaccgagattttgatccactctggaaatcgggcgaaatgacgcgaaaacaagcttatcagtggtttagtaaccaattaggcatcccctctgaaagttgccatatcgggatgtttgatgttgcaacctgccagcgtgtccagacagtttgcgcttcaatgaattgtttctga

SEQ ID NO: 85273 - DNA, 717 bp, Citrobacter koseri
atgatcttggttatatttttcttgggcataacttcacaggttctggtcggcgaaaaatttactggcattttccaaatgcttcttttctttagcgtatgtctccttatcgcttcaaatagtattcttctatgctcattcttgggctttatctttgtaattctggtttggacgagttatttttctctatctggcgatagcacacttgcctttgaatctctaaagattaggattgcagcgcagagccaattatggtgggggcttatagagagtgcggccttgcaagattttggtgcttccgatattatctataatttctttgggataggggcatttccagaagatacaggtatgtcatatcttatgggattggtcatgccgcagcatttattttcggtatatcaggatgcagggattgctttaacaatggcatttcctgctaacatacttttattcttcggaccgttcttatctcttttggtttgtactgttctcgctatttttcttgcgttggcgctatggtttaccgtatttactttaagaaataaggattatgtattattatttatcgcgatgaaggtttttaacattgctatccaatttatattgatgggaagagtgtatctgttatttgaatggaagattattttactcttatttccaatgatatttgctttcatcgcacattctaaaaataggatttcggggactaatgcctga

SEQ ID NO: 85274 - DNA, 339 bp, Citrobacter koseri
  misc_feature (318)..(327): n is a, c, g, or t
atgattaaagatacaatattacaaaaagatttggattttatcgcaaataaaatatttaagggtggcagtttttctaattctactgtgtttattacaggtgctactggtctggtagggtccttgcttgtcaaaagtatactatatgcaaataaaacgttaggaacaaatataaaagttcttgcaagtgtaagaaatcttaataaggcgagagaaacttttttagattttatatctgattcctgcttggagtttattacaatagacttgcttgaaccaattaatatattaaagaagattgattttattgtacatgccgcnnnnnnnnnnatgtcaaggtaa

SEQ ID NO: 85275 - DNA, 222 bp, Citrobacter koseri
atggcaaacttttttattaatcgcccgatttttgcctgggttctggccatcattctcatgatggccggcgccctggcgatcatgcagctgcctgttgcgcagtacccgaccatcgcgccgcccgccgttgcgatttccgcaacctacccggggggcagacgcgcaaacggtgcaggataccgtaacgcaggttatcgaacagaatatgaacggtatcgataa

SEQ ID NO: 85276 - DNA, 2151 bp, Citrobacter koseri
atgaaaagaaaacttgttctttttaacaacaacctccccaacaaatatgattattcattcagcatcgattcattagtcaaacaatttttacaacattatgattgggattcaggcgttccaaactttataaatcatgacatgcttcgcccactttcttggtcaagaacacatggtatatccattgatagcacaagtgtcaatctttttggcgaattatctatcccagaaaacaaaaccgaaagaaaacaaatatacggtcttacaaaaaattatctcgacaagaatatttataacttagatgatgatgataaaaatgaactagaaaacctgattggaaagaatctaattactaaggaaacgaaatttataagaagcgaatgcattaccgcatttggagaaaacattgcacgcgagaaattcccggagttattcggagattatgagaatgacaaaagaaagttagttaatttaaacgaacttaacgccgtcgcgcctggaatattttcctataaaggattgctagtctttgctcatagatattttagaagatcactatctcctttaaataatttaaatactcccttacttaaaatattacaagaactttccgaagacacaaaactttccgtaaaaatattgttagacccccacacccttggtttgccaaattcatatctagagccaatagagttggattattggtgggggcctaagtttgatgactcgttagataaaatccccaatggcgttacaacacatacatcttcaaaagaagaagcattttttaacggcatctcaaaaacagaattttggtggcatgaacaaaacagtataaaatcacttgagtgcgaagaaaccagagatattccctctggtgaaatgcttgagctaggtaataattatggttttaggtatgctcattccatgttagacgataaaggaatcccttttcatttagatggcgcaatacgcttatatgatgaagatggtttcatatcacgactagatacaacgattgataaagcaggcaagaatgcacattactttaagatttggcgtattgatggtgaaataaccgtaccactatggaaacgaatcctatctgattattttaaagataacaggttaatcggagagtattttgatggtaaggacataaagactgagacatttctctccaaaaaaaatgagtatctaaacaaagaaaaaagatatgtttatacaccttgtaaagagcagggaattaatatatacctatcagtaaaaaacaaagaagattaccatcaagccgaagtagtcatcaataacgaagatctaatcactgatactttcgagatgtctaatactatggatgttaaattcataggactaaaaaagaaaatccgttttaaattcgataagttagttgatgagccaaaaaaaataaattttattgcttatgaagatatgaatctcagaatacccgaagtatcatttcatggtgaaaatgcaagaagtcattcattagagtacctacgcgacgttaaaaacttcatcactaacgatatatctttaacggacgatagcgttataactttcacaatatcaatcgattatgaaacattaacactgaaaatctcttgtatgtcctacaagcaagattttttgaaccttgtatctaatgaagagtttgttccgaaagaacagcaacagttaaataaatgggtttcggataatcatgctttgataaaagataaaaaacaaagcactcatactcaagaaacattatttctcagaaacaagaggatttatctcccgttaataatgcttagtgagcatgagtatttaatcgaaggttcaatcataagaataatgtttcacgagtcaaacctagacaataaaaaagggatagaaaataatcacaaacccgttatgttaaatttagtaaagaaaatgacctgtacaaaatgcaagacaagtttttttgaatgcaattgtatttccggcgctaaaagaatcgatgatttttctcttctaggggcctattggtctgataccaattcattctcggaggaaaaacttaaagcattagctttgagtggcgatagagtggcgatagaaatggaaaaaaaaggcccttttctggcaaacgatggcaatctatgtcaatga

SEQ ID NO: 85277 - DNA, 576 bp, Citrobacter koseri
ttgatacttgatactcaggtgaataacgacgagttactggatagaatttgtcaagtatatggttttactcaaaaaatccagctagcccggcacttcaatattgcagccagctccctacaaaatcgctacacgcgaggcactgtttcttatgatttcgcagtgcagtgcgccttagaaactggagcaagcttgctatggctacttacggggcaaggctctcaatatgatggaaaaccatccccaacggatccgaaaacgatagactccttcactcttagtgatggaaagctcgaagaaaattcaccattgagtattgatgccggtctttttagcaagcaaatgtcaaaaggtattgctgttcgcgccgatggaaagctgcacttcatagaacaagatgcttcactttctgatggcctttggttggttgatattgagggggctaccagcatcagggaattgactctcctacccggcaaaaagctacacgttgccggtggcaaagtaccgtttgaatgtgggattgacgaaataaaactgattggccgtgtagtgggtgtatacagcgaggttaactaa

SEQ ID NO: 85278 - DNA, 264 bp, Citrobacter koseri
atggcttctgaaatcgcaatcatcaaagtgcccgcacctatcgttactctgcaacagttcgctgaacttgagggcgtttctgaacgtaccgcttaccgctggacaaccggagacaacccatgtgtaccaatcgaaccccgcactatccgtaaaggctgcaagaaagcaggtggcccgattcgtatctactacgcgcgctggaaagaagagcagttgcgtaaggcgttgggacattcccgttttcagctcgtcatcggtgcttaa

SEQ ID NO: 85279 - DNA, 510 bp, Citrobacter koseri
atgtttgattttcaggtttccaaacatccccactatgacgaagcgtgccgggcttttgcgcagcgtcacaacatggcgaagctggccgagcgtgcgggtatgaatgttcaaacgttacgtaacaagctcaacccagaacagcctcaccagttcacgccgcctgaattgtggctgctgactgacctgaccgaagactcaaccctcgttgatggttttctggcgcagattcattgtctgccatgcgtgccggttaatgagctggctaaagataaattgcagtcttacgtcatgcgcgcaatgcgcgaactcggtgaactggcgagcggtgctgtatctgatgagcgtctgaccactgcccgtaagcacaacatgattgaaagcgttaactccggcattcgcatgttgtcattgtcggcactggcgctgcatgcacgtctacagactaatcccgctatgtcgagcgtggtcgataccatgagcggtattggcgcatcgtttggtttgatttga

SEQ ID NO: 85280 - DNA, 228 bp, Citrobacter koseri
atgctgaaaagtgaaccgtcattcgcgtctctgctcgttaagcaaagccccggcatgcattacggccacggctggatcacaggtaaggacggcaagcgctggcgcccgtgccgctcacagtccgaattattaaaagggctgaaaacaaagtcgccgaaatcgtcaggttttttaattattcgtattgtccactttgtaattaaaggagtaaaacatgtcacgcgatga

SEQ ID NO: 85281 - DNA, 201 bp, Citrobacter koseri
atgtcacgcgatgaattaagaattgttttaggtgccatgattcccaatatggaggaaggttttgaaattaaaacccgcgacggcgcaatacttcgcgttgaccctgagtgggagtgctgcaaagaatttaaggatggattaaaaaccgaaatcatcaagcagttaaaaagcaagcctgctgttgtatttggatatagttaa

SEQ ID NO: 85282 - DNA, 234 bp, Citrobacter koseri
atgagcagaactatttatttatcaacgcagagtagtgctggcgaccacgtgctggagtctttgtttaaagaagccaaaaaagaagagcgcaaagaccgcgctctcgccgtttcaatccgtctcgaagctctggccgttcacattaccaattcagatatgaccggcaaagaagcggccgaactgctgcgccgcgaagccactcgctttgagaacgaatcacaggagctgcactaa

SEQ ID NO: 85283 - DNA, 222 bp, Citrobacter koseri
atggccgacacaattgatttagcccaacagcgtgagcaggaagaccgcgagcgctacatcaacaaagcgcgcagccgtatcgctgcgccttctcgtttcctctgcgaagaatgtgacgcaccaatcccggaagctcgccgcattgcgattccgggcgtggccttttgcgtgacatgtcagcaaatcgcggagctcaaacgcaaacattacaggggcgtataa

SEQ ID NO: 85284 - DNA, 279 bp, Citrobacter koseri
atgggtattcgtatcgaagtcggcgacaaatgggtaattaccagcgaccagtatcaattcatcctgaatgaaaagaaagtcattaagtctggtaaaaacgctggagaggaatggctcgatactatcggttattacccgaagattaatcagctcatttctggtctggtacatcaccacattcatacggcaatgattatttcccttagtgcaatggcagaggaaatagagaagttatcttttatctgtgaagaagcatttaaggcggttaaaaatgattga

SEQ ID NO: 85285 - DNA, 999 bp, Citrobacter koseri
atgattgattcccgctgctttgctgaaagcacaataaatattgtttctggtggaaaggacagcctcgctcaatggattcttgcggtagagaacgacgtaccgcacaccactgtttttgcagataccgggcatgagcattcccaaacaatggagtatctggattatcttgaatccagactcggcccggttattcgagtgaaaaccgattttactcggcggattgaaggcaaacggaaattcattgctgaaaaatggcctgtctctctcgttgaagaatgcggaatgtctcatgagcaggctgcagaacgaatcgcaaaggcactggaaatccttaagccaaccggcaatccgtttctcgatttgtgcatgtggaaaggacggttcccgagcacgaaagcaaggttttgttcactggaactgaaacatgactcagtacgggacaagattgtactcccagcgctggagaaatatgacgaagtaattctatggcagggtgttcgtgctcaggagtcactagcccgcgctgctttacctatgtgggaggaggatgcagataatacccccggtttgcatgtgtatcgcccaattcttaactggacacatgaagacgtatttgccttagctaaacgacacggaattaaaccgaacccactctatcagcaaggctgtagccgcgttggctgcatgccatgtattcatgcaagaaaatctgagctggcagagatttttgctcgctggccggaggagattgcgcgcgttgcagagtgggaacgtcttgttgctgcctgttcacgtaggggaaactcaacatttttcccttcgactcacgacccgcggcgagcagaaaaacgtattgaagttgttaccgtagaagaatatgggatagcttcatatcgtgactgggcgatgactacgcgcggcggttctcagtacgatttgctcgctgctacaaacgacaaaaccgtgtgcagtagcgtttatgccggtgtatgtgaatga

SEQ ID NO: 85286 - DNA, 2241 bp, Citrobacter koseri
atgacgggtgtcgtttacgcgtttccgtggaatgccccacggtcggcaatagtcagcccatatcttacctatgaccaacagtatcgccgcgaccgtatgttcgcggctttgctgcatgcgagaaaggtgctttccctccagcctgagtgcgtgcgttttgatgtttatcgaaccgctgcggtactggagcaaaatcagggcagtcaacgagccaatgcttttttaatcagcttctgcaaaaaggcattgccgcgtcttgaactggtcgcaaaaaaatacgagtgcgcgggtattaacagcaatgtatcagccgctgttttcgatggtcattttgatacccagcttatgcaatatctggcgtcacgcatggtcaatatggtcgccagatttaaccgcctaccggatatgtcgcgcgccgatattgacctgctggccgctgatatcgctaatttcattcgcgccgaactggctgatattgatgacaccggatttagcgaactcaaaacgctgtacacctggtacatgcgcgctggttttatttccctgcaattcaacgttacaccgccgaaatgggagcgtgtgactaaaaaatattttggcgaggatgaaatcgcaccggcagtaattcgaatgtttaatgaggtttggtggcgtggtcgtttacgtcgcattgcgtctgcatggcgcgaacatctacaaattgctgctggcaacgtcagtaagaaaaagcacgtctatgcgagtaaaaactgcgtgactgactggcgcgagcagaagcgccgtacgcgcgaatttcttaaaggactggaactcgaagacgaagacggcaatcgcatcagtctgattgaaaaatacgatggatcggttgctaaccctgcaatacgtcgctgtgagctgatgacccgcatccgtgggtttgaaaatatctgcaatgagctcggttatgtcggtgagttttacactctgactgcaccgtctaaatatcacgccaccaccaaagcgggctaccgtaacagcaaatggaacggtgccagcccatcggacacgcagagctatctaaccggtctttgggcacgcatacgcgccaagctacaccgggaagaaatccgcattttcggtatacgtgttgccgagcctcatcacgacggaacgccgcactggcacatgcttatattcatgttgccggaagacgtcgagcgtgtgcgtctcatcatccgtgattatgcgtgggaggaagacctccacgaactgagaagcgataaagccaaaaaagcgcgctttcatgccgaagccattgacccagaaaagggcagcgctaccggctatgtcgctaaatacatttccaaaaacatcgacggatatgctcttgatggtgaaaccgatgacgaaagcggtgagctgctgaaagagacagcccccgccgtatcagcatgggcggcgcgctggcacatccgtcagttccagtttatcggcggtgcgccggtgacggtctaccgtgaattacgtcgtctcgctgataccgagaccgcgcacggtctgagcgttgagtttgctgccgtccatgatgccgccgacgctggtgattgggctggttacgttaatgcgcagggtggtccgtttgtccgtcgcgatgatttacaggtgcgcacgctgtatgagccgcgccccgagtttaaccagtatggcgaggaaacagtctgcattcgtggcgtctacgactctgctgtcggcgcaggcaccccgattttaacccggttaacgcagtggataattgtgccgaagcgtgccgttgatttggccgttgacgttaagggcgctcctgcgccctctcggagttctgtcaataactgtacgggaagcgaatacgatccaccgatactggatttaacaaaacctttgaatcggcgtgaaagaagagagctgaccaaccgacttaggaagcaaaagccagcaatacggcgaaaattcatccacggaacgggtgagcaaaacgcagctatagcgaaaactatcgatgagatacatctgacaaccggcatcacaatcagccggggcgaagcccttcacctgatgtctggtggtaaaagttgctttgatggcaaatggctacgcggaacggccaaaggagaaatatttaccgcagcgccatcacatcaggtgatagctaaggagtatcggaccaaagctatagagatcctcaatcgtgttgcggttttagcggagctaacaaaggaaatttaa

SEQ ID NO: 85287 - DNA, 441 bp, Citrobacter koseri
gtggatagagagctaagtcagcacgttatgattgagcgggtcgaaatgattgctcgtctgacggctgaagggacttgtcaggaaagagaccgtgaaatcgcattgaatttaattgcggagatagcaagaggcaacttaatgaaaaacaataatttttctgttgttttttccgcgccgccagttgatgaaacctttgcgaaggagggcaaagtgagagtaaatatcacattagataaagaccaaataatcggccaaccggtgattgatgcttttcagagtgaattgaccaagcgaatacagtcagtttttccttcaactcgcgttaatgtcaagaaaggttctatgactggtgttgagttgatggggttcgataaggattcagaccgcgaagcgctggacgctattcttcaggaagtttgggaagatgagagctggcgttaa

SEQ ID NO: 85288 - DNA, 156 bp, Citrobacter koseri
atgaaaaatgataaattaaccaacgaacagcaggcgcagagcaagtcaaaccggaagaagtggatcgcttttgcttgggaggcgattaagtggggtatccgactacttgatctaatcactcgattagttgatcgctttgaagggggagatgagtaa

SEQ ID NO: 85289 - DNA, 309 bp, Citrobacter koseri
atgttacataaagcccttcgtttgataaggcaataccataaagaatcattagttgatttatcagcatctttaggtattccaaaagatagaatagtagatctagaaagcggggtttggtctccgtcgattgaaatcttacagcgttatgcatcccatttcgacataccagtatcctctttagtatttttttcagaatccttaggcactcaagggcgtctgtctaaacgattacgtttgaatttagctggtaaagttctggatatcgtagagtgggtaagtaataaaaatgaaaaaacggaaaaagcttaa

SEQ ID NO: 85290 - DNA, 897 bp, Citrobacter koseri
atggattcgccattttataaactcaaaagcaaaaagaagcttgcagggcttctttgtattagtgttaatgatttatctattttgaaaaatgatgaaggtaattattccgttttcgatcaactgtctaaaaaaggcaagtcacggaaaatacaaaagcctttagataaattagatgtagtacatacgagaattgcaagtttattgtcacgtattgctttaccagaatatctgcattcggggaagaagaggtgctctaatgtgacgaatgctaaagctcatcttaaccatgaaaagatgatgacaactgatattaaggcatttttcccttcaacaactaggataatgatattttcatttttcttttcagtgatgaaaacgtcatctgatgttgctgatattttgtcgcacatatgcacctgtcatgaccggttgccaacaggaagtcggatcagtatgcctttggcctactttgcaaactctagaatgtttggtgagatgtatgaactttgccaaaagttaaaggttaaaatgactgtgtatgttgatgatcttacgttctcgggtgctaacgtaaatcgattattctgcgctgtaattcgtaaggttatcagcaaacatgggcatatcatgcatccaactaaaacgaaattatatgctaaggacaaacctaagttggttacgggtattattgtattaggtgatgctttaaaggttagaaatgagcaacatcgattaatggcaagggatattgaatactggaaaataatcaaagatgcggaaaatgcgaaagaaacatctattgcgaaaacactctttggtcgtttgcattcaatgggtgtcattgaacaacgctataaatcaaaagtactcactttaaaagtgaatactgcaagttaa

SEQ ID NO: 85291 - DNA, 132 bp, Citrobacter koseri
atggcctcaaataacgacctgagttctcgcgaggtggaaagctacaccgcaaaaatggtcgagcaagccagtaaagatgagcttacagtcgttatcaaacaccttttaaatcacatcagaatgcacaaataa

SEQ ID NO: 85292 - DNA, 837 bp, Citrobacter koseri
atggcaaaaaaaatctctaaatggtttcgcatcggcgtcgagggtgacacctgcgacggtcgcaaaattactaagcaagatattcaggaaatggccgacggctttgacacgcgtgtctacggttgccgtatcaatctggagcatatccgcagcgttattcccgatacgccgttctgtcgctacggcgacgtcatcgacctgaaagccgaagtgattgacgatgattctgcgctcaacggcaagctggcgctgtacggcaaaatcgcaccgctcgacaacctgctagccatgctggagaaaggccagaaggtttatacctcgatggagattcgcccgaattttgccgaaaccggcaaatgccacctcatcggcctggccgtgacggatgacccggcaagcctcgggactgaatacctgcaattctgcgccgccggtaaaaaagaacagccgggcgacctgttttctgttgcgaccttcgccgagctggaattcgaagaccagcccgaaagcatcttcatcaaactgagcgacaccgtgaaaggtattttcagccgtaaacaggctgatgacgacgcgcgattcagtgatgtgcatgaagccgtgaccgctatcgccgaacaggtacagaccggcggcgaaagtgccgaagcgcgcttcagtaagcttgaaagcgacatcgccgccgtcaaacagtcgctgaccgagcaggccaccaagaccacgcagcaactcagcaccatcaaaaccacgctcgataaaaccgaaagcatcacgcagccgcgccgcaaactgagcaccggtggcgatgctgtgacgaccacgctgaccgactgctga

SEQ ID NO: 85293 - DNA, 1155 bp, Citrobacter koseri
atgcgtaaagaaacccgctttaagttcaaccagtacctgagccgtatcgccgagctgaacggcgtcgaagtggccgacctcaacaagaaattcaacgttgagccatctgtcacgcaaacgctgtttgataaaatccagcagtcgtcttccttcctgaagctcatcaacatggtgacggtgggcgagctgaccgaagagaaagtcggtatcgatgtcaccggcactattgccagcaccgcagacaccgcgaacggcgacgagcgtcagaccgctgatttctcgaaactggatgcataccgttacttctgtcatccggtcaacttcgactatcacattcagtacaacaagctcgacctgtgggcgcgttatcaggatttccagatccgcatccgtaatgccatcatcaagcgtcaggcgctggattacatcaccatcggttttaacggtgtcacccgtgcggcgacgtccgaccgcaaacaaaatccactgcttcaggatgtggccgtgggctggttgcagaaataccgaaacgatgcgcctgagcgcgtcatgtccagcattaccgacgccgaaggcaatgtgacgtcaaacaccattaagattggcaagggtggtcattacgcgaacctcgacgcgctggtgatggatgcattcgagtcgctggtcgaagagattcaccgcgaaaacccggaaatggtggttatctgtggccgtcgtatcctgaccgacaaatacttcccgatgattaacaaattccaggcgaatacggaacagctcgccggtgagctgatcatcagccagaaaaccatcggtcagttgcaggcggtgcgcgcgccattcttcccggcgaacagcatttttatcaccacgctggataacatttctatctatctgtatgaggacggccaccgccgccacatcatcgaaaacccaaaactcgaccgtgtggaaaactacgagcaggtcaaagtcgactttgttatcgaagactatgaagccggttgcctgattgaaaatatcgagattctggaacctgaagaggacgccacgaccgagccgaccagcgcggacgcattcgctgccgcgattgtgaaagcggtacaggcgatgggcgtaaccgccccggctgaaaccactgaaggcggggaggcgtaa

SEQ ID NO: 85294 - DNA, 747 bp, Citrobacter koseri
atggcgagccccgcacagcgtcacgcgatgcgggtctcggccagtaaagcatcgcaacgggataacgccccgttgcgtaatgcttccgcttacgagcaaatgctcgtcaagctggccgcagaccgccggacgctaaaaacaatccattcgaaagagcgcaaagcggcgaagaaacgcgaactgctgccgctgtatctgccgtgggtcgctggcgtgctggaaaacggcaccggcgcacaggatgacattctgatgacggtgatgctctggcgtctcgatgcaggtgatatcaccggcgcgattgaaattgcccgttatgcgctgcgttacaacctgtcaatgccgggtcacgcccgttccgcgccgtacatgctggctgaagaggtggcgcttgccgcactgcgcgcccgcgccgccggtgagccggtcgacgtatccgaattactgagcgtcattgagcttacgcttgccgccgatatgcctgatgaagtacgcgcccgtctgcataaagtcaccggtctgaccctgcgagaaggtggtcagctcaatgatgcgctggcgcacctgcaacgggctttacagctcgaccctcatgtcggcgtgcgtaaagacattgagaccctcagtcgtgagctgaacccgaagccggttgctgtcaaaaagaccgcgccaaaaaagacaccgactaaaaacacaaattcaccggcaaaacgagggcgcggacgccctaagaaagttgccggttaa

SEQ ID NO: 85295 - DNA, 1170 bp, Citrobacter koseri
atgattacgggtatgaccattgatgccggtgccagccttgcaccggcatttatgctgacgctgaacagccaggacattaccagcaattttagtgaccggctgatttcactcaccatgactgataaccggggttttgaggctgaccagctcgacattgagctcgacgacaccgacggcaaagtcgagttacccctgcgcggggcggtgctgacgctgtggcttggctggcaggggacggcgcttctgaataagggcgattttacggtcgatgagattgagcacaggggcgcgcctgatacgctgaccattcgcgcgcgcagcgcagactttcgcggaacgctcaattcacggcgtgaagaatcatggcacgacaccaccctcggtgagctggtcagcaccatcgcaaaacgcaataaactgacggccagcgtcgcggattcactgaaaaaaatcccggtgccacatatcgaccagtcgcaggagtctgacgcggtatttctgacccgactggcagaccgcaacggggcgacggtgtcagtgaaagcggggaaactgctgtttctgaaagccggtagcgcgatgacggccagcggcaaacccgtcccgcaaatgacgctgacccgcagcgatggcgaccgtcatcagtttgccattgccgaccgtggggcttataccggcgtaacggcaaaatggttgcacaccaaagacccgaagccgcaaaagcaaaaagtgacgctgaaacgtaagccaaaagagaagcacctgcgcgcactggagcatccgaaagcaaagccggtcagcaaaaagacaaaggccaaaaaagagcaggaagcccgcgaaggtgagtatatggccggtgaggccgataacgtgctggcgctgacgacggtctacgcttctaaggcgcaggcgatgcgagccgctcaggctaagtgggataagttgcagcggggcgttgcggagttttcaattacgctggcgctcggtcgggctgatttatttcctgagacacctgtacgcgtgtcgggctttaagcgcgtcatagacgagcaggcatggctaatcagtaaggtaactcacaatctgaataatagtggcttcacgacgggcttagagcttgaggttaagctctctgatgtggagtacagtgcggaatcggatgatgaataa

SEQ ID NO: 85296 - DNA, 201 bp, Citrobacter koseri
atgagaggaattctattgatttgcggtactctggtgactttttatgcaatggcaggcaaaatcaccatgcaactgacagaacagacccagactgccaacgggacgctgtgtcgctattccaattcaatctacgattttatgtacaaaacgaaaagcaagcattgtccaaatgtgaaaacgttctctacagaggacaagtaa

SEQ ID NO: 85297 - DNA, 753 bp, Citrobacter koseri
ttgaaaaaaattcttgcattacctcttgtgttcttttccttctcatctttcgctgatggtgttccccctgcggaagtacagccttaccctgagtacctggcgacctatgtcaaaacgctgattaatgtcagttgtgagcagacgctgaaaggcggttctgaagatgtattgataaagcaggcaacgcagggtatgaagaaagatacgcctagctattacgctatctacaattctgtcgttgagggcgctggtgctggtgctgcgcttaaagctaaagggaggttgataacgaaagataagatcgcccttgatagctgcgatggggtcgctgcctatatctcgatgcaaaaagattttatgaaaatggtggttgacgagatgacaacatcagcacaatcgcaatctggcaccgtaaaacaaaaggctgcatattctgacgaaagcatgtatcggaccacagcgaaagatctagctgaactttataaagctaacgaggttgcagccgatgacaaaattggtggtcgtaaggtggaagtaaccggaactgttcaggatataacaaaaaatttcacggatgatgtagttcttaaacttgaaagcggtaatcgcttcatgccagtcagtctgagtatgtctgattcagaaaaggcgaaggcgtcgaaattgaaaaagggccagaagatcaccgtgacttgcgaaaagatgcagtttttcatcggtgcaccgtctggcggaaactgcacctttaactaa

SEQ ID NO: 85298 - DNA, 447 bp, Citrobacter koseri
atgaacaaaccaaaatcccaacgtctcgacctgaccactatgacaggcgagcagatcgctgatctcatcctgaacggcaaatacaccaaatcagccttgtgggccttcatcagtaggaatggtggcgcggatgctgtacatgctcgattcccacagattgccgtctgcctgcatatcctgaagcaggagcgcaaaaaggcaaagcaggcgcgagcgtttaaaaccatccttaagccgctgagtaatcaacgcgctgccggaatgcagttgaccgagatacttcgcccaatcctggaaggtcatcgccagctttatctgaacaaattcaatcttgcactgactcatgagcagatcattatgctgcttgtggctgtcagcggtgcagaagaacttgaagcctacggttatccactggctggcgaattcccgacagcaaccgcagcctaa

SEQ ID NO: 85299 - DNA, 186 bp, Citrobacter koseri
atgaagctgagcctggatgacgaaacatacgcaatcctacgtgaagagtctgatcggctggggatgccagttccgaggatgatccggaacatgtgccagaacctggcgaaacacattcagaaacgcaatgaacaaccactgacgaacccacagggagataaaaatgaccgagacaacagaaactaa

SEQ ID NO: 85300 - DNA, 960 bp, Citrobacter koseri
atgaccgagacaacagaaactaagctctacaaatcactaccgcagccgaacgaagacaaaccgatcacagttgatatattttccccctgtatcgttctgctttctcgaattcgtgattttaatggggtcaaaatcgacctcaatattattgcagtatacggctaccttctggggtggaagaaaaccactggacgagtaacggtatcaatcccccggatcagtgatgattgcgcggggatctcagaatctacggtgaaacgtgctcgtaaagcacttaaagaaatggggtggttagattggaaaacaatctctgacgagggcaaaagcaacacttctcactgtatctatacggtcaaagatcccgaggacatactagctgaactcaacgctggattgtcacagcagggtgatgcagtagttaccatcgcaaaaaaacaaaaagttaaagccggtacggagagtggtaataatgaacaaaaacctgttgtggaatcttccgtggtggaacctgccgcgcctgttgctggaaaaccagacggcgtaccttctgtggttgctggcggcaatgctgatttatccggtggtgatgatgcggtgaatggtggaaatgttatccaattcccaacagtcaaaagaccagaccagccccagatggctgatatcgataccctcaacaactgggtagaaggttacgacgaagaaggatttatggcctatggtgcgctatggtggataacaaaacccggtgagataatggatctgataaagagccatatcaaaaaaatccagagcgatggatacaaaggatcgaggtctgccgctaacgatacttcatccggtgctgatgcttattacaaacagcagcaagcacagagagcagccgcagctaaacaggctactaatgccccgcagcagcaagaggataactggtacgaatatgacgaaacgatcccattttaa

SEQ ID NO: 85301 - DNA, 483 bp, Citrobacter koseri
ttgtgtgagaacgtaactggcaacagccactctctggctgaccagaaaaaaccagatttagagcgtctttttaaaaagcgccgccgtgatgaggatattgttaaaaccgctaagacactccttgtgcatggcatgacccccggcaaagttgccttactattacgtcttgatcctgagtttgtagctgaactggctaagacatggaatcccaagtttcgaaaggtgaaatacaccagtcagtacgcaactaagcgaactgtacgccagtattttgactcaggtgcaatgctcgaaaaaatctgtgctgacctccagttacctctattttctgtgatcacgtttcttcaacgtgacggagtgagcgatcaggaaatggcatcccgaatgcctgttagtgacgatccgttgttcattgagtaccggaagactatttcacgcaagcaggcagcgccccaacgccgatcaccacgcctgcattattaa

SEQ ID NO: 85302 - DNA, 333 bp, Citrobacter koseri
atgaaaaacatcgaagaaattcgagccagtattctggaagcgatgatcgcaggaacagacgaaccggaagacctgagcaaaagtgctgatcaggtgctggcagatgcaattactacttatcttgcttcacctacatctaacagccagccgacccagacgaagggcggcaaggcgatcaaaatcaaaggtatagctatgacttgtgcagctcaagggtacagcgcaaatctccgtccggtcagtctgctgatgaagagcaagatcgaagatctgactaatgaacagtggttagcgctaaagtatttaggctaccagatcaacagattagcttaa

SEQ ID NO: 85303 - DNA, 1113 bp, Citrobacter koseri
atgtttaattcagagcgtttacgtatagcaagagaacggagaggcctgactcaaagagcgctagctgaagctgctggattaaccagcaagaccatttctaactatgaaaaagcaggtatcttcgagccaattgccagcgatagtatggaaagaatcgcttctgttttggaatatcctatcgaatttttcctcgatcgggatgttccttcattgacgcccgaagccgtcagttttcgtgcaatgacaaagttaagcgcccaaaaacgtgattcggcactcggcgctggcaaactagcacaagaattatcggcatggattgatgggcaattcaagttaccgaagcccaacatccctgattgtagtttcgacggatattctgagccggagcgtgctgctagagcagttagagaagcctggggtattggtgaactatcaatttcgaacataattcatttgcttgaagctaatggcgtcagggtattctcacttgctgaaaattgcgttgaagtagatgctttttcattttggatggacgaaaaaccctttgttctgctgaatacaatgaaaactccagaacgcagccgctttgacgctgctcatgagcttggtcatttggttctgcacaaacactccagcaacaatggtcgccaagctgaacaggatgcagatcgctttgcttcggcgttattgatgcctgagcgtagtatcttagcctcagtaccaaggatgcctagcctagaccagcttgttttattgaagaaaaattggaaagtgtccctagcggctttagttcgacgtacctttgatgtcggtttgtcttctgaatggcattacagacaactggcgatagaactcaaccgccgtggttaccgtactggggaaccccagggcatgccagaacgagagaagtcgttgattttggaaaaagtctttacatcgttgcactctcagggagtaaagcgtgtcgaaatacttaaacagctgcgcttccccgctgatgaaataggagcgctcacatttaacaatcgcttcttcatggaggccatagctggggacggcctttcgtcgtcgatcaaacacaaacgaccacctcatctaagtcttgtcaaataa

SEQ ID NO: 85304 - DNA, 720 bp, Citrobacter koseri
atgtactctcataatctcgaaaaaaccgtagtattggctgatccgaatgatatcgaatcttacttgcaacctctgaatctcagtcaaaacgaccttatacgcattcttgagcgtggtttgtctggtcgctattccactacacaaaatcaccctgtaacgtctcgcggacagtacttttacggtgaaggggtaagcgctgccagagatatccttgctccgaagggattcaagcgattgtctctacgaaacgttgaattgactattagtgaaacggtggcgatttatctctgccgtggctgcgatcaaacgggtttggttcatggctatcctgagtcacgtatgaagaaaggagactttactcgtgaactcatggggttaatccataataaccaccctggtcaggggaaactaatgctggatgataaccagctcaaattagatttagacctgccagaaggtgaggttgtcccattactcccgaacaaaatcggacgggacttatggttcttactttacgattttgatgaactggatgaattcaaccgtgtaggtattcgcgcggagctgtcccggcctgtttcctacaatgacaaaaatgttgttaacagtttttctactcgtttgattcttgatgcccatcagccagatccaatggttcagggtggtgagactcctcagtttacaccagatattgatcttgatattttgaaaacaggctaa

SEQ ID NO: 85305 - DNA, 1035 bp, Citrobacter koseri
atgggactatcaaccaatttcagctacgcggattacaccaatacttttgtgaacatggatgcaaagaacactttgctgtccacgcttaatgttttcagtgatcgtcagacttctgcaagtccgaaggtgagtctcgatatcattgatgaagtcgctcagaaggtggcaagctctgttaatcgttacggctctgagtggtctagcattcctaagcgtagcgctagcaatcacctgattgaagctccgctttatgcttttcaggaccgtattacagcggcagacgtgcaaccatatcgcaaaccaggctccgacctgcaaatgtctgtaatggatgcggtcacttcttctgctgtagcaatgcacgataagtacatgcgtacccgtgagcggatttttgctgatgcgctttttcgtaataccatcgaagcgacctacacccagcagccgatcatttcctgggaagatgaatttggatatcaacaggcaaccgggacaatcaaaaccaacgttagctctggtgacccacttcgcagcctcgatgatgctgtaaccgccgctaaagtgcgtatgggggggcttgctggtcagcttgatggatttatcctgtttgcaggtagcaatgtttttcgcggcatcaagtatcacccagacgtgcgccagaatgttcagttcggtgtgcttgatcgtgatgtactgtttaacaaagaagtgcttccggcgttctcaacattcattattgaaaatgtccgagtggtggaagtaacggaccaaaatctttatggaattggtccggatgaatccttcttggttccgcgctttagcaaaccgctatcctctgatattgctctgcctttcggttatgtagcaacggctaccagccgcaatcttgatcttgcatttgctgatccggttgatttccgtatctggagcgtacaggacaagtttaagaacgtggagctattcgcggaaagctcaatcttgcctgtggtgtaccgtccagactttgtgaccaaactggcgaacgacgcagcttaa

SEQ ID NO: 85306 - DNA, 282 bp, Citrobacter koseri
atgattcattttaaacaaaaactcgaagactacactgaatccgaattcttagacttcctaaatgaattctccgcaaacccgcgctaccagggagaaatggaccgtgaatctcacattgactcattagtcgatcatttcgataaaatcgtggatcatcctgaaagtaatggattgattttttatcccccggatgacagggaggacagtccacaaggcatcattggagaaattaaaagatggcgcaaatctcagggacgcccatcattcaaagactctgaataa

SEQ ID NO: 85307 - DNA, 543 bp, Citrobacter koseri
atgggtatgaaaaacgacctgacgttttcttacgttaatgagtgtctttcctacaatcctgaaacgggcgatcttacctggaaacaccgaccaaaagagcatttcaagaccgatgcgctatgtaaaatatttatttcaaagtgtgcaggtaaagttgctggatgggttacatgttacgggtacattaacataagaatcaatggccgagcatacaaggctcaccgtttggcttggttactgagtaatggtaaatggcctgataattttatcgaccatattaatggtgacagggctgacaatcgactgtccaacttaagagatgtagataagtttcagaatgcgcagaacattgctaggccatcaaataacacacttggttttattggcgtggcaaaggtatcaaagggcgtaggttatcgggcgcaaatatttttccgaggtgaaaacattcatctcggccgctttctcactgtagaggaagctatagcagcaagagaaaaggctcaaattgaattaggtttccatgagaatcatggaagataa

SEQ ID NO: 85308 - DNA, 174 bp, Citrobacter koseri
atgaagtacaaatcagtgacggaaggcaagccgaagcctctcacccgcgtatgggtcgaaaccgacaccggacgggagactaccggttacgttaaatctgacggcgagtggcatatcaactgcccgcgcatccgggcgaccggcgcgaaggtgctgcgctggaaggagggctga

SEQ ID NO: 85309 - DNA, 294 bp, Citrobacter koseri
atggctaaatacgaagtggtgcgtccatggttcggcgtgaaggtagggcaggtggtggagttgaaagaactgcacccggcgctgaagtctaacgtccgcctcatgaatggtgaggcaggtggagaacttaccccgtcgacgcctgatgccggtaccggtgaaaaatctcgcaaagaggttatccaggctcgtctgactgagttgggcatcgagttcaaaggcaccttgggcgctgaaaagctcagtgagttgttgccggatggcgagctcgaaaagcttttccctgctgaataa

SEQ ID NO: 85310 - DNA, 1350 bp, Citrobacter koseri
atgactgacaaattaactctcgccgtcaaccatgcgttgaacgatgcgcgaatggcgcgcgcccgtatgggactgatggcgcctacaatggggctggacaataagcgccattctgcatggtgcgagtatggtttccctgaacaggtaacctacgaaaacctttatgccctgtaccggcgtggtggtatcgctcatggcgccgttgagaagttagtgggcaagtgctggcagacgaacccggaactcattgagggtgacgacgccgacgagagcaaggatgaaaccccttgggagaagagcgccaaaaaggttttcactaaacgactctggcgcgcttttgcggaagcagaccgccgccgtttggtcggtcgctatgctggaatcctgcttcacatcaacgattccagaaaatgggatcaacctgttgttcacgggaagtcactcaaaaaggtaacgatcgcatgggccggttcgttaactgtcagtcagtgggtcactgacgagaattcggcagactacgggcagccaaagcagtggaaatacgttgagagtctgccaaatggcgggacaaatcagcgttttgtacatcccgatcgcgtcttcatccttggcgactactctaacgatgctattggctttcttgagccaccttataacgcctttgtcagtctggagaaagtggagggcggttctggtgagtcgttcctgaaaaacgccgctcgccagcagaacatcaacttcgataaagagattaattttagcgagttggcctcgatgtatagcgttacggttgacgagcttcaggagcgatataacgatgccgcacgagaactaaaccgaggtaatgacactctgctcattacgcaaggcgccagcgtcacttcgctagtttcaccagtatcagacccatcgccaacttatgaggtaaacctgcaaaccgctgccgccggggtggatatccctacgcgcatcttagtgggtaatcagcaggctgagcgttccagcactgaagatcagaagtatatgaatgctcgctgtcagtcacgccgcggcgacctgtcattcgaaattgaagacttcagtgacaagctcatcgagctgaaaattattgatgctgtcagcgagaagacggtgatctgggatgaccttaacgagcagactggcactgagaaactcgccaatgccaaaaccatggcagaaattaaccagacgttccagggcagcggagagaatcctgcattcagtcgcgaagagattcgtacggcagcgggttatgaaaacgttgatgaatttccattaggagaagaggatggcaacgaagaagacgaagccaccgattctaccgcgtaa

SEQ ID NO: 85311 - DNA, 1320 bp, Citrobacter koseri
atggaaagccaagttgacctccagataccggccaagttagtccccgtattcgcgacagaagggatccgctatcgtggcgctcacggtgggcgcggttccgccaagacccgcacgtttgcactaatgaccgcagttaaagcgtaccaggcggcagaggccaatatcagcggcgtgatcctctgcgcgcgcgaatacatgaactcgctagaagagtcctccatggaggaggtgaagcaggcgattcgctctgtcccatggcttgatgattacttcgacattggcgagaaatatatccggacaaagaaccgcagagtcagctacgtattctgtggtcttcgccataacctcgacagcatcaaatccaaagcgcgaattcttgtggcctgggttgatgaggccgaatcggtatcagccactgcgtggaaaaagcttcgcccgacagttcgtgaagaaggctcagaaatttgggtcacatggaacccggagaaggaaggcagcgccaccgataagctcttcagaaagaacccgccaaaaagctcgatgattgtcgagatgaactatgtggacaatccatggttccctgcagtgctcgaggaggagaggcaggaagacctggcaaacctcgattactcagactatgcgtggatctgggaaggcgcttacctcgaaaactccgacaagcaggtgctggcaaataaatacgtcgtgcagagttttgaagatgacctctggaagaaatcagaacgcctgctatttggtgctgacttcggcttcgcaaaagacccgagcacgcttattcgcatgttcattctggataacaacctctacatcgaatacgaggcctacggcaacggggtagagcttgacgatatgtggaagttctacgctggcaaaaccgatgccacaccgaaacaacttgaagactggaaggttactgacgaggcgaaattccccggcatacccgaggctcgcaaatggcctatcaaagctgataattccagacctgaaactatcagccatatcaagggacagggattcaatatctcagcagctcagaaatggcagggcagcgttgaggatggcattacctgtctacgtggctttaagaaaatcatcattcatccacgctgcaaagagacagcgaaagaggctcggctttactcgtacaaaacggaccggatcactggcgaagtcttgccagttattgaggacaaaaacaaccactgttgggatggtgtccggtacggtctggacgggtatatcaaacgtaaacctcagtcgatgggaatgatgattccaaaacgccttcagggcagataa

SEQ ID NO: 85312 - DNA, 639 bp, Citrobacter koseri
atggctaacgatgacgagcgcaggccatatccgccagttaacttcatcgactctgataactggcagccatacaccaggctgatccctgctaacgaagtgcatgagtggataagccgacaaatcctcagcgatgccggcagtatccacaaccctgaccacgagcacctgattgatgctgacctttgcttcatgtgggcatcagaatcgtttgcgaaaaaagggcgctacgttctcggtcaggctgaacaggtaatgcttcgcgccggtgggtggcagaaagccagaatggaacagcagatgtatgaatggttcgggcgaataccgaagttcatcatcacgctggcagccgattactgctcacagtgcagcgacctcgagttctgcgcgctggtagagcatgagctttaccacatcgcccaggccactgatgactacggcgctcctaagttcaacaaagagaccgggcagccagtgctgacactgcgcggccacgacgtcgaagaattcactggtgttgttcgtcgatacggtgccagcaaagaagtacaggagctcgttgatgcggccaatgcgccagcagaagtggcccacatcgatatagccaggtcatgcggcacatgcatgttaaagctggcctaa

SEQ ID NO: 85313 - DNA, 180 bp, Citrobacter koseri
atggcgacgtgcagattgtcagttgaaatcaaaagcaagtggtggcttcccgtttacatcaagacactgacactgttctgcttgatgatgcgttgcgagcctgattaccaaaaggtgggtaactttctcgttaagcatggcattagccagaagctgaagcgtgagcctgtaaagagataa

SEQ ID NO: 85314 - DNA, 153 bp, Citrobacter koseri
atgctatttctcttcattctcctgtcgatctggctctatcgaccatcggagaaactgagttggccagacgccaactctactgtctcaatgccattgctcgtagttgagcacccggcgcgcgttaaggggatgcgtgagacaagagcctattaa

SEQ ID NO: 85315 - DNA, 390 bp, Citrobacter koseri
gtgaaaactatccagttatctgaacgtgagctttccatcatttttagcttaatggcgccgccgtaccgcgctgaagatatccgctctgacgagttcaacgaattgcgtaacaaagtcttttacgctctgcgtgatgctcagaacgatgaacctgtaagccagccttacaagtttcctggcggatggattccgataagcgatcggatgccggatcgcgatgctgaagttcaagtttactgcgctgatacgaaagagcagatggttggctacatggagcgcaatggaacagagggatggtttaggtttgcatcgcttccgaatggtggtggcatttattgcaatccaacccactggatgccactgccagcagcaccgaagcaggttatttaa

SEQ ID NO: 85316 - DNA, 255 bp, Citrobacter koseri
atgatgaaaagacacactcctcctgacatcaaagaactaacagcatcgcttgactatgacccattaacagggaaattcacctggaaaaagcagcgcgcatcaaattgcgcaatcggcaaggaagctggctacataactggttatggctataggcagatacacttcaacggtaaggcatacaaagcacaccgccccgccagcgccggtaccgatgaaataccatcagattcgcaagctggtaaacgagttgcgtga

SEQ ID NO: 85317 - DNA, 567 bp, Citrobacter koseri
atgcaatcacttacgtatcaacagagtaccggacttgaacaacgtccgttgatttcgatttatcaaagtgttccgcgcaataaccgtaagctaactcgaatacgtgaggcggttaaggcctggcaaaaagctacgccgggccagtctcaggttcacatttctcagctggttgcgaaagagtggctggcgcgaggcgggaaggggttgttactggcaggttctgaacacaacacgaagcagaacttcttccggatgattaacgatccgggcccgaagaacgacaaggggctgatgctgctgattcccgtcatcgtcgatgtgatggcgcgggataacgagaaagtggcgagagagtttggtctggtcgcaaagactgaggccgaactgatagcagaggctatgaaagagtgcactgaagcgcatcaggcgaaattacttggtcagccgatacaacgccttgaaaaagaggtgagagaagctgctgaagcacttctgcgctttctgcccactgaatcaatcgctgcggtggtaaccagtctggcagctatggcgccgggagttatgtga

SEQ ID NO: 85318 - DNA, 156 bp, Citrobacter koseri
atgccagaattcgaggttaatcatcagaagggattttctttgcgtgaattgattgattttcgcgcatggacggatctgcaactttcagagttatggagactgagtataggtgactcagtaatcctgcaagagcagttaatacgacgcattaaatag

SEQ ID NO: 85319 - DNA, 510 bp, Citrobacter koseri
atgactcttatcgaattgaccaaacagaaaatggcaattgaagctgagctggctcagttgaaggcgaagtttgttgacgatacctcacgcattggaaaggagttgattgccgtgtctgaaggaatcaaccaggccaataaaggccttacggttgagatggtccagcatggcatgacaatcgttaatttcggagacccgaagcaaagcatggagaggcgcgggtgtgttgaagatgcgattaacgatattgcatccgggtttccccgcctgagcgagcgttattttggcactaaaaactacgcccaatggagcgaccagcgtgaagaccatcgttatggatatggccctaaacacggctctatctgctttaagatcggcttaactggcaccgcacttaacaagctggcaagcggcgggctgagtgattacgacgcagaatgcgctatctactgcctgatgaacattgacgccatcaatgcggcaaatgccaaggcccgggaggcatcatga

SEQ ID NO: 85320 - DNA, 141 bp, Citrobacter koseri
atgatcaatcatcacctgctgcgcgccgcgcagagtaaagcagccattgccctgtttatcggtgatggcgccatgtggatggcagcctacgacgaaatgaaggttgccatcggttatccgtggcatagaaaaacagcctaa

SEQ ID NO: 85321 - DNA, 510 bp, Citrobacter koseri
atgctttcaattcagaggttaaaggaattgtttcactacgatgcagagacaggaatcttcaccaggctcaaaacagccggtggaatggttcctggaactatagccggatcattaaatccctttggctatctacgtatctcaatcgaccacgaaagatatttgtgccaccggcttgcatggttttattcctatggttcatggccagagcacgaaatagaccacataaacggcatcagaactgataaccggttatgcaacctcagagacgttcctcactggattaatcaactcaataagctctctccaaaaaataacacaagcggcgtcaaaggcgtttattggaataagaaagataaacgctggcatgcgcgctgctctatagacggcaaaaaataccaccttggaaatttcaccgaccttaatgaggccagggccgttgtcgttgcagcaagagagcgcatgcacggcaaacatgccgttcatgaagaaagaaaaccggagaatttatga

SEQ ID NO: 85322 - DNA, 234 bp, Citrobacter koseri
atggcccgcagaaatttactccacaaatcgaaattagccgactttaaggagtggctctcgatgaacggaattcagtggagagatgggaaaggtagttaccaggtgatccaggtgaatacgggatgcggctggacaccgatttatgacagcagcaaagagcgacgcgagcatttcaccattcaggatgctctcaggcctttggtaaacagattcatcagagaggctgcaaaatga

SEQ ID NO: 85323 - DNA, 459 bp, Citrobacter koseri
atggcagaaatctggcagccatgggaaaacctattcctctatgacgcttgcaaaacaatgcctcttccacttatcgccgaaaaactcgagcgcacggaacgcgcagtcaccactcaggcgacacggatcggcgctcctctaccttccagaatgacaggtagacagtggaccaaagcagaattgtttctgttaggtcgattcactcctgaagaaatcgcagcggcaaccggccgctctatctactccgtgcgcagcaagcgcaattcccttgcccgatcgtcaggaggaaaagtcatgcctgaatggacagcagaagaaattgcatacctgtggcgccacacaaacgcagaagtcgcagagatgacaggtcggagtatcgaagaggtcggagataagcggctgcaaaccaatattgaacgtaatggctgggatgttaacgatccggagcgtgcatcatga

SEQ ID NO: 85324 - DNA, 222 bp, Citrobacter koseri
atgacaccagaagagaaagaaaacatccttcgcgcgcagggccgtaaatgcgtcgaagaaatccgccaggcgatgaaagtcaggccgaagccgaaatggaatgtggtagtgcctccgatcctgaaaaaacatcaccagaagattgcgcctatgggaatcagccttgtggcatttgtcagcagcataggtcgaatgcaaggccggtatggagtggaatcatga

SEQ ID NO: 85325 - DNA, 285 bp, Citrobacter koseri
atggaagattttaaaggcactaaaggtaattggtcatataaccaagtgaccggaacaattcgcggtgatggtggccttctcgctgagttactgattaatggttccgaagacgataacggcacgctcatggccgcagcaccggatttactggaagcgcttcaatccctgttcgacaactataagcagctcgctgattcaggtgatgccggtaactggcgactcgaagatgaacctgccggaaagaaggcgctgcatgctatcaacaaagccctcggtaaggagtga

SEQ ID NO: 85326 - DNA, 210 bp, Citrobacter koseri
atgaacttaacgattaaacagatttatgacctggcatctttcgccgggctgatgtgtagctcaccagaagaatctcaggttgatgaggaaacagaaatcagcatcgacaacggcgtaattcatggtgatgacggtcaggtcgaatatgaaggactgcgggcatgctgcgcagattacccagaagaaggctacatcccacttgaagactga

SEQ ID NO: 85327 - DNA, 630 bp, Citrobacter koseri
atgattccatacttcttagagcacattgataaaatcagcactttcatttctgcttttgctgcactgttaactgccatagcaacttttttcttatggcgtgtaacccgtatcttggcagaagagacaaagcgaatggtcgacgcttccgagcagcctcaagtagtggcaacgctggaacctaacgcatggtcaatgctttactttgatatcagtgtcgttaacaccggaaacgcgccagctttcaacattgaggtcacatttgatcctcctcttgaaaatgcctcccatcgaaaagataaaactatccctttaaagcaaataagtgtcttaagaaatggtcaacaaatgaccagtaatctatgtgaatacaaacagatagaaggtaaggtattccaagtcagcattagctggaccaaaaaaccaaactccacggtgaaagagagcactagttatacatacgacatggcttcctttactggtattagccagttgggggccaccaatccaatgacggcaatttcacaacaaattaaacaaattcgtgaagattggatgcctatagcgaaaggtacaaggcgaattcaaacagatatacatgatacagaagatagaattgacgaaaaaaattga

SEQ ID NO: 85328 - DNA, 210 bp, Citrobacter koseri
atgcgaggctacgcagttatgttttgtggtctgttgacggcattcaacgccgacgcaggccgtataacgatgagcaacccgaaacagtccaccactgagaacggtcacacactgtgcgtctactccaacagcgtctacagctttatttatgtcaccagatcgaagcactgtcctttttcgaaaagttttgatgtaagtgaaagtgaatag

SEQ ID NO: 85329 - DNA, 570 bp, Citrobacter koseri
atggctttcaaccaattgaaaaataataatctttatttctatctctacatggcagctccatcagtgcttccattggcttacttcttcaccatgaacgataaggccgcatttgtggtcttctgcgtggtagcgcttatctgcgtatctctagatttgcgagagttgaagaaaacagatgaaagctatgtgggttttgttggctctgccttaggtatcgtcgttttgccaccgatttatgtttatgggcgcgccagagatgcagggatgaaaaaatggcgctggctgctcacttaccttgccattgcacttggtgcagcttttatcagtgcgactatcgatgataacgaagcactgaaaacatcagcctgtgaaatcaccacatcgattttcaaagacaaagagagtggtgtgcaatgccttgccgttgaggatgtgaagaaggtttcagataagcactaccgtgctaaggcggtgctgtcgaatggtatcgatatgccgatcactattgaggaacgcgacaataactacatctatgtaacgctatcaccgctgagtggtctaattgagtaa

SEQ ID NO: 85330 - DNA, 579 bp, Citrobacter koseri
atgagccgcacttttgcatattgccgtgtgtccaccagcgagcagacaaccgaaaaccaaatcatggcgatacgtcaggctggctatgatgtgctagatagccgtgtagtgtctgaagttgtctccggtggagtgcaggcgatgaagcgtaaggctttctccaacctcgttagccataagctggaagccggggataagctagttgtgctcaaattggatcgattagggcgtgataacatcgatgtgcaacaaacaatctcgatgcttgtagacaagggaattgatgttgtttctatggatctgcctgcgagcaatcttgccagtgctgaaggaaagttgatgctgcaaatgttctcagcgtttgcggagtttgagaaatcccgtatcacagaacgaactaaagaaggcctagagcgagcaaagaaagaaggcaagaagttaggtcgtcctgtggcaaaagaaactcaaaaacgcgtacaggaagccaaggataaaggtctgagccaatctaaagctgccgctgaacttggattgagcctaccgaccataaagagaaactggaacattaaaataatataa

SEQ ID NO: 85331 - DNA, 1515 bp, Citrobacter koseri
atgggcaaacttacagaagattcgatagaatttgcaagaaaacatattgagcattactacgattctgatttctttccaaaagcttttgaattcgaggctatctggcactgctgggatgatgttaaaaaacaccttttagcaagcaatgtcgggaaacttagaactaaacatcctttgacaatggcgtcaaaaaaaccttcaggcagttacagaatcgtccatcaactagagcctttggatactattgtttataccgcactggcttatttgatagctgagaaaattgagctagccagagcagataaaaatattgcttgttcatatagattcgttcttgatgaaagtggttttttcgataaaaatgctggattcaaaatttttactgatatgattgaaaacttatcagagcaacaccaatttatattggtgactgacatcactgacttttacaatcagatttatcttcacagacttaataacgcaataaaattagctgacccgagcttagatattatagccgatgacactgaaagatttatttcatcattgaatgataaagcttcgcaaggtgtccctgtcggaccagccgcaagtataattatgtctgaagcagtattaatagacatagatcagtacatatcaaactttggagtcaaacacacccgatatgtcgatgatataaggatattttccaactccaaagatgaacttgaaaaaatcttagaaaaaatcactctatatctgcatgaatctcatcgattaacacttgcatctgaaaagactttcattcaagaaacggcagcatatgctgagagcgttctgcataaccagtatgaaattgaaaaagttgaaatattcaagacacttgaagtttttaatccatactcaggagtcgttaagtatgaaaaaatacgagttgaagaaaaaccagaccttgaagaacatctaaaatatatatcagaacaattattaaagcgagatactgttgatttgggccttgctcgtgttttgattagaaaagctaaaatcaatcgaatcgagttcgtatccgatcttatttttgataactttgacttcttctccccagtaataaatgatgtaattctttacttccagacattattaaataagaattggatttcattaaacactgataaattaatatccatcattcactcgacctcaagccagcagaatatggttaggtactgggttgagtggttttattcaactaatgaattacttctccagattccagaaatccgaaaatttgtatttcaaagcgcttcagtagaaattcaagcgcttgcggcgttgacatctaaaaatgtagcctgggtcagagattctaaaaaacaggtatattccgtaggtgaaagaggaaaaagggctattctccgatcagcaaaaattctgcccaaagatgaaagagatcactggttaaaaaacatagctcaaagcgcatctgaagagcttgatatctggattacaaagtggattatcgaaactgcgtaa

SEQ ID NO: 85332 - DNA, 720 bp, Citrobacter koseri
ttgatagaaaagtcgtatcctgtatcaaccgattcaattattactccatacaaaaccatcactcacgattacggtagttatccgcttattatcggcgatcgcttccaccataacggctacgcatatttaatcaatgcaacagaaccctctggtgtaaggttagatatcctcactccaatagccgcagaactagaagctgttctggcaacctatagtcgtgtgtttttcgcttgttttgaattgcgtctgcctagcggcacttctgttgcgattggcaatgaatgggtgcgtcagttattcaaaaagctgcgtgaacgcctcagatctaaatacaagaggccggacggtgtgactagcccaattaacgattttgcatttggctgggtacgggagaaggagagagcaaaacaagaccattaccattgctggattgctcttccgcaccgtcaggttcaacggataggtggcccgacatatgggattggtagttcaattatggatatctggagccagctcactggtggagagaagacgctggtggatctcttgggcaaggatgaacggtacccgaaaagttatgttatagagcgtggtaaaccagaaacacttgaaggtccgatttattgggtatcataccttgcaaaggttcgtggaaagtatcaaactggtaaaggcgaccgggtgcattcgacgtcccaattaaggaacaggaaaaagtaa

SEQ ID NO: 85333 - DNA, 1746 bp, Citrobacter koseri
atgtcatctaagcaaaaattatacagctatgtgcgttggtcaagcgagaaacaatcctcagggacatcatttgagcggcaaacatcaagagcaaagagctttgcgctagaacacggacttgagtatgtcgaaatcaaggatgcaggcatatcagcattcaaagggcaaaatactactcaaggtaagttaggtgcgttcatcgcccaagtggaacagggggctattcccaaagatagttggctgtatgttgaaaatttggatcgactgactcgtgaggatgcgataactgcaaatgaactatttctgcgcctgttaaggctgggattgacgatagttactggcatggataacaaagtattcacccgagaaggagtgaacagtaatcctacagacctgatgatttctatcctgatgttcatgcgtgcccatgaagaaagcaagacaaaatcagatcgtgtaaattcacatgttttggcactgttgacccgtgagaaacaggggctcccagtcaatattaaggctgttggaaggcaccctttctggatagatgacagtggtccaagcaacgagaaggtaaaaaaacaccctgattactggcaacctgcacaagaagcggtaaagctatttctcgatgggcatggtgctttttatgtgactgaatatcttaatcaaaaatacccaccacctcctgcatttaaaaacaagacgcgcagagcaggagggtggtcacagcaagctttgaataaaatgagaagcaacctggctctggtgggggtaaaactctttaatctgtcgggcaagccatatcggcttgataattactatccacctctctgtacactaggcgagtttgcacaacttcaggacatcaaagcgaataacaacagatacagtggtaaagtttccactgcgatcagtcttttaggtggtatgaaaattcttcgatgcggtcactgtaatggaactatgacggcttttttgcagagggggcgattacgctacatctgtgaatacgggcggactggtggtaactgcaatgcttggagtgttaaggcttccattatcgaacgctgtttgatgccagtgttgatcaccggtttcttgattggggcctataaggcacatagcgatctgtcttcgttagatgaagagtcaggcaaacttaaagaagaatttgatgcaattcagaataaacgaaataatgtcgttgatgcgatgactgaattcggtagaactccacaatttgacgtgaaatacagagagttgcaaaaaagagagcaagccattagcggtagattacaacaacttgatcagctaaaagccctgtatgccacaacacaagatatttcagacaatatagtggattttgttgcggaacaatgccactggccgattatctcagatgttaataaccctaagcgtgaaaaactgcgagagagtgttcgtaaaatcatcagttcagctactatcacaaaagtggagcgttgcatccgtatagagttcaaatatgcaacaggtgagacctttgtttttagcggaagcgaacctgggaaatacaccacttatataccaaagcgagttcttgatataccggataatgctactgaggatgatattgctgagttacaggagtttgatcggaaatacaatgaatacttttcagtactgtggtatgagcatgtgaataaaggataccttgcccactatccggctataaacgggagagacttttggcctaaaaggtaa

SEQ ID NO: 85334 - DNA, 258 bp, Citrobacter koseri
atgaaacggctgatgctctctggcatcatgctgctggtttgttcagcggtggtgttttatctcgcatcgggtaacacgccgcagattaaccgcagcgatctgctgctctggcgtataactctgtacggcgtggtttgtggtgtgggctggcatctgtatgaccgcttaccgctacatcgtccggcaatccgccgtatcgcactgatatttatcgtactgattgtactcaacgaaatcgtgccggaggtattccggtga

SEQ ID NO: 85335 - DNA, 768 bp, Citrobacter koseri
atgtttgaagacaattccccttttagctcaattaaagatgctttcttgcaaagaataaataattctttttttggttttatagcactctcattttgtgtggataactggcgagatattatatatgcgttctctacatctacaaatgtagataccagaataaactatatagcacagaatacctccatcatattccctatcgtgtttgggtgtatagcagcggctttgtacccatatgtacagtgcctcttcgaaatcatacataaaaaggcaatcatatttcgctggacattaaaatcctcagagctgattgctaaaaaagttgccgaagattctgtcacctatgacaaagaacttcgtgatgcaaaacaaaaagccgcattaaaagaaatagaatatagtgctaaaataaaaaacctcgaagagtccatcaaggaatacgaggcaaagatcgtacaatcagaagatgacagcaagatggccaacattcgctttgaccaaattaataatcagctacaagaatatatcaggatgcggaatggcgtctactctgacattgaaaccgggctctcgtttattaacgaaattaagaatgctataaataaatctttaccttacatagatgaccttaacaatactgatcatgctgaaaaactcagctattacattgagacaatacacgataacttcaaaaatattaagactgataaaatggtaaaattcacaaatcaaatacttaataataagcacgatttacccgctaaattttaa

SEQ ID NO: 85336 - DNA, 1296 bp, Citrobacter koseri
atgttagaaagtctgcaacctaatgtcactcaaacgttacctgacgatagggaagagctgtatcaccttgtctggcgcgagcctgcggagcgaatcacttccctctatagcatcagcaaagaacaactgacaaaacgatgcgctgaattactaataccgagaccgctcgccggatactggaaggcgctagcgaaaggaactgcaccggcggtacctgctttgcctgatttgaagagtggcaaggtagaaaaatcccccagaaaaaccagccaggccattcctcctcccacaaaaatatcatcgaaagtagtaacgccagcaccgcgaaagcgagtgaggacagagggtagtggctatgcactgatcgatgatctcaaaacttaccttcccgtctcttccgtcacaaaagacggctactacaaaccaacgaaaaagaagctactcgatctgaatgtttcagaaacggcattcaatagtgctatcgattttctgagtcggttttttgctgcactgggaaagcaaggttattgggtaaggttagctgaaggaaatgaaggacttcattgtcagggcatagatatcaaagaagacccaaaagagggcggtttgcgttatgacagcttatggcgcccttgttcagccagtattatctgcgttggggatatgctgttcgcctttaacctagctgaaatgacggaatatgttccagcagaagaggttgatggtcgatacatccgcgatgaaacgatgatccgctggatgaggggaaaatatgacaagccatttcgctatgtccttaaacatgccttacctaccggacgattctttctacagctctactcgccatactcgtcaactaactggcaggttgagtttcgccagacaaaacagtgcgggcttataagccaaatcccgaaaatcatttctgcgatgcatgaagctgttccgttgattaagaagcaattggaagaggcgagagtcaaagcagaagctcggcggatccagtgggaactagatgagaagagatatcgggagcgggatcgaataaaagaagagaaagaggcgtataacgccagtttagctgaattgaaatctatcatggcgcagtgggtggaagataagcgtatagagcagttttttcgtgaagcagaatcggatgtatctctggttgaaggaaagcataagggacaggtaatggagcgtctacagctggcccgccagcttttgtcggtggatactgctgttgagcgattgcttaagtggacaacacctcaagagcgattaaataaaaggtaa

SEQ ID NO: 85337 - DNA, 2487 bp, Citrobacter koseri
atgcctgggctttttcttgatttgtcaaaactttctaaaggtgtcgatagtaataccgcaattcctccaagagatatattcaccgctcttcctggtaaaaatgctaaatttcagtatccacgtgatgttcaatcagaggtttgggaaaaatggtttaacattagaaataatcctactaccgttattaaaatgaatactggtagcggaaaaacctctgtaggattgattattttaaaaagttgtattaatgaaggggttggtcccgtagtatatcttgttcctgataactatttagtcgaacaagttattgaagaggcgaatcagcttggtattccagtaacatcagatgagaaatctcaaaaatttattgcagggcaggaaattcttgttacaaatatttttaaattggtcaatgggcgctctgtttttggggttggagatgaaggtgagaaaatatccattggttctataataattgatgatgcccatgcttgtctttcaacgattgaagatcaatttactttaagtattagcagagataaccctgcatatgataatttatttaaaatatttgaaaattctttaatgacacaagggagtgctaaaactctagagataaaatctggagatagaaatgcatatgtgagagtcccattttggaagtggcaagagagtattaatgatataacaaaaatacttctggctaataaagatcataaggatcttaactttaaatggtcattggtaaaagaaaatttaatcctctcgaaatgtatagtaagcgcaagtaaaattgagatatcacctcattgcattcctattcatatgattccaagtctagcaaatgctcgccgaaaaatattcatgacagcaacgcttgttgatgagtcaatattagcaagtcacttcggtattacggatgattcattatctagccctattacaccaaaaacaataggtgatattggtgatagaatgatcttgatgccacaggttattaatcctgagctaagtgatttagaaattaaatccatgtgtaaagagatctcaagtaaccataatgttgttgtcatagttccctctgaatatagagcaagattttggcaggatgttgcagataagacacttgataaagataatttgtatgatggggtaaaagaccttaaaaaccgacatgttggtcttgttgttcttattaatagatatgatggtattgacttgccaaacacagcatgtcgccttttggtcattgatggtcttccagatgttcgcagattggtagataaaacaactcaaagtatgctcttaggtagtgaaaaaactaaagatgaaattatacaaaaaattgaacagggcatggggcgtggtgtacgttccagcgatgatttctgcggtgtaatattacttggtaaagcattaaatggtgctgtatttcttggtacatcgttagaaaaattctcacctgcaacaaaagctcaaataaaactatcacaagaattggttaggatattccctgattcaactattgcgactattaaaggtgctctagattattgtttattaagagaacagggatggacctcaatgagtaaaggtgcattagctggattaacttcaagtccaaaagaaattgattctcatacgatcaataaaagaagagcgtatgattttgcatcaaggaatatggcacacgaagccgcacaaattttaaaaagtgatagcaatgttactgacattattcataaaggctttttgaaggaacatgcggctgaatatgttaatctttatgaccaaagtgaagcccaggtattattgcagtccgcatctggtgataattatcgagtcttaaaacctttgtctggagttagatatagtagattagatggagccgcattggaacaagcaaaggagtgtagtaattatctgagggaaaattttaagaataataatgaaatagtcgtctatacgaattctactcttgaaaatttgatttttatggaaggtacctcaaatccatttgaaaatgcaatcgaccaagttgcaaaattaattggatttagaagtcaacgtcctgagaatgatacagggaaagggcctgataatttatggtcaatgggtgacaatgattacctggtgattgaatgtaaaaatggcgctacagcagatagaatcagtaaacatgattgtaatcaactgaatggttcaggggcttggttcagaagtatgtatgatcaaactgccaccttccgtcctataatgatacatcactctaattttccagagtacgcagcaactttaaatgaaggctctaggatcatgacaatagcagatcttgataatttcaaaaaatcaatcttagattttattaatgctatatgtagctgtgataaaaaacatgatgaaacatttattcgtgaaaggctaatatcgtgcaggctacgtgcatcagatatagttaataattatacaagaaatttcagaacataa

SEQ ID NO: 85338 - DNA, 669 bp, Citrobacter koseri
atgcaacatgaacaatcacttgcagatatgtttagagattttatgagagagcaatcacatgcagcaggttgccgttttcatgctttctctcttgatggacaagatcgcgatacgggggctgattatgtattaaccgacgcagatagatttgcaatagttgaattcaaatatacagataaaaatttagttagtgaaaaatacaaacctaaacgtttaacgttgtgtcagaaattattgactcgtgaagatatgactcgatatcatgacaagtgtcattttatatcttgggctgattcaaaaagcaatcaaataaaaacaaacatttaccgtaaagaaatttgtaacattaccgtttttggttgtaaatgtggattaccagatttaaatcctgttcattcagaacaaatatctgcacttgcgtttgctcaggactttttcaatattcaaggcttacgttcattatcacttcctgaatttgaggcttatttagcctgggtgcttactgaaacaagtgcttcaacaaactctactctcgaattacttgcaagaaatcctaatactaaagaactaatgattatgaggcttaattccctttctgatgcacaaaaatgggtgaaagatcatattaaacctccgtcaccaagaaaacatatgggtatgggctattaa

SEQ ID NO: 85339 - DNA, 345 bp, Citrobacter koseri
atgcgtatttttgtaagttacacaactaaagacagctatatagatcgtgagttgttaaacgatttatataaaattatctcacgttgtggtgattgctatattgacttattacacaacaatgcaaataataaacaacatcatgttgaaaacatgttatcccaggctgacttacttgttttaatcgaatcaagttcaatagtcaaatcgagttgggtacagtgggaattagccgaggccaaaaagaataatataccaattattgtgatcaaagctatgcctgaaaaaagtataactttagccaacttaaaaaatacattacttcatgaacaactcaccccatactaa

SEQ ID NO: 85340 - DNA, 441 bp, Citrobacter koseri
atgcaagaatacaagaaaagctgtgaagacgagctagactgggtaatagttaatcaacttcatgaagcaaccttgcaaataagcaagagttgttttgaattcaaaaaaatatgcgtaggactaattggggttagtttaactttattggtcaagcttactgatagcaaacttgactactcttattttattataccgcttctaatatgtattggtttctggatagcagattcttcggcatattactttcaacgaaaaactcggatagcaatgaatagaaaattaatttccattgctaatagaaactcaattgataaatatcaagctgaacaattaactgtcaccaaacttagcgcagtatttaatcattcaatgagcctttactacatattatctattatcggttgtggtggatggttagcttattactgctcaggaaattaa

SEQ ID NO: 85341 - DNA, 312 bp, Citrobacter koseri
atgcagttgatcacttcacttctaatcgccctattctgtgcttctcccgccttcgctgcccccctcaccgagcgcgaagagctaaccctgtccctcaaccagcttagccaaatcgaagcctcgctccaccgcgcccagcaaagcgccagaaccggcattaacgagcgctactacttcgactatccgcgtatccacggcgatatcaccactctacgtagcgggattgaacattacctcacacccacccgcgcccagccgcgaaatacagcaacgctggtcgggcaataccgtgaggagaaaaccacgccatga

SEQ ID NO: 85342 - DNA, 192 bp, Citrobacter koseri
atgaaggatattgccggatgctggctaacgccttatccggcctacaggccgtactgttgtaggccgggtaaggcgttagccgccacccggcacaatacacacaacgatcagtacagctttttagcgcaatccagccagtcacctttgaacggacgcttcatgttttcgatagcgtcgatgatgtcatggtga

SEQ ID NO: 85343 - DNA, 1320 bp, Citrobacter koseri
atgcccgttaatgaatcagaagagaggttgcttaacttcacaaagaaaacatttctgtcaatgtggtctcacagtaatattttctataagaaaggaaaggaattttgcgatgtaatggtcgtctttggcaatgatgtaatcatcatgtcagataaacttattaagtataatattgaaattgacgaaaaaatcgcatggaatagatggtataaaagtgctatcgaaagcagcataaaacagctaaatggtgcatataaccatataaactcatatcccgacaatctatatactgatgctcaagcaacagagccattctcaatggaattaccacattcggatgaaatatgcattcatttaattgctatcgcaaatggttgctctaacgcatgctatagaaaatacggtcgctatggattaaatattgatacagcatgtaccggaaaagacaccttatttactataggtatacccacaagaaaattcgtccatatattcaatgatagcagcctagataaaatatttacatgtttagatacaaccagagatttcattgattacattcaagctagggaaaacttacttacaacttcagataagcacattaaaatatatggcgaagaagagctattggcagcctggatgcttagccagccaggtaatgctccgttccatatgccatatgaactatttcgtacagcagatgacatttatcatatcggcccaggcctttgggaacaatataatagcgatgaaaatcaaagaataagacatgaaactcgacaaaactcctatactatagataatttgatagatcacattcataccgaatatgaaaaccaaagtttaatcattggtcaagatgaatcaattaattaccacgagagggctttcagattattagcctctgaatcaagacttggacgtcaacttatttcaatgccattaattgaagtcgcacaagaagatcctagattcttttgggctaacattgtcgaatccaatgattttccgggattgttatacttatggttaatttaccctgagataccagaagatgtatctgatgatattgttctaaatatattattttctcaactcagtaaatatttacttgttgcacaatccaagtttagagatatgaaaataatttttggtgcatgcttgccgaatatacaatcatcacgcagggatcgcctttttattgttaatgatgcgtcacactggaatgaagagatgcaaaagctagcaattgaatatgaaaaaaatgaaggtatacttgctaatataaccagcactaagaattttagcattagagcatag

SEQ ID NO: 85344 - DNA, 597 bp, Citrobacter koseri
atgcttaaacgtctggcttacctgactaccggcgctgctctcctgctgctggcgacggcgatgttctggtgcgtcaaccgcctgaacaccctgacactggcgcagcaacaaacacaacgccagataaatcagccgcagccagacagcgattatcacgaactggaggttgccgtaaaaaacatcaccgatcgcacggaagcccttgccagacagcttaacaatgccgccagcgcgcaggccgaacagcttcaacccattaacgaacagatcaaggagctggagagacaggtccagaccctgagcaccagttatcaacacctgcaacaacagtccgccacgcgcagccgcgccacggcaaagcgtcccgtcctctctccgctttgggccgcaaaggcccctttttctctcattggcagcgagtttcgcgccgggcggcagttcgccatcatcgccccatccggctatcgctcgctctcacaacttcagcttgtggcccccggcgacagcgtgcagggctggcaattgctgcaactggacggcagtcacgccacattccgcaaaggcgggcagcggctgacgctgaacgccggaggataa

SEQ ID NO: 85345 - DNA, 606 bp, Citrobacter koseri
atgcccgaccacgcgtcaccaggacccgtgcgtcgccccggactgctcggctggatagcattacttcccggcgtgctggctggcttttgcctcggcgcatggatgctgacaatagcgctggagtggctgggcgatgcattgttctggcagaatgcctgcgccagccatagcgaacaggtattgcaggcaacatggcagtggtggcggggttcagctagcgcaccagtgtggttagtagaagatctggcgcttgtcagcggtacgttgcagcaagggattgcgacactggttcattcgctcaacgggcaaagtgggttgttctggacagagacggtcactacggtgatccgctgcgcgttactgtctgcgggtaacgtcaccctaacctttttgctgcgactggcgattttgttgcaggctctgccgctgtttgcgctcaccattaccattggcctcatcgacgggctggtaagacgcgacttacggcgattcggcgcaggccatgagtccgggtttgtttatcaccatgccaggcgtatggtttcttccagtcttgctgcaatagggttggcatgtttgtcgctgccttccttgagccaaaactaa

SEQ ID NO: 85346 - DNA, 888 bp, Citrobacter koseri
atgcttaaagaacagaaaattataaatataagcgagttcaacctcaaagaaatttctcttattaaaaggtattttcttctaactttaaagaatttaattaaattatttgatatgcaaaatccaaatttaatgcatatgacatccattgataagtggcttaaaaacttattgattctgataggttatgtaaaatggaatcaaaatcaaatgaagttaataattgatagcttgatttctttactagaacatagaacgaaaaatatgatggtttttgaaaatacacaatattttctggctgtgaatgctattttatataaaaaaacacatcctgatatcttaaggcttcttgatgtcatactgataaaaatagctaacaataaattaaatggctatgaccaacaaattatacagaccaatactttgcgcaatatttatgctttgtctgagaatcacaatcatatttacgaaaatactgagttgataaaaaatgctttattgataattaaagctcgtagtgatgagtggaaaaaatttattacagataaattattgttgaatcttaagcgcattggttcggagaaagttaaacgtattatagatgattttatcgtgggagatgttctgatcttaccgtgtgtaacaccaaaggattatatagaacgtctgttgctattggctaatggatatcctatgtctgctagttttttagaggaactagcgttatttattaagtgtaatatacctagtaaactatctgacttggattttatcgttgcaggggttgaaactgaaatgcctcggttactaaagtatttaattgaagaaaaaaatagaacagagtttcaatctatacttgatgattttaatagtcggatgaataatgtttaa

SEQ ID NO: 85347 - DNA, 1812 bp, Citrobacter koseri
atgaaaaaagtttttgtatatcatcgtgttagttcagatcaacaattggatggatctggtatagcacgccaggctgagctgttagagggctacttagatcgtactggcatttgctcggaaatggatgacccaatccctgtagtattatcggatcaaggtgtctcagcctttaagggattaaacatctcagaaggtgagttaggggcatggatggaagaagtacgtaatggcatgtgggatagttctatcttagtcgtagagtcaatcgaccgcttcagccgacaaaatccgttcgatgtaatgggttatatcaatgctctaatggctcacaatgtagctatccatgatgtaatggctaacattgtgattagccgtagtaactctaaagatctcccttttgtgatgatgaacgcacaaagggcatatgatgaatcaaaatataaaagtgatcgtattcgaaaaggttgggctaaaaaaagggaacaagcatttaacaaaggtacgatagttactaataaacgtcctcaatggatcgatgtggaagatgataagtatgtactaaatcataaagcggctgtaataaaagaaatctttgagctttataaaactggtttagggtgtccaactattgctaaagaacttcagaaaaaagaaggtgagagatataaatttaatcgggcatggacaggagaacttgtacataagatactcactaaccgccgtgtgactggtaaaattttcatttctgaaaccatccgtaaccatgatgatttagataatccagtaacacagaagaagtaccaaatggatgtctacccagtagtggttaatgaagatgaatttgaattagtacagcaattactgaagtcacgccgtcccaattctggacgtgtaaccgttaagaaaacggaaaacgaagaagtgctaattaaaagtaatctctttagtggtattgcccgttgtactgaatgtggcggttcaatgtatcataatgtagtgcgtgctaaacgtactccaaagaaaggcgaaccaaaagtagatgaatacagatatatccgttgtctgaatgaacgcgacggactttgtgaaaataaagctatgacatacgaaactgtagaacgttttgtagtagagcacattataggaatgaatcttagtactgtaatgaaagagcaagagttcaatcctgaagtagaagtactacgtgttcagattgaccaagtgaaggatcagatcactaactatgaaaatggtattgaacgccgtaaaagttctggtaaggctgtatcatttgaaatgcgtgaagaattggatgatgcaaaattagagttggaagaactgttagcacgtcaggcatcattagctacagtacatgtagatgtaccagtattacaggatgttaacgtaactgaattgtatgatgtgtataacgtagatatgcgtacacgctatgagaatgaacttaacaagattgtttctaatgttcgtctaaagcgtaacggtaactattactctattgatattacctacaaacagaacgagctaaaaaggcatgtactttttgtagagcataagaagaaggaacaaactttaatcagtgaagtgattattgaagatgtggatagttcaacattctattcaaccccttcatttatgattagggctacaaaaggggaaattcgttttcaacagactaacgaagatctttcaatcattgattacagtttgatgatgaactatgtagatacattagaaggtgctgatacagtcgctgtatggatgcgtcacaatatgaatttcttatttacatag

SEQ ID NO: 85348 - DNA, 624 bp, Citrobacter koseri
atgaaaagtggaagtaaaatcaagagctttaatacacttttacttactattgtagttacgctattaattgtagctattttagtcggcatgaaaatattgttttccggttctaagggattagaatgggtaactttagtaggagcatggtgtagtgctgcgggtacattaggtactctatgggttgcttacttggcatataaagctgccccccactggttacagacaaaaaacaatgaagctggttttaatcatatatcagcaataatggcagaaagtgacgaaatttcatcaggattgattagattatattttgatgttttaacagtgggtaattttcctgataataaaaaatcaatacagtcaaagattgaggactatgcttacaagactttaactctaaaacgaaaattaaactcttgtagacgatggggaataacccaccactccgatttatctagttatttttccctactaagagacttctgtaatacttcatcagaaattttcagtaaaggaaagctaccagaactttgtgataaattgactttacaaaaaaatgagatagaacgcctatctgttgtttttagtcaagatatagaaataacatttaattttccaaaataa

SEQ ID NO: 85349 - DNA, 168 bp, Citrobacter koseri
atgttcaaatgtatcatctacacgaaatactctgtcagtaccaactatactttcaattttagcatttgcacgataagcattaatagccgatatttgactaatttgctcttcagtcattccctttctatcagtatcatgaacgattttaaatggaatgttaagttttga

SEQ ID NO: 85350 - DNA, 300 bp, Citrobacter koseri
atggcgcttacaaaagttgaaatgtcagaatatctgtttgataagcttgggcttagcaagcgggatgccaaagaactggtcgagctgtttttcgaggagattcgtcgtgctctggaaaacggtgagcaggtgaaactctctggttttggtaacttcgatctgcgtgataagaatcaacgtccgggacgtaacccgaaaacgggcgaagatattcccattacagcacggcgcgtggtgaccttcagacccggacagaagttgaaaagccgggttgaaaacgcttcgcccaaagaagagtaa

SEQ ID NO: 85351 - DNA, 1257 bp, Citrobacter koseri
atgaaactaaatgcccgtcaaattgagaccgccaaaccaaaagagaaagcctacaaactcgctgacggtggcggtctgtatctggaagtaaccccgagaggctcaaaatattggcgtatgaaataccgccgtcctaatgataaaaaggaggaccggttagcttttggtgtatggccgacagtcaccctttctgatgccagggcaaaaagagatgaagcaaagcgctttttatctgcgggtctggatcctaaggagcaacaaaggggggcacaggcagaggctgacggcacattcacctttgaaacgattacaaggaaatggcatgcgggtatgttgaaacgctggacagaaacacacgctaacgccgtattaagatcccttgaacaatacatttttccccatattgggaactctgatatcagaaagctcaccacccgccaacttctggccgctgtgcatgaagtagacgcaacagcaaaacatgatgtagccaagcgattacgccagagaataacctccgtcatgcgctacgccgtgcagaacggtctaatcgactcaaaccctgcgctggatatggccggcgcgctgacagcagctaaagtcaaacatcgccccgcgctaccccctgcccgtataccagaattgctctcacgaatagccgcttaccgagggagaacattaactcgtctcgccgtagaaatgaccttgcttactttcgtgcgttcaagtgaattgcgatttgcacgttgggacgagttcgatttagcgcgggcagtgtggaatatccccgcgcagcgggaagcggtggagggagtccgctattcctggcggggtatgaaaatgaaggaaccgcatattgttccgcttagcaaacaaatgctcaaaatactggagcagatacagaacctatgcggcgacagcgacaggcttttcccaggagatcatgatcctcgtaaggtcatgagtgaaaatactgtcaacaaggcgctacgccaaatgggttatgacacccaaacagaggtctgtgggcacggattcagggcaatggcgtgcggtgctttagtcgagtccgggagatggtcctatgacgccgtagaacggcaaatgagccacgcagaaaggaacgatgtgagagctgcatacacccacacttcggaatatctggaggaaaggcggttgatgatgcaatggtgggcggattatctggatgctaacagggagtcttttgtaactccttacgacttttcactcatatag

SEQ ID NO: 85352 - DNA, 552 bp, Citrobacter koseri
atgaaagatatttcaaacattgccgtatctggcgaagatggtgtggtgacgtatgccgatggcagccaggaagagttcgcatgcagtggaactgtggcgaccatcattgcaaatcttgcaacgacacttgataaagaacgcaaaatgcgcatcgccaccggcgaccgcctgcgccgcatgtacacccgcgacagcgatatggtttcccgcggtctgaatggtgcgccttctctctccacgtcacccacggcgctgaacgctgagttcatgcgcctggtacgcgccgtagcgccgaaatacgattcagccctgcccgatgccgacccgcgcctcgtcgcgctcgatgtgctgcgctacgcccctgctgaggcattcagtgccgtacaccctaccccgatgtcagaaattcagctggatcaggctatcgacgtgctggagcaggtaggcgactacatgaaggccaacaacgtcgaaccgaaggttttcaacactggcgacgccatccgcagcattaacgccgacaacgccagtttctggggcaaaaaacactaa

SEQ ID NO: 85353 - DNA, 189 bp, Citrobacter koseri
atgtctatctatgacccgaaattagcagcaggcaacacacagagcggtcgccgccagatgctgacccgtcaggaccttgaggcggcaaaagcgcgaaataacttcgatcgccagagtcgcagcctgcagcaactcaacgaatcaaacgcacagttctggagtgaacaggatgagaaagccaaacgttaa

SEQ ID NO: 85354 - DNA, 177 bp, Citrobacter koseri
atgagaaagccaaacgttaagccggtcctgctgtccgccgagcagatgcaggccatacgcaacattcaggaacgcgagcgccagcgctccgatctcggcgtcgcccccaccgttcaccagatagcccgtggcctcatggctaaggcgctggcctcactggcaaccgagggcgcgtaa

SEQ ID NO: 85355 - DNA, 672 bp, Citrobacter koseri
atgggtgccattcaccagatatatgagcaggaaatgttctatagctggataggcgatggtaaacgctgtgtagcgttccacgaagcgggccatgcagtagctgcatggcttattcgcttagatatgcaggttatcgccgttatggatgaatccggctacgttgctggggaacatgtacatgaagcccagtgtttgggcgttgttaaacacagcataattcacagccacgatctcgggcgtttacgggagagtaaatctggtgtagttgggcgcgatggcaaagttatccctttcatccgctactacgcggacggtataaagcgcgatgcaataaaggccgcttttgtagccctcgccgggccggtaagcgaagccctttacgaaaacgacgacgttttcaacaaaaggtattcgcggcctcaccgctacgacatggctaacgtggatgacatgctcgatttgatatgcgccacagatgaacgaattaacagggcgttaatgctttctaaactggttgaaaagactaaattactcatatcacaacactggtcgaaagtagaaaagatagccgatgtattggaacgtgatagcgtggttaatggccgcaatgttaattcgataatcggcatcaacgtcattgaccaagcaacaccatttttactggcagaataa

SEQ ID NO: 85356 - DNA, 1059 bp, Citrobacter koseri
atgatgaataatttaatcaattacattgttttaacccctctggcattaatactcacaggctgcaccgcagggaaaatcgaccccgcaaaagcgttaacacaaatgcatatcgtcaaaagtgatgactataagaaacgccccggctggcctgcgttggttcgtctgggtaccgatgattgtgagacatacaaaagcggtggtggcagtctctttaagtgggacgggctgacctgcgacgataaaagtattatccaggcagttaatggcaaacctcagaccattcctgtgttctatgccgcttaccatgaatacgggagctatggagtcggggaactatccagttttgacaatagcacccgaacaggcgaggaaggctcgaagattttggttaacctgaccacaacattgaataatccggcaaaagttgacgccatctatgctgactatgaaaaggatcgctggagcatggggcttggtacggtcaacgaaagcgattttaaaaatagtctggctacttttgccctggaacgggataagctcgcttccgaataccagaaattgcatgatggaaaccaaaagcgttaccaggcagaacgggacgaacgaatcaaacgtgagaaagaacagtccgtggcctccgaaaaaacgattgatctcgcgctatggcagaacccaacgaccgagcagcagatgattgttgacgcgctgcacaccgttaaattcacaataagaaacgatggcgtggcgtacgccaacggccgccgatttatgtcagttgccgggctggaatctctcaggaatagcctggatctgagtatggcctcatgctcagacgttggggcatatatcggtgagaaggcattaaatcacgcatgtgttcagggtatggcgaggaacattgtcgagtggggcaaaaccgccaacgaccattctatttcagacagagcatggaacgcagctgcaatggatggcagcattaactacaacccggtcaagtatgaaatcctgttctcgcattgggcgggaatggcccgtgtctactcttctcgtgggtactaa

SEQ ID NO: 85357 - DNA, 720 bp, Citrobacter koseri
atgaaagcagatcctatccctctgatttaccctttcgaaaatccatcgttggccgctgggctggcggcaatcaacgcaaccacgcctttattcaaaactgaggccaaacaccttgaaacatggttcaaggaaggtgttatcgcccgttatatgctggtagacgacatacgggaatcgtggaaccgtgaagggctaggcgcgttttttgatttgattttcggtgaggcaaagggctgcaggttgattgcttctcgccgggcaggtatggagtggagtcggctaaaaggcggtgaaataccaacatattccgtttatgccgttgataccgccgaggcgctgtatgcagaggaatgcgaagaaaacagcccccctgcacgtaatctcaacaaagcggcggtatcccgcgatctggctgctcttgaattaccgatgccagaaccggtactacctcgctacgaagcgcagaaaatttacgcgatgatccacggccttagtgcacctgaaactgcacctaaaaagcaagcgcccgaacgagtgactgcagtacaaagcaaagctattgtggagttgctcacagcccacggatttaccgccgatgactacaaaggcacaatcccggcattgcagcaaaaactgaccagaaagggtctgaacggaacgctaaccagcgttgataaaaatgcgctcactgcctggctaaagaaagccggtgttcgctaa

SEQ ID NO: 85358 - DNA, 213 bp, Citrobacter koseri
atgaaacagtcccttatccgcttacccgaagtttgccgcagaactggcaacggcaaatcctggacttacaagcaaatcaaagaaggtcgcttcccccaaccagttaaaaccgggttccggtccgtggcatgggtagaaagcgaggttgatgcgtggatcgagcaacgcatcgcagaacgcaatactggctacgctggtggcgaaaatgcttaa

SEQ ID NO: 85359 - DNA, 195 bp, Citrobacter koseri
atgtcaacagtaatacagcgcgataaacagcccaaaggcggaggaaaggcaccagctttccaggtgagaatagccccagaattgaaagagcaattcgaagccgccgcacgagatgcaggtatgagtttggctaattggatgaaaaccttagggcgcaaagaactccagcggctgggtattgagccgaaagcctga

SEQ ID NO: 85360 - DNA, 201 bp, Citrobacter koseri
atggctggattacagcatacccaaactcaccccaaatatcagtaccgttttatggcgctcgatcgcgcagaccgccaggcaaaaccctgcaaaatcattgtcgaggccaccagcgagcatgaagcgcgcaaggtgctggcacctcactacatcctgtcactgtccgccgttctgccagtccaggaggtgcgtcatgtttaa

SEQ ID NO: 85361 - DNA, 195 bp, Citrobacter koseri
atgtttaacgtcattgttacggtcacctatcacttttcgggaacagcacgccgatttgcacttccggagcgcttcactaaacgtgagtgcgcagaaaaagcggcgcagcgggtaaaccacaccagctacctggacgatggtgcgaccagaattgtgacccacgtgggggaagtagtggaggtgcgccatgtatga

SEQ ID NO: 85362 - DNA, 189 bp, Citrobacter koseri
atgtatgacgcctacctgaacccaaaggatgccatccgtccgatcgccgttgcactcgaggccgcgcagtttatcgcgctcgacccggagaacaccgatttagcccatgagctgatcgcctgggcacttgaaacagccgcgcgcgcctcagctgcgcaacgtaacaccccggaggtggacaatgcttaa

SEQ ID NO: 85363 - DNA, 309 bp, Citrobacter koseri
atgcttaatctcaatacctggaatcttttcacgctgccgttgaacggtggcgcagctgaaacagcacctggcgatctgcgtctgctggccgctgtgggtgacgaggctcgcaacgactacctgcgcggggtgagcgctatcggcaatctgatcttctgggcgtgcgataaccccaactacaccgaccataaagccgatatgccggcgctgggcgcgttcctgaaacataccgctgatatggcgcgcgccgccgagttcatggcggggcatctggacgcactggccgacgacaaagagggggacgaataa

SEQ ID NO: 85364 - DNA, 183 bp, Citrobacter koseri
atgagccgacatagccagtctaccgcgcatctcttcgctgtccgtgtccgccagttgggtaatccggttgtgcgtgaaggttttacctataccacgcaaggggacacaaaagcggacgtaggcgataaccgtcgtatgcgtcgaacgattaaagcaacgttacgtaaggaaggaaagttatga

SEQ ID NO: 85365 - DNA, 2415 bp, Citrobacter koseri
atgagcggatttgatcacctgatggacaaggggccgaaaacaacccctgcccgttttactgcgagtaacttttctgacctgtgcaaggccattctatcgcaccgtgtgcaaatttccatcacagcggaaatgagcgacgaagaacggcgcaaagaaaagcagaaattatactggttctctgcaacaacccagcaggacggccagcgacgtaaacccgagaacatggcaccgtgcgccttcggtatgctggacatcgacggcagcacccccggcgcaatcacagcacttgtaccggtgttccgccaatattcaatgctggtgtaccagacggccagccatacggcggatgaacctcgtctgcgtatcgtgtgcgagctttcccgcgcggttgaatctgacggccgccgcgcgacaggtgaatctgtagaaacaatgttgatgcaggaagccggattctcattcaccagcctggcggataagaaagcacgttgggagaacggcagcgattatgttgtctttgaccgcaacgtatacggcgctcaaagctattgctactgcccgcacactgacgcaaaagcccagaactacgcgggcgcggtgatcgacgtcggggcgttaccggaaccagccctgccaccagcgaagaccatcaaaagcaagccaaagaaacaggctcagcgcgacgccgcggcggtaatagatgctgattttgacgatctgagcgccggaccggataacttcattatcgccgacctgcgcagcgcgctttggtttccctcaatgttgcaaaaggcatgggacaatggggcgtggattgagcagggctaccgccttgcatctctcaaaggcaccgattttgaggacgacgcgcggcagctgtggatcgagtggtcattgaccgcggcggatggctggccggatgaagaacttgatgaagtcgcggcacaacgctgggatggcctagaccctgacaaaaccagctataaagctatttttactgatgctcaggcgcgggggtggaacaaccctggcaaatggcgtgcgaaggccgcttatatcggcgatatggcccccagtacccgcggcgaattgctggcgcagtattatggcaacgtatgcctgaaagctgatggcaatatggtttatcgctataccgggcaggggtgggagcacatcgccgatgccgagctgcgccgccagctttcgcagattttccaggataacaaagtaccgtttaacccgaacgaggttaaaagtgcgattgaggctatgggaatgcttctgcctttaatgggagaaacacctcgtaacctgattggctttgccaacggcgtttatgatctcgaggcgcagcgattccgcccccactgcccgggcgactggctgaccagccataacggcgttgaatacacgcagccggttaaaggcgagaccctaaaaaacaatgcccctaacttctggcgctggctgcatcattctgccgggggcgatttcgacaagatggagagaatcaaagccgctctgtatatggtgttggccaaccgctacgactggcagctgttcatcgaggttaccggtgcaggcggtagtggtaaaagcgtgttcacaggtgttgctcgtatgctgacgggcgaacagcacgccaccagcggcacaatggaggacatggacaccgcacgcgaacgcgcatcttttgtcggcaaaagcctgatcaccctgcccgaccaggcaacatatacgggttccgggccgggtatcaaggccataacgggcggcgatgtggtaaggatcgacccaaagcacgaaaagccattccatacggttattcgcgccgttgtcatcgcaacaaacaacgagcctatgcgtttcaccgaacgacaaggcgggatatcgcggcgccgggttattttcccgttcaaccatgaagtgccggaggcagaacgtgatcaccacctgctcgataaaattaaagccgaactgccggtaatcgtccgtggtctgctgattgacttcaaacagccaggcaaagccaaggcgctgcttatcgcgcagagggattcagcagaagcgctgcaggtgaagaacgacaacgacccgatgtatggcttttgctcttacctgctgggtttgccgaatcccgatggtatgtacatgggggacgggcgcatggcgcgagagccacgcatctacctctatcatgcttatctggcctatctggaagcctacggttatcagagaagccccactctgccgaagttcagcggagatttacgggacacgctcaaagcctttggagttgtattggagaagcatccgacaaaaaaaggatacagatataacgttaacctgtcaggaaatgcacaagaatggttgggagaagacgaactctcagttgtgcccgacacattgcagtaa

SEQ ID NO: 85366 - DNA, 678 bp, Citrobacter koseri
atgaaagtttcatttcagatcaaactgtttatatcgctgattgcttttttctccatattatttgccttactgggtggatactattatatgcacgtagaaaagcagctttatcaggagatgggagccagggcgaaaatacaggcggaagaaattgcgcttattccgaatttgcgaaaagaagtcgtggaaagagataccacggcgattcatcaatttatgcaaaaaatagccgcgcatagcgacgccagttttattgttatcggagataaagaaggtatccatctgtttcattcggtttatgccgacagagtaggaaaaaagctggttggtgacgataacactgaagtgcttcacggaaagagcaccacgacaattcgccgtggcggcctgggcatctccctgcgcagtaaagcgcccattgttgacgatcagggcgaggttattggtatcgtctccgttggatacctcaccagttacctcaacaccattacggtgaataaagccgtcagtatcctggttgccgccatcctgctgctgatatccctttttgtcttttcctggttcttcacccgcagtattaaaaaacagattttttcactggagccgcgatgtagcggttcacaaaaagcgcgaacgcgatccaaaaaagatgcgacaccgtgttgtgtcgcattttaa

SEQ ID NO: 85367 - DNA, 1320 bp, Citrobacter koseri
atgtttcaccttgataataacagcggcatttcctccatgcctgcacccgctgcgcagcagagttccgccacgcgctggtttaccgaaggtggcggaaccgactcgccgagctggccggggcaggactggtttaatatcgtgcaggccgagctgctgaatgtgttgacagcggcgggtattgcacccaaaaaagcgcagttcaatcaactggctctcgcgattaaagccattgtcaataaagacgctctgcttaaaactaatctcctgagtgaaattaaagacgccggtgcagtagcgcaaaaaacagctcgcgataatattggtcttaaaggtggtgcgactgctgacctcactacatctgatcatgatataaccgcaggacgtttacttaaggtcggtgattacgggcttggtgtgagtaacggtagcgtgaagtcgttagccagtatttacgatattacttgctcaggtgagtataatgcgatgggaagcggaaccacctcgccgacagtgggcatccctgctgattctggtaatacaagattcgccgtttacgctggcaatatttacagcaatcaatacctggtaactttgaccagcaatgtacatttttatgttggtcttgttaatacagctaataaaacagccacatggtcaaaattctacaatacattcaataagccctctgcaccagatgttgatgcagtatccgcatcgaatggaggtgtgtttagtaaattcgttcgatttaatgaagggcttactctgcgggggagtaaggtcggtgatgccgggatggtcggtattcatcccggagcagatgccgccagttttgacggtgcaaatctgttattagaaagctggtatggaataggtttttatagttcttttcctgccgatgctccacgcggcatcatgggttatatagatgtccgtatgggacgactggcaatgaaagaacaggtcattccaggcaattatgcgaactttgacgcacgctatcaggctaaaggtaattacacccctgctggtcaggcttatacgaaagcagaaagtgacggtcgtttccagcctaaaggaaattacacgccagcgggagaggcttacacaaaagccgcatctgatgcgcgttatgtacagaatatccgcgtaagtgcaacgcaagtccgttcatttagtgatggtggtgggtattcctctaacgatgcggcatttgcaacggcgattgcgatggtgggcggaagctcgaataacggttctctgcttgtccgatatgtccagaaattagttaacggcacctgggttaatatcacgacctaa

SEQ ID NO: 85368 - DNA, 426 bp, Citrobacter koseri
atgtttgagcaacttaaagacaacgctggtactgattgcgggcaggctggcccgttgcattgcagcgtggtggtcaaatgttcgcgcccggtgtatcgccgcgcgggtttcgtgttcgttcgcggaaaaaacaccctggaaaacgtttcgccggaacagctggcgatcctgcgttccgaccctgtgctttcactggtatctgaagcgccagtgtcgccggatgctttaccgggggggatggacgttctggatgtgggtggcctgaatgcccgtatccgtgacgcggtagccacgctggataaggccaattctgaccacttcacacagagcggagcgccccgtgtggcggctgtatccggtgtgctgggagaaaacatctcggcggcacagcttaaagccgcgctggaagaggacgccgcagaatga

SEQ ID NO: 85369 - DNA, 450 bp, Citrobacter koseri
atgacaatatctaaagaacagtggagtggtatccagaatacgctgggcgatctgtacagccaggttaagtttaaaatgccgtcaggcgaagtgattagcgtcatgaagtcattcgtctctgagaacaaaaccgcgctgattgtctggattgatgatacccgctgcgatgcgtggggctggaaaagtcatgatgaatatcggcctgtgactgagcttgtgtggcgtagtaagacctacaggccgggagcttccatcattcgccgtgcatccaaaaccagagacgggcaacggtggcttaaacggaaagagaatgcgtatgtacatgaagtggtggaataccgtgtgtgctatttcaacaccgcagcctcgcttgttcgccagtaccgcaaaattgaggggctggaactggtaacgccagtttctgaggtgatgaaaaatgcagagggctaa

SEQ ID NO: 85370 - DNA, 261 bp, Citrobacter koseri
atgaaaattgagagattttggtatccgtttggacgtgccgtaattggcttcggtttttcctctgagctttggcatatagaacgtaaaaatggcggaatatttatcagttttttccatttcggatacaccccagatcttaacccaactgcgcggtttaaggcttcacttgtatgtctgactctactttgggtcacgttccgatttggttttgttgagtttgggcgttcaacactcactggagacagctatgacaatatctaa

SEQ ID NO: 85371 - DNA, 426 bp, Citrobacter koseri
gtgttaaccggcgggcggcgcaagcagctggaaggagagctgaaagagggctattacctcgaaccgaccatcctgtttggtaagaacaatatgcgcgtcttccaggaggagatttttggcccggtgctggcggtgacgaccttcaggacgatggaggaagcgctggaactggctaacgacacccagtacgggcttggcgccggagtctggagtcgtaacggcaacctggcgtacaaaatggggcgcggtattcaggcgggacgcgtatggaccaactgctatcatgcttacccggcgcatgctgcgttcggcggctataagcagtcggggattggccgcgaaacccacaaaatgatgctggagcattatcagcaaaccaaatgtctgctggtgagctattccgataaaccgctggggctgttttaa

SEQ ID NO: 85372 - DNA, 573 bp, Citrobacter koseri
gtgctacaaatagcaatccagaacattaaccaacaccagggtaagttctggttctcaataaatattccaccctgcatcgccaaccacgaaaacctgctgcggatgatggaaacggcgcgccagcagctacagcagccgcaatggtcgggtagattagtactggaatttgcagaaacggtcgatctgcatcagcaaggaagaacagcagaaaatatggacaaaatccaacggcaaggctttcgtatcttcctcgatgactgcttttcacacagcagcgtaatgtttcccgtcaggacaatccgctttagcggctacaagctggatatgagtatcgtgaatgattttcaacgcgatccacatgcactggcgctgataaagagcctgctctattactgccagttgacgcagagccgctgtattgccgaaggcgtcgatagtctggagaaattcaatcagttgaaagcgctgggagttgaccgctttcagggctatcttttctcgccgcccatcactcacgatcgtctgccggagataatccagcaatttttaccgaaacatcccgcacctcgctga

SEQ ID NO: 85373 - DNA, 150 bp, Citrobacter koseri
atgcaaaccttatcatcacacccgacacgggcgactcagcccaatctgtcacccattgaaacctggcaacggctgctgactcatctgttatcgcagcactatggcttgacgttgaatgacacaccgttcagtaatgaaaccaccatctga

SEQ ID NO: 85374 - DNA, 876 bp, Citrobacter koseri
atgaataaacctcatggccttcagaaatttgaacaaccgctggcatctcttccgcacacgcttcgccagcttatccttgaacgtattcaaaatctgactcactacgagccggtgattggcatcatgggtaaaagcggtgccggtaagtcctcactctgtaatgaactcttccaaggtaaggtttctcccgtcagcgatgtgaacgcctgtacccgtgacgcactgcgctttcgcctacgcagcggtgaccgtagtctcgttatcgtggacttgcctggtgtgggggaaaaccagcaacgggatcatgaatacaccgcgctgtaccgccgtattctgcccgagatggatctgatcctctgggttatcaaagccgatgatcgcgcattgtccgtggacgaacagttctggcatagcgtgatggtagcgcaccagaagcaggtgctgtttgtcatcaaccaagccgacaaaatcgaacccagccatgaatgggataccaccaccagcacaccttcactccagcagcaggcaaacctcagtgccaaacagagcgccatcacggcaatgtttaaaccacataatcccgtctgtgtgctctccgctcttagtgggtggggaatggaggcgatggtggcaaacatgatgcgcagcctacctgaccgcgcaaccagcccggttgcgacacaactgcacgggaggctatgcacagagccggtaaagtcgcaagcccgtaacgatttcggtgaagcggtggggagggtgtttgatacgacagaatcatcgtcgctcctgcccgctcccctgaaaactgtgattcgtaccgtacgtgatgctgtggtatcggttgccaggagcatctgggactgggttttcttctga

SEQ ID NO: 85375 - DNA, 909 bp, Citrobacter koseri
atggaatctgctcgcgataaacgcactggagagattgttgaggctgaggatctctggttgctggatagcgttgatactgaaggctacgtgtgctggggatgtggtataaccatgtatcctgctgcatgggaaaaagataaaaaagtcagagcttactttaaaaagaaacgccatatccaacatcatcatgactgtgacgctgatgctgaaagcatagtaattcgaaagggtcagaaggagagtgtccgcaacatactggacagtgctccaggtttaatgccttcgggattaaagttgattgaacaacgcccggttgtggaacccgatattgcaggtggtgaaaacaagtccagttcgacgcgttcagcatcctcaggaactggggaaggtcattcacccgaacgacaatcccggcgtcaagtaaataccatccgcaatatttgccgggccttcctccgcttcccatatgatcgagaaatgtcgctaaacgttcctggtatcaaggggctaacttactcagaggtgtttaaaaaactccaaagtaaaattcagctctaccccgagccaaagatcttttatgcagaactactctggaataaatttgttgaagatgatgacaagctcatcatcccgttgtctggtgagtgggcagaagacgaatccggaaagcgtaaaccgtcccgaagttatcagatccacataacttggactgggtggtcaaaagctaagcgtactgtggtacgtaaagagttggaagctgctcggacagaggcgcaggaggctagagcaaaaagattgaaagataaggccagggtcttctttatcggtgagcaaagtgctgataacccggagatcttctacgtcactgattaccggttaatttgtgcgctcgtgggacatatgacttaa

SEQ ID NO: 85376 - DNA, 621 bp, Citrobacter koseri
atgaaaacgtataagggctctcacggtgagcatattctggagtacagaatcaaaattaaccaattactaagtcgcttgactgatcgttacccaagattaatggccgtacgtgtcgatctccattatcctccaatactggaagataccgccagttgcttccatgtcccgacacctaaagccatctctaaattccgagattcagctaaagctaagcttgtagctgaccgtatacgtaagcaacgtgaaggcaagcgtatctatcgctgcccaatgtttatcatatgggtaagggagttttctacatcaggtaaatgccattatcacatttgcctgttgttcaacaaagacgcttactaccacctcggggactacgaacgcgaagataacctaagagggatgattacaggggcgtggtacagcgccttaaagttgcaccgggaagatcatccgagtctggtacatttccccgacaactgtcgctacgtgctggatagcaatagccctaattttcaggaccattaccaggaactgttaacgcgtctggattatctcaccaaacttggttcgaaagtgtttggcgagggagggcgtaacttcggctgtagccaaatcgaattgtga

SEQ ID NO: 85377 - DNA, 564 bp, Citrobacter koseri
atgcgttcatttttataccttgtcagcacagaaaatgacgactctaggttacaccctgcttgtcagtctatatgtacagaattctcgatattgcctgataatgtggttattgagatcatcgataatttgcagcctttatcagaccaacgcttactggatgcattacttgctgacaaaatgaataaaggcgatctgctcatcgtcacaaacttgagtagcctcggaagaaatgttgaggatattgaacaggctttatttttttgctttcgcaaagagataaacgtttattgctatcactcttacacaaggattgagccaactgccgagagctgtatttcttttctcatcgcagctcaaacaaaagtcgatattcaaaatataaaatcaaccagaagcaaacatagaacaatcaagaagccattaggaaggagagaaggtagtaaatacaaaactgatattctcaagctcaaggctgcgggatataaacaatcacaggtggcaagaatattgaacataagcacatccaccgtcaaacggcactggagcaccaaaattatcggttaa

SEQ ID NO: 85378 - DNA, 759 bp, Citrobacter koseri
atgtcgcgcatacctgttactcttaaccaaccagccattaggcaaacaatcaaaaatacagccaaacgaaacaactgcactgaatcatcggtgctttcatcttgcgtaattgcatgcgccccatttttagaaaaaatgaatgcggatcatcaatctatacttaacctgcaaggaacgcttcagaaagccatcttgaaggagactatttctcaacatagaagtgagcgacaaatttatcctgagctatattttagccttgcttttgaaacctgtataaaggatcaaaccctgatcaccccagcaggcagccatcagcaaaaagccataaatgatgagatgaataaaacagaaaaagaaacaataaaagcacagatggaagttctcttagagtcgagcaatgcaaaaaaaataatttacatttaccatgctcgttatgttgatcctaaaactttatttacatatgggcaggcaaacatcatcccaattaaagaagtagtatatgaaggccatgctttcgattttgacaacattcaagtaatgccaacttcatatttaatcgctgtcggaataaatgaattacttaagatgaaaggaatatttcttccccacccatgcatttgttgggtaagcatctgtcatatcaatagcttttcagtaatgcttcctgtcgttcgcgaagtagatatatcggttaacagcaaagcatctggtgatgtcattattatcaatccattctcaagaaaattatcacagatataa

SEQ ID NO: 85379 - DNA, 207 bp, Citrobacter koseri
atgaacacacctaacgttaaaattcttcgcctttctgctgttacggagaagactggcattgcgcgttcgactgtctacgattggattaatccaaaatccccacgttatgacccaaccttcccgaagcaacgacgtctgggtcagcaatcagtcggctggcttgaatcagagattaacgaatggcttttactccgccatccggtctag

SEQ ID NO: 85380 - DNA, 852 bp, Citrobacter koseri
ttgttttcagaagcatggctttatgatgaagttcgaatgaaaaaacaatttcttgaagaggaaatgaagaagacaagctggaaaaagtatttaaaagtttttgacccgaacttccctgccacggttgacgctatcgacaggatgaggaggaatttttggggcgatggtactgcagagtttagaccgttatgctattcacttcgctatgagaatgaatactcataccagaaaattggcgaaagatattcaggtaaaagacttccttctagccagtatgatccggttgatgcatgctggaatgaactgcataaaaatgtaattatattcaaaaatttatccattcttcatgacaagagtcttgatgggatgtttgaagtaactatggtatcaagttgtcttgtttatcactggggattatccgttctgtcagaaaacaaggtaattgcttcggcagcattatatgaagcatcaggcctattcgatgtttgtcttggaatgttatacgcaaagttattggatgaaaaacaaaagaaaatctccaaaaagagaatgaatgcagggaaaaagggaggtgaaactaaagctgaagcttataaaaaaattcagcaggagttgattaagttgttagatgaaaattgtcctgagggtaagtggaaaacaaaagtagctgctgttgagcatgtctttagcgccttatggacatttgtggaaaaagttcagtcaggagacataagcagtcccctatcaactatgaatgaggaaaaaatgagggatcgcatagcggtatggtcgacaaaaggagagctcaaagaggcatttaaaagaaatgtctcaaggaaaaataataagtaa

SEQ ID NO: 85381 - DNA, 1266 bp, Citrobacter koseri
atggaatgtgcggggctttttgagcatggtatttttgagaggaaacccaacccgaccatgctgactgataccaagctgcgcaacctcaagccaaaggacaagctctacaaagtgaatgaccgtgacggcctctacgtggccgtcacccctgcgggttcgatttcgttccgctacaactactcgatccacggcaggcaagagaccatcaccttcggccgctacggtgtcggagggatcacgctagcggaagcccgcgaacggctgggcgaagccaagaagatgatcgcctcagggaaatctccagccaaggagaaggcccgagacaaagcccgcgtcaaggatgctgagacattcggcgcgtgggccgagaagtggttgcgcggctatcaaatggcagattccacccgcgacatgcgccgtggaacatacgagcgagagctaaagccgaaattcagcaacaggaaactgatagaaattacccacgaggacttgcgggcgcttactgatgccatcgtagaacaaggcaggccatcaacggccgtgctttgccgcgaaattatgatgcaggtcttccgctgggctatcgaacgcggacagaaggttgagaatccggccgatctggtgcgcccgtcaactatcgccaagtttgagccacgagatcgagcactgacgccagatgaaattggcttgatgtaccagtacatggagcgcattggcaccacaccttcgatccgcgcggctgccaagctgctgttgctaacgatggttcgcaaaagcgaactgaccaacgcaacgtggaacgaaatcaatttcaccgacgcgctctggacaatccccaaggagcggatgaagcgccgcaatccccatttggtgttcctgtcgaggcaggcgctggatattttcatagcactgaagaccttcgccggcggttcggagtacgttctgccatcacgttatgactcagacttgccgatgagcagcgcaacgctcaatcaggtgcttaccctcacctatcggctggcccagaaggaagggcactcgctcggcaagtttgggccgcacgatttgcgacgtacggccagcacgctgttgcatgaggcgggctataacaccgactggatcgagaagtgccttgcgcacgaacagaagggcgttcgtgccatctacaacaaggccgagtaccgcgatcagcgccgggcgatgctccaagattgggccgacatgatcgacgagtggacaatcaggaagacccgccccaagaactga

SEQ ID NO: 85382 - DNA, 231 bp, Citrobacter koseri
gtggaaaaagaattaaggagagcaagtaaagttctcattagcaaaaagcaactgctggagatgattccgctgtgcgagcgcacgatctacaactttgaaaagcaggggaaatttcctcagcgcattgcgctcagtagccgcaaggtcgtgtgggatttggcggaggtcgaggcatggattgatgcgtgcaaacattccagcccggcccctcgtcccggaatgggggcctga

SEQ ID NO: 85383 - DNA, 1059 bp, Citrobacter koseri
atgagtagccgaaacagcggtcttaagcccataggcgcggtaataggcgactctggcgggctactggaacgccttgaaaatatcaggaagcggaacagtgaccgaactccggctgctgaacgcggtagaccgtctaacgtctcgaccgtgcatgaacagatggaaagggcaaaagagcgggacaaagcgttgtcacttgtccgcaagcctccacaaggcgacgctcagccagatttttttgcgcccagcctctatgacgtgggcggccgcgacaatcgcagcgtcatggatgtggccgtgttccgtttatccaagaaggacaagcgagccggagaactgatccgctacgacctgccggatggatacgtggaagtgtccgcaggagcgcacggaatggcctccgtttgggactacgacattgtgctgatgatggtgtctcacttgaccgatgctatgaaccgctatcgagaaggaaagggtggcaagccggggagagtgtttcggctgcatgttagcgacatcctcagatttgcccgacgtggtaacggtagtagtcaggttaagggagtggaagccgcgctagatcggttgcggggtactaccatcaagacagtgcgcgaaagcggcaagttccggacaaccgaagccgaggggctgatcgcgcgctatcgtgttctgtcacgcacggacaccaagaagataagttctgtcgagattgaagccccggagtggatttatcgagaagtcaccgagggcaagcggccggaggtacttacagtacaccgggactactttctgatcgagccgggcataggacgctttatctaccgactggctcgccgtgccgcaggcagggatagcgctaaatgggctttcaagaccctttacgaacgcagtggaagcggtggctcgttcaaaaaattctgtttcttacttcgcgggatcatcaaagccgatgacctgcctgaatatgccttgtgcgaagaagcggggaaggatggccctctactggtcatgaggcaccgcaattcctcgtcggaaccgctgggcggttcctaa

SEQ ID NO: 85384 - DNA, 327 bp, Citrobacter koseri
atgatgaacgatatattttttggcctgatgatgctcggcggcttttttggtctcggtattggtatgtgggcgcttggccaatggctgcgacgcaaaggcttcggtccgcagctcgatgcactggataagcaatacacggcactacagcatcgtgtgaaccgattggctctgcctgccgctgcgcatttttacggcggcatgggtatgcttaatcgcatgccactgttcggcagcaagaatcaggtagtactggtagagcgtgtgagaatggccatccttcagatggaagaggaagaacggcagcgagtcaggggcatcaatcgctga

SEQ ID NO: 85385 - DNA, 1644 bp, Citrobacter koseri
atgcgacgttcaaccgttttcgcacttgtcggcgcggcgctcttgctatctgcaactagtgcgatggctgccggggtcgatttggcgcagagcaacacgtctatgaacagccttctgcggctgattcagaacgcttcaaaccaatgggcaccgcgcctgcatgactacgccttgtggctcttgggatgccttgccgtcatccagttagtttggacttttgctcctttggtcatacgcggagctgaactgggagacatcctccatgagctggtgaaattcatcctcgtgatagggttcttctatgcgatgctcgagcacgcgaccgagtggggcggggccatcgtcaacagcttccggcaggccggggcgcacgcggcagggttgggtagtgcggagctgatgccgggggatatgttctcaactgctgtggacttttcacggcaggtgctgacggccggtgtgtcgatgtttagcccaatcacatcggttgtagtggccgtgtctgcattgatcgttctaatgtgctttacgttcatagcggctctggtgttcgtgacgctcgtagaggcctacgtcattatcaatgccgccgtcctgttcatgggtttcggtggctctcaatggacacgcgaatatgcactggctcccattcgctatgccgttgcagtaggtgccaagctgtttgtcctgactctgattgtggggctgatcatgcaggtttccgcagaatggtcggcagcctacaccaacgacgaagcgtcgttgatgaccttggtcggcctgtctttggtgtgcgcctacctgaccaaaaccatccctgaactgatcggcggcatgattagcggcacgtcgatgggcggcggctctgcaattgggggcatggccgcagccggtgcagccggtgcggcggccgcaatcgctactgttgcaacagcaggggcagcagccccggctgctggagcactaggagccgcgggaactggcggaggcgctgccagtgccgcgggtggtggactggcctccgcattgaacgccagcatggcaggcggcagtaccgcaggaggcatcggtggtgcgacgggcgtcggcagtgctggaattggcgcaagcacaggagggagcagcggtgcgaccgcaaaggccgcaggttctcgcgtcgggggtggtgccgcgtcaggatcggcgaatccagtgtcggcggccgcttcgcctgctagccaagaatcaggcagcggcttgaagcaagccgccaaacaggtcggaaaagctgcgaagggtggtgtcgacgatatggatcagcaagccgtcgcgcagcaacggcagatgacaccaaaagaagggactggcggcaacggcaaggctgttgcgcagggcgccgaggtggccacacgggcgcttggcgtgctgggcgctataagcgtacccggcatggaaagctcccacgggctttcgctcgggggcaccggatctccccctccagtccccggcggtgacagtccaacgcctgacgacggcgctgagccgactgcacaagcggaatccaacattattcgtccgacatcggacaccactagcaccggagacgtcggcgcgctcaatgtgcccggcatggcttctaatgttaactctcaatcggaggcgtaa

SEQ ID NO: 85386 - DNA, 183 bp, Citrobacter koseri
atgatgatttctaaggcgctgattgccgccctctgcctcgtctcggcccttggtgggtcggcaatgacggccgtagtcgtcacgaacaccgccgcgccggaatgcgcagcggtcggcaatggccatcaggatgaccaattccgcagccgcccaaacactcgcggcccgtctgaggggttctga

SEQ ID NO: 85387 - DNA, 792 bp, Citrobacter koseri
atggaaatggaatcgcaaaaaacgtcgacttatgccgcccgaaaattcggtcgaggcgcggcgctcgctctggcaatggcaagcgcaggccttggtgtaagtctctacatggcaccggctccggcctatgccatctactgctcgaactgctcgacgttctatcagcagatgtacgagtacgccgaagcggtcaacacgcaactaaacaccgcgcagcagttgcagacgcagatccagcagtacgacaacatgattaagcagggcatgtcactgcccagccgcatgttcaacaccatcactggcgaccttcagcgtgtagtgagcgtctatagctcggcgcaatcgctcggccgtaacattagcaatctagatgaacagttccgccaacagttcaagggctatgacagctatctgaactcgattggccaaggacagaacaacattccgcagcgctatcgggattggtcgaaatccggcttcgataacgcccgcacggccttgcaggccgcaggcgtaaataccagcactttcggcgatgaaaacgcaatgctggatcagttggtaaaccgttcgcagtcggccgttggtcggcagcaggccattcaagcagggaacgagattgcggcgcagaatgtgcagcagctccagaagctgcgcgatctggtggccacacaaatcaccctgcaaggcaactacatggcgcagcaaaacgaacgacagtccgttagcgatgcctccgaacagcaattccgtagccgtgaaaatacacgcggcccgtctgaggggttctaa

SEQ ID NO: 85388 - DNA, 225 bp, Citrobacter koseri
atgaagacagctcaccgcatcagcgcattggccaatcaactcaacgaactgcaagcctgcctcggtcgagccagtgggcggcctagcaagagcgttatggaagccaagcgcatagcggccgagctggcttctttactcgaagattggcaccttgaaacgctacacatccctgaaccggagcgtgacctctatcgcgtacagaatccctattacacggcccactga

SEQ ID NO: 85389 - DNA, 210 bp, Citrobacter koseri
atggcacgaaaaaccctcgcagagcgccgttctgatgccctttcggagcttgaaatggcgaaagccagattggcaaaactcgacaatgaggcagcagaaagaatcggaagaattgcaataaagtcaggattggttaatcttgagctgacggacgatcaagtccgggaagaattcgacaaaatagtggaaaggatcagcaaggggaattga

SEQ ID NO: 85390 - DNA, 1077 bp, Citrobacter koseri
atgacggcagtcgagctaccagaggatttttttgcaaatatacaaggggttttccgcaaaacacctgttttacttattgggtcggggttctcatgtggttatggcctgccagggatgggggcgttggctgagcatctggctaataacgtttatggcgcactcgcgacggattcggcacggaatgcttggacccaatcaattaatgcgataaaggagaatttggagacaggcttaaataatattccacttggaatggcggggtgggatgagattttgtcggcaatccgtggggaaacagcgaagctaattcttgataaagcaatagcggcagaggcgcaaattcttgtcgaaaaaatagcggaccaccatgccccctcacgccttctgaagcgtctatttttaggatctcctcagaatgcggaaagcattcatgtcatcacgacaaattacgataccctgctagagctcttttgcgacctggcagagttgccgttagacactggatttatggggtttcgacggcgtaggccgcgacctcatccgctttttcaaactcaatacagccgagtgttagtagccgagaagcgccaacagcaggtcgatcaccgtctatgtaaaacggtgcgattatacaaaccgcacggttctatcagttggttgacaacaaaagatggaccaattgaagtactaaatgacgtatctgttgctgagcgagctattgttgtgccgggcccttcgaagtaccaagacgcattagtcaacaccctatttgacgcaatgcgtactgagatgaatcaggtacttgcggaggctcaagctctcctgtgtataggtttcgggttcaacgatgatcatttacaaggcgttatcaaacaccgtttggcggctggaatgcctgcaatcatagttactcgtgattcaacctccagcattgatcggttgctcggtgaacatcctcatgtgatcgctttgtttaaggatggtgatggagctatttgtcattggaatggtgagcagttcagagtgtccgagcctctttggcaacttgacgatttcctcaaaaaatttctggagtga

SEQ ID NO: 85391 - DNA, 1791 bp, Citrobacter koseri
atgagtatttttaatttttcagaagagcaatccttgggcgaagttcgcagtgttgaaacctcaagaataactgtgcgagtgactgacggccagcgtttacagaaagcacgagttggaagattagtagctattcaatctgtaggagatgaatggttaattggaattatcgaaagagtttggcgacatccagtagagttgccttcgtttccagaagtagatgaaacaattgatttgtcagcagtgccgcaagaagaaaatggaatttctataagtttggtaggaacttatcgttctcgtgatggcgtgcgaaaggatgtatttacgcgtgcagtatttatattgccagagattaataggtcagtgttccctattgaggaaaagtcactcgaagattttatgggcatattaagcgcgtcatctaaagctgatgcagtcgcgccgctcaaagtgggtacttatactttagatggcaaagctagtgcttatattgacggtgataaactttttcaacgtcatgcggcgttattgggtagcaccggttcagggaaatctttcactgttgcttccatacttgaacagtctgcgcagctagctcacgccaatattgttgttcttgacttacatggcgaatattccagtatgaagttcgcttcccattatcgtatcgcgggcattagcgatattaaggcgaagggggatggtgcaatttttctgccgttctggttgctgacctatgatgagatgcaatcggtatttgttgatcgttcgggagataatgcacctaatcaggctctggcccttatggattccgtggtagagatgaagcgtgctgccatagcggcgcttggcaaacatgaattacttgaaggttttacagtcgatacgccagtaccttacaaattagatgacttggttgaatcccttgataagaaaaatgaagaagttattccaactggggaagaatacgtcactggggcgaagaaggggcagcctaagactgaaaaaggtccattgaacggcaaactctctcgattcctcattcggttgaggacaaaaatgaatgatcgacgttatgccttcatgtatcaatctcccaaggaatacgaaacttatgaagcattgcacgaactagcgagtaagttactcggtacgggaaatgttgcagatggcgtaaacccaggtatcaaaattatcgacttttcagaagttccctcagatattttacctgttgtagtaggtttggttgggaggttgatctatcaaattcagttctggagcgatccgggtaaagatggtgatggacgtcatccagtagtgatcgtttgtgatgaggcacacttgtaccttcccagcagtgcagcctctactggaccattagaaaagcgggctttggagaactacgagcgcatcgcgaaggagggacgtaaatacggtgttggtttaatggtggttagccagaggccttctgatgtgagtacaaccattttgagtcaatgtagcaacattataagtttgcgtctcgctaataagacagaccaatctgtggttaagcaacttttgcccgagagcttggaggggttgatggaggtgctgccgacgctggacgtaggtgaagctgtcgttgtgggagatgcaacattgctacccacacggattaaaatgtctaagcccaagcatgaacctcgtagcgcaactattccgttctggacgcgctgggataagccaaaggccgacgttgatttgattgctgccgtagagaacatgcgtcgacagtcgcggaccaacgattga

SEQ ID NO: 85392 - DNA, 198 bp, Citrobacter koseri
atgaaagatagaccgcatgacgtggcgatggccgagcacttccgcgcccatccgacgtatgcagcggagctgcttgctgaagtctgccgcgaaggcaaccctgctgagctagccattctgttgcggcagatggccacagcctcggaaggttgcgcgaggtcggatgacgccgatacagggcgcgctttatttcgctga

SEQ ID NO: 85393 - DNA, 1323 bp, Citrobacter koseri
atgtaccctatcgcaaacgagttaaaagtgggtaacaatcaactggatagttacctgcctgtgcgcaataaaaataacgatattagctggcaattcgtcaccggtctggtccttagctacgccctgaaacgcaaaatcgaagcttacgatcccgaacaattccgtgaagattgtaaaacacatctgcaggagctgcttgatgagcctgcattctggtccgtgctggaacggatgtatttttccagtcaggatattttccgtgtctccccactttttttactgttccacgcccagtttaatggtgaaaaaataagtgccggttcaacggcagataaacgacttggcacgctatttgccaatttgatgggagatttcagcctccgttatcccatacaggacagactgaacttcatcgagcagcaaatgctgaataagctcaatgaaaaaataaagctgttggggaaaggaccgtttgccgaagagcaaccgtatctcccgtatatggtaacgtgttttcagtctgatctggcatttctggcagaacatccgcagtaccttttacaggaattgaccaacaccctacgtttgtacgcttttagctggtgcgctcaactggcgctcaatctggacaactggcaggatggcgaaccacaaagcaaatcactgttttttattcttgatagcgaaaaagccagctccgaacgggaaaaggtgaaacgttatggttataagctgttcgccagccagagcgaaaaactgttcccggttctctctgcacttgaggttttgcagtggggaaaaggacagaaaaagcgtccgttatggcagatttatcaagatactctgaatgattcagactcatctgcccgagtacttaatgaccttaacgtatatttgcaggattttattgtggatcgaggcctcccgcttcgtgaacgcgcaacaaacctggaaaatgccttcaaacagctcttatccgttgccgtagagcagtttcagggtaaaaaaactgaccgcgccacggtcaatcgtaaatacgttaacgagttggaaaaccagatttgcactgacttcattcaggtccgtggtcgggcagggaaagtgctggtgctgaatcaggatcgtcttctgttactgaccaatcttacagtgggcaaaaatgacaaactccgcctgcatgaactgctgcgtggttttgaacagcgcggtttttatcttgacaaccagtcggcgcaaacgctggtggcgttttatgaacgcatgggaaatgtagagcgaatgagtgatagtggagacgccgtgtatgtccgtaaaacagtatga

SEQ ID NO: 85394 - DNA, 1074 bp, Citrobacter koseri
atgaacccatttcgtgttttgtgcttagacggtggtggaatgcgtggtgtttatcaggccacgtacttacagactttttctcaaaggctaaatcagacaggttttaaacagtctgaccctggttctgccttcgatctactggtaggtaccagtacaggaggaatcgttgcttgcgcattagccgctggtattcagcttgagaaggttctcgagctttaccagacttatggtaaagatatttttccacggcagcgactccgtgcccttccttttgtaggtaaatacgttcgcgggttatgctcgggactggcttcaggtgattttgccttacgcaaagtgcttaaagatacctttggtgaagaaactatcggcaaagtttatgaacgccgaggaatcggtttagccatcactactttagatttaaatcgtcactcctcaactgtatttaaaacaccgcatatggctcgcctaaatggacgagacaatgatcgactactggttgatgtatgtatggccactagtgctgcacctatccttcgatcaattgcacgccttgaggagccaggctctggcggagcaatcgtcgattacgttgacggtgggctctgggctaataatccaggtgctgtaggcatgatcgaagcccatgaaattctccagctcaggggcgagactgaacgccctgtgcatttattcatgctgggcactcttcctgttcagggaggtgaggaacttgccagtagcagtatgttgcaccgtggagctttgggatggtctggcggcctcaaagcaatcactgcgagcatgaatgcccaggcggttgcttgcgattatatggctcggaaaattgccgagttgagaggcaatggcagttttgcatacagaatgccagctcagtgcccctctggggagctgcacaaatacctcgaaaatatggatgacgcacgcccaagagtactaaatgcattagcccggcaggcagtgtccgacgttgattacgcatgggctctgaccgaatcaaataatcacatgaaagaatttcgaaccgccctgtcgattaaatctaatacctaa

SEQ ID NO: 85395 - DNA, 1065 bp, Citrobacter koseri
atgacgttaattgactgcaataaagaaatgaaagggtatcattcagaaaaagtaactctgtcaaataccgaccagtctgaaatgcgtgaccgtcgtgataatggaagaaaacggctcgaaaatggcctgactcgctcatcccatccattgccaaaagaatttagctctcaaggttcttatgcgatgcgcaccatggtccaggacgatttatgtgattacgacatcgatgacggaatttatttcaacaaagaagacctgaaagatgaaaacgataattatcttggtgcgcaggatgcgcgaaagcgagttcgaaaagcgttgaaagacgacaggctggcctatgatgctgttgttaagacaaattgcgtccgccaactctaccctgatggttatcacatcgatatcccagtataccgttcatttatcacaaaggacttttggggtaacgaaacaactgaatatgagctcgccagtggcgatgagtggactaaatccgatgcccgtagggttacacaatggtacaacaatgctgttgcttcagagcttaaaactggtcaggctgataccagccaacttcgccgtgttacaaagctgaccaagaaaatggctcgttcccgtacctcatggaaaaagaaaaccacaagcggtatttgtatttcgaaattagttatagatcattttgtttgtcaggcgggccgagatgatgatgctttacgtgaaacgtggaaggtcatcaaatctcagctgacatatagcaagcgcatcgggcatccagtgtttgcagataagaatcttgcagaagaaaacgatgaggccgtagctttctttcaagaatgcctaactgaggcgctaaatgcacttgaagtgcttgaagagtataactgcactcgtgaaaaagccgcgcttgcctgggataaggttttcaacactgattatttcagtacagaaatcgctcaggacaccaatatgtccaaatctctcatgcgcccagctgtcagcgcatcggcatctctatccttccccgctcaccccgtcacacctaataaatcagcggggtttgcatga

SEQ ID NO: 85396 - DNA, 1770 bp, Citrobacter koseri
atgatgagttggttactggagaatcctgcgcgctttttgcgtgagcagaaggagctcaaacgccttgagagtgagcaagagtggctaaacatggctttgcgctttcagaacgatggtacgttgacagtagaaataaacatgactattcatggtcgcgtttatgaagggaagatgacttatccggactcatttccagattctccaccctatatccgtcccagagatcgttccgagaggtggtcaaatcaccaatatggtgaaggggggtcactgtgtctgcaatggcgagctgataactggcagcctgacataaccggggcggatatggtgctcagtgcatttgagttactgaatacagagcagcatcccgaactaccaatttcagtcccttcagcacatcgtttaacagaaggccagattttgcggggttcgatccgccgcttaatactaaccaccgatatcatggaaacgtggagtaatctcccccccctatccagcgccagtttaaaaacagctaccctgttcagttctgacaaggctgtaacattcatcactcagatttccgatgcagagaataatttaaaaaacgtcgaagacgttccacaaagtcttggatcattcactaacttactttcactatccggagaagggtgggtgttcaaaagtgaaggatttgacttgaaattgaaaattaaatcagcagaagatttacttcaggcgatatcagatgagggctttgatacagtagacattctggttaaggaagataataagtacaaggccagaacgatagtgttactaggcagggatggatcgtcattgagaattttttaccttgcccctggtgatgaacccactatacacgaattcagtattatttggccttcatccactgagcttaggttatcagaggaatcacaacggctgacgaagatcagaataggaataattggcctaggctcaatgggtagtaaaatcgcaacctcgcttgcccggtcaggaataaagcgatttttgttagttgatgatgattacctagctaccagcaatttagtgcgtcacgagctgtactggaatcatgttggcgaacataaggtagagggtgtaaaaagtgcactttcactgatttctgcggacattgaagtcgatgcaagtattgttcgtctagcgggacaagaatcctcagtatttatggcttccatccttaatgacctttcaaaatgcgatctgcttattgacgcaacagcaaaccctgaggtttttcttcagttatccgctcttgcgaaacgctataagataccgctgtgttggggggaaatctttgctggagggtacgggggaatgattgctcgttcccgcccgagttatgacccaaatcctttggccgttcgcgacgcattttatagtcatctatcaactcttcctaaagcaccttttgatagagcccaaaattacgatggcagtgaagaacagcctctgaccgcatatgacagtgatgttggatttatcgctacagcgctaaccaggcttgctattgatacagcattatcaagagatcccagcgtattcccttactctctatatttgctaggcatgcgttgtgagtggatttttgagcaaccttttgacacgcatccagttcatgtgtctggagctggatgggatatcgatgacacaagcgtcagtgaagaggatctcttagctgccctacaagcgatacggcaaatttatgaaggagaggaacgtgctgaacctgatacttccggctga

SEQ ID NO: 85397 - DNA, 462 bp, Citrobacter koseri
gtgctgaacctgatacttccggctgaacaacaggcaattataatggacgctctatctaaagccgggcgccgcgaaattggtggggttttaatgggggaacatattggacccaatgaatttatagtacgcgaaatgacagtgcatcgttgtggtacatttgcctactttgtcagacggcttgaagaagcaatcagtgggttcagtaaattttttaacgaaacagggcataattatcagatatttaactatatcggtgaatggcactcccacccatcttttgaaccgtaccccagcagtaaggatgacaggtccatgcttcaaattgttcaggataaaaatgttggggcaaacttcgcggtccttgtcattgtcaaatctggttcaaaaggtgagctaatcataactgctcacacctatctcccaaatggaacgaaaagcgaatcagaaataacttttttatga

SEQ ID NO: 85398 - DNA, 543 bp, Citrobacter koseri
  misc_feature (399)..(406): n is a, c, g, or t
atgcagaaaatattggttaatcgccatccaattcttttaattgatgaaagccaagatactaacaaactgctaatgaatgcattactcgaagttgagaaaaataacagagatacattctcggtgggtctgttaggggacatgatgcaaaggatatactctgatggtaaaagtgatttagaggcatgccttgacgaacactggaaaaaacctgaaaaaagcattaactatcgttctccaaaaagagtggtcgctttaattaatttaattagaagccaagtggataatcataagcaaaaggccaaagaagatgccgaggaaggatatgtaagaatttttataaaagaatgtcattctgataataaagatagagatgaatcttttgtaaagcgaagaatgagnnnnnnnntacactatcctcttcgtcggcagcgtcagatgtgtataagagacagattcattagtaaacaccctaatattagaacatcatatggccgcaacacgtatgggctttatagacatgttcactcctctctatcaaattga

SEQ ID NO: 85399 - DNA, 2265 bp, Citrobacter koseri
atgagaataaatttcattgaaattaagaatttcagaaagttgaagtctgtccgcatagatattgcagaaaaaaccactctctttgttggtgctaacaatagcggtaaaacggctgcaatggaggccttaggacatttcctcgttgatgcctcgcggtttagcgtaaatgatttgacactttgcaattgggcaaaaataaaagatattactgaacaatggttaactgaggaaaatatagatcttgataaatcacaggaagctttatcagatctctttcctttcatggatatttggatcgaagcgaaagaaaatgagctccaatatgttaaccatatactaccaacgttagagtggaatggaggtttaattggagtaagactgagatatgaacccaagaaatttgatgttttctttgaggatttcatatcttcccgccaaaattcattagatatacacgaccgaatttctgagcggattgataaagaaaattacacaatagcattgtggcctaaagatatttatgaatatctttcaagaaagttgaattcactatttacaatcaagtgttatagcttagatccttcaaaactagaattatctgataatggaatagccaaaccccaaagaatagacagtaagcaaacattacttgatggcatacctctcaaagatctaataagaattgatgagatcaatgcacaacgtggctttggaagcccctcagctgccgacaaagagaatagcaaattaaacacacagttaagagattattattctaaacatctcaacccaatagaaagccctgaattatcagatattgaagctctacaagccattcgtgatgctcaggatacatttgatgaaagattaaaaaactgtttctcccaagccataaaagaagttgaaggcctcaactatccaggagtaactgatcctaaattaaaaatctccacaaaaatagaaccaattgatggcttaaatcacgattcagcagttcaatatgagttaactaatgctttaagcaatgtatctttagactatctaagattgccagagagttataatgggctaggttatcaaaacttaatctcaattgcatttagactaatggggttcagagatagttggatgaaagttggcaaagctacaaataaaaaattagcagacgacaatcaagaggattttccagctcccctgcatttggttttgattgaggaacctgaagctcacttgcatgcacaagtgcaacaaatcttcattaggaaagcatatgatatattgaggaatcataacaatttaggcgataaagaagagcttcatacacaactcattataagcacacattcgagccatattgcccacgagtgtaaattttcttctttacgatactttagaagaattcctgcttgtaaagaacatgagatccctgtatcaacagtaatcaatctttccaatgtttttggtgtaaatgatgatacagaaaaatttgtaataagatacctaaaggcaacacattgtgatttattctttgcagatgcagtaattcttgttgaaggtcctgccgagaggattttagttcctcacttaattagaagacactaccctttcttaaatcaaagctacattaccttattagagattggtggtagccatgcacatcggctaaagaatctgattgttagtttgaatcttttaactctaattattacggatttagaccctaaggattcacaagatggcaaggttaaaccctctaagaaaggcagcggtttcgttacaagtaatacaacacttgcaagttgggttccagaagttaccggtgtcgatgaattgtataaactcacggaagataagaaagaaaagaaatataatgaattcttttatgtttactcagcttttcagattcctgttttggctgaattcaaaggtgttaaccaagagtttttaccaaacactttcgaagactctttagtctacaataatctagattttttcagtaatcttactggtaatggtttagtgaagaaatttaaagcatcaattactaattgcaaaaatgcagaggaatttggagaggaatcattttcacatttatctaaaggtaataaagctgaatttgcattagatatactttaccatgacgaaagcgataaattaaacacacctaattatataagtaatggtctaaagtggctcgaagaaaagataaaaataaaacaattagagcttgtttctgatttagccagtgatggagaaaccaaatga

SEQ ID NO: 85400 - DNA, 399 bp, Citrobacter koseri
atggtaagaagtagcacccgtcttgtcgttattttgtcattgccaggagtagcgtttctcttactattccctgagtttgtgctttcaatttttgggcgtgaatatactcaagcatctatcatacttagaatagtttgcattggtcagttaattaatgtcctgacaggatcggtcgctttcttattaacaatgacaggtaatgagaaaatatttagaaatattattttctttaatgcatttatgatgattatcaaccttaacttcatgggggggggattcggcataaaaggaattgcctgcgctgttgctctttctgtgattatacagaatgttattgctgtctattttgtgaaaagaaaactggatatcaatattcttgattatttttatttgaagtaa

SEQ ID NO: 85401 - DNA, 465 bp, Citrobacter koseri
atgactagaaaaaaaactaaggcattgtttgctgttatcgcagcgagagtaattggtgtatccattagttttttgatgaatatacttgttactcgctgggtcaatgtaaatgaagccggaatattcttcacctccttctctattattatgttgtggggacttatcggtacatcagggttttgtgatgccattcttagaatgcgaccgcaacttatagccacaagaaattatatccaggcaagttcattggcattgtttggagcattaataattatagttatatcatgtctgttatcaggagctatatatctttttctgacttacggagagtcattaaaggtctatggtgctttatatatttgtgcgagcatccctcttctttccatgatccaatatacctgtctcttatacacatctccgagcccacgagacgctacgctatctcgtatgccgtcttctgcttga

SEQ ID NO: 85402 - DNA, 237 bp, Citrobacter koseri
atgacctacacattagtttccctggttgtttacgttctgggatttgttgcaatgtatttttattcattgaagcgtgatgttgtgtgtgatctccccagaaatccgcgagaagcaatctggtttgcaatattctggccggtgcttgtcgtgtttatggtaatcgctatttttattgaaaaagtcgttggcttggtctgtgcaggatatcgtcactgtaaaaaatctggaaaatcatag

SEQ ID NO: 85403 - DNA, 1113 bp, Citrobacter koseri
atggtgacaaaaaataataaaacaattaactccattcaaattttgcgtggactagccgcgttatcagtagttttgtatcattacgggttttatcttgttcctgatggtggaaatatatctaatagatttttttcatggggtggaattggtgttgatttgttttttgttatcagcggattcattatgataatagtaacgaatcatagcgaaccgggattcaacaccagtaaaaggtttataattaacaggctgagtagaatattgcctgtttattatgtgattttatttatcacatttctcacaggcggtgctatgagtacattccattatagcgaaaaagtttcaaacctcataagcgcaataacttttactccatatatgcatgaaacagctcccatgtacatactaagcaatggtatgtttaatatacgatggacactaaattttgagttgtatttttattttgcatttgctctttgccttttatgtaaaaataaattactcccattacttacctggtttttagctccattacttttatgcttcctcataaccggagatattacattctctacaaaaggatataattttaataacgtatatattgagctaataacaaatccaattattttggagtttggttttggggtactaacagggctgttgtacttacatctcaagaaaagaaattattcccctcacatattaatttcgttatttattattgcagcaataacacttggtgtgaacacaaaagtgttaactatgtataacttattaacaggcattgcattctctgttctggttttgactcttagcctcagcgaccatttttttagcaaagcatggtcaaaaaaactggtgtaccttggtaacatatcgttctctttatatttgatacataatcctcttgccaattttatatcaaaaaaagtagaaaaatatatagacaacggaatgcataacacattcggtgtgattattatgcttgtggcagcaatccttgctgctcatatctcgcataaatatttagagatccgtctatcaaaactcacgaaatcatggttagagtcagtatttttccgtaaatcaatcttaacaaagcccctgtaa

SEQ ID NO: 85404 - DNA, 1071 bp, Citrobacter koseri
atgaacgttattaaactggccatcggctcaggcatattattgctcagctgcggtgcttacgcacaatccatcagtgaaaaaacaggtaccgataaaaaaggagcggcagaattcagcccgctcaacgtttctatcgggaagacgaccagtgagcaggaagctcttgagaaaacaggcgcgaccagttcccggacaacggacaaaaacctgcaatcactcgacgcaacgctgcgcagcatgcccggtacttatacccaaatcgatccaggccagggagcagtaagtgtgaatattcgcggcatgagcggatttggccgcgtaaacactatggtggacggtatcacccaaagtttttacggctcctcaacctccggtaccactgcacatggctcaaccaacaatatggctggcgtacttatcgaccctaattttctggtagcagttgatgttacgcgcggcgacagcagtggcccggcaggagtcaacgccctggccggtagtgcaaacatgcgtactattggcgttgacgatgtgatatttaacggtaatacatatggccttcgttcacgtttctcagtcggcagcaatgggcttgggcgcagcggaatgatcgccgtcggtggaaaaaccgacgcttttacggatacaggcagcgttggcgttatggccgctgtgagcggcagttctgtttactctaatttctcaaatggctctggaattaacagcaaagagtttggttatgataaatatatgaagcagaaccccaaatcccaactgtataaaatggatatcagaccagacgaatttaacagcttcgaactttccgctcgaacctatgaaaataaatttacacgtcgtgatataaccagtgacgactattacattaaatatcattacacccctttttctgaattaattgactttaacgtaacggccagtaccagccgcggtaatcaaaagtatcgtgatggctcgctgtatactttctacaaaacctcagcgcaaaatcgttctgacgcgctggatatcaacaataccagccggttcactgtcgcggacaatgacctgtag

SEQ ID NO: 85405 - DNA, 306 bp, Citrobacter koseri
atgggaaatggatggcatgaatggccgctggtgctgtttacggtgttcggtcaatgcgttgtcggcgcattgattgtcagcggtctgggctggtttgcggcgaaagacgatgcggccagcagacagcatattgtgcgcggtatgttctttctatgggtcgtcatggggctgggttttctggcgtcgatcatgcacctcggctcgccgtttcgcgcgtttaactcgcttaaccgggtaggcgcttccgcgctgagtaatgaaattgccgctggctctgtcttttttgccgtaggcggtttctggtag

SEQ ID NO: 85406 - DNA, 198 bp, Citrobacter koseri
atggaggccttcaccgacaacgatcagttcttccacggcgttggcgtggatggcgtatacctgccgttccacaaggccaatcagttcctcggaatggaagcgctaccgacctttatcaccaatgacgtcatcaaaatgccggatgtcccgcgttatatcgcagaatatcgcaagcatctgagcgagatttttggttaa

SEQ ID NO: 85407 - DNA, 378 bp, Citrobacter koseri; identical to SEQ ID NO: 83255

SEQ ID NO: 85408 - DNA, 279 bp, Citrobacter koseri
atgacttgtattgttaaagatgttgaagagaatgaacaagtaataaaactcactttgcaaaatagtgataatattcatgtcaaagattatgactatttcttcttatcagaatcagcacatgagtgtgatcaggaacgaatgattaatacatatagaagattgatttctgaactgagccaagttagcgaagaaacaatagagtccttagttccgaagatatcgaataatatgaaaaccaatttcccggcaagcggtgtgagtgctttggaagatgattga

SEQ ID NO: 85409 - DNA, 1167 bp, Citrobacter koseri
atgattgccgacatcgcttttcatgatcttgatagcgacaacccacatgctcacgttatgttgacattaaaaactataggaccagaaggttttggtaaaaaggaaaggagctggaacgacagaaaaatgtctgttttatggcgtgaatcatggtcagctatggctaacagctaccttgctgccgctggttcgtcagaacgtattgatcatcgttcccttcaggcccagcacgaggaagcgttagaaaaagccgcagttgctttggataatgaagaaaaagcgctatggcttgctaaggccgctgaaacaaatcgtcctgcaatgaaacgtatccacagcgctaaatggcgtagtaaggctgctcaggagcaaagagccaaagaacaagctgttcgtgatgctgccaagcaagaagccgttgaagtctacaaaacattcagtgagcttgatcttgaaatcattgttgatgtcagaagctttactgtggctgttcttgctgaatcagaagagatcgtattacctgaaacacactccggctcttctactgatgagaatcaaagacctgtattggtagcaccagctcctcatactcgtatgcgtggcgttaaatcttaccgtgataaaacaaaagtcagtaaagttgttgctggtaaaaaaccatcggtcagtatttctgattctggatcaaatactattctgcaaacatcctcctctcaaaacccaaacagggcatccagaagcgcccctgaacgtgttaaaaggaaacagactattccacgtcaggataatgtctttaaacgctttacagcccttttggttgattttatcaggggtaaatttatatgggctaaaacaggcaaaactaaagttgatattatcagtgaagaacatgataagcgtattgctgaaaactacgtctttgatgaggtattaggccgtcatgtgtcacgtaatgaatatgaacaacgtgataaattcaataatgatgaaaaacaacatcaaactgagacctgtgtccttaaaccaacgggaaaagaaattagtcgtttcccaagtcgtgtgaaaaaatctgaacaacacaacaacgaaccggagtacagacctacactctcatctggtaagcgcagcgggcctaaattaagaccgccgggctttccgctaaaatga

SEQ ID NO: 85410 - DNA, 1482 bp, Citrobacter koseri
atgtcaaagtttagcgttgcagatattgttaacagagtatgggggtatgcaaacgtacttcgggatgacggtattagcaacggcgattatgttgagcaacttactcttcttatttttttgaaaatgaatgctgaacgcgctgagtctggaaaaataaataaaaatgagatttcagaagcttggagcatgctgactacattgcagggtaaggaattattagagaagtattctaatcttattaagctttttggtgaaaaagatggccttttaggaactatattttaccaagctcaaaataaaattcaagatgcaagtaagttaaaaaaattgatatctttgattaattccgaaaagtggataagctctaatgtagatgttaaaggagctatttatgaggggattttacaaaaaagtgcagattctgagaaaaaaggcgctggacaatactttactccaagagccttgattgaagctattgtagaagtaatcaaccctaaacccaagcaaacaatagcagatccggcttgtggaaccggcggattcttaacagttgcacatgattacatttataacaaaataaatcaggctaacgctgaggaaatcagctttttaaaaaaacatactttcagtggaaacgaaatatcaaactctgttgcacgtttatgcgccatgaatctgtttttgcatgacataggtgtcttttcctttcctatatcagtatctgatgctttagaacggaaaccttcaaaaaaagttgatattgttcttgctaatccaccatttggtagaaagagctctttttctatcaataaaggtaaatctaaaaatgatgaaagatatgtcagagatgatttttgggcagaaactacaaataaacagtttaactttttacagcacatatgtagcatgctgaataaagatggaaaagctgctgtcgtttttcctgataatattctttttgaaggcggttcgggtgagaaaataagaaaaagttttctgtatgactataatttgcatacgatacttcggctgcccactggtattttctatgctcagggtgtcaaggctaatgttctgttttttgataatgccaatgaccttttatatcctaaaactaaaaaagtatggatttacgatttaagaacaaatattcacagaaccttcaagaacaataaattgtctcgtgctgattttgatgagtttgtcaacttctattgcgctgaaaacttcaatagccgtaagagcaattggagtcctgatacgactaaaaatagtagtcctgacggcagatggagagatttctcatatgaagaaattcttttgcgtgataaaaccaatcttgatattcaatggctgaaagaagaaacgtctgactcgctggtaatgcatacttcgtcagatgaattagttgaagatataattgaactactttcgtctgcattgagtgactttaagaaagtcgagaaaattattagtaaataa

SEQ ID NO: 85411 - DNA, 663 bp, Citrobacter koseri
atgctttccaccactgcctttctggcggcggccatgcagtgcgccgccagcattcatccgtccacggcactcgacgtggcgcgggtggaatccggttttaacccgtatgccattgccgagattgttccgaactccggagaatcttccggcgataaacacgttaattctcaccagccagccagtcggggagaggcagagcatattctccgccgcctgatggctcagggccgccgttactctgttggactgatgcaaatcaccagcaccaatttccgccattacggcgtcacggccagcgacctgcttaacccttgcatcaatctgtcggtatttgagcgcattctcgccgactgttaccggcgcggcggcaccctgaaacgagcactcagttgttactactccggcaactttgaaaccggacagcgacgggaatccgcctttaaccagaccagctacgtacagcgcattggctatgtcgtcccgtccacgcgggaagaccggcaccgtgcccctgaccggagtgtacagccctctgtccgttatcccgccgttgtgctgcgcggcgagcctgtcggtgccactgcgccggtcctgacttctctgcattatcccggtgccgtcattcgcggcgctatccctgttatccctgatgaggataaatga

SEQ ID NO: 85412 - DNA, 585 bp, Citrobacter koseri
atgattccattaattaattacaccatcttaactgatgcattgcacgctctgaaagaaggcaatattcgtcactgtaaatccctcggatttactttcgacgaaatgaatgctcttaatcagttatcactcgatgaactgtttacggtcagccgggcggcagttccctttgtttcggtcagtgtccgccatgatgttctgcatcatttactggcgcaggcccgccaggaataccagcatcaacaggagattaaccgtgctatccgcctgggtggctctatctcgttgctcaaccactattttggcctgacatcaaatgaagtctgccttcgtcgccggttgctgagtgtcagcgtgccgtatgggcggacgcctgaaccagatgaagagacagatgccgaaatctggaagcaatggcaaaaatgtcgggtggataaccttgaatcctccgacgcgctggccgccatgatgcaggtgacggaaaagctattgccggacgccgaaggtctgtctctcaccaccatctggaagcgcatcacactctgcgaaaaggaagccgccaacaggagggcatcaaatgccggatga

SEQ ID NO: 85413 - DNA, 300 bp, Citrobacter koseri
atgatcgtcgtcagttcaacaggtcgcacatcatccacactcgccatcgctgatgccgcatcctcggccggagcatcgcttatcgcaataactaaccagtacgataccccactggcgacactcgccaacgtgtcgctcattgttggcggaatgccactcccggcacagatggctgctgccgggagtcgactggcccagctcatcgttattgatacgctggtcgctgctctcactctgcgggataaagaacaaagtcgccgcgctgaacgggcggggattgatttgccggatatgtcctga

SEQ ID NO: 85414 - DNA, 678 bp, Citrobacter koseri
gtgctcagcggcgtcgtcggcaccggctcgtcgctcatcatgctgcccgtcctcatcactctgtacgggccacggatcgcggtacctgttatggcgattgcgtccctgttcggcaacatcgggcgggtgattgcctggtggcatgagatccgttggcggccggtgtttgcctattcgttggcgggagttcctgcggctgtgctcggggcgcacacgctgctgacgatctctcctgccactgtggacatgttcctggcagctttcttccttgcgatgatcccgctgcgccgcctcatcagacgatcgaacctcaatctgaacctctggcacctgagttttgccggggcgattgtcgggttcctgacggggttcgtgctgtccaccgggccgctcagcgtgccggtattcaccgggtacggaatgagtggcagcgcgtttcttggatcggaggcggcaagcgctatcctgctctacgcaggcaagctcggtacattcggtatatcgggcgtccttgcaccggccgtcatcacacgtgggtttgccatcggcatagcattgctcgccgggtcgatgattgcgaaacgtctcgtccagcggctccagatgcacacgttcgagtttctcatcgatgcggttcttatcgccggggcagcaggaatgatcctctccctaaaatga

SEQ ID NO: 85415 - DNA, 174 bp, Citrobacter koseri
atgaaaaggcacgcctgtgctgacggcgctaccggaccgtttatgctgacggcaatcaaggcgggtcgaccaaacccattctctgcggaggtgcagaacgcctgcttaggcgtgtgcttttaccacataatcctccagtgccagggaaccgatggttgcatcctgcttctgtga

SEQ ID NO: 85416 - DNA, 669 bp, Citrobacter koseri
gtgacatccaaacattcgtgcgtactccctactgaacggcgaatagctctcgtagcctcttgcatacgcagaggatccgactttcatccgcaggggcgggatcatgagccgcatttccagcaaccgaatccaagtgctgtgagagcattttctgtttcttattcttacgtagccaaccttccagtgcgttcggtttcggtattgctttttcatggcggatatccagcctgcccgctgcgcttttaccccggatactggcttcgatgccgtacagttcaccgatgcgatgcagtgcttcggtcgttatttccgacggggtgcgcacgtgcacgtcgtggattttcgctgtgcgtaagcccagctgtcgcttcctttatatgtcactcgcgatacagctcgttgaaccctgccttagcatctgccttcagcccccctgaacccgcaatatgcgtctgcgggttcgcgggcatggttttatctgtttcatatggatacatttcgagatcacgttacctccgaagatatatccttactgatcactacgaatccagtctaaggcagatgcctgttccggggataagttggcaggtactaaccatttggggaatgtccagggagggggcacttcaaaaatccctcacttcaaacaccgttcagctcgttttgtaa

SEQ ID NO: 85417 - DNA, 906 bp, Citrobacter koseri
atggataaactgggagcaatgcaggtctatgtcagcgtggtggactcgcatggctttgcaaaggcagcagaagtgcttggcctgccacgttcaacggtttccagggttatccgggagctggagtcctggcttggtatccagcttttacagcgtaccacccgcaagctcagcgtcacggcgggggggcagcgctactataatgaatgcaaacggatactgacggatattgctgccatggagtcgtctttttccatccgttctgagcagcccagcggtcgtttcaaagtcgggatgccccagtctctcgcccggcattgcattatccctgaactcccggtgtttctccgccagtaccccggactggaagtgattctgtgctcaagcgataatgtcgaagatatcattcgggaaggatatgactgcgtgatccgcaccggcaggatcgaagattcaactactctggttgcccgcccactacccaactttacctgggttgttctggccgcgcctgcttacattgacacctttggaaaaccgcaaaaactggatgaactggaaaagcattacgcggttggctatctgaatcaccgcaccgggcgcaccactgaatggttttttacgcttgaggagggggaccgggcaatccgtatgagagaaacactggttgttgacgataccgatgcttatattcaggccggaatacttggggttgggttaatccgtgttgccagttatctggttacaccttacctgcaaagcggggagctggtttcctgtcttgagaattatacctttgagttacctctgtccctggtatatccgtatagccagtatataccgccctcggttcgcgctttttatgactggagcagagcaacgttaagtcatccggataatcgtccgtaa

SEQ ID NO: 85418 - DNA, 144 bp, Citrobacter koseri
atgcgctgggcgacgcgacactatgacgacattctgctggcgctctggcagcatctggtactggtcggcaccgcaatgctgatggcgttcgctatttcactgtttctcggcattaccaccgcccgcgactgtatgcgctggtga

SEQ ID NO: 85419 - DNA, 864 bp, Citrobacter koseri
atgaaacaatttgacggtttgcagtcactgcagcaatcgctttcctgtctaccgctctgggcatcggagcgtattctgcagcagataaaccagcttactcactacgagcccgtgatcggcattatgggtaaaaccggggcaggaaaatcgtcgttgtgcaatgccctgtttgccagtgaggtttcaccggttagcgatgtggtcgcctgcacacgcgcccccttacaatttaacctgcaagtaggtgagagcgttatgacccttgttgatctaccaggcgtgggggaaagtagtttacgcgatactgaatatgctgccctgtatcgcgaacaacttccccggctagacctggtactgtggttgatcaaggccgatgatcgagcgctgacggtggatgagcatttttaccgtaaggtaataggtgaggcatatcggcataaggtgctgtttgttatcagccagtcggataaggtcgaacccaccagcggtggtgaaaagctgtctacagagcagaaacaaaatatcagccgcaaaatctgcttgttgcatgagttgttccaaccagtaaatcctgtctgtgcggtgtcggttcgtctgcaatggggactgcgggtaatggcggagcgtttgattcgttgcctgccgcgggaggccagtagtccggtggcggtacagcttagtgctccacttcgtaccgatgccgttaataaaaaagcacgtgacgattttggtgaaacggtcggctcggtactagacacagtaagctccatacccctgataccggtcccggttcggacaattatcctggctgtacgtgacaccgtagtatcgatcgctcgtgctgtctggagttttttcttctga

SEQ ID NO: 85420 - DNA, 1053 bp, Citrobacter koseri
gtggatcttcatctcgatttccctgtgtatttcggaaaatatgttaaaggaatgacaacttttttcagggttatgggtgaaattgggcaagatgctttcagccatttagcttatcgattagaagtattaaacaggctgcatcctttaaagagagagctggaaagtgttataacacagtataaaaaaggcgatataaaaaatttcgcgaaggtctgcaaaaaaatacctggtgttaacctgaaaactcagaaaaggcaggatgtttttgcagcactttacacggcaacatcaattatgtcttcaccttttacgatccatgagcagaacgaagaattagcaaatggtttcccccagctatatattttcttgcatgagatgcaccatgataaaaccatttgctttattgatgaaataatcaaaagtcgttttctaactaatttacatcatgattgccttaccctctacccgaaaatagttcagatggacttgccattacgccctgcctttttctatgattatgtcgatgaagaaaaatacacggctgtacccgctcgtgtatcaactgaccactttgactcttgtaataattattacaaagatctagcagaggttttttcccgacagctaacacttcttgcaggtttaaataatattttcaagcgcggagatcataacgaatttgagccatcgttaaagatgacaagaaaaaatgaggttcgtaaggagctctcgtctcttaacaagtttgctgatatcgatttagggagtaagattcaattcattgatgactgcttttattctattgatatgaaagccatcgataatcgcctaagaaatggtattgctcactacaaatatgaatataacgagtcaactcaagtaatcacctattatcccactaaggaaggcatggaccgagaaaagggggaaaatatttcatttatggagtttctgcgcaagaccctattactttttcgtgagatccataatctcaatcatcttattaaagctactctttactatagtgttttaatcctcaaaaaagatgtataa

SEQ ID NO: 85421 - DNA, 360 bp, Citrobacter koseri
atgagaaggttttctattatttttatttttgttacaggttcctctttggctaatactttcgtttttacgaaagataataatgttctgtcattatctccgggagttgatattgccgagttcagtattaatggatctcatagcaatacttctagtttatgtagcataggaggtatggctgaatctgttagggctggagaagggcagagaaatcgctggatctacagtgattcttcgagtgcatgtgtggcggtgatcagtgaattgaaagatggttctgttaatgtcatgacccgtagttgcgagaactattgcgttatctctgctgttggttctatggatggggagtacagaaaagaataa

SEQ ID NO: 85422 - DNA, 834 bp, Citrobacter koseri
atggtaaatatcataaacaaaaaatctttattcattctatcaatgatggcttacagtacaagttatgcagcttcttttgattgtaataaagcatcttcagatgtggaaaaaattatttgctccgatcataagttaagtcgcttggatgactatctatctcaaaactataaaatagctatgagtccagatatgcctgaaggatccaaatctaagattagagaatcgcaaatagattggcttaacaagagaaataattgtactgatgctcaatgcattgagaaaatgtattctaagcagatggattatctttggaatgaatgcttcgatcatcttcatggaaaaattgaatacgtcaaatactctgaagcaatagataaaattaaaagagatcttgattctcaagagtataataaaactcataagaaacctgaggaagttatcagagaattatcaagcaagaacactaataaagtccaacaattaggatttaataataaacaattagaatcaactttatatttagatgggtttggtagttactttgaataccatactctcaaggaatgtttgtcattgatttttgaacttccggatttaacctccttggacaagataaactataaaggctatgttggttttagaataaaaacaatcggacgaccttactctggttttatttttagagaagaaaataatgagatttatttatccggtctcttggcaggcgataaaattattgaggctactaccgaaaatgacatgcgagaattagctcgtatttttttgagctatacaggttatgttattgacaataataactccaaagatttatga

SEQ ID NO: 85423 - DNA, 585 bp, Citrobacter koseri
atgcaaaaacaaaaaatacttattattgaatcacgcagcgatctggatatttatgatgaaagatgcgagggaaatacgctaaggaaggttttggagttacaaggagtagctgcaaaatgtactgaagtagttaatgagggaatgctagtaaaagcattgaagatagcgcaacgagagcacataaaatatgtacatatcagtgctcacggctcatgtgatggttttattttaacagatgagggttttattacatggagagattttgatcgtatagcatggcctatattaagaggtaaatgtatttgcttttctagctgttcagtcggtaggggcgcggaacaattatttgattttcataagtctttttgtaacgcaatcgttggacccacaagagatattacttggggggaggggcttgtcgcatattctgcattttatcaccgagcacaatcgtatgagaaatcatccttacaggatgttcgggtaatgaataatattgttggtgcgggtacgttcaggctcatagaatcaccatatatatcatctacctatacaattgatggttctctaaaatatgtttattag

SEQ ID NO: 85424 - DNA, 132 bp, Citrobacter koseri
atgacaactaagttaattcagataggcagttatctggctagcactggccctccttattcaccaagggataaagctggcggtattattttctatattgatgaaagtcaggggaagggcggtcgtaattcttag

SEQ ID NO: 85425 - DNA, 1005 bp, Citrobacter koseri
atgtcaaaagaaaacacaccaatggaaccaaacataaatataaaggcagacttcactgagatattaaactcatctccaaaaggcgctaagtatatattcaacattctcttcggaaaaaaacacgctgaggccgagagaaggattaggctatcgaacgctcaagattatgcagatatgaaaaaaattatatctggagaagcaatatatgacaatgagaagaaccaaatagcaccttctaaccaagacattaagtcattaattgctagtgcattgcaggatgaggaaattacaaatcttataggctgcatcagaagcacctctgaatacattaaagatgatactgataacgatggtggtccatcccaagactttattaacagatggcgaagcgatgcgaaactaatcagtgagcagtctatccagtacgtttgggggcgaattctagcggaagaaataaacacacctcaaactgtaagcgtaagaacccttgatgtaataaaaaatctatcaaaagaagaggctgaatatttctcagaggcacttgactttatattttacaattcgtatttaattgataatggagataccaagaatccattcatctcaccagaaaaaggtcataaattgagagatgcaggattaatagttactttttctcctgggatgtatcgcgccgggacatgggatacacaacgttttgttctcagcggagccaccataccaaaagtattctacatcagcagttctgataagtattactttatcgatgcagacaaaataactgacgaccctaaaattcggatatgggagttaacaaatgctggcaaagaattatatgaaattctaaagaaagatcataaaaccaaagaagaatcagtaaaaaaaattattgactggatattaaacgacactaaagcttctgagttttactatggagatattgttaagcattcagacaatagcctgtcagttgagaacttactgactataagcagaaatagatag

SEQ ID NO: 85426 - DNA, 501 bp, Citrobacter koseri
atgaccacgatagtgatgagtaacccgacgcagaagcgcgacccgctggtcatcccgcctgcgccggatgatgagccggtgataaaaaatactgcctttttcccggatatcgacccgaagcgcgtgcgcgaagaaatgcgactcgaacagaccgttacaccggtgcgcctgcgtcgggcgattaaaaacgggatggccgaaaccaacgccgagctgcatgaatggagagaccttcaggtcagcgccggttatgcccgtctggaggatgtgccgacggatgagctcgacggtgaaagcgtgcgggtcttccactacttcaacgccgtatgcgcaatgacgaccgccacgctgtacgagcgttatcgcggcgtcgatgccagcgcgaagggagataaaaaggctgacagcatcgacagcactatcgatgaaatgtggcgggatatgcgctggtcagtggcgcgcatccaggacaaagcgcgctgcatcgtggggcaaatctga

SEQ ID NO: 85427 - DNA, 204 bp, Citrobacter koseri
atgaacgtcatcgcgcatcagggcgatacgctcgacaccctgtgtcagcgccattacaggcgcaccgagggtgtggtcgaggcggtgttactggctaatccgggactcgctgagctgggcgtgattctgcctcacggcacggcggtcagtctgccagaagtggacgctgcgccggtatcggagaccgtaaacctgtgggactga

SEQ ID NO: 85428 - DNA, 219 bp, Citrobacter koseri
atggaaaaaatcacctcatttttcgcttactggctgagtgtgatgctggctgcattcggcgctattacaccgcaggatttcgctgcctggttcggtgtgctgggcgtcgtcatgactgtcggcgttaactggtattaccggcgtaaaagctaccttcttgagctcaaccgtatgcgtattagccccatcgtcgtggctccaccaccaaagaggccgtag

SEQ ID NO: 85429 - DNA, 510 bp, Citrobacter koseri
atgtcatcaatcattaaacgttgcagtgtggccgtcgtgctggcgctggcggcactggtgcctgactttcgtttgcttcacacctcgcctgacgggcttgcgctgattgccgacctcgaaggttgccggttgcgcccgtaccagtgcagcgcgggtgtgtggacgtcaggcattggccacactgccggggtggtaccgaaacgggatatcaccgaacgtgaggcggcaacgaaccttgtcgccgatgtgctgaccgtcgaaaagcggctcgcggtctgcgtgccggtgcaaatgccgcagccggtctatgacgcgcttgtaagtttcgcgtttaacgtgggtaccggtgcggcatgccggtcaacactggtttatcacctcaagcatcagcagtggtggcaagcctgcgaccagctcacccgctgggtatttgttaacggcgtcaaaagtaccgggctggagaatcgccggtaccgcgagcgcacttactgcctgaagggggttaaatga

SEQ ID NO: 85430 - DNA, 414 bp, Citrobacter koseri
atgaaaacgctgattgttctgttaattatggccgtggccgcgctggcgtggttacgtcatgaaaacacaaagcttgcgggatcatttacccgcgcgaacgacatcgccagcgagcaaaagcggctaatcgggatgctgaaaagccagctaaaacaggcctatgaagtcagcgaccagaaggagattgctcaggttgcattgcgggattcgctcactgctgccggtattcgcgcgcaacgtcgcgaacagaccattacgaggttactcaatgaaaatgaacagcttcgccgctggtatagcgctgaccttcctgatgctgtgcgccggttgcaccagcgcgccgcctgcaccgacgccggtgattgtttacaacgcctgcccgaaggtgagcccctgcccgatgccgggaagtga

SEQ ID NO: 85431 - DNA, 474 bp, Citrobacter koseri
atgtacaagccaaagagtctcagagccgctttaactaacgccgtgccggtgctgaggggaaacccggatatgctgcgcattttcatcgataacgggaaactcgcctcgacactggcgacctccctgtcgtttgaaaatcagtacacgctgaatgttgtcgtgacggattttgccggtgatatcgatttgatcctcgtgccgattcaggcatggttgcgcatccatcaggccgacattatgacgaccgacgaagggcgcaaaaaaggcttcacctattttgccgatatcaatgataacgacagtatcgacctcagtgtcagcctgatgctgaccgagcgaaccctcgttaaagaagttggtacccagttgcacgttgagcacgcgccggaaccgcagccaccggagccggtaacgcgccctgtggagctgtacgtgcatggtgaactggtgagcgaatggcatgaacgagtttaa

SEQ ID NO: 85432 - DNA, 450 bp, Citrobacter koseri
atgaacgagtttaaggcgtttgacgataagctcgccgggctgattgccgcgctgtcaccgtctgcccgtcggaaaatggccgcagatatcgcgaaaaccctgcgcacccgtcagcaacgtcggattaaatcgcagacgtcaccggatggcacaccgtatgccgcacgtaagcgccagccggtaaaagcgaagaaaggccgggtaaagcgtgaaatgttcgcgaagctgcgcacaaatcgctttatgaaagccaccggtggcaatgacgcggcggtcgtggaatttaccgggaaggtgcaacggatagttaacgtgcatcagtacggcctcaaagataagccgtcgcgaaacagtaagccggtgcagtatgacgcccgaccacttatcggctttaacagtgaagaccgtcagaccgtggaggaaattataatcgctaaattgtccgtttag

SEQ ID NO: 85433 - DNA, 642 bp, Citrobacter koseri
atgaatactctcgcatctcttcaggaaatttcgcgcctgctgcgcaacatgattcgtaccggtgtcgtggtcgagactgacctcgacgcggggcgctgtcgtgtccagacgggcggcattgttaccgactggcttcagtggctgacgcatcgcgccgggcgctcgcgtacatggtgggctccttccgtcgacgaacaggttttgattctggccgtgggcggtgaactcgatacggcgtttgtgctgccgggtatttactcggatgaccatccggcaccgtcggcatccgctgacgcgctgcatatcgattttcccgacggcgcagttatcgaatacgagcctgaaaccagcgccctgactgtaagtggtattaaaaccgctgacgttacggcgtccgattccattacggccacggtgccggtcgtgctggtgaaagcggagactcgcatcacgctcgatacgccggaagtggtctgcaccaataagctgatcacctccacgctcgaagtgcaaaaaggcggaacgatgaagggcaacatcgagcacagtgacggaaaactcacctctaacggtgtgcaggtggacgaccacggtcacggcaaggtgcagaccggcggaagctggacggagggaacgaagtga

SEQ ID NO: 85434 - DNA, 348 bp, Citrobacter koseri
gtgacgacacgctacatcggtatgaaccgggagaccgggcgcaccatcaccgacgccgatcacatccgacaaagcgtcagcgatattttgcgcacgccggtcgggtctcgggtcatgcgccgcgattatggctcgctgcttttctccctgattgaccagccgcaaaccgaagcgctgaagctgcaaattatgtgcgcctgttatatggcgctgctgaagtgggagccgcgcatcagcatcagctcgctgacggtcgagcgccagtttaacggccagatgattgttgaactgaccggcgagacaaaagacaccggcgaaagcctttcgttaaccatccctgtgagttga

SEQ ID NO: 85435 - DNA, 909 bp, Citrobacter koseri
atggcaactattgacctgagccagctccccgcccctgacgttgtggagacgctggattttgagaccatcctcgcggaacgcaaagcgacgctggtctcgctttatcccgaagaacaacaggaagctgttgcgcgtacactcgccctcgagtctgagccactggtgaaatatctggaggaaaacgcctaccgtgaagttatctggcgtcagcgcgtgaacgatgcggcgaaagcctgcacgctggcctatgcgaataataacgacctcgacgtgatggccgggaacaacaataccgagcgtcagaccgtgatacctgccgatgacagcactatcccgccaacaccggcggtcatggaatccgacgctgatttacggctacgttcgcaacaggcgtatgaggggctcagcgtggcgggtccggtcggtgcgtatgaatatcatggccgcagcgctgacgggcgtgtcgctgatatctcggttgtcagtccgtcaccggcctgtgtgaccatcaccgtactttcacgcgaggatgacggcgcggcatccgatgacctgctggctgtcgttgagaaagcgctgaacgctgaagaggtgcgccccgttggcgaccgtgtgacggtgcagagtgctgaaatcatgccgtatcagattgacgcgaccctttatttttatccgggaccagaagccgaacctatccgtcaggccgctgaagaaaaactcaaggcgtatatcaccgcgcaacagcgactaggccgcgacattcgtcagtcggccatctatgccgccctgcatgtcgaaggtgtgcagcgtgtcgaactggccgcgccactggctgacattgtgctcagtaaataccaggcatcctgttgcaccgaatacagcatcgctgacgggggtgccgatgagtga

SEQ ID NO: 85436 - DNA, 612 bp, Citrobacter koseri
atgagtgataaccggctgttgcccgttggctcgtcggtgctggaggttgccgccgctcgcgcggccgcagatatcgagcgagtgccggtaccgcttcgcacgttatggaactggcgcacctgcccggtgcggctgctgccgtatctggcgtgggcgttttcggttgaccgatgggatgagaactggccggagtcgacaaaacgcagtgtcatcgcctcggcgttttacgttcacgcccacaagggcaccatatccgcattacggcgcgtggtggagccgctcggctatctgattgaggttaaagagtggtgggagctcaacgaggagcccggtactttccggctggtcgtcggcgtcatcgataccggcatcactgatgaaatgtttatcgagctggagcgcctgattgaaggagccaaaccagcaagccgccatctgaccggcctcgccatcagcctgagcacaaccggccccgcatgggtgggcgctggttgctatgacggcgacctgttgactgtttacccctacaccgccgaggaaattgtggtgggtgggacgatgtacccggcttcggccattcatttgattgataacctgcgagtaagcgcatga

SEQ ID NO: 85437 - DNA, 945 bp, Citrobacter koseri
atgacgacaaaatactttgccactttgacaaatcagggcgcggcgctcctggcaaatgcgaccgcactcggcactaaactgaatattacccaaatggccgtcggtgacgggaacggcacgctgccggttcctgacccggctcagacgaaactcattaacccaaaacgcattgcgccgattaactcgctcaatgttgacgctaacgacgccggtcagattattgccgagcaaatcatccctgaaaatgagggtggtttcttcattcgggaaattggcctgtttaacgatgatggcattctgatagctgtcgccaactgcccggagacctacaagcccctgttggctgaaggtagcggccgcacgcaaaccatccgaatgattctggtggtatcgagcacgtcggccattacgttaaaaatcgacccgtcagtcgtgctggcgacccgcaaatatgttgacgacaaagttatcgaggttaagggctatgccgatgacctgatggaaaaacatttggccgccgataacccgcataatcagtacccgttaatcgctaatgccttaaaagaaatggccgacgccggactcgtcccaaaggttctcgaaaaccttggtttgggagaggtctcaaaagcgggtgtcgcatctggtgttttaggttctgccggatatatcgcaatcccgatgattattggcggtgttcgccggagtctaatcattcaatgggggtcaacggcgacgggtttagctgggcagactgtcaccctacctacggcattcccaacgcaaatttgtggctgcgccggatgtgagagtggaaatactctcgcaatgaaagtggttggcataatccctaaaacactttcaacaatcactgttgcgggccgagatgtcggtgtttctacgctcgttaacacagctgtgaaatggattgtcgttggctattaa

SEQ ID NO: 85438 - DNA, 480 bp, Citrobacter koseri
atgaaattttcaatcgaaacacaaagtttttatgccgatggtttaaatttcggggaaacgatgcctgatgacgctgttgaactgacagcggagcaggaattatctttttatcaggctgttaataacggttgttatatttatcagaatagcgatggcttgaaagcgtccgaacccagaccagatatttatcattcctgggatgacaacagcgcttcatggataatgaccagtgaagcgacagcgcgtaaaaatctggatatacagagcgcagcaatgactgacaagcaacaacgcattgatgccaccaatacgtatatcaacagtaaacaatggcaagggaaagccgcacttggacgactgaaaggtgacgaactggcgcaatacaatctgtggctggattaccttgatgcactggaggccgttgacacctccagtgcaccggatatcgggtggcctgatcctcctgtagtacaggcttaa

SEQ ID NO: 85439 - DNA, 159 bp, Citrobacter koseri
atgacaaaaaaagcagcacatactcagatcaccaagaatcaaatctaccgtgccgtcgccagctcaaccgcgatcgaaaccggtgtttctgtgcaaaaaattgagcagcaacttaagcgcaatcaggcactggcgaaagccgttggcctcgcccgctag

SEQ ID NO: 85440 - DNA, 1044 bp, Citrobacter koseri
atgacgcaaaaattttacacactggaagaaatggtctctcgctttggtgtagatgttgatgtgttcatccaggcatggatagataagcgactgccgctatatatttattttcaaaatttaccttgtactattaggcgttgcgtttcggctgaagtgcatgagtgtggcaaaatggatattcaattcggtcgtgattactaccaaagtaaagacagcccaattcacgatgtaatgatgtttgtaccagaagacccattaagtgcacatttcaaagttagacatcgctttgaaatggggggtggcgatggaccaagattgggtgaatattacgaatacagatatcgcggatatgctaatggttattggctcgcgcaaccaacacgagttactcacttaagccgagaaaaatatttattgaccgataaagagtctattgagtgcatgcaatcatctccaggtgatgtgacagtacatgcttttgatctatttgattatcttatttttccagaaaatatctatatcgaaaaatcatctttaatgattagagaagatgagattaaaataaatctccccgaactagaaaaaatgaacatcaatgttaaaaatgttgcaggtacaccagaaaattcagaggtagttactattttaaaagaattccctacaccaaaaattcaatttgcactttatctgatgattcatgttcttgcccctaaaggcagaggtgaaacaccaatcgtaacaaaaataacctcagagttcacgcggttatggggtgagggttttacagaaagtacagttaaccgttgggctaagaagccaaacttaaaaagtaataaaagactaaggccatcatttgcccagaaaacaggaatattcatcctcctttcaacttactgcgctcgttttgacatcaaaaaaaatgcttcagctatagctactctactcacagagctggccgtatccacatcgttcaacttggatgttgagttctctgctgatgatgtaagaccttggcttaaaaggccttccaagaagagcgaataa

SEQ ID NO: 85441 - DNA, 237 bp, Citrobacter koseri
atgcacaaatcctttaaccaacccacagctgagcagcgtttgcaggctttgcagaactacggtgaagcatcagatcgtctggttcgtgaacaagagcggaagcgtatcacatcagtgtcgcgttcaacagcgtggaagcttgaacgggcaggtcagtttcctttgcgtaagtcgattgggccaaaatcttgtgcctggttactgagtgatctgctttgttggataaacttccgatga

SEQ ID NO: 85442 - DNA, 570 bp, Citrobacter koseri
atgcgttcatttttttacaccatattcagtggtggacagaaagagagtatttcagatcatcattcgcttatagagatatgccataagtttaatattccacctcaacatgttgtgatcgagcaggtagatattaaggaggttgtttcaaagcaacgtttgctcaggcaattgattcatcatgaaatgaaccggcaggacacacttgtcattccagatctaagctgtcttggcagaactgtggaggacttacagaatattttatttttttgccttcaaaaagaaatctttatctacagctaccatccagcttcaagaatagagccttctgctgaaagttgcttgtcttttttgattgctcgtcaggatacgattgacattcacaatctgcaatcaactaaaagccgatatcgacatgttaagaagaaattaggacgaaaggagggaagcaaataccgacgtgatatcacaatacttaagaaaggcaggtttactcaggctgagattgcaaagaaattgggtatcagtttatcaaccgtgaagcggcactggaataacgggattatcggttaa

SEQ ID NO: 85443 - DNA, 627 bp, Citrobacter koseri
atgaaaacatatcaaggtacgcatggagaacacgttctcgaatacagaagcaagattaataaattattatgttatttgactaatcgttaccccaggttaacggcggtacgtgtcgatctccactatcctaaaatagttgataatggtgacaatatttgttgcttccctaatctggaacctggggtgatatcccggatgcgtgaatccctcagggctaagctggaggctgaccgtacccgtaaggagcgtgagggtaaacgcatttaccgttgccctttatatattatgtgggcaaaagagtattctgagtcaggcaaatgccactaccacatttgcctgttgttcaacaaagacgcttactaccacctcggggattacgagcgggacgataacctgagagggatgatcacgggagcctggtacagcgccctgaggctggagagagacgatcaccttggtctggtccattttcctgataactgtaagtatgtgctggataccaatagtgctgacttccagcagaactaccagtcgctgttaacccgactagactacctcactaaagttgaaagcaaagtttttggtgaaggggaccgtaacttcggctgtagccaaatcgatctgtaa

SEQ ID NO: 85444 - DNA, 900 bp, Citrobacter koseri
atgtatgagcctattttatggcgagaacaatatgccaatttgccgagaattcgtgttctcgagcttgctgagcagctcctaaataaaacaagcggagataatgtcattttgcatgcgctctccatgagactgcatggtaaagacaaatcggcagatactcttggcgcagactttcggttgattggtcttgctgctgcaatccagcgggttaaaaacagtgacagaagccaaataggtacaactgattttcacatggagagagttatcaatgtcgcgttgcgtttcgatggtaatgaggcaaaaaaaattgagtggctagacacaattttcaatgtcattgatgaaagctatggatatgtttttgaattcgagaaggctatagcaacaactgttgcgttaatgcctgaatcatttctcaattgcatttttgaatgcaccgaggaacaacagcagagaagacagttctttattcgtcgtggcggtttacgccattctcctcttgctgatgtaagtactagcgtcttgattgcatggtgccgtgctagaaatgaccccagtgtttgggctgctattgcggctggcgttactctctggtcaaagaatgatgaacagaatgtactaaccctacacgaggctgctatagaactgttagaggcctctcctgagccattagctgtgctggagtcttttgctgagcgaatcactccatcatcctggactggtagcctggcgaacataatgcaagctagatcaaggaccatcagcacactgtgcaaacatgagcgtccagatatcgccgaggctgccaaaatagtttgtgaaaaaatgagtcagtgggtcgaacgccaaaaagaacgcgaacaacgggaagatagtgaaagggaacaacggtttgaataa

SEQ ID NO: 85445 - DNA, 798 bp, Citrobacter koseri
atgccgatgcctgcaccgcagcttgtctatgatacttgtacatcacctattgttgctcatggtttatcttatgacgacgggcaaatgcgcgaaattttggctgggccagtaaaagctattttgcaagatacggcgggcaatgatgagctattagaattattggggagtgttgtaagcactgagtttgagcaggaagggcttcgtgagcttcttactgataagacagttcccaataactggcgtgtgggcgaggctattgcggaagcctttgtgactgataaaggaagttgtgtttttccttggcctactggacgcgatcttaagaatcctaatgctagcccagctggttgtgatttaacaggctttcagcccgtgaatgatgtggagctcccctaccgcttcgcttttggagaagttaagacatccgaacataaccagtcaccaccgagtgtgatgaccagcttgggaacccagctccatgggttgcgtgataatcgcaaagtgaaagatgcgctatgccgatatttggggcaccatgctgcacgcgcagattgggaaccaatgtttaaaagtgcagctaagcgctatctaagctctaatactacagatgtagcggtatatggcattttgattcgtgatattcagccaaattctttggatatttctgctcgggtaaatgcactggctataaattgtccggtgttaactaatattgaaatgtacgccttgtatctccccctcaacgcaatcagcaccctctctgagcttgcccaaatcttgatgcaggaggcgtcatga

SEQ ID NO: 85446 - DNA, 2553 bp, Citrobacter koseri
  misc_feature (2499)..(2508): n is a, c, g, or t
atgacgcttctgcaggaacatttaacgcaggttgatcagcattgggctgtgcaatccattagtgaagatctccgtgctcaggcaatggaaatggctgagctacgtttagtcgatgtcgctttagacaagctgctagaaaatcttcaggttaactttgatacggatttgctagagcgggtagcaacagcttacgaactggctgctatcgaaggtattggtgcattgttgtatccagttgcaaatcaagacaataagaatctccgtgacgttgcccaagcaggagcttaccgggcttttggtttctatcgcatattgccaatacctggtgataatgaagcgagattatttcatgtattgcatatcgcgggattggcttactgtggtgaccgctggacagatttacgacgctggtttgaagaacaacatgctgcattagtcgttcctagtgtagccggtgtgtcatgggataagcgccttctatatcgtatttttgattgttggcttcgtttgttacgtaagaatcgttgggacgatcttgatcaaatttctgagattgtggttgggcttcgtagtgaccaagccgactatgagaaagtcttactagaacaagctcaaggggttgaagcccagtccatcgtaatgcgtttggttgcgctctatcactgggcgaaagcgacggaaagattggctaagtatatgcttcagggagagcctgtagctatagatgcccaattggatcaacactttgaggcggcacaaaaagcagctcaagcatcaaaggatctgcaacttgagatgattttgcgttggttgcatgtcactagtaagaaaatggtggcaggttctttatggtgggtggctcatacagtcaattcccgtgtgacgcgctttgtttctcatgtaactaagcacaaaagctttttcgagttgttgccaccgcaaagggctgcgcttcaagaacaaggtttattagatcaggcaagcagagcagtgattgtcgatctgccaacatcgggtggaaagacggcgcttgctcagtttcgaatgctacaagcactcaatcagtttgatcaggatgacggttgggtagcctatgttgcgccaactcgtgcgcttgtctctcaaatcactcggcgtcttcgtgaggacttcggtcctcttggaatacaggttgaacctctaaccggtgccgttgaagttgatgcttttgaagaagagttgttaggtgaggcccgcgcattccagatattggtggcgacacctgaaaaacttcagttggtcatgagaaacaaaaaagttgttcgcccgctagcactggttgtgatggatgaagcccacaatatcgaagacgaatcacgtggtttgagaatagaactgctgttggccactattaaacaagaatcagctcgggccaatttcttattgttaatgccttttgtacctaacgctgatgaccttgctcagtggttggccgctgatcgcgggcgaagcattagtttggggacttcagcatggcagccgaacgaaagaattgtggggcttttcgacattcataaaggtcaaaagcgaggggattggcatttaagctttgaagcactcactacgactcaacgtacaattcatctaaaaggaacgcatcgtgttgatggcaatcgaccgttgcaaaagctgacgtactcaagtgctaaaggattggcagcacaagctgtagcaatggccaaagtcttctctaagcgtggtacgagtatcgctgtcgcccagacaattccagatgcatggggtatcgcacgaaaggtagcagcagaactcgatccttatgtgcaaataccagatgatattcagttagtacagcgttttctggcgacagcgatactcgtaccaggcgtcgtagttcatcacgcaggtctgcctacagaagcacttactctaattgaatggcttaccgaagcaggacatatccgcgtcatgtgcgctacaacaactattgcgcagggactcaatttccctgtttcttcggtatttttagcaacccgaaaatatccttatggcaatgagatgtcgcatcgtgcattttggaatttagcagggcgagctggacgcattggccatgacagcgttggtgttattggtattgctgcgggtgacaaacctaacgagatccgtcaatacgtaagtgatgctacagaatctcttgtatctcggctcgaagagatgcttgatgagcttcaggcgactggtaatttgataaatttatcaatagttattcaggaagaacaatgggcagattttaggagttatattgcccacctttggaatgagaagcgcaatcttgacgcagtaattggggaagctgagcaactgctgcgtaatacttacggatttggctcacttcgtgcaaaagcagatcaggcgtcacaggaaaaagcagatgcacttttagaagcaactaaaggatatgtgcgtaaactcgcggagcatccggaaaacgcttcccttgcnnnnnnnnnncttttctcccgagggggttcgttcgacattgttggatttgaataa

SEQ ID NO: 85447 - DNA, 876 bp, Citrobacter koseri
atgaataaacctcattgccttcaggcatttgaacaaccgctggcatctcttccgcacacgcttcgccagcttatccttgaacatattcaaaatctgacccactacgagccggtgattggcatcatgggtaaaagcggtgccggtaagtcctcactctgtaatgaactcttccagggcgaggtctctcctgtcagcgatgtgaacgcctgtacccgtgacgtgctgcgattccggctgcgcagcgggcgtcacagcctggtgattgtcgatttgccgggcgtgggagaaagcggacagcgggaccatgaatatcgcgccttgtaccggcgtatgctaccagaactggacctggtactgtgggttattaaggctgatgaccgggcgctgtcggtagacgagcagttctggctcggggtaatgcagccttatcagcaacaggtgctgtttgtgctgaaccaggccgacaaaatcgaaccctgccacgaatgggatacccataccagcatgccttcaacacagcaacggattaatcttcaggaaaagcaggccgccattacggcgatgtttagtccccgtcatccggtctgcgtggtctcagcactcagtggctggggcattgaggaaatggtggcaaccatgatgcgctgtctgcctgaccgcgccgccagccctgtagcgacacaactgcacgggaggctttgcacggagccggtaaaaaagcaggccagggacagcttcagccatggcgtgggaaaggtgtttgatggcgtggcgtcatcccctatgcttccggtcccggttcgggcggtcattcgtaccgtacgggaaaccgttgtgtcagtcgcacgggccgtctgggactggatattcttctga

SEQ ID NO: 85448 - DNA, 711 bp, Citrobacter koseri
atgtctcaggctgagcgtcgttatgatcggctgtctgttcgactgtcgctgattatcagccgtctgctcgcgggggaaacgctgaatgtgcgtcatctggcgacagagttcggcgtttcagaacgcaccctgcaccgtgattttcgggagcgactgatttacctcgacctcgaataccgggatggctgctgtcgtctgctgaccggggggcgtcacgaactcagggaagaagcagccctgcattttgcccgtcagtcgggggttggcgcattgtttcctgatatggacaaccatctggtcagctcgcttctgagcggccaggggacgtcaccatgtcttatctggcatcaggatatgcccgcgccatcttcccgcccggggatcttcacgcgactggtcagggcagtatcagaacaacggcggatcaccctgctagccgacgggtgtcgctgtggcaatcttgccccctaccgtctgatttttagttccggtgggtggtttctagcgggtgaacataccagacaactgagcgttttccctctgagcaccgttcactccgttacctttcacccggaaacgttcacaccggacgggcatttcacccgtattctgtcccgcccggattttttacaggcactacctcattttcatgtttttcattcattactcgctgacggcagttacgggcagccccataaggaacaggtatga

SEQ ID NO: 85449 - DNA, 342 bp, Citrobacter koseri
atgaaacctcaacctgtaacaacttcgcgggcggcgaagctatgtctgtcgcccgtggctgtctggcaaatgttactaacacgcctactggaacagcactatggcctaacactaaacgacacgccgttcagtgatgaaactgttattcaggaacatattaacgccggtatcacgctggctgatgccgttaattttctggtggagaaatacgaactggttcgaatagatcgcaaaggatttagctggcaggaacaatcgccttatcttcgggctgtagatattctgcgagcgcgacaggcaactggcttgttgcggaggagccgtaataacgctgtatcgtga

SEQ ID NO: 85450 - DNA, 273 bp, Citrobacter koseri
atggtatcattttcaaacaccgatggtgctcactacgattccgtaaatggtcagagcaccgtactatcaaaaacaattcagatggacgaaaaaattcccgttcaaccgtcaaattttgacgctccgcagatgggggccttactgggggctccaatatttatgaaacacaataaaaaccataattatcaatgcaaatacgcaaccaaatacattccgagtccgggcaccactttcttgcttgttttgcgcgtttctatgaatctctatatgtag

SEQ ID NO: 85451 - DNA, 849 bp, Citrobacter koseri
atgtcagactttaccctcactgaacctgaagttttgaccgaccatactgatgtgatttgccccaccagcattgaacgcatcgtaaccggacgtaatgccgcgctggtgcagattgaaatgttgatacagcagcttgacgatatcacgacactgacccgcagtattggcggtaaaaccgcgctggactgggccatgaagcaagactttcgctgcggctgctggttgatggaaaaaagagaagtagcgatgaaagccattacccgaaatctcgatcgcggtatatggcgcgatttaatgaaaaagtcagggatgctttccatcatggatgctcaggcgcgtgaccagtggtacaacagtctggaaaaggacgatattcccactgttagcgaagagaatattcttagcacatttaaacaattgcaccagagcaaaggcgaggtgtttgagcgtggggtgattaacgtgtttaaggggctgaactgggattttaagatgaacagcccttgcaaatttggaaggaaaatcatcgtgacagggctggtgaaatatgatcgttggggatttgggtttaactggagctggcagcgcgatcgattagctgaccttgagcggatgctgatgatccttgacggaaaacctgttcctgacaaccgtgctgacgttacccgtcggctgggagatcatatccatgaaaacaggcataacaatcgttacgaggacgagatgtttgcgatccaatactttcagaagggaacggcacatatcacttttaagcgaccggaactggtcgataagttgaatgacatcatcgcccgacattatccggggacgttgcccactaaacagtaa

SEQ ID NO: 85452 - DNA, 378 bp, Citrobacter koseri
atgcaaacccaaccacaatcctccatgcaggaggcaccgacacgcctgttagccgtggatgtctggcagcggctcctgagccacctgctggatcgtcactacggtctgacgcttaacgacacgcctttcggcaatgatggcgtgatccaggagcatatcgatgccggtatctcactgtgcgacgccatgaattttatcgtagaaaagtacgatctggtgcgcatcgatcgtctcggtttcagtacagaaacacagtcaccactggtcagcagtatcgatattctccgcgcccgaaaagcaaccgggctgatgacccgcaacgattacaaagtggtgaccgacatcaccaccggcaaataccgcgaggtgcagccatga

SEQ ID NO: 85453 - DNA, 141 bp, Citrobacter koseri
atggtttccggtgaactcaatccctgccatcagcactgcgtcacgttatacgcaaaagggctgacctgcgagaccgacagcctcggctcgcatggatacgtgtacgtggcgatttatcccacacctgcagcaaccgcgtaa

SEQ ID NO: 85454 - DNA, 207 bp, Citrobacter koseri
atgcataacacagcaaatgcagcaaaccatgatatttctgagccctggtggggacttaaacccaccgtcacgccatgttttggcgcacggctggtgcaggaggacaaccggctgcactatctcgctgaccgcgccagtatcaccggacagttcagcgacgcggatttacgccatctcggccaggcatttccggtactgctcaaataa

SEQ ID NO: 85455 - DNA, 480 bp, Citrobacter koseri
atggaacaacagttaccgttatttgctagtgaattagcccccactgaccagcagaccatccggacggcactgaccctgctggaatgccagctacgtgagcctggtgcagcatttacatccagcagctcagtacgcgactggctacgcctgcagcttgccacgcttgaccgcgaagccttcaccgttctgtggctcgacaatcagcaccgtctgatagcccacgacacattgttcctcgggacgattaacagcatcaccgtccatccgcgtgaggtcgttaaatccggactgaaaaataatgccgccgcagcgcttctggcgcataaccacccgtcaggggaagctgaacccagtaaggccgacaggttaattacagaacgcctgaaacaggcgctggagctggttgatattcgcctgctggaccacctggtggttggcgggatggatattgtgtcttttgccgaacgtggctggctgtaa

SEQ ID NO: 85456 - DNA, 300 bp, Citrobacter koseri
atgcgcaacgcagttcgttcagacatagtataccagaccggtcagcaccggttccatccttccctgtggcagttcggcaaagagatgggcttctctccccggctgtgtcgccccttcagggcacagaccaaaggcaaggtggagcggatggtgcaatacacccgcaacagcttctacatccccctaatgacgcgcctgcgtccattggggatcaccgtcgacgtcgaaacagccaaccgcttcaactcagaggtgaaagaacaactgacgtgtcaaggcttcaaaagcggagtatgctga

SEQ ID NO: 85457 - DNA, 420 bp, Citrobacter koseri
gtgaaagcaaacgtaaagtacgagtttcatcatttcggtatcccggtgcagggcggggagacttcaggcaagttcagcgccagtgccggaatgtacaccactgataatccggagaggtttcgtgtccagtggcatcgttttaccgatgattccccactccacccgttgctgaaaaccgttccgcatgtggcctttaaggtcagcagtctggctgaggcgatagcaggtgagactgttatcctggggccttatgaacccatcgacgattaccgggtggcggtgattgatgactgcggtgtgccggttgaactgattgaaacaacgcttaccgatgaggagttgtgggcgcgtgctgcatccgggcaggggagtctgtaccgaaagccagaaatgcatgggggtgaaaataacgatggatga

SEQ ID NO: 85458 - DNA, 360 bp, Citrobacter koseri
ttgcagcagtcggatttgtaccggctgacttacgctattgaacagcttaaatcgcagggctgggtcaatgccgtggtggctgatgaagagtgggttccggagtccctgtataccgaatatgcgaatgcctctgcattgctggtcaggaaatctgaactgcatcgccattttaacgaacagggccagcagtctgcgccggtggattttattgttatcggggactattgcgtagtgggggatgtgcttgatgcgcgggaactgcgctacacgactggtgagcaacacgctggctggtgtattctggtactggtgccgtcagaagaggcgaaagtgcccggagagctgatggtattacgttaa

SEQ ID NO: 85459 - DNA, 636 bp, Citrobacter koseri
atgccagtggggcgaatcgattaccaaatcgaaaaataccagttttcatgcacagacgaaacaccccgcctgacccggcagtgggcggatgtgcctgaagaatgccgacaactgaaagccggagcggaagaacggctgcgtattgccttgctgaacgtcgattacgttaccagttttgaattgcctttccgcttactgttgctccgtacaccacaactgattgccggtctgcgtgacgaactgcagatcagtcagaagaacgttatctttaatgggaagcgctatggctgcgtctggagtctgaaagcggatctgagcacggtacccgacgcatttcattaccatctggtgacccgtatacggcgggtgagcccggatgatgtttcggcagcccccttccagaagatcgcaaaagaggtgaaaacgccccgtgagcgtatcagactggcgcttgctgcggggttacaggtgacggcgctggatgcacttttctggttcggatgtcagcgtatggcggcggatgtgctgcgactgcgcagggccgggatggtgatttcgacttcagaaaccgacgtattcgacaccctgaccggaacaacccgccgggttccggtttaccgctgcgacagcgtgtaa

SEQ ID NO: 85460 - DNA, 492 bp, Citrobacter koseri
gtgataaacctccttcgtggaatgcagcaacgcgcggccatctggtttatcacgcggatgttcaccgcagcaaatcgtgggtcccctgcacttaaggcggtcattcaggtgacaataaaaggaaaacagatgagtaagacgaatgtattcactgcgctgatgctggttatcgggtcaggcataccttttctggcgggggcggcagaacacaacaaactgcgtttaccgacaaaaggtgtcgtctgcgatgcgtatttttgtgctgatgcgacgggcatttccgacccgctgacgacgaaataccttggtaaacagaaaggggtacaactggctgctcaggggaagtttgaccgcactgtgtttacgtttgcgaacggcatctactgtgacaccaaagaaaaggtatgccgtaaggaccgttacttcggtgctgacggaaaaccttcaggtaagctcgacagcaaaacgacacagtggctgtttgcccaatga

SEQ ID NO: 85461 - DNA, 597 bp, Citrobacter koseri
atgactacattaaaatctgtactccaccgtgccttactggtggcttccggctctatgttgttgactgtttttactgtgcaggcagaaaccaccatcgtattcctgcgccacggtgaaaaaccgaaagtgcccaccggtcaactgacctgcaaagggtttaatcgtgctctggcgctgcctgccgtactgttgacccgtttcgggatccctgatgcgatttatgcttcagcaccaaaggaaaacagaaccggcagttcactgcgtccgctggccactattctccccactgctatccgggcggaacgcccgatgatcctcaaataccatgccacggagacggacgggctggtcagcgatcttctgtccaccagtaataaacaacagagggcatttgtctcatgggaacacaaaaacctggtgatcgccgcgaaggcgctggtcagacagaccggtggtgatcctcagcagatcccgtcgtggcccgggcaagattttgacagtctgtatattgtcaaacttaacgatcagggcctgtttgaatcattcagtaaagaaaacgaggggctgaacggggtgagtgatcgctgtaagcactga

SEQ ID NO: 85462 - DNA, 1116 bp, Citrobacter koseri
atgaaattaaaagtattgtccctggtggttccggcactgctgaccgccggcgcggcgcaggctgcggaaatctataacaaggacggcaacaaactggatctgtacggtaaggttgacgggctgcactatttttcatctgataaaagtgtcgacggtgaccagagctatgcccgcctcggctttaagggggaaacgcaggtgaatgaccagttgaccggctacggtcagtgggaatacaacatgcaggccagccgtgccgaaggcgacggaaatcagtcctggacccgcctcggttttgccggactgaagttcggcgaccggggctccttcgactacggtcgtaactacggggtggtctacgatgtgacctcctggacggacgtgctgccggagttcggcggcgacacctatggtgttgacaacttcctgcagcagcgtgctaatggtgtggcgacgtaccgtaacaacgatttcttcggcctggttgacggcctggatctggccctgcagtaccaggggaaaaacggcagcgtgaagggcgaaggcaccggaccgaccaataacggtcgtgatgcactgtaccagaacggtgacggcttcggcggctccctgacctacgacatcggggaaggtttcagcataggtactgccattgccagctcaaaacgcacggatgagcagaataaactgaccttcggcaacggtgacaaggccactacttactccggtgctctgaagtatgatgccaacaatgtctacctggcgacacagtacacccagagttacaatgccacccgtttcggcagtaatgacggcgaccatgcttatggctttgccaacaaggcgcagaattttgaagccgtggcgcagtatcagaccgacttcggcctgcgtccgtccgtcgcttatttgcactcacgtggcaagaatattgagggctacggcgaccaggatctgctgaactatattgagctcggtacgacctatttcttcaacaagaacatgtccacctacgtcgactacaaaatcaatctgatcgacgacaataaattcacccgcgccaccggcgtggcgacggataatattgtggccacaggtctggtttaccagttctga

SEQ ID NO: 85463 - DNA, 414 bp, Citrobacter koseri
atggaaaaccaatcctggcgaaaagagccccgtaagaattattcgaatgacttcaagctccgtatggttgaactggcttcccgtcccggagcctgcgttgctcagattgcccgtgaaaacggcgtcaatgataacgtcatcttcaaatggctgcggctctggcagaatgaaggtcgcatatcgcgccgccttccggctaccgtcgtgacttcatcactaccaacgatattgcctgttgaggtggtacctgatccaacaccatctggcgaggtgaacacagaggcggctcagttctcagcgctgaacgcatcctcctgctgcgtcgagttccgctatggtaaaatgacgctggagaacccgtcaccagagttgctggctgtactgcttcgcgagctgaccgggagaagtcaatga

SEQ ID NO: 85464 - DNA, 180 bp, Citrobacter koseri
atggcaagactgagaacgcggaggagtaaaatcaaagaagtgctgcgtctgaaatttgactgtcacctgcccggcaggagcatccctgcctgtctgaatatcgggtgcagtaccgtatctgatgtggtcactcgtttaagggggagccagctggcgtggccccctgccgggaagagatga

SEQ ID NO: 85465 - DNA, 264 bp, Citrobacter koseri
atgaaaggtaaacatcaagacactaaagccctatctgacgtgctagcagaaatgcaacggcaggatgccaaatggggggcagaccgtaatcaagatccttttatctggggagcgattctcggggaagaggtgggagagtttcatcaagccgtcctccatgatcgttttggtggtaaagcagctggtaccagcagggaggaagcggtgcaaattgctgccgtcgcactacaaatcatcgaatattatgatcgcttaagctattga

SEQ ID NO: 85466 - DNA, 327 bp, Citrobacter koseri
ttgttcattacctttcaaagcaagaagttaagggctatttgcgagagtatgcacgaggcaaatgagatctttggtgacaaactggcatcaagactacgctcgcgactttccgatctttccgtgaccgacaacattttactgttgccagtaggttcgccggaggtacgctttgaggatggggaagagtgtattacaattactcttttcggtgatgtaaaaatggggtttgtctgtgggaatacaattaagcccaaaaatcaagacaatacaattaactggtcccgagtcagccggatacggttagtgttcataggtgacgtgaaatga

SEQ ID NO: 85467 - DNA, 1083 bp, Citrobacter koseri
atgatggttacgcaggacttccagcctgactgggtatctccacccggtgatacgattatagatctaatggatgaacatgggctctctggtgaagaactgagtaagaggattggattgtctcttatccggggtcagcaacttcttgaaggaaaaatccgacttaatgagtctctggcttgtaagcttgaggagctattcagcgtatcgacagacttctggatcaagcgcgaagacgcttatcgccagcaaattgaatatctcgagaaagtgaacagtgattggctcgaatcattgcctgtacgtgatatgatggagtttggttggatccccaaaactacaactcgggaaagtaaattcaggcactgcctgtcatttttcggaataaattccgtgaatgattttttttataaaattcagtcagatgctcctttggtcgcttttcgtaaatcacttaatctggcaaccgagcctgtggccgatttggtgtggctgactagggctgcacaacttaccttaaaccaaaactgtgcagtatgggataaagaggcgctactagcattgttgccagagctgcgcaaagctacaaatgaacctgacatggggatttttatcccttacattcgcgaccttctcgccactgctggagtttctctcgtggtattgccaacgccaaggggatgtagggcaagtggtgctacctgcttttttacaccagatcgcgctaccctagtcatgagtttccgttatctgaccgatgaccatttttggtttacgctgtttcatgagattgggcatcttatcttgcatgaagctgtccgagttcgcgtagaaggtaaagatggtctttcgtcggaagaggaaaaggaagctgataaatttgccgttgatgttcttattccagaagaataccggcagcagcttggtcgctatggtgtccggcactggaaagagatcatccgattagctaggaaaatgggggtatccaaagggatcgtgctgggatatttgcagcacgaaggtaatatacccttttctcaccttaatcggtttaaagtgagattccgtaaagaagatatcgtctga

SEQ ID NO: 85468 - DNA, 180 bp, Citrobacter koseri
atgctcttgctcttgctcttgctcttgctcttgctcttgctttataatccacaggtcatgtgcgttccgcaaattatcattggaaagaaccttatatgcttcatttattattttcagtatttcagtttgtctttttttaagttccttagggtgcttgtctggatgatgaataaaacataa

SEQ ID NO: 85469 - DNA, 402 bp, Citrobacter koseri
atgaatagagagtacaataatacatattttatatttcttgtttttttatctttgtttggtgtcgtatttaacactgcatgggtgttaatcaaacttgcatcaaatgattggtacatcgatattactgaagcaaactttatagatgctgcatcaataattgttttgattgtattttcggtaatgctattcattaatgacaggaagatccttaaagatatcggagcctattgtccatcttggggctggtatttcatattccctgtttatgtttatttacggcagaagaaaaacaatctaggtttaaaatatttttggatttatatgataagtactttcattgtcaccaaattagctcaaagtttagccacacagattctgattgggttaattaacatcaaatga

SEQ ID NO: 85470 - DNA, 480 bp, Citrobacter koseri
atggaaaacattaatacgttaaaagctaaaatcgatacaaaggtaacgaagtttgtattgctgtctgttgtaactggtggcatttaccccatgatgtggttatatctgaaccagccaaagttaacagagcacatgaagaatgagtttgttgccagggattatcctctctggctggctattgtaaccggatttggctggctactgtcagatattggtatcgcgataagtgacgatgtgacggttctggatcttgtcgcaagagtcctgtcgctggcatcaactgtgatggttattgtctgggcttttaaagctaaaacagctctacaggcatatgctttaactgaatttaaattcgaattaaagatgaatccattctatacatttatttttagcatatactatattgtttattgcatcaacgatatggagtcagagttgcagaaacacaacattatttatagtaagaaaatggttgaatag

SEQ ID NO: 85471 - DNA, 417 bp, Citrobacter koseri
atgaaaaaattactcggcggttccatgctgttagccgcaggcatgttctcaatgtctgtttatgccaaccctgataattcctgcgacggtgaacaaaccatctttgatgcttataccgctaagggtggcaagcacgtgggtgtgtgttacgtatacggcaatattcgttatgtgtatggaaaggatgaagatcctgaaattttaattaatgtaccacgtgaaaaggttgagttcagtctgtctggaaatggtgatcaaagtgtcaccattcccaatggcgagtatcgatatgtggtgggtgaatatttacgtggtggaccatttatacaggcatggaaagggagtaagtttattaccgagatcaagttaaatggcgctaactttgaaaataatatcgagcaatatattaataattaa

SEQ ID NO: 85472 - DNA, 888 bp, Citrobacter koseri
atggaatacaaagagaaaggcggtttcaacccggtcaaagatgcactggagattttaccagaaaatatcagggagagtatttcaaggcgaataaatgaggtcatcaactatgagccagtgattggcatcatgggtaagaccggggcgggtaaatccagcctgtgtaatgcgatcttcaaaggggagatctgtgctgtcagtgatgtggaagcatgtacacgagaaacgcaggaagtacgcatccagtttggtaaacgcgcaatcagattgattgatattccgggagtaggtgaaagtgcagtgcgtgatggtgagtacgagaagctttatcgggaattactaccgaagctcgatctcgttctctgggtcattaaaggggatgatcgagcattttcagccgatgaacatttttacaaaaacgttctgaaacctgccgggggtgaagagaagacgctgtttgtgcttaatcaggtagacaagattgagcctttccgtgaatgggatgtacagaatgctcacccctcgccagcgcagataaaaaacattctcgataaaaaaacctacattactcaccgactcggttttactgaccatcctgttatcgctgtagcggccagtgagggctataacgtcacgcaactggttgaggcaatggtgcgggctctcccaaagcacgcacaaagcggggtggcctcccaggtcagggaagaacacaaaacaaaaaacgtaatagaagaagcaacagaagggttcggagacaccgttgagcgggtgattgatgaattcattgatgcctctcttcctaaacctgtggcaaccgtggtgaaagcagccaaaaaagcggttgtcagtgggttaaagaaagcctggaatttcttcttcgggtaa

SEQ ID NO: 85473 - DNA, 291 bp, Citrobacter koseri
atgactacgatatgcccgcaatgtggttctgaccgtgtaagtgagcgaaatattggtaggaaggcaggaggtatcgctggaggcgtggcaggagcacttagtggtgcaggtacgggggcggcaataggttctgttgttccggtggtgggaacagctacaggggctgtcattggcgcaatactgggaagatttgtcgccggcgcgacggctggagcggtaacaggagcatcgcttgatggtgtcctgttcgatcagtatgaatgtcgtgactgtgaacatacatttgactaa

SEQ ID NO: 85474 - DNA, 1179 bp, Citrobacter koseri
atgcctcttactgaccttgagatccgccgcgcgaagcctgcggaaaaaacgtataccaaagctgatggcaacggtctgtctctacaaattgagcccaacggttcaaagggatggagattccgttaccgctttgaaggtaaagctaaaatgctttctttagggacatacccgaaggtttctttatccgaagcgcgtagacggcgagatgaggctcaggatctgctggctacgggtatcaatcccagtgattcgcgtaaagagaagaaactggctcagcaggaccggctggggaatacctttgaggcgattgcccgtgagtggtatcagcggcgttacgatctttgggccgagtcgtaccgcactgaaatgatcgctacttttgagaaggatgtttttcctcatatcggtcatcgtccaatagattcgattacacctatggagctgatggcagttttgacccgccttgagaaacgaggtgcaactgagaaaatgcgcaaagtacgtcagcgctgcggtgaggtatggaaatatgcaatcgcaacaggacgtgctctatctaaccctgcgccagatcttgccagcgtgatgatgccccataagaaagaacattatgcgcacctggaagtttcggagttatcagacttctttaccgtgttgcaggcgtacacgggaaatatactcgttaagttggctatgaggcttctgatacttacggggactcgtcccggtgagctacgtaaagcggaatggtcagagttcgactttgaaaataatctctggagcattcctgaagagcgaatgaaaatgcgacgaccacacctcgttccgctatcccgacaggcgctggctattctggaagaactgaaaacgatgacgagtggttatcaatacgtttttcccggtaggcttgagaaagttaagccaatcagcgatatgtctcttaacgtgctaattcgtcgtgtcggttacggtggcagggctaccgggcatggttttcgccacacgatgagtaccattttgcatgagcagggctttaattcagcatggattgagctacagcttgcccatgtggataagaacagcattcgcggcacttacaatcatgcacagtatctggacggaaggcgagagatgatgcagtggtatgcggattatctcgactcactgagagtttcgtaa

SEQ ID NO: 85475 - DNA, 1197 bp, Citrobacter koseri
atggcactgacagcccggcaggtcgagaccgcaaagcctaaagagaaggattataaactctctgacgaacgtggcctttttctcctggtaaccaccaccggaaaacgctactggcgtatgaaataccgtatcgccggtaaagagaaaaagttatctatcggcgtttatcctgaggtctccctggctgacgcgcgtgtaaaacgtgatgaagccagaaaagtgattgctgatgggggtgacccgagcgagaaaaagcagctcgaaaaactcgccaaaaagatatccgtcgtaaataccttcagagcgctcgccatggagtggcacaggcacaagtgtatctcatggtcggaaagctacgccaggagcgttatggaagcgctggagaaagatattttcccgtatctgggcaaacgccccgtcgcagagatccttccgctggagatgctggaggttttacgcctgattgaaaagcgtggttcgctggaaaaacttcgtaaggtcagacagtactgcaatcagatcttccgctatgccatcgcgaccggacgggcgacgattaacccggctgcggaactaaccggtaccctgacggcgccaaagactgagcacttccctcacctccaggcatctgaattacctgcgttccttgccagcctggctgattaccgtggcagttgcattacgcgtatggcaaccagtctgctgctgctcacaggcgtgcgcactatcgaactacgcgcagcagagtggcaagagtttgatctggagaatgcgttatggacgatccctgaaaaccgcatgaagaagcgccgtaaacatctggtgcctttgtcagaccaggttctggcgatactgcaggatctacgtacctataccggtctctatcaactggtattccctggccgctgtaacatcaacaaaccgatgagtgaagccagtattaacatggtgatcaaacgtatcggctatgatggcagggctaccggccacggctttcggcacaccatgagtaccattctgcatgagcaggggtttaatacagcctggatcgagttacagcttgctcatgtggataaaaacagcattcgtggcacgtacaaccatgcccagtacctggaaggcagacgtgaaatgatgcagtggtacgccgattacatcgacaatcttacgggtttatcaccagtccacacacgctga

SEQ ID NO: 85476 - DNA, 528 bp, Citrobacter koseri
atgacactcaaatgtcagctcatcagtgatgagaaagaactccatcattgcgcaaaattctttacagaccatgttaccgatgattacatcactcacgatgaaatcctcagggggcgggctgaatccatagatcgctggagtgaaaacctctatgaaatattgctcagggatctgcgcctttgcgttgaaaaaaatgcaccactcttctcatttatactttcaggcactattgtgggaatagctgtttttgacaggcccgattgtgaacataacaatgccctgatactcaacgatcttattatacataaacatttccgcggctcaggtctggggaagaaggttatgtcagaacttctgaagatattaagtaacactcattatgaatatattttcctcgacgtttgcgcaggaaataacaaaggcagggcttttttttccagaaatggaggcgtccatatcgcaagtacttatgtcatccacctgaaaaacaataaatctcctgttcctgctgacagcgccagaccgtaa

SEQ ID NO: 85477 - DNA, 270 bp, Citrobacter koseri
atgcgtcaattatcaacaggtatattattcatattactgtccggctgtatcacttcagtcctggcggcccctacaacccgtctcccgccggccccctctccctctgagttcactcacagttccggagccggacaaactgtcactcagccagataaaacgacactcagacaaagaacagagagcactgccagaaagcatgtaaaaaagaaagttgcccgtaatgccgaaaaagcagcattacagtcattaaaaaataaaaaacaacgctga

SEQ ID NO: 85478 - DNA, 285 bp, Citrobacter koseri
atgaataagctccagatttatatccttctgggtctgctgtccggattaaatatcactactgtacaggcccgggataattcatatccgtcagtccccccgatgtctccccgggggccgggtccggttataaacccggaaaactcacagtatatggaagaaaaagaagccagactggcaaaacagatccagcatcatcagtcagcacaggaaaaacggactattaaggaaaaacggaccacgacaaagcaccacagcgaaaaaaaacacaacaagaaaaaacactga

SEQ ID NO: 85479 - DNA, 270 bp, Citrobacter koseri
atgacagtatccctgacggaccataatctggcgacagaacagtggggaacagggcactttgaagttgcgccagggtatgagagcacataccttccggatggtgaccctgttcatctctggcgtttcatgaatggtgaccagtggtttatggatatgagaaatgatcgccactttttttcctttgccgggcaggacacactgaagccctgtactgcggggaaatgggtgatgttaccagcggtgagcccaccggagtggaaagagcattaa

SEQ ID NO: 85480 - DNA, 249 bp, Citrobacter koseri
gtgcgcagcctggatagaaacgaatgccaaaaaagtgaaacatccctgcaatgtcacaccgggtctgaaatctgccggaaacagacggcagatatcgttgacacggaagaacgtgatgtcaggatggtggcggtgtcagtcctggattatgatcaacgctgtgtgatggagttcaggaaaaacaccgccattgacggggcacgtcatccctgtgccaaagatgccgcgccttgtctgatgatggaatga

SEQ ID NO: 85481 - DNA, 318 bp, Citrobacter koseri
atgatgacgtttaaaatgagcgattcagaccggatgattaccatctgtaatctttccgcagatacaaacgaatttatcgggaaaagtgatggcttcatcccggcatatacgggttcagccctggctacacaacagaaaagggagcttcttgccctggcgtcatcaaaaattgaaccactacaggatgctgttgaactgggtattgcaacggaagaagaaacagcgcttttactggggtggaaaaagtaccgggtaaaactgggccgtattgaccccggcgatgcaccggatattaactggccggataagccagagtaa

SEQ ID NO: 85482 - DNA, 474 bp, Citrobacter koseri
atggaactgcagaaactaaagtcacttttcacccagcacgccagaaacatagcccggtacagaaaatggtcatcagagggggaatttatccccacgctaaaatcatggctcagggccgagcagtttctgaggctggacatgctcattatgcgataccggaacaaacacccctcagcctgggcccccatgaaaggatttgatgcgctcaatcagttagttttctcccggactggctggacgccggaccggataactcagctttcttttgctgataaattgttcgtgcttcatcaggatctggcagatgtgaatatcccaccggcagcactggagctcccggagtgcgtgacaaagtcgctggagcatgcgcttaatgaacgagagctatatcaaactgaatggcctccatgctcagaagaggaatgggatccgacgctgtcagagatagcacagggcctgcgtaagccgttttga

SEQ ID NO: 85483 - DNA, 180 bp, Citrobacter koseri
atgcgggttagctttgccctcatgatctttcatgaccttatcggtgtacgctttaacctcgatcacagcatcatcaacatactggcgcgtagcaagcacaacagatggatcaatcttcagggtaactgcgtccgtgctcgatacggtaagaagcatcctgataacctgcgttcttcctga

SEQ ID NO: 85484 - DNA, 615 bp, Citrobacter koseri
atgagtaagagcctgttatccccgaaagccagtgatttcatgcgctgcgcggaagcgggaaccgagcgcataacagaaattccggtggaattgcacaagctgtggaatccagacgaatgccctgttgccttgttgccttatctggcgtgggcgctgtctgttgatcgctgggataaggggtggtcagaacaaacaaagcgccaggttattaaatctgcctgggcggtgcatcgccagaaggggacaatttcggcactgcgccgggtggttgagccttttggttttcttatcaaggtgatcgagtggtggcagaccggcggcgagccgggaacttttcagcttgaaattggcgtttctgattctggcattacagaagaaacctatcttgagcttgaacgcctgattgctgatgcaaagccttgttcacgtcatttgacgggccttgccattaatttgcaggtatccgggaatgtgtacgcacacgccgggtgctatggcggtgatgtgatgactatttatccatacatgccggaagccgtggaggttagcggcggttatttccccgcaggggcaattcatattattgatacgttagaggtaacaaatggcgcttaa

SEQ ID NO: 85485 - DNA, 897 bp, Citrobacter koseri
atggcaacgattgatttatcagagcttccgccgccggaagtgatcgccacgctggactacgaagtcattttgtcagaggtaaaagaggccattatttcggcttacccggaggaaaagcaaagtgccattgcagcagcgatggagcttgaatccgagccgctaaatgtgattgcccaggtatttgcgtaccgtgaaatgcttaagacacaggaagttaatgattccgcagctgcgtgtatgttgagccattcatcaggatcgaatcttgacaacctggcggcgaataacaacaccaaaagactcaccatcactgaggcgactgattcaacagatgccgtgatggaaagcgattcaaagttgcgtttacgtgctcaggctgcatttgaggggctgagtgttgcggggccaacggcggcgtatgagtactttgctaaaagtgcatcaggcaaagtggcggatgccaaagcatcaagccccgcgcctgctgaagtgattgtttcggtgctgtcatcagaaggggatgggactgcttcagcagaattaatcgccactgtgaatgcggctttatcagatgaaagtgtgcgcccggttggtgacaggctgacagtacagagtgcagagataatcaactatgagatcgccgcaagcctgtatttcttccctgggccagaatcggaacctatcgctgatgcggcggaaaaagccttgcaggattggctggctgatcagggaagtattgggcgcgatgttgctctatcagcaattatggcagcgttgcacgtccagggcgtgcaacgtgtggaaattcaatccccgccaggaaatgttgtgattagtgatacccaggcggcgcggtgcacatctgtaaccattgccaaaggtggaacggatgagtaa

SEQ ID NO: 85486 - DNA, 369 bp, Citrobacter koseri
atgacagcgaaatatacgggcatgaatgagaccggcacaggcacgctttcagattctgatcatctctggcagtcagtgaaagatgtcctgttaacgccgctgggctcgcgggtgatgcggcgcacttatggcagtttgttacctgacctgctggatgaacccaaaaacgaaacgacacgattacagctaatgagtgccacggtgatcgctttaacgcaatgggaaccacgcatcgcgttaaatcaggttgatgtgacatattccgaatccggcgcggtgactgttgagcttggcgggctaattaccaccactatgcaggcggcgacaggctctgtgaagctgagggagtcgaacaatggcaacgattga

SEQ ID NO: 85487 - DNA, 582 bp, Citrobacter koseri
gtgaacgccgaactgatgcgactgctggaaaatgtgctgcgcgtggggattgtcactgagatatcggaagacggtaaaagcgtgcgcgtacagagtggcgagcttaaaacagcatggattcgctggaaaacgggccgtgccggtgtttttaagatttggtgtccgccgtcgctgggtgagcaggtgctattgggctgcattggtggcaacccggaaaccgcaattttgctgggtagtctgtacagcaacgaaaacgatgccccatctgcaagcctgaaacaaatggtgattactgcgcctgacggagccagatttgaatatgacgcggaggttagcgcgctgaccgcccgcggtatgaaaacggcgacaattcaggctgagacgaaaatcacgctcgatacagcggaggtggaatgtactcatcacctgaaggcaaagacttttgattttactgaaggcggcaagatgtccggggatgtgactcattctggcggcaagatgacgtcaaacggcgtccaggctgatgatcatgaacacggtggcgttgaaagtggcggtagctggactaaggggactcaatga

SEQ ID NO: 85488 - DNA, 639 bp, Citrobacter koseri
atgagtgccgacagtgttcacgttctggatcagtatcttgctgacattctggctggggtgtcttccgccggtcgtgcaagaacggcgcgcactgtcggaaaaatgttacgcatcagccagcagcagcgtatacgcgcacagcgtaacccggacggaagccagtacgcggcgcgccgccgcaagaagttacgcacccagcaggggatcgccttcatctgggaggggcagttacgccgccttaaaaactggcacagcgggcgtggaaagtacggacgcactatcactggatttgatgaagaccgtaatgaaatccgcactttttaccgggctgatattgagcgctatacggagattaatacgcgcgcggggcagtcgccgcgcacagttaaaacccccatgtttgtgaagctgcgtacgtcacgatttatgaagatgaaggcgacagcagaaggtgctgaggtcggttatagcggcatggcagagcgtatcgcccgcatccaccaatacggcttacgtgagcaggttgggccaggcgctttcgctaaatatgccccacgtgtattgctggggatttccagagcagatgaagcgctaatccgtagtgcggtgattaacagcatggggagtgccgggaagtga

SEQ ID NO: 85489 - DNA, 456 bp, Citrobacter koseri
atgctgaaaattaactctctgcgcgatgcgctaacccgttcgaatcagtggtgcaaggcaaaccctgaagccttcagcgtgtttattgagtccgggcatgttgagacgaccggcgaaacggctgattttgtttatgcctacacgctgtgtctttttgtaatgaatttcgccggtgatctggatgatttcactttgccgctgatggcctggctgtggcaggagcaaccgcaactgttgctgaaccctgaaaagaacaaagagattaaattcactacggcaatcaataacgacgacacagcagacctgttttttgagttgcccatcagtgagcgcgtgatcgtaagccgcaatgatgatggcacgctgaaagcagatcacaaaccagagccgcgcccacggataccgccggagtggagcggcattatcgaggatgtcacctggagtacgcccgtatga

SEQ ID NO: 85490 - DNA, 339 bp, Citrobacter koseri
gtgaaggtgaagcaaggcgtgaaaatatgtccacggcgatgcgtactgataaatgcgccggtgctgttgtgcctgttgctgtcagtgacgggttgctcagaaaaaataaaagtgcaaacccgactgattcaccagccagtgccgcaaagcctgacaaatgaaactcccgcgccggaactgaaaacgccggttacgtggggcgggatcgcgatttacgccgaccagctacgtgatgcgcttgatacctgcaacacggataaacgggcgataagtgaatttaatatgacgcggctggcgcgccagcaaggtcaagaggtaaggcaacatgctgaaaattaa

SEQ ID NO: 85491 - DNA, 543 bp, Citrobacter koseri
atgaaggcggttattaaacgttgttcaatcgcgttgattgtcgctctgggtgtgtcgatgtcgcctgatgcgttgcggacgtcgccagaggcacaacaaaaaatagcgtcctgggaagactgccgcaacacgccttactactgtaccgccggggtgttgaccgtggggatcggctcgaccggtaacgtccagaagcgtgagtacagtaatgctgaaatcgcgcgccggtggatcaacgatatgcagcattccgagcgctgcataaaccagaacttcaacggcgaagcgatgccgcaaagtgtgttcgaaagcatggttgatggcgggctgaatgttggctgtacgggcctgatgtggtttaccgataagcaggcccgcaagcagagaacaacaatctggaaaaacgcccaggcgcacaactggagcggggtatgtgaccgcttaactgactttgttaacagcgccggtaagcgctctcaagggttggttaatcgacgcactgattttcaggcgtggtgcaggcgagatctggaggctaaatga

SEQ ID NO: 85492 - DNA, 300 bp, Citrobacter koseri
atggagttgaattcatttaaccggctgtgggactgggttacctggataacttcatcaatcaccgttggtgttggcttgatgacctggaatgaaaagctgggtatggcggggttgttgctggggattttatctggctggcgcgcgtgggtgcatcgcgcacgcgtggagaaggctcaggaaaaacgtaacgctttgattgagcagattctgaagctggcagagcgccgtgatctgactacctttgagcgccaggaattagcgcaactcaaagcggggattgatgatgaaggcggttattaa

SEQ ID NO: 85493 - DNA, 201 bp, Citrobacter koseri
atgaaagtaaaagccttgcagggggatacgctggatcagctatgtcaccggcattacggaacaactaagggcgtaaccgagcaggtgttaagcgccaatccggggctgagtagtcaaatttttttagatgccgggcaggtggtggagatgccagacatcgacactcagcccgcacaggagatggtacagctatggagttga

SEQ ID NO: 85494 - DNA, 498 bp, Citrobacter koseri
atgagtagcctggtagcaacaaagcatccgtttccggccaacagtgacgtatctgacgtggatgatggtaacgaaaccgtcacggctggcaatttctggcctgttattcagttgaaggaattacgccttgccgcacgtatcaccggcggcgtgacgacatcaagactgaagcacgtggcgacagaggccgtggcgcacgtaacggaacaactggatttatggcaggccagccaagaagcggcgggctatgcaaagttgcaggatgtgccagcgcgactgctgaacgatgaaagcgtgaaggtctaccgctaccggcgcgcggtttattccattgcccgcgccctggtgctggaaggttacagagatgtcgatactacgccaaaaggcgacaaagacgccgccgcgctggatcttcaaatcagtgatctctggcgtgatgcccgctggggtatttcagacatccagcgcaaaccgcgcatttacgcggagttgtgctga

SEQ ID NO: 85495 - DNA, 795 bp, Citrobacter koseri
atgttaaccccagcgcaaaaacactttcagcaagtgatggctgatcgacgcggagacagtgccgcacaacaaagcgttgtacgtactgcgcatgagcagattttgcaccggctgcgcctcgatcaggcgtcacttaaacaagtgcagtccaacgaatcaaaagcggtaatgaagcgcgacatgatgccgaattacgaaggctggattgatggcactctggatggtgacagcggtcgccaggatgaagtgatcacaacgatgatgctgtgggcgattgactgccaggactatccgctggcgctgaaaatcgggcgctacgtggtgaaacatggcttgtccatgcgtgatgacttcaaacgcaccgccccggtattactggctgaagaaatcagtaaccaggctctgagcatcgcggcggctgatgtagatgctgatctgtccgcgtatgttgctgtgctggatgagctggcagagatcgtcgatggctgtgatatgccggatgaggtgtcctccaaactttgcaaggctcgcggcctctctcgccgtggcgcgtctgacaatgagaccaaaggcgaagccttgaagctgtttcgccgcgctaccgaattaaaccctaacgcgggcgtaaaacgtgaaattcaggcattaacccgcgatttgaagaagctggcaacagcgcaacctgaagcggccccggtagagaagaagcccgcaaaagctgccagtaagccacgcgccgccagtaaagcgaaaaagccagccactaaagcggcaaaagcgaaaaaagaatcttaa

SEQ ID NO: 85496 - DNA, 1071 bp, Citrobacter koseri
atggaaaacagtacccgcgtactttttaacggctatgtcgatcgccaggccaatttaaatggcgttcgttccgatgatgtcgccaaatccttcagtgttgagccttctgtgcaacagcgcatggaaaaagcatcgatggaaagcgatgacttcctgaaaaaaattaacgtcttcccggttaagtcgcaggaaggccagaaaatcctgatcgggagtaaaggcccgaccgcaaacaccaataacagcagtgatggcacttcccgccgaaacccggttgataaccactccaaagagccgagtagttatcgctgccgtaagacgaattacgattccagcgtgagctattcgcagttggacgcatggtctatgcagccaaactttcagacgctgatcagtgcggcgaacgcccaacagattgcgcttgaccgcatcatgattggttttaacggtacttcctatgcggaagtatctgatcgtgcagcgaacccattattgcaggattgcggcgtgggctggcttcagaaaatccgcgaagaagcgccgcaccgcatcatcaaggatgtcaccctcaccgcgcgtgatgaagacaacaaaatcattgcaaaaggtacttacggcaaccttgatgcggctgtctttgatgcaaaaaacagccttcttgccacctggcaccgtaaagcgccagacctggttgcgatcatgtcttctgacctgctgaccagtagttacttccctaaactgaatgcgcttagtcagaccaatccgaacagtgaaatgattgcagcacagttgatcgtttccagtgaaaaagttggtggcctgccagtctgctttgcaccgtacgtgcctgatgactgtgtcctgatcacctcactgaaaaacctgtccgtttattaccagttaggtgcgctgcgtcgaacaatcaaagaggagccggaatacaaccgcgtggctaattaccagtcctccaatgatgactacgttgttgaagattacggcaaggtcgcatttatcgacggcatcacctttgccaccgccccggaagcggaagccgaagagcctgaagagtaa

SEQ ID NO: 85497 - DNA, 840 bp, Citrobacter koseri
atgagtgcaaccactaaacctacccggaagaaattccgcgttgccgtctccggtgcaaccgtggatgggcgtgaaatcaaacctgagcacttacgccaggccgcggcaaattacaatccgagcgtctacgcagcccgtgtgaatattgagcattatctttccatgtaccccggtagcgactttggcgcaatgggggatgttgcggcgctgagcgcagaagatattacggacggcgcgttagcaggacgcacggcgctttatgctgaaatcgacgcttcagacaagatgaaggccatgactgataaaggggaaaaagtttattccagcatcgagcttgccccgcaatttgccctgaatggtgaggcgtatgtcgttggcctggcaatgactgataccccggcaagcctcggaactgagcggcttcaattcgccgcacaacagcgccagcaggtgcaggcattcaataagcaacagggtgaatctgcgatgttctctgacgccattgaagcggaggttatcgaactggcggaacaacgcagcgatgaaggcaagcagtggtttagccgcgtgatgggcattctcaccaaaaaccataaaaccgatagcgagcagttcagccaggtgcgccaagcggttgaaggcgttgccacgtctcaggctgacctgatcgatcaggtggtggagcttaaatcattgcgtgacggtgacgcaaaagccatccagaagctgacgagcgatctggcgagcctgacaagcacgctggcgacacaggacgccagtacctttaaccgccagcccgctcagggcggtaattctggcgttgaacaagctgactactaa

SEQ ID NO: 85498 - DNA, 1728 bp, Citrobacter koseri
atgattcaggacgcatttgtaaggcagagagcgaaacagctttactggcagggctacccgccagcagagatcgcacgcctgatgggtatcagccaaaacacgatctattcatggaaaaagcgtgacgaatgggatgagacgccagcgatccagcgcgtcacacagtctattgatgcccggttatgccaaatcaccatgaagccaactaagaccggcggcgacctgaaggaaatggacgcacttacccggcagatgaagaaactttcagaagggcaaccggcggaaccattcagcaaaaggacacgcacccgtaaaaagaaaaatcacttctctgaagcgcagattgccgcgctgcgtgaaaaaattcaggagtctctcgcctggcatcagcagggatggtttgcacagcgtgcacagcgaaaccgcatgatcctgaaaagtcgccagattggggcgacctggtattttgcccgcgaagcactgttacaggcgctgcgggatgatgtgaagcatggttatcagagaaaccagatatttctgtctgcttctcgccgccaggcgcaccagttcaggggattcatacagaaagtagcggaggaagtagacgttgaattaaagggcggagacaagattctgttatccaatggcgctgaacttcatttcctgggcacatcagccgctaccgcacagagctacactggcaacctctttttcgatgagtttttctgggtaggtaacttcgccaacctccgaaaggtggcgggcgcaatggcaaccctgaaagggctcacgcgtacctatttttctacgccatccagtgaaagccatgaagcctatccgttctggacgggcaagcgctggaatgagaaacgcagcaaggcaacccgcgtggaattcgacacaagctggaaagcgcttaacagtggcgttctttgcccggataaaacctggcggcaaattgtcacccttcaggatgtgatcgataacggctgggaatacacagacctggaagaaatccaggatgaaaacacaccagatgaatacaccaacctgtacatgtgcgaattcgtcaaagagggtgaagcggtcttcacccttaaccaactactggcttgcagcgcagatggttacgacgactggcaggactggaaaccctacgcggcccgccccctgggggatcgtgaggtatggataggctatgacgcaaacggcagtactggcaacggtgacagcggggcaatctgtgtggttgcgccacccctcgtcaccggcggcaagttccgcacgattgaaacgcgccagcttcgcggcatggagtttgaagaacaggccaaagtcattgaagacatgacttttaaatataacgttcgtcacatcgccattgatggaacagggatcggggaagccgtctggcaactggtcaaaaaattcttcccggcggcggactgcttcatcatgtcgctgtcttcaaagcggaatcttgtactgaagatgcagcaggtgatccgcgccgggcgctgggagtatgaccgcagcgaacaggcgttagtgtctgccttcaacgcagtaagaaagatcaccaccccaggcggtcaaataacctatgacacagatcgcgcgcgcggcgtcagccacggcgacctggcctgggccaacatgcttgccgtaatcaatgaaccaatcggacgcgagaacggcggcggtggcggttccgtaatggagttttaa

SEQ ID NO: 85499 - DNA, 1056 bp, Citrobacter koseri
atgaacacaaccacacatgaaagcggcttaacgatgcttactgagaacaagactgattttggagaagcgataaagcgtgatccctcactcagcgccttcacgtttgatgggccataccaggtcaccggcgcgcatgatctgttagataacatgtactgtgcggacaacggcagatactacgaaacccctgttgactggtatgggctgtcgcgttcatttggtcagtcgccgtggcatcagtcggcgctgtattttaagcgtaatgccctggcgggctgcttcattccgcacccgcttttatcccgtcagacgttttccgcactggcgcttgactggtttgtcttcggtaatttctatcttgaggaacgaaaaaaccgcctcggcgggcggcttcctatgcgtaactctccggcaaaatacacccgccggggaagtgatctggatacctactggtttatacgtcagtggaaagatgagtttgccttcaaaactggctcggtctgccacgttatgaaccccgatattcatcaggagatctacggcatgccggaatatatgggcgcgctattgtctgccagcctgtcacactctgctgatatgttccgaaaaatgtattacgaaaacggctctcatgctgggtgtattctctacatcggtgcttcaaccgtggatgatgaaagcatgaagagtattaaaaagacactcactgatgcacgcgggaaaggggcgtttaaaaacctgctgctgcacgcgccaggcggcggaaaagatggagtgcaactcatgcccttcagccagatatccgcaaaggatgagtttcttaatatcaaatctgttacccgcgatgacatcctggcggcgcatcgtgtgccaccgcaactgatgggggccatgcctgatggcaatggctcattcggtgacgtggagaaagccgcgcgcgtgtttgccattaacgaactcatgcccgcaatggaagccctgaagcatgtaaacgactggcttggtgaagaagtgatccgctttaaaccatacgccctgctggaaaatagcaagtaa

SEQ ID NO: 85500 - DNA, 1380 bp, Citrobacter koseri
atgagaaaaattaacaaagtagaatctaaaaggatttttttacgtggatggttccgctttctgcgtagtgttgatagagctaaaaaaaacagacctcgccaagaaaaaaatggtagccttcgttttgccaatgaaacaacacctgtacaaaatcaagttgttacattcattgaaaaaatatcaataatcaatgaatatgattcatcaattcttcgaagggatgcggagagaatattaatacctaaatattttgatttgtacgacaaccctgaaaaatcgctgctttttattagcgccgctaccaaattaattgctaggggaaaaaggaagtcatatttatttgattataaaaagaacaagaaacattgtttagggatcgaatgcttgttaggcgtagcacttacagctgcaagacagaataatattaatttcaaggataccatgatccagattaatggtatctatccaaaagatgagcagtatcttgaaataatacgtgacattggccttgttaaggaaattagcaatgctaacctaggtaaagtacttgactcaacagaagcatccaaaaaaaccaatcctaaacaaagaattttcttagccgacagcattggtaaagaaaatgcgtcagcttttgctcatgataagaaaaatcttacggctgaaaaattcacagcttatataaataaatgcttaaatgatcatagtttgaaacttgttcacgacgcggaaaaacatctcacctcatgtatgggtgaactcttagataacgccgagagacattgtggcttagagcaacgtcctcgttggtatttaagaggctttgtaaacaataatgttcggaaccctacatgtgaactagctgtgttcaattttggcaaaacaatatgcgaaactttcgatgatttacctgatgaacacttttcattaagcaaacaggttaaaccatacataaataaacatattgataaaaaaggtatgtttaaagaagggttaactactgtggctgcgttacagggacgagtgagctgtaagaatgaaaaagaaacagatagttcgggcacaggcactatcgaattattaaaattgttccaagatatgcatgatagcctcaagaagatgggacgtgatgtaaaaggaggtattaaaatgactttaatctccgggagcacacatatcaattttgatggttcttataatttaaagaaaagattagtaaatgatgaagaaagcgatatatttacttacccttttaacgatgtaggacttgaatctgaacctgatcgcacctatcttaagcgtatgaaggatgctcgattccctggagtaatgatcaatattcgttttcctctaccagaaaacgccacccagcgaacttga

SEQ ID NO: 85501 - DNA, 345 bp, Citrobacter koseri
atgaaaatgtctgatatcactatagatttcaacaggttagtaaaggatagcaacaaaaaattgtttgcaggtcggtcaaatggtcggcatgcctatggttactttaacatagataatttttgcgtggccagcaatgatagactgtatctatcaatgcccaaaggcatagtagtatcaagttcttatttcctaggaatgcttgagacaattctgccaaaattcacttcccctagcgaattttacagtagaactatgcttgatggtcatgaatataaagaaggaatgctttctgagttagatagagcggtaaggagaggcttacataaaaatgtccccttcttctaa

SEQ ID NO: 85502 - DNA, 810 bp, Citrobacter koseri
atgtccccttcttctaaccttttttctgctttaaaaatgacagcattgtctgtcattttttttgtatttcccacagcatgtacagtagctgcattttctaacgacgattctttaaattatgaaaatgacgctgcttatcaattaccattaaacccgtttgatactagcattccaggcatttcatcgccactcgtattatctggtatcccaaatgaagggttgatggtctgtgaaaaaccatataatagctttcacaaactatcgctgactaataaaaataatgagagtgctttagtaaatcattacaaaagcgttcctgactctcacgaaatatataatgttgtaaaagtcccagagagcggacctgagtgggtatcaattggcatctctatatttgctcttttttcttcttttgccatcccatactttcagcatagaaaagaaagaaatgaggccattaatgaaggttactggctaagagaggttataatgccgaaaataaatgacttggcattcgaagttgcaacagactttaaaaactcaatgccattagcagaagatgattttattaacgcattaaatgaaagattattacctaaacttggaggactacgggactctttatatttatttgaaagtttccctaagctaaaacaggatgtggaaatccttgagggaatatgtgacaccttagaggaaaaagtctccgataatataaactcacctgttgaagcaagaatgtctgatatttctagatttcattcctcattaatacaaaatttgattttattacatagaaaagttggctag

SEQ ID NO: 85503 - DNA, 2370 bp, Citrobacter koseri
gtgggcgcgcttaaatgtgattcacccgcgaaatatattatttcgcgggttctgaatactaggccgggtaggtctggttttttggtgtgtctggaggtcataaagcacgggattaaaaccccgatctatatcgcgcgagaaacaaaagcagaagtagaccagttaacgccaggcgcttttatctcacatgatgaaggccaaacatcgaaggggaaaggccagggctggagtaatccaaaacaggccatttccgtcgataagactcccgctgttgatctatatgaattgggtcaagagcaggagtttttcgcgtgggtagaagataccctcaagccgttacctacctttattcgccgccgcatagcctcttacataaataccgtgcatgaggataaagggcgtcatatcgcaaaactgaagttgctcgatatcgttaagcgcgagcttccacacgtccgaagcgtcacgaaacaatacgcggtgccagaagacaatgattggatcattttctcggaactaaacccgctgtttcacacgtttgaaaatctgcgtgttctggcgcgccgcttcaataatctggctgatagtaccgacgaagatattgatttgttggcacaggacatcgccatttatgccaatgctgttttggctgaagtgagtgaaggcgcgagcgtgtttagtgatgcggagtacggcaaacgcatggtgcgtgaaggttccaggctaatcgcttatttcaggttggttccaccctgggcgaagaagcgccggatggcgcttgatgaagcagcggcagcaatacaaaaaaccacacacgatcgcttttggtcacgtcttctgcgcaagtacgcccgccgctggcgtgagcatttgcacattgcttatggtgatgtgcgtcgcgatgtttcaccgtattgcagcaaacaccacgtgacacagtgggattcccgccgcaagcgtagccgcgcaattatgagccgccttgagcttgaagatcaggtgactggtgagcgcatttctctgatagagcagatcgataaaagcatttctaaccctgaaaagcgccgtgttgagctgatgacacgcattggtggttttgagaaagtggcaacagaaagcggttttgccggtagtttcttcacgttgaccgcaccgtctaaatatcatgcttttacagcgttcgggcatcgtaaccataaatggaacggagcaagcccacgcaaaacacaaaattaccttaatcacgtatggcaactgatccgcgcggagcttgcgcgccgtgagattcctgtttttggccttcgcgttgctgaatctcaccatgatggtactccccattggcatggtcttttgttcacggccccggaacataccggcgaattgctggaagtgatggaggactacgccacacgcgaggatgcggacgagctaaccggtaaggctggcaagcaaccgcgctttgagcttaagccgatagatccggccttggggagtgctactggctatgtcgttaagtacatatctaaaaatattgatggctacgcactggatggtgaaagcgacgacgaaagcggacgcccactgaaggaaacagcaaaacatgctaccgcttgggcttcatgctggggcattcgtcagtttcagtttttgggtggtgcgccggtgtctgtctggcgcgagttgcgccgcctgaagaatcaggagatggcagatcgtatcagcccggtttttggtgagttacaccgcgccgcccatgcggggaactggcaggactacatcaccttgcagggtggcccgttcgtgacacggaataggcttgtgttgcgtgcctggtatcagtatcgggatgagccgagcagctacggcgagtttcagaaggtcattaaaggcgtagtcatgccagcatcgactgttcctccggtagaaacccgcttccattcttatcgcattgtcaaaatgaagccaaaagcagacgacaacgccgatcgaggttttgaccttaagggcgcgtctgcgccctcttggacttgtgtcaataactgtaccaagtacaaaaaacatacaaatagagggggggtaaatatacctcctgaagatccagaacaatatgaaattggtcaaatgagccgtgagcagagaaaccggcttaacgagagcatcagaaactacaaacccgaacggcaaaaatcacctgctgaacagtttgaggcacttgcttacagcattacaaatggcgattgcactgactttgattgggctagggctgagagctatttgaaagcggcacaggccatccgagaggaggagattgctatcgctaagtgcagtataaaatctattacttcacacctaggagagatggatgtttga

SEQ ID NO: 85504 - DNA, 174 bp, Citrobacter koseri
atgaataaagtcgatgcggtagttacaaaggttctggacgttcgcccgtaccgcaatttctggattacccgcgttgaggttctcagcgagggtggttacagcaacactgaactgatcaattactcagaacgtgacgcgcgggaagttaagcccggcgatagcgtccaggtatag

SEQ ID NO: 85505 - DNA, 993 bp, Citrobacter koseri
atgattaattcccctctgatttgggcgggcggcaagtctcgcgcgatgcctcatgtgctggaggctttgccacagggtgaatgtctcgttgagccttttgtgggaagcggtagcgttttcctgaatactgattacaagacctatgttctgtgcgatagcaatgcagcgttgattaatttcttttcggtagttaagcgcaacactgaggcgcttttatctgctgccgcaaagatttttgaaaatggcaataatgaagacacgtattataaatttcgcgatgcatttaatgtgattaatcgtgagtttaaatatgaccgtagaaaatatgatgatgaagcattgattgagtatgccgcgctgtttctttatttaaaccgtcattgctacaaaggtgtttatcgcgtcaatttaaaaaacgaattcaatataccgtttggttttcgtaagaaaccaattttccctgtggctgagatccagcattttgcaaaaagagcatgggaaaagggtgcgatgtttctgcatggtgatttcagagaaacaatccctttggcaatcgggcattcgggctgcgtggtttattgtgatcctccatacctgccagccagtgaaacggcgaactttaccgcttatggcaaaccgtttaccgatgaagaccatcgcgcgttggttgcgatgctttcacgcctttataacctggcaaaaatcccttctgttatatccggcagtgacacccccgaaacgcgccagatttactacccgttcacccttaaatcattcgacgtccgccgatcagtgggggcaaaagcgcgcaacctcgcaggtgaggtgattggtttgctgcgtacttgtgatgagtgcgggcaagtggggcgcggttattgcgcgacttgttgccccgcagttgctggagatggttatgaatctggaagcgataccttctgctgtcgtaactgcgagatctgcgattcatataccgcgccggaggacttctga

SEQ ID NO: 85506 - DNA, 714 bp, Citrobacter koseri
atgagcatgaacaaacgcaatgaatattttaccgcgataatcgcgggctatgcggctaaccccaacattaaagagggtgagccagcggctaatgtgatccgtaaagcgtggtctttggctgatatggctgtctatcacgaaaaccgcgtcgaaagcccgaagcaacgcgcaaagcgctggattcgtaaaaattatgtcattgttgacacagaaactaccgggttgggtagtgatgcgcggattgttgaaatcgcaatcattgactgctgtggtcggacgctgctgagtacgctggttaatccgctgtgtgagatccatgctgaagcaacagccattcactgcattacaaacgagatggttgctgatgcgccaacatgggccgaaatactgccgcaggtagttgacttaatcggtgagtcttggattgcgtacaacgcacaattcgatgatcggatgattgaacagtcttcatctcatgtccctgagaatgatttccctattttgctgggtgtgcctcagtgtgcaatggagctttacgctgaatttaatggcgaatgggatgattaccgccgtaagtacaaatggaaaaagcttaccgaagctgccaaagctcttgatgtcccacctattaacggcgcaccacatcaggcacttgttgattgccagctaacgctgggggtaatccgtgctatcgcggaggtgtccaatgattaa

SEQ ID NO: 85507 - DNA, 186 bp, Citrobacter koseri
atgaagcggaaaatcgtaacagcgacaacggaaataagaactaaagagcgtagtcatttgctggggcttttacgcattcgattaatgctcttgaaaaacgaaagcgtcaccactgacgatatttttaaatccctcgattcatggataagtagtcgtgaatcattaattaatagtgagattaattaa

SEQ ID NO: 85508 - DNA, 186 bp, Citrobacter koseri
atgatgcttattcagatcaacagcaaaacagcagtctatcgcggctttaccatcgtaaagctgccacgcaaaaaaccgtattcgcgccagcgttaccaaatcaccaaagatggtaattatctggggctggacttcggattgtctcaggctcgacagactatcgatcagctacatcgggggcattaa

SEQ ID NO: 85509 - DNA, 264 bp, Citrobacter koseri
atgttgctaacaagtaaggaatcatttatgtctaaaaaagaagtacctatttacacgccagccgaacttgaatacatcgagttcaaccatcttgcatgcctccgctttcactaccacttaccatcaccacataagccacccaaagcaggtgatttgtttactggtttaactcttgagcaagcaaaggacactgttgtttggcttcagggttacattcagcgcactgaagcggccctctcttcttcatctgaccagaaacattaa

SEQ ID NO: 85510 - DNA, 273 bp, Citrobacter koseri
atggaagcgaatgactacgttatccagtatccgctggatgcggttcaccctgataaattcgctgaactgctgggaaaaccacgcaccgcagtagctgcgatgatcgaaaaaaacaaactgccggttgttgagttccgtgatccgacaaaaccaaaagcccgcgctggtgacaagctggtctatgttcctgagttcaatcgcggcgtgcgtgaggcgttctacaaccgcccagttgaacagcgtgatgcctggttgctttggatggggctatga

SEQ ID NO: 85511 - DNA, 294 bp, Citrobacter koseri
atgaatcttgctcaaaagttacgagctatcagaaaggcagaaggactaacacagtctaaattctgtgaaatcagcgggatagcgctaggcacgttgaagaactatgaaggtggacatcaagatccgggcatacaagtgatcatgcaggtaactaacacggcggaatttgaaaaatacaccctgtggttaatgaccgataagactgcaccagaagtcgggcaagttagtccggtcgtcgcacactctgggccagaagaaacaacctcgtcacactcaggccgcaaaactggttaa

SEQ ID NO: 85512 - DNA, 981 bp, Citrobacter koseri
atgagtattaagagactcgatgatggtcgttatgaagtggacatcagaccgcgcgggcgcgaaggacgtcgcattcgccggaagtttgaaaggaaagccgaagcgttagcatttgaacgctatacgctggcgaacgccaattcgaaagagtgggccggtcagcgtgccgaccggcgcacgctaaaagaattattggatgtttggtggaagtatcacggccagacccatgaacacggtacgaaggaatttaatcacctgctgaaaacgattagcggacttggtgatattccggttagcaggatgaacaaaagaattttgatggactatcgatccgcacgcttgcgagacgggatcagcccatcaacgattaaccgcgatatgtaccgcttttccggcatgttcactaagctgattcaactggaagaattcgtcggtgtgcatccagttcacggcctgccaccattggccgaagctaacccggaaatgacgttcctggaaaaagcagagattgccacactgctgaaaactgcaaccggagatgatctgctggttgctttgctggggcttagtaccgggggaagatggacggaaattgcaacgctgaaacctacgcaggtcgtcaattgccgcgttacattcctgaaaacgaaaaacgggaaaaagcgaacggttccgatctctgccgaactggaaaagatgatcaaggagaaagccagcgggaagctgttcaaggtcgattatgagaagttttgcaagatactgcggatggtcaaacctgacatcccgcccaaccaggcaacgcatatcctgcgccacacgttcgccagtcattttatgatgaacggggggaacataattgcactacagcaaatactgggacatgcgagcatccaacaaacgatggtttacgcgcacttgtcgcctgactatctgcaaaatgctgtcgcattaaacccgcttgccggtggcacgtcgctgtaa

SEQ ID NO: 85513 - DNA, 219 bp, Citrobacter koseri
atgactattcagaacaacaattccagcctgcttaacgacaagatggttgatatgaaattcattacagaatttacaggattaacagataaatggttttataaactaattagcgaaggacaattcccaaagcctattaagttaggccgtagctcaagatggatgcaaagtgaagtggaagagtgggttaatgaaagaattaaccaatccagaaatcattaa

SEQ ID NO: 85514 - DNA, 624 bp, Citrobacter koseri
atggttaatgtaaacagcaatggtccattaaacacaaactacatgaagagaatcaaagatacattaaataaatcacttaaagagcatttcaggacaatggtactcagaatcgacctgaggctgccggatgatagcccatatgaaaaagacccaatgttgattactcgctttatagaatcccttaaatctcagaagaatgctgaccaactcaagaaaatatccttaggtaaaaggactcaccattgtcgaatcaggtatgtatgggtgagagaatttaataagaacggtaagaaacattaccacctggcattattcttaaacaaagacacttacgcttatcctggttcatataaacctgatcatgaaggtaactatcaccataaccttgcatatatgattatggaggcctgggtacgggcattaaagcttcaaaaagaagataattaccagaagcattacaaactcattcatttccctgaaaattgctatgcacacctgaatagatactcttcaacttatctggaagattatatgaacgttataaatagactgagttatctggccaaggaatacagcaaagactcttcggacaaccagaggaacattggctgctctcagtactga

SEQ ID NO: 85515 - DNA, 126 bp, Citrobacter koseri
atgaacacgctcagaattgttggtatcgatattgccaaatctgtttttgaggtatgcgtctggatgttcgatgacaggagcagtattgatagccgtttatttggccatatccataccctcaattag

SEQ ID NO: 85516 - DNA, 2385 bp, Citrobacter koseri
atgcacgagaacaatatcacgttactgtgtaatgaagcagagcgattattgcagcttaatattagtttgctgcaaaaaatggttgatgagccgaatttccttgtcgaaagcaaacaaaacagcaacgaacaactctttaataaaagtaaagccttgaaaagaattgaagaattacagggtgaacgaaccaaaattatccgtaaagagatggtgctggccgtcgttgggaccatgaaagccggaaaatcaacgaccatcaacgcgattgtgggaaaagagatcctgccaaaccgcaatcggccaatgacctcaatcccgacactcattcgccacgtgccgggtaaacatactccagaccttcagctaaacaatatcgaccctatccatcagttgttgagcgcgctcaagaaaaagattacaactgacgaaggcaaaaagcgtgtacttgaactcgataaggatcaagagaaaagtaagttattgcgaattgccatggatgataattggttaaaaaatagctacgcaggtgaagctgaaattttcacctgcctcgcctcgctcaatgacctggtgcgtctggcaaccgcgctgaatgtcgaatttccgttcgaagcctatgaagaggttcatgagcttccggtaattgaagtcgagtttagccacctgacgggaatggatgatagccatggaacattgaccctgctggacaccccaggtcccaatgaagccggacaaccccaactccaggcaatgatgcgcgatcagttgcaaaaagcgtctgcggtactggcggtgctggattacacacaattaaattccgaagccgatcagcaggttcgcgcagaattgaacgatattgcaaacgtggcggcaggccgtttgtttgtcctggtcaataaattcgaccagaaagatcgtaacagcgataacgctgagacggtcaagcagagcgtgcccgccatgcttgaacatgacgtcctgaatagcgagcgcgtttaccctggatcctctcgccatgcatatctggctaaccgcgcccgcagcgtgataagccaggccggaacgctgtatggtcaggaagactgggtggaggattttgcgcaactggcctttggtttatcctgggaagaagaggatcttacgagtccggatgatgtcaggagaaacgccgataaaatctggcgtcgttcactttttgataagctcattaccgaagtgattcaggctgctcatactaaagcggcagcactggccgtcgattctgccgcagccaagctggttcagaacgcagaaaacgccaatgaatatctctcggtgcgtcatcagggcctgttgaccagcattcagaccttacaaaatcaaatcaacggcttgcttagcgatatcgataatatagccacctgccagaaagaggtcgacgccgaggtgaaacgggccatgaaaggcatcacgcgtgaaacggacgcattgcttgaacaggccgagaaaacgctgagcaaagacctgaatgaatacttcaaaaatggaaaacgtcaggagaaagaagcattcgggatcgatcaaccgaaggaatcaacaagtctcacgatctttggaacgttctttaagacgctgaccggtactacccagccacgagagcgtgatttcgatccgaacaatccggaaatgaagtttagcgcgcgttctgatgccgaaagattcatccagcaaatcgaagactccgtcactagtttgctggcagagaccgaagaaaaaattaaaccgacgctgacagagatcgttgtcggcatcgaaaaaagcttccatggcaacgcgatcaaggctgtggaaaaaatcgcccatcaaatcaatactcgtcttgaagacgatggctttgcggtcaatattcgcttccctaaagtaagccagctacagactaatctttctatcagaactcgtatggccagtcttctggaggaaaaaaccttcagtgaaaccagacgtcgccgttcgagtggagcatggggaacggtgtgtgggtggtttaaaaccgatgactggggctgggaagattacagcgttgatgtcacccgtagtgtggtagatattcgcaagattaaaactgccgtgaaaaaacagactaaagaacattttgcagagttaaacgagaccatcgaggcgagtatcaatcagcctattctggtcgaaattgaatcattctttggagcctttaaaagtaaagtggagcagttgcgtaatacgcttatccagagcaccgaagatcataaaaatagccagaatgagcaggaaaagctgacactgcgcctgtgtgagctaaaaaaacttacaccggagatgatccgtgacggcaaagcgctcaaagaggaactggagccgatgctgtga

SEQ ID NO: 85517 - DNA, 906 bp, Citrobacter koseri
gtgatcacctccattcaggaagcacttccagacaatgaggcatgccagatcctggcatgcctgccggaaaagtttattgttgatttcgccaacggtatcgatatcacacaagatcaccttcgggtacagaaaaaccgcagcttctttacgcgagtgaaagaggggctcagcggtcagtcttccgcccgccagcacgcaattaatagcgcgctggcagatggtgttgaggcctcactgacgtggctcaccgaactcacctcctcgctggccaccaccaactatgccctgacgcaggtgaatgacagagtgacgtctctggtcagcgataccgctacgctcgcacactattctgccgacacccgtgagcagcttaacgcactgtctttgcaggtgagccaaaagctgagccacctcgagcagcatcttcatcgcgtcgatatgctgcagcggggccaactgcatcttgaccagatattttccagctggagcgccgggcggtactctgccctgccgttggccggacgttgctatgtcgcacttgaggaactgcgctggggagcattcggcgatgtgatacgccatggcgatacgcatcaggcaaaccagatgatcgacattttaaaaaacaaggccttagcccaactcgccgcagaccacggtagcctggcgagcgcacgccacgacactcacagctggctgtcatggcatgcaggccagatacagcaaaatgactggccagagacgctcaactggatggctgactggtgtactaaagatgcacatcccgttatctggtctgcaacccagaaatacgacgatttaccattacgtatgccgcgtctgtgttcagcagaacgcattgctaccagcatggtcgatgaaatattcagccgggaggccgcatga

SEQ ID NO: 85518 - DNA, 1089 bp, Citrobacter koseri
atgagccaaacgatgaaattaggtctggcgctttccggtggtggggcgataggtgcttatgaagcaggcgtcgtcaaagcgcttgcggagtcgggaaccgacgtccatatggtttccggcgccagtattggcgcgttgaacggcgcgattatcgcctcttcttcagggctgtcgcaggcggcggaacggatggcggaaatctgggaccatctgggtaatagcaccgttttgtcggttaacaaatcagcctatttttcgctgctgttgcagtttgggatcggaatggggctctccccgatgctcagcaagacgggaagtatgctcagtacgatccttaatcgtgcggcgctgatcaccggtacgaaaggctttgaaaatcagcctttgctctcggatcaacccttgattgccctgatggatcgttatctggacatggatgcccttgcggtcggtttaccccttttcgtctcgttataccctactgaaggcggagtgcaggatattatcaactgtattgccgccgaactgggtctgggttcaacgcgcgattccgaattttatcatgtgcaaaacctccccccagaacagcaaaaagaggcgctaatggcctcggcggcactgccgttgttgttcaaatcccgtgaagtcaacggtacccattatagcgatggcggaatgggcggctgggcgagtttgcagggcaatacgccggtcacgcccctcgtggaagccggttgcaacatggtgatcgtcacccatttgagtgatggatcgctgtgggatcgtcaggcatttcctgataccacggtgctggaaattcgaccgcagcgttcattacgccgcaacgatggggcgctgggaggtgcaaaagatctgctgggctttacggcgatgcatattgattcgtggattgaacagggttatcacgacaccatgagcgccctagacagcgtccgtaaaccgcttcaggcccgacgtactctacaagtttccagtaccgcgcttgaaagcagtctggcagagaataccaccgcggattcggtcttaaaaaacgcaatatcccgacttaaagatggcattcaacgctga

SEQ ID NO: 85519 - DNA, 150 bp, Citrobacter koseri
atgcgcagcgagttaattcgtgggaacccgcttttctcagtcaaacaagatgcgatgagagataatattacctctcacctgctcattgtcatcctgcccgaagttaagtttcgggccaaccagtctctgttatacatacagattatgtag

SEQ ID NO: 85520 - DNA, 822 bp, Citrobacter koseri
atgaaattagccagccgttttggtcgggtgaaccagatacgccgtgaccgtcctttaacacgtgaagagctgatgagccacgttcccagcgtgttcagtgaagaaaagcatgaatcccgcagtgaacgttacacatacatccctaccattactctgctcgaaagtttaaagcgtgaaggctttgagcctttctttgcctgccagacacgcgttcgggaccagagccgacgggagcatacaaagcacatgctgcgtctgcgtcgtgccggacagttaaccggccaccaggtccccgaaattatcctcctcaacagccatgacggctcatccagctatcagatgctgccgggcctgtttcgtggtgtctgcaccaacggcctggtctgcgggcagtcgttcggggaggtgagagttccgcataaaggggatgtggtggaaaaagtcattgaaggggcttacgaggtgctgggcatttttgaccgtgtggaagagaagcgcgatgcgatgcagtccctgatgttaccgccacccgcacagcaggtattggcgcaggccgcgctggcgtatcgctttggtaaagaccaccagccggtgactgccgcccaggtgctctcaccccgtcgctatgaagaccgcagcgatgacctctggaccgtttaccagcgcgtgcaggagaacctgatgaagggagggctgccaggacgtaccgtgcagggtaaacgcagccgtacccgcgccgtgaacggcatcgatggggacgtgaagctcaaccgggccctgtgggtaatgaccgaaaacatgctggccctgtctggccgctga

SEQ ID NO: 85521 - DNA, 450 bp, Citrobacter koseri
atggataaacacatttcactgacacctgaggtaacagagcccttcatcctcacggccactgtcgtaccggatgaagagcgccttcgtttctggcctcagcgctttggctccatcccgcaatggataacccttgagccccgtatctttgcgtggatggaccggctgtgtgcggattacagcggtggcgtctggaacttttacaccctcagtaacggcggtgcctttatggctccggaagagagtgatggtctctggtcgctgtttaatatcctgaatggtaacggggctgaaatgagtgctgcagctgcgggtattgccgcctgtctgatggcttacagccaccatgcctgccgaacggagtgcgatgccatgacggaacattattaccgtctgcgggattatgcgctgaaccaccctgagtgcaacgccattatgcacatcatcgactaa

SEQ ID NO: 85522 - DNA, 480 bp, Citrobacter koseri
atggaaaaacaattaccgttgtttgcatatgaactgacggcatcagcacaacagaccatccgcgaggcgttgactcttctggagcgccagttacgagaacccggcgcgtcgtttacgtccagcagctcagtacgtgactggttacggctccatctgacaatggaggaaagagaggcatttgtcctgctgcttctggataaccagcatcgcctgattaggcacgaaacgctgttcaaaggcaccatcagccacaccgaagtccatccacgggaagtggtgaaggccagcctgagacataatgcggcagcggttattgttgctcactgccatccctcaggccatgccgaacccagtcaggctgacagacgggtgacagagcgactgaagaatgctctggaccttgtgggtgtgcgtctcctggaccacctcgttatcggcggaatggatattgtctcgtttgctgaacggggctggttataa

SEQ ID NO: 85523 - DNA, 360 bp, Citrobacter koseri
ttgtcgaagcaaaccacgattgcaacgcatgatatcagcgaaccctggtggggactcagacacagtgcctccccgtgttttggtgcccgtctggtacaggaggggaaccgcctgcactacctggctgaccgcgcgaactttgatggtcagttctgcgatgcggatttgcgccatcttgaccagtctttccctgtattgatgaaacagctggagttattgctcaccagcggtgaactgaatccccgtcatcagcactgcgtcacgttgtatgcaaaaggtctgacctgcgaggccgatacgctcggttcgcatggctacgtttatatcgcgatttattccactcctatagccacggcataa

SEQ ID NO: 85524 - DNA, 387 bp, Citrobacter koseri
atgcaaactacattgcccttcatgcgggcggtatcgtcacgtccgtctcccgttgatgtctggcagaccctgctgacctgcctgctggaacatcactatggtctcacgcttaacgatacgtcgttcagtgatgaacaggtaatccagcagcatatcgacgcaggtatctcgctgtccgatgccctgaattttattgtagaaaagtatgaactgatccgcactgaccggccaggcttcagcatcagggagcagtctccgtttattacggccattgatattctccgggccagaaaggctacagggctgatgaaccgtggcacgtataaagaggtgacggctattaccagaggacaacatccgcaggccagcacttcaggcaagcgatga

SEQ ID NO: 85525 - DNA, 840 bp, Citrobacter koseri
atggccggaaataatgttaatgaacccgaagtgttaaccgggcacactgatgtgatttgctccaccagcattgaacgtattattacaggccgtaatgctgcgctgacacggattcaaagccttatcagtgaacttgatgatatctccattctgacccacgatatcggcggtggtacagcacaagagtggggaatgcgggaagggcatcgctatgattgctggtttacggaaaaaaccgataaagcgatgaaagcgatgacccgcaatattgatcgccgcatctggcgagagctgatgtcgaagtctggcatgctgagcctaatggatgctcaggcgcgtgacgagtggcacaaaagtctggagaaagacgatatccccgcgatctgtgaagacaatatcctgagtacctttgagcggcttcatcaggataaacatgctgtttttgagcgtggcgttatcaacgtttttagaggattgtcgtgggattataaaacgaactcaccctgtaagtttggtaagaaaatcattgtagatgggctggtttctttcaatcgttgggggtttagcttcacccatggataccggcgtgaccaactggtcgatctggagcgtatgctgactctgcttgacggcaagccgctgccggataaccggtctgatattgcctgtcggctgagtgaccatatcggccagcagcgcacttctgtagtgtatgaagatgagctattcaggataaagtattttcagaagggcagtgcgcacatagtgctcaaacgtcccgagttgattgagcgactgaacgatatcattgccaggcactatccggggatgctagcttga

SEQ ID NO: 85526 - DNA, 588 bp, Citrobacter koseri
atgcgaatagggtatgtaagggtgtcaacaattgaccaaaatcctgagttgcagagagacgcgatagagcgtgcaaattgtgagcttgtttttgaagacaaaatgaccggaacaaaggccaaaaggccggggctaaataagctgcttaagacgcttaaatctggtgatacggtggttgtgtggaagttggatcggttggggcgttcgcttatcaatcttgctgatctgctgcaaaagtttaaaaaaatgaatgtggaatttctctcgattactgaagggattaacaccaaaacaagcatgggccggttcacgtttcacatcatgtctgcgctggcagagatggaacgagaaataattatcgagcgtacttgcgcggggctggcggcggcaagaaaaaaggggcgtgttggcgggcgggcgccaaagtattcaaaggaagaatgggatcagatggggcgattaattcagaaaggagaggcaacgcgagagcaagtagccattatttatgatgttggaatatcgacattatacaaaaaatttccagccggtaagctggcgcaattacaggatagatgcgtagaacaatga

SEQ ID NO: 85527 - DNA, 489 bp, Citrobacter koseri
atgatgatggtttacggaatgtttgtctttgaattgaagaccgttccacaccaacaattgcagcagtcaaaaacatggcggcatgtcaaaaacgaacgcatcaaccgttctgcaaaatggcaatacattggtgcaggtgatgatcagatcacgctttccggcgtactgtatcctcagattaccggcggcaaggttagtctcgccgtacttgatacgcaggcatacaccggacgcccctggccccttattagcggcacaggtcagattttcggaatgtatgcccttacgcaactacaaaccacgcacacggaattcgatcagtatggagaggcaaagaaaatagaattttctattacttttcagcgggaagatgaagatctcagagagagccttcagtcatcatctgtgggtgatttactcagcaacctacagagcaccgccagttcagcctatagcaacgtcagcgccgccgcctcaagcctgttttaa

SEQ ID NO: 85528 - DNA, 3015 bp, Citrobacter koseri
gtgaacgggcggctatccgaagcggaaacagtgaagatgaaagaccttagtattcgtgtcgccttcagtgcgattgataaactaacccgcccggtaaacgccgcccgcaattctgtgggcggtttatctgaatccctcaaaaaaacacagtcttcaataaaagacctggatacccaatcccaggcatttacccgccttaacgagcgcgttaaaaaaacctctcaacaactcgctaccactcagcgtgcctttgatgggctgaacaaggcccagaaagacggagccaccctaaccgatgcccagcgcgaacgtatgaccgcactggcggcaaaaattgatcgcctgagtgccagccggtcaaaagaaacggcacgacttcagcaggcatcacaggctctacgcgcacacggcgtttcactcgctggcggtgatcgcaccatccagagcgcaatcaggcgcaccgaacaatataaccagacgcttgagagagagcggcgtcaacttgccgccgtgacaaacgcacgcgcacgttacgaccgtctcagcgctacggctggcaatcttcgcacaggcggggctgtcgctattggtgcaagtgctggcgcaggctatgccgccgggcgattccttgcgcctgctgtcgggtttgatgaggaaatgtctcgtgttggcgcgctgacgcgccttgataaaagcgatgaacaatacgcagcactacgcgcccaggccaaaaaacttggcgcggaaacagccttcagcacacgcgatgcagccagcgggcaggcatttctggcgatggcaggctttacccctcaggctattcaggcggcattgcctggcgttctaaatatggcccttgccggtggcatggatcttggtgaatctgctgatatcggttcgaatgtcctcactcaattcaaactgtcttcagatcagatggacagagttggcgatacgctgaccgccgcgtttacccgaaccaataccgatctccgcgcgctgggagacaccatgaaatacgcggggccggtcgccgccaatctggggattagtcttgagcaggcatccgctatggcagggatgctggcgaataacggcttacgtggcagtgatgctggtacagcattgcgttccagtctgtcacgcctggcttcaccgcctaaagccgccgctgaagcattaaaagagcttggcgtatcagtggctgacgccaacggcaaaatgcgcccaatggaaacagtgctactggatctgtttaaagccacccagaaatatgggcaggttgatcaggtttctttctttaaaaacatcgccggtgaggaagcctttgttggtctgcaaacactggtacaggcggcgggctctggtgaactgcaaaaactcaccaaagaacttcagggcgcagccggtgaatcagcgaccgtcgcaaaaaaaatggcggataaccttggcggtgatctgaaagaactcgacagcgcctgggaagcgttccgcattcagattgaagaactcgctgacggtgcgctacgaaaattaacacaggcgttaagcggcacaatcggggttatgacagagtgggcacacaacaacccccaactgtcaaaagcgctactggtgacacttggaagcactctggcactgaccgccgcaattggtgcaacttcactggctgtgggcttgctgcttgggccacttgcgaaattacaactcggcttcaccctgctgaccagcgcaagcgggctgggcggcgcggttcccctgtttacccgccttggcaaggtaattaccgggccgcttggcagcatccgtggctggggccaggcatttagcctgatggctggcagcgccggaaaacttaccggcatattaacgccgctacgggggataatggcagcagcgtttatttcgccgggggccgcgctcagtggcttgattaaaggcattggctgcttgcttcttagattaaccggcatacccgccattatggggatcgcttcatcagcactaagtgtgttaggtggcgcgctatctttgctgttaagtccaataggcttgattggtgcagcatttatcgcaacagggctactgatctggcgattctgggagcccattaaggcattttttgcgggcttcttttccggggttatgcaggcgctcacgccttttcgtgatgctttcgctggcctggccccaatttttggggtgatagctaataccgtctctcaattgtggcagtggtttagcaacctgcttgcccccatgaataccagcaaagaaacactggataaatgcgccagcgccggtgagacattcggcagagtgtttggcatcgctattcaggggctaatgttacctctgaccgggttggccaaaatgattggctggatacttgaaaagctgggcctgataccttcagggatcgacgcggcaaaagcgaaggcggataaagtacagaaggaattaacaccggcagggctggcactgcttcaggataaggtaagcgcgcttacaggtgacgttaaggcagcaagcaagcccgttgcagcgccaccatcaccagtgattgcagccgaaacaggaacccaacgccgcctgcaaaaaatagctgataacactggcggaatgctggatgaaaccaaaaagcaacgcatcggccccggcgatatcgtgtttaaaaacctaccgcaagcgctcgctgtgcatggagcatggcaggaagcacgatcaacaccaggtgcaaatatggcgcagcttggcgcacgaccagtgattgcagcggcatccgtaccagtaaaacccccactatcaacaccggcggtggcgcaaccagggagatcagatcgtaacgcgcagccgcaagccgccacaccatttggggaaatacatgttcatgtacaccttcacggcaacaccacagacacagcacgcgaaacggcgcgcatggttggtgatgcagttcaggcggaatttgagaaacgttttcgctcacgtagcaacttccgcgataacgattaa

SEQ ID NO: 85529 - DNA, 312 bp, Citrobacter koseri
atgactgagaaaaatactgtaacgctttcaaaacctatcatccgcgatggtaacgaaatcaccaccatcaccatcaccgatgaagtgaaacaggcgggctctctgcgcggcctgcgtcttgttaacgtaatgaatatggacgtggacagcatcagcacactgttaacccgttgcacatccccacgcctgaaacaggcagagatcgcagcaatggcaactactgattttgttgtgtgctgcgaggtgcttacgccttttttagcgccgccggagcctggcacgaagaacgaaacggagacggagagcgagtaa

SEQ ID NO: 85530 - DNA, 516 bp, Citrobacter koseri
atggctattccggcgaaactacgctttttcacctgcttcgttaacagcgtgaacaatatcggcaaagtgacctccgtcaccctgccgaagctcacccgtaaaactgaagattatcagggtggcggcatgatgggctcggtcgctgtcgatctgggtatggatagcggcgcgcttgacgccacgatgattgttggcggtctggtcaaagagctactgcttgaatacggcggcgatctcgatggcacgcttttacgcttcgtcggcgagtattacacgtcaggcgaaagccagattgtcgaagtggaaatgcgcggcaaattcactgaaatcgacggtggcgagagcaagcaaggggaagatacttcggtgacttacgccgtcaaaaatacgtactacaagttaacgattgatgatgcaccgatttgggaaattgatctgctgaacttcgtttacaagaaagacggcaaaaatgttttaccttcccgagtgatttccgcgcttggaatgggtagctaa

SEQ ID NO: 85531 - DNA, 1203 bp, Citrobacter koseri
atggtgacaaacatgtctgagacacgttttcacggtgctcgcaccaaagaagaaaccgatctcatcacggcaattaacgacattgactccagcgtcattggcctggtggctgtggctgatgacgcggatgaagatgcattccccctcaacaccccaatcctgttaacccgcgttcagtctgtgctgggtaaagcgggaaaaacaggaacgctgtacaaaacactgaaagctatttcagaccagtgcagccccaaagtcattgttgttcgcgtagctgaagcgaaaccggcggaagaagacgaagaagcacaaacgcagtctcagttaatcatcggcggctctgatgctgatggtaactatacggggatgtatgcgctgctgacggcggaacagaaaacagattaccgcccacgcattttgatcgtgccggaatacgacactgaagaggtaacgtcgcagctttgcgtgattgcaaaacaactccgcgcttttgtgtatgcaagctgtaatggctgtaaaaccattgcagaagcccgcacctatcgcgaaaccttcgcatcacgcgaattaatgctgctctggcctaacttcgttgcgtacaaccaggtatctggtgcaaatgaagaattcccttctccggcatttgcggcggggttgcgcgcgaaaattgacaatgagaaaggctggcatcgttcgctctctaacatcatcgtcagtaacgttctgggaatgtcgaaagatgttttctgggcattacaggcagaagacagcgacgcacaaacgctgaacaacgatgacatcaccaccatcatcaagcgtaacggcttccgcttctggggcaaccgtaccactgacaccaatgaattcatttttgaggtgtacacgcgtaccgcgcaaatcctggctgacaccatcgctgaagcacagtttgaaactattgatgggccgctcacgcctaccaatgtgaaagacgtggtgagtgcgattaagcagaaactgagcgcactggtaacagcgggcaaattgcttggcgcggattgctggttcgacattgtggacaatgcaactactgacctgcggcagggcaaggttgttattcgctataaatatacgccggttccacctatggaagatctcacgctgatccagaccttcaccgatgaatatattgaacctgcgtttgccgcgctgggaggtgagtaa

SEQ ID NO: 85532 - DNA, 1137 bp, Citrobacter koseri
atgagtatttcagcaatcaatagcagtatttctaaggcggttactggcgtaaacaacacacttacagaagcgtgtaaaagcccgttattcagcatcaaaatgggcggtaaagtactgaaggaactggctgatcgggttatctcaatcagtctcaccgataaccggggatttgaagcagatcagttgacactggaactggacgacagcgccggtgatgtcgcgctaccggggcgcggcgtggagttgtctttatggctgggctggatgggggaggcgctgatttttaagggtgtatacaccgttgatgaagtagcgcatgacggcccgcctgaccgcattaccgttacggcccgcagcgctgatttccgcgaagagtttaacgtgaagcgggaagtgtcctggcatgatgtgactgttgagcgggttgtgtctgcaatcgctaagcgctacgacctgaaagcgcaaatcagcgatatattgatgaatgtcgagatagaccacgccgaccagacacaggaaagtgacatgtcatttttgacccgaatggcggaaatgctgggcgcaattgcgacggtaaaaaatggctctttgctgtttatcgttccgggaggtggctttaccgcatctggtaagcccataccgtcgattgagatcacgcgtagcagcggcgaccggcacagattcagggttgccgatcgtgatgcgtatacgggcgtgcgggcgtactggctggatctggatttcggcaaaaagaaaaaagtaagcgtgaaacgccgcaaagcatcaacgaagaaaacagataagagcagcagccgtgagggtgattacatcgaaggggctgaaggtaatgtctatatcatgcgcaagacctttcagaatgagcaggcggcaacgcgggcagcggctgcaaagtggcagcaattgcagcggggcgcggctgaattctcgatcaccctggcgcgcgggcgcgcggatttgtacccggagatgcactccaccgtaaccggctttaagcctgacatcgacgcgcaggactggataataagcaaggtgcaacatgatgttgatagcaacggatttactacacagcttaactttgaagcaaaaatatctgactggatcgcagaaactgaatag

SEQ ID NO: 85533 - DNA, 249 bp, Citrobacter koseri
atgttcaaatgtccacattgcggcgctacggcccgcactcgcaccagtaagccactcagtgaagtaaccatcaggcagtatcaccagtgtcagaacatggaatgcggcctgtcatttaccacgcttaacagcgttgaaaagattgtcacccgtcgagagagaagagaaaaaatagaccccggcttcataccggcgggagttttccccgcgtctcactacggacgcgatcagctaaatctggctatttga

SEQ ID NO: 85534 - DNA, 1179 bp, Citrobacter koseri
atgctggatattatcaccggcgcgggtgccacactgacgcccgactttatgctgacactggaaagcaaagatatcaccggcaatatcagcgaccggctgattaacctctcgatgacggacaaccgaggttttgaggccgaccagctcgacatcgagctcgacgatagtgacggactggtcgcgttgccgattcgcggcgcagtgctgtcgctgtatctcgggtggaaaggtttctctctcgtcggtaaggggcggtttaccgtcgatgaggtggagcaccggggcgcgcccgatacggtgaccattcgcgcccggagtgcggattttcgcggtacgctcaattctcgccgtgaagagtcatggcacgataccacgctcggcgctatcgtccacacgatagccgaacggaataaactcacggccagcgtcgccgaaccactcacggggatacagattccgcatatcgaccagtctcaggaatccgacgctgttttcctgacccgtctcgcggaacgcaacggcggcgcggtgtcggtgaaagccggtaaattgctgatgctcaaagcggggagtggcaccacggccagcggaaagcccatccctcaaatcacgctccagcgcagtgacggcgaccggcatcagtttgctattgccgaccgtggcgcatacaccggtgttactgctaaatggctgcataccaaagacccgaagccagtgaagcaaaagcaagcggtgaagctgaagcgaaaacctaaagtgcaacatctccgggcgttacagcacccgaaagcaaagccggtgagcagtaaaaccacggccaaaaagcagaaagagcaggaagcccgcgagggtgaatatatggccggtgaggctgacaacgttttcgcgctgacgaccatttacgccacgaaggcgcaagcgatgcgcgcggctcaggcgaagtgggataaattgcagcgtggcgttgctgagttctcaattctgctggcaaatggacgcgaagatatttatcccgaaatgccggtcagggtctcgggctttaagcgcgtcatagacgaccagccgtggataatcagtaaggtggcccataatctcggcgggaatggcttcacgactgctgtggagctcgaggtgatgctttctgatgtggagtacaaagcggaatatgatgaggggtga

SEQ ID NO: 85535 - DNA, 465 bp, Citrobacter koseri
atgatgctggcattaggtatgtttgtttttatgcgtcagacgctgccctatcagagcatgcagcgcagcgcggattatagctgggtgtcaaactcccgcgtcgggaagcgtgacgcctttcagtatctcggtgaaggggaggacaaaatcaccctgagcggtgatctgtatcctgagctgaccggcggcaagttttcgatgctgacactttatgcgatggctgagcaggggcgagcatggccgcttatttctggctcaggctggatttacgggatgtttattgtcagcaatgtctcggagaccggcacggtattttttgaggacgggtcaccccgaaaaatcagcttcactctgtcactgacccgtgtcgatgaatcgctcgcggcggtgtatggcgatatcggaaaacaggccgagagcctggtcggtaaagctggcaatctgctgtcgatggtgggggcataa

SEQ ID NO: 85536 - DNA, 2430 bp, Citrobacter koseri
atgagtaataacctcaaactcgaagtgctgctgaaggctgtcgaccaggcgacccgcccctttaaagcgatccagacggcgagtaaatcgctgtctggtgatatccgaacgactcagcaatccctgcgtgatttgaatggtcaggcatcgaaaatcgacggttttcggaaagccagcgcacaactagccgtaaccggtcagtcactgaaacaggcaaagcaggaagccgccgcgctggccgtgcagtttaaaaacaccgaaagtccgacccgcgcacaggctcgagcgcttgagctcgcgaaaaaaaatgcggctgaccttcagctcaaatataacggtctccggttgtccgtgcagcgccagcgtcaggagctcagtcaggccgggataaatacccgcaagctgtcgaccgatgagcaacgcctgaaaaccaccatcagtgaaacaaccgtacagcttaatcgtcaacgtgaagcactggcgcgcgtcagtacgcaacaggcgaaactgagcgcggttaaatcgcgctatgagtccgggcaaaaactcgccgccggtgcgcgtaatgccgggatggtgggaaccggcctcgctatgtcagggttatatgctgaatcgcgttttatcgcgccgggcatcggttttgataagcagatgtcaggtactcaggcgattctcagtcttgataaaggggatgcaaagctcgcggcgattcgccagcaagcgcgcgatatcggtgcaacgaccgccttttcacccggcgacgttgcccgtacacagaccacgctggcgcgctcaggttacaaggccgatgacgtgctggccgcgacgggctcaacggtcaatctgagtcttgccgccggtgtcgatatcgctgaagcggccgacattatcacgaatatgcaatcggcctttaacctgccgacgaccgagattcagcgtgtcgctgatgtgatgaccaaaggctttacgtcatccaataccgggctggttgagctgggcgaagcgatgaagtatgtcgcgccgatcgccgaggccgcaggtgcgagtattgagagcacgacctcgatgctcggtgtgctggccgataacggtatcaaaggttcgatggccggtacgggggcgagtgccatttttaaccgtctacaggcaccgatgggtaaagccgtcgacgcgattgctgaattaggcgttaagacccgcgacagcaaaggcaacatgttaccggtcgagggcatcctcaaagacattcacacctcttttgctaaaaacaaactcgggacagctgaacaaggcgaatacctcaaagttatttttggtgaagaggcgatgaaaggcgctatcaagctggtcgccgccgccggtgatggctcgctcgataacaaacgccgtgagattcagaactccgcagggacgactgagctcatcgcaaaaatccagaccgacaacctcgacggggatttaaaaaaccttcagtcggcgtgggaagacctgcaaatcgaggtattcgagaaacaggattcagcgcttcgcaagctgacaaacaccacaaccgactggattagtaccgttgcggcgtggacaaaagcgaatcctgaactgacgaaaacgctgttcaccgtcgtgactgccgcgctgtcgattattggtgtgctgggcggtattggtctgattgcgtggccggtcatcgccgggattaatgccattatcgccgccacgagtctgttgggtaccgtttttaccgtggccggtagcgctattgtgacggcactcggtgcaatcacgtggccggttgtggccgttgcggcggcggtggtcgctggcgcgctgctgattcgcaaatactgggagcctatcagcgcctttttcggcggtgtcatcgaggggctgatgagcgcctttgcgccagtcggggaaatgttcgcgccactggcacccatctttgacggtctcggcgaaaaacttcgcggcgtctggcagtggtttaaagacctgatagcgccggtgaaagcgactcaggacacgctgaacagttgtcgtgatgttggggttatgttcggtcaggcgctggccgatgcgctgctgatgccgcttaacgcctttaacaagctgcgaagcgggattgattgggtactcgaaaaactcggcattatcaacaaagaatccagctcgcttgaccagaccgcggcgaaagccagtgcggcgacgcagagcggttacagcccggctatcagctcatacaacagctatcagccggtcacggcacccgccggtaaaacctacatcgaccagagtcgaccaacctatcaaatcaacgtgccgggcaacggtatgccgggcggtcggttaggtaatgatttgcaggatgccttagagaaatacgagcgtgagaaacgcgctaaagcccgcgcaagcatgatgcatgactaa

SEQ ID NO: 85537 - DNA, 282 bp, Citrobacter koseri
atggaaaaaaccaacgaaaacaccatcaccctgaatactccgatcaaacgtggcgaacaggtcattactgaaatcacgctgttaaaacccaccgctggaacccttcgcggcgtagggctggcggctgtcgcaaactctgacgtcgatgcgctgattaaagtgctgccgcgcatgaccatgccctcactgaccgaacaggaagccgccgcactggagctgcccgacctgttgtcgtttgccggtaaggtggttggttttttgtcaccgagttcggcggtttaa

SEQ ID NO: 85538 - DNA, 519 bp, Citrobacter koseri
atggcattaccgcgcaagctcaaactcatgaacctgtttgtggacggtgtgagttatctcggtgtcgtgcagtccgtcacgctgccaaaactgacccgtaagctcgaaaactatcgcggcggcgggatgaacggctccgcgccggttgacctcggcctcgatgacgacgcgctgtcggctgaaatctcactcggtggcttcccggatgacgcgctctggtctctgtacgctgccaccggtaccgcatccgtgccgttgcgcttcgctggctcttaccagcgtgatgacactggcgagaccatcccggtcgaagttgtccttcgtggccgtcagaaagaaattgacctcggcgaagccaaacagggcgaagacactgagtcgaaaattccgctcgtatgcacctatttcaagctgacgatgaacggctcggaactggtggaaatcgacaccgtgaacctcgtcgaaaaggttaacggtaccgacatgctggaagcacaccgacagaatatcggtctgtaa

SEQ ID NO: 85539 - DNA, 1191 bp, Citrobacter koseri
atgagtgattttcatcacggcgtgcaggtcgtcgaaattaacgacggcacccgcacaatctcgacagtatcgaccgccgtcgtcggtatggtctgtacggccagcgatgctgacgccgaagcattcccgcttaatgagccggtactgattacgaacccacaaagcgccattgcgaaagctggtaccaaaggcactctgaaaaaatccttacaggcaatcgccaaccagtcgaaaccggtcattgttgtcgtgcgtgttgaagagggcaccggtgatgatgaggaagccgctcaggcgcagaccatttctaacatcatcggcaccacggatgagaacggtaaatacaccggcctcaaagcactgttgaccgcgaaggccgtcaccggcgttaaaccccgcattctcggcgtgccgggtctcgatacgcaggaagtcgcaaccgcgctcgcttcgaccgcgcaaaagctgcgtgcattcgcttacgtcagcgcgtgggactgcaaaaccatttctgacgttatcgcttaccgtgaaaacttcagcgcgcgtgagctcatgattatctggcctgaattcctcggatgggataccacggcaagcgccacgacgacaacctacgcgaccgccgtcgcgctggggttgcgtgccaaaatcgacaatgacaccggctggcataaaaccctgtctaacgttggcgtcaatgaggtgacgggtatcagtgcgtcggtcttctgggatttgcaggagtccggcaccgatgccgacctgctgaacgaggccggggttacaacgttgattcgtgctgatggcttccgtttttggggcaaccgtaattgctccgatgacccgctttttcagtttgagaactacacccgcaccgcgcaaatcatcgccgacacgatggctgaaggtcacatgtgggcggtcgataagcccgtcacagcgacgctgattcgcgacattatcgacggtatcaacgccaaattccgtgaactgaaaaatggtggttacatcattgatgcgacctgctggtttgatgaagaggcgaatacccaggagacgctgaaagccgggaagctgtttatcgattacgactatacgccggtaccgccgctcgaaaacctgaccttacgccagcgcatcacagataaatatctggcgaatctggtctcttccgtcaacagcaaataa

SEQ ID NO: 85540 - DNA, 579 bp, Citrobacter koseri
atgctgattggctatgtgcgggtatcaacaaatgaacagaacacggatttacagcgtaacgctttggtcagttcaggatgtgagcaaatatttgaagataaaataagcggtacaaaagcgacccgccccggtctcaggaaagcattaaagacgatgagcgagggcgacacgcttgtcgtctggaagctagacaggctcgggcgatccatgcggaatctggtgttacttattgaagaactgaagggacgcggcatacattttaaaagcctgactgactccatcgataccagctccgcaatggggcgctttttcttccacgtaatgggggcgctcgcggaaatggagcgcgagttaattgtcgaaagaacccgcgccggtcttgctgctgcacgggctcaggggcgcataggtgggcgacggccaaaactaagccctgaacaatgggagcaaatcggtcgtctactcaaaaacggccatccgcgcgccgaacttgcccgtatttatgacatatcagaacaaacaatctataagcgatatccggctcaatccctcgttgtgtcaccgacagcaaaaccctga

SEQ ID NO: 85541 - DNA, 498 bp, Citrobacter koseri
atgaaaaaactgatgctcactctgccgttgctggctggtctcagcaccgtacatccggcagtggccgcaatggatggcaatgatattatttccctgggctatgcccagcagcatagcaaccgcgccggtacccttcacggctttcgtctgggggacaatcatgccttcgcagataactggggactgaatacatctgcctcatggaccatgaaaaatggcggtgacaatggtgagtctaatctcgtttccctgctgaccggtccttcataccagattaacgacatgctgggtctttatactcaggtggggccggcgttcttccatgaaaatgcgccgggaacaaaatgggggtatggctatggtgccggattccagatcactccccgtgaagacatcaatatcactgttggctacgaaggtgccagttttgacagcacccacaccagcggcagcctggacaccaacggctggaacctcggggtaggttaccgtttctga

SEQ ID NO: 85542 - DNA, 204 bp, Citrobacter koseri
atgaacaaacttaaaaccggcctgcctgatttatctcagcggaaaacgcacagttatttatccggcccgacattacgcgaactcagggtgcgcctgcaacaagcttccaggatgcaggaccgcagaaagccccggtcttccgcaagacggtatctgccgggcaatccctcccgggtcttacggactgaatggttagttgactga

SEQ ID NO: 85543 - DNA, 363 bp, Citrobacter koseri
atgacaccattattctcgttcagggaggccctgaacatggcctttatactgctgtgtctgcttcccggtgccgctgctgccgccagtttcagttgccgcagcgtcacggccccggatgaaaaggcagtctgttctgaccgggaactgagtgaaaaggatgtcagaatggcgacgacttacggcatgctgagacaactggtgctgatgggaggtcgtggagcgcttcaggctgaacagaccgcctggctgcagaaacgccaggagtgtggtgacaacacccgttgtctgtcacatgtctacgatgacaggattgaaacactgaacagacagtaccgctacattgtggcatcactgaatcgctga

SEQ ID NO: 85544 - DNA, 516 bp, Citrobacter koseri
atgacggagttgagtttatcttcaggaaagtgtgtggcaaatacggcctccggagggcggcagcaaagcagccgtgagcggctgaaacagcagacccggcaggatattgctgagtttcgtgaacgtatgctgcgactggctgacagtctggtggggtggctggacgggtatgacgttgatattaccctgcgggaaataagtcctgttaacacggcaggggcgtataccatccccggcattgtgctgtgtcacagacgtaactgggccggcttcactcctcaggcactgtacagcgagaaagggggtgttcagcttaagggagaagtgtgtctggcagttgataatcccgggcgccgtccccgtactgaaaaatatatgctcggtatggcgggccatccgttatccgcggcagactggataatatacaaagacagtcgtacgccgggaaaaggtaaggaactgacccgtgaacggctgctggctgcggttgaatcattgttcgatgacaccgaatga

SEQ ID NO: 85545 - DNA, 1851 bp, Citrobacter koseri
atgaccccgtctgactgtcttcacacaacaaacgtacgctgcctgctgcttattgtggctgcgttgtgcttcaccggctgtggtacccggtctgttgaccggagtgctgcactccttgagagtccggtacagactgattccgcatactgtctacagcaaatgcagcaaagtaccggtgaccgcaaaaccagctggcagttactcgccattcgttcactgctccgggagagtaagcatcagcaggccggtgcattgttcagccggttgccggtgaagctggatgccgctcagcgtcaggagcggtcgttgctggccgttgagctgaaactggcacagaatgatattgccggggcgcaggcccttctggcaaaaaccggtccgtctggtttcagggggaaacaactgtcacgttaccggcagtgtatggttgccgttcagcagggtaaaccgtctccggcgctgctgcgggcgctgatggcgcaggcgccgcttctgaccaccatgcaggagaagcaacgcaatattgatgcgacctggcaggtgcttatcaccatgccgcaggagtatgtggattcactgaaccacgatgcgggcagtacagatgaacaggacattcagggctggctggcactgcgtcatgtctggtctgataaccggggaaagcctgacggtatgaaggcgggtatcaggtcgtggcagaaacgctggccgcagcatcctgcctcggaagtactgccctcccggctggtgagggtaatgcatttccggtcatcatcggtgagtaaaattgccctgatgctccccctgagcgggcaggcggcacgctttggtcgtgtgatttatcagggttttgaggcagggaaatacatgagttctccgccgttggggggcgccccggcgttgctggtgtacgatacctcgacaaagcccgtgacacagttgctgtcactggcgaaaaaggacggcgccacgctggtcgtggggccgctgttaaaacatcatgtgagagagttactcagcagcaacacaggagtggatgtgcttgcccttaacctgcctgaaaatcccgtgttccgggataatgtctgttattttgctctgtcgccggaggatgaggcccgcaatgccgcgcgccatatccgtcagcagggaaagcgctttccgctgcttctgcttccggagggggaactcagcgaacgcgtgtccggtgcatttacgcaggagtggcaaaaacggggtgggggtgtggtcctggcacagcgtttcgggtcggtggccggtcttaagtccggtgtgaacagtggggagggtatttcactgaccggcacaccggtcatcattcatttaccacaacagcagccggtgcgtgaggtggtcgcattacatgacagcaacggaagttttcgccgggggcaggttgatgccgtctatatcattgccacaccgcaggagatggcgtacctcagaccgatgattgagatgcgaaacggcagccggtccggcgagatgctttatgccagttcccgcagcatcagtagtgcggcggggccggactttcgtctggatatggaggggctgcagttcagtgatatcccggctctgacgggcggcaatccggggctgaaaaagcgggccatgaaagctgcgcataatgatgactttcttgcgcgtctgtatgcgatgggggctgatgcccggatgctggcgaatcacttttcacagatacgtcagatgccggggtttacgcttgacggtaataccggtgagctgagcgccacatctgactgtgtgattagcagggaactgccatggttcagataccggcaggggcagattatcccggccggataa

SEQ ID NO: 85546 - DNA, 624 bp, Citrobacter koseri
atgaaagaaaggcgatatatcacccggcaggagatgaggctgttacttcatgcaacccgtgaagggcgtcattatctccgggaccggtgcatgataatatttggttatatgcatggcctcagggtcagtgaactggccggactgaaagtaacggatattgatttactcagtggatatatatatatacgccgcctgaaaggcggtttcagtaccacacatatgctgacagagacggagcgaaaggcattatccgaatggcttaaaatcaggccggggtatataaaagagaatgtcccgtggttatttctgacatccggcgggaacagaatgagcaggcagcagttttataaactgctccggcgttacagtgaaaaatccgggttaccgataaacattcatccgcatatgctgaggcatggttgtggttatgacctcgcggaccaggggctggatacgcgacttattcaggattatctcgggcataagaatattcgccataccgtgcattatacggcgggaaatgctgcaaggttttctgttgtgtggcaggctgttcctcctcccggaaatatctttggtgaatacagtaccgggggatgtatggatgccatcccgacggcataa

SEQ ID NO: 85547 - DNA, 396 bp, Citrobacter koseri
atgaaagcattaagcgatattgtcatgaagttattcagcggacaggaagaccacccggacctggtggcgtttctggcatgggtgcaggatgagggtggctttccggcgatgctggagcgcattcaggaccgtggcgccggtgaactgctgactgaactgctcagcggggcgacgcaaaccctgagcagcgggcacatcgggcaactgttcagtcagtctgaaatcagcgcactggcacagcgtacgggaaccacgccacaggaggtcactgcctggatggcaaactgtctgccggcccttctgcagcacctggctcctgaagggcatacgctctccggcagcgacatgctgagccgggcgctgacgctgttacgcgacaggctgtttccgtcataa

SEQ ID NO: 85548 - DNA, 369 bp, Citrobacter koseri
atgcgtatgatattcccccttctgaccacctgtatcctgatgctgagcaccatgactcaggccgcaccacaccctccttccacgaccacagcagcggacgacacagcaaaacaggaattgcgtgctcacaccccacaccgccgtaccacaccggccaccggcgatgtcgcatcacccaaaaacgacaatgagaccgcaccttcccggggaaaaaacggccagttccgtaagaaagaaaaaaataccgtcacggcaccggaaacgtccggcgcaacggcacgctgtcgtgatggctcactcagccacagccggcagcaccgcggtgcctgctcccggcatggcggggtcgaccagtggcttgaccagtaa

SEQ ID NO: 85549 - DNA, 594 bp, Citrobacter koseri
atggctaagcgaaaatatctgacacagagtgaggtggaaaatttgctggaaacagcgaggcagtcgggcaaccccgaacgggattactgcctgatatacatgagctttatccacgggtttcgtgtcagtgaggcccggcacctgaagctgtcggatatcgacctgaaggaggggagtctgtatatccaccggctcaagcaggggttcagtaccagtcatccgctgctgaagcaggaaatccgcgccatccgtgcctggctgaaggtaaggagccggatggaaggcgcggagagcgactggctgtttctgtcgcgtcaggggagaccgctgagtcgtcagcgtatttattacctgatacaggggctgggtgaaaaggcggggctttcgttatgttcgcatccgcacatgctgcgacatgcgtgcggctttgcactggcggaccgtgggatagacacccggctgattcaggactatctgggtcaccggaatatcaggcataccgtgcgttacacggccagtaatgcggagcggtttgagggggtgtggcggttaaaaaacaggcgcaaaagggttcaattaggaccaaactgttaa

SEQ ID NO: 85550 - DNA, 558 bp, Citrobacter koseri
atgaagaaaatgcgtgttttaatgctcgcaacgctgatgggtgctgccgtatccggtcaggcatttgcggatgacacttccgggcagtcaggaaccatgacatttaatgcgaccctgcaggaagggacctgtcagttatcgggtcagaacatcgatcataactttggttcgctatctaaagcgatgactctcgggcctggctgggataatggcagtagttggggagtgttagtacaatatgctgatacgattactgtgagtaattgtccaagttcagtggcttcagtaaaaatgactccgacctataccaaaatgtcaggccaatcggatgtcatagctaattcagctacagacggttcgaacgttaagatgtttatctcaaaagatactgcgttgaaggataccaatacttataaatctggaactgtgtatagctataatttgaatgatggctcagtgagtataccgatgtattcttccgtgaccaaatctaagactactgctattacagcaggtgctgcagacttcaacgttcaattggcttttgcgtaccaataa

SEQ ID NO: 85551 - DNA, 531 bp, Citrobacter koseri
atgaatatgtttgttaaaggtgcgtttgtcgcctctgttgttttagctgggctgtcgtcaggagtagtatttgctgatgatagtggtagtgtccatgttgccggtacaattgtcgatgcaagttgcctgattgcttcatctcagttaaccagaactgtcgattttggtgacattgatgcacatgatgtcagtggtgtgggtgtcggcgcagtggcaaaaactgagccgctggcgtttgatatcacagactgtccggcgtccactaatcaagtgggtatccgttttgactataccgcgaatgcagacggacagaactatctgcagaataccggtgatgctgccggtgccctgtttggtatttcttctgatgctgacgacactgctgttgccagtggtaccgcactttatgccgcaagcattacagatggtgccgccacagtaaatgcaaaagccaatctgtaccatgtggacgatacttatacccctggctcgctgacctccacggcgaacgtcacgctggtatacaattaa

SEQ ID NO: 85552 - DNA, 720 bp, Citrobacter koseri
atgctgaaaaaaaacatactgtattctgcgttgtcgattttatttttcacctgtatgcctgtcgcacagagcagtgagggtgggttcagtctcggctccacgcgggtgatttatccggcagagaaaaaagaagccacggtcatggtggttaacagtgcgcccggcctgcgttttctggcacagtcctgggttgatccgtattctccggacggtaaaagtggcagcggaaaggctccttttatggtgacgccgccgttgtaccttcagaccacgggaagcaatacgctgcatattgtccggaccggtcctgtcggtgcaaatgaccgcgaatccgtctactggctgaatgtgaaggcgatcccttcggcaaaaaaaacaccgggtcagaaagacggaggaaccattcagttctcttatctgatgaagattaagctcttttaccggccgcaggggctttccggaaagcccggtgatgcgtatgagaaaattacgttcagtcgcgcaggaaataaactcaccgtcaataatccgacgccgtattatatcacttttaataaaatcactgtgggcggacgggaaattaaggacgtgaatgccatgacgccgccgctggggtcgcagtcttatagcattccggccggtgctgtcggggatgtggtttataaaaccattaatgattatggcgggctgacacaggaaaaacgcgtgtcattacaataa

SEQ ID NO: 85553 - DNA, 2628 bp, Citrobacter koseri
atgaaaataacagaactccctgttaatcccggggcgtgtttccctgcgtctgtactttcccgcgccatccggatcattctgttatccaccggtgtggcaggcgtctggagtgcaggcgtctccgcagaggaatattttaacccggcactgttatccctggggacgccgggcggtgcggatgtcagtcacgttgatttatcccgctttgaagcaggggggcaggcaccgggtgtgtaccgggtggatgtttacctgaacggtcagttcatgaccacccggaatgtgaattttgtggcaggcagcgggactgaccttgacccggctctgaccctgaaagattaccggtctctcggactcagtgacaaagccgttccggccctgaaggacgtgtccggcgatactgcgctgaccccgctgggtaaatatgttccggcagccaccacgcagtttgatttttcgcagcagagactgaatatcaccataccccaggcgctgatgcagacccgcgcgcaggggtatgttgacccggacagctgggatgagggggtgccggcagcgattctggattacaacattaccggcaaccatacggcgtaccgcggcgacagtgccagtatgggcagtacggacggtcagtacgctaatctgcgcagtggtcttaacctgatgggatggcgtctgcgtaactactccacctggacccgcagcagcggtcacggagacacacagtcacatttcagcagcatcaacacctatgtggcccacgatgtgaaacccctgcagggtgagtttcttgccggtgaatattcaacgccgggcgatgtgtttgacagcgtaccgtttcgcgggatgcaactggcatcggaccagggaatgctgccggacagtatgcgtggttttgcaccgattatccggggtgtggcgaattctaacgctcaggtgaccgtgcgccagaacggtaacgtgatttatcaggcttatgtcccgccggggccgttcgagataaaggacctgtatccgtcttcggacagcggtgacctggtggtcagcgtgaaggaaaaagacggtacggagcgtcgcttcacgcaggcgtattcctccgtggccatcatgcagcgtgaagggcagatgaagtatgccctgacgggcggtgaactgcgtgacagtggcggaggtaatctgcgtgagtcgaagtttgcgcaggcgacgctgatttacggtatgccgcataatatcacgccctatgtggggctgctggcggcgcagaaataccgggctgtcaccggcggtatgggggtcagcctgggcgagtggggggccatgtctgcggacgtgacgcaggcgaacgccaccctgaccacaggggaaaaatcgcagggtcagtcgtaccgggtgagatattcaaaaagtatgctcgacacgggcacaacggtgacgctggcggcttatcgttattccactgaagggtattacagcttccaggatgcaaatacttaccgggaccgtcgtgataacaatggcggggatggctttgattcttcttataaaccacgcagtgagttccaggtttccctgaaccagtcactgaacagttttggctctgtctacctgtcgggtactcagcgcgactactggggacgcagcgggacgcagcggacgtacacggccggttataacacgaacatttacggcatcagctacggggtgaacgtcagtcagagtaaaaacagcgacagcaacagtaaaacggacaaacgcctgaacctgaatgtctccgtgcccctgagccgtttcctggccggcagtaacaactatgccggttacaacatgaacatgaactactccatgaacacggaccaggaccataacaccagtcagcaggtgggggtcagcggtacggcgatgagtgataaccagctgaactacaacctcagtcagagcacgggtaaccatggtcagggttatggcggcaacctttctgccacctataacggcagtgccggcgctgtgaccggcggttacaactacagcaacaatcagcgccagctcacgtacggactgagcggcggggtggttgcccatccgcatggtatcacgctgggccaggagccgggagagaccattgccattgtgcgggcgccgggggcatccggtgtgaaagtgaacagccagacaggggtgaaaacggactggcgtggttatgccattgtgccatacatgacaccttaccgtagcacggaggtgacgctggatccgaccggtctcggaaatgatgtggcaatggacatgacatcatcccgtgtggtgccgacccgcggggcagtggtgatggcgaactaccgtactcaggtggggcgtcaggcgatgatgaatctgacctggcggggtaaaccggtaccgtttggagccatggcggtactggacatggctgccggggaagacggacagcaggctgccagcagcatcgtgggtgatggtggtcagttgttcatgacggggctgccggatgaagggcggattaaggtgcagtggggcagcgacagtgatgaacactgcagtgtgccgttccgtctgccggcagagcgcggcgatggtgtgccggtcagtgtcagcggcgtgtgtcagtaa

SEQ ID NO: 85554 - DNA, 768 bp, Citrobacter koseri
atgaggccgggggaaggcatgaaaacaggagctctcgcacgatggtccgggctggtgctgctggcgctgcttggtacgctcagcggcatgtctgctgaagcggctgatggcgataaatcggggattggaacggaccgtacccgttacatctttaatgaaggtatgcgccagacgggagtgacgctgagcaaccggacgcatgagagttatctggtacaggcgtgggtacgtggtctgaacccgcagaacggagaggtgacgaacgcgtcagcgcctttcttcctgaaacagccgctggtgaaagcgctgcctgacgggcgttatggttttcaggtgatacagacccggccggtaatggtgaaggaccgggaaagtctgtacctgttgtccttcaaactgatccctgcagagaaaaagaagggtgagacggggtacagccgggcaaatgtggtgctgacgtataacgtgaaactgttttaccgcccggcaaagctgaaggacggaaaggtggctgaggcagcaaaatccctgcgcttcaggcggaaaggggacgtgctgcaggtgagtaatccgacgccgtactggataacattttacagtctgaaggcgggagggcatgcgctgtcagaagacgcactgcgacgtatggtgcccccgctgggggaagcggagtatccgttaccctccggagtggagagtgggcaggtgacatggcgggtgattgatgagaatggcgaagtgacaaaagaagaggtctctgccttatga

SEQ ID NO: 85555 - DNA, 1140 bp, Citrobacter koseri
atgagtgacatggtgcggatatgggcgggacggtcaggggcggttcccgcgctgataaaacgttttaccggacagttgttgtcgggctggctggtcctgatgctgctgtcgcttccggcttttgcctgggatatcagtctcagcggcagggtggcggatgccggtcatgttatcggaacatccggagccccaattccgacggtgagagtcggtgctctgggaagcccgcgtcccggacaaacggatgcgagttatatcacatcagacggctcagtactgaaattaaccaatccatcttcagggaagattgaagcagtgtgccttcgtcagaacggcagtacagtggacagcgtgtgtcgtggcggtgtcattgtgccggcgccggcaatgtggattgactggggggtaatatcagatggctccggaattgggttgtatgcgcccggagagtacgatgggatgaatgccgtggtctggcttgaccatctcagtggaggaacatccactacctggtcctacgcgtcatcttcaggttcacagactgttgattcatgggtcgtcggggggggagaacattccgggcaaatcagtgcggtagcggggccggaccttttacccgggatatactccgggcaggtaacagtaaacattaccggggcgccctctcagacgtttaattatcatgtcgctgtttttaacacgttaccgacgtgtcagataaatcctgtgccgcccgtgatgttcggtgacgtaaatatttctcaggttacggatgttctgttggcctcgaaaagtattaccgtcagtggaaattgtactgtgaatgatccgcaggcatcaggtatggcggcatatctgactttttccggtcgtcttctgagtggtgtatacagtcacaggctggcaacggatcattccggtgtgtttattgtggggggcacggataattcgactgcacagtgtgataactcattaattacatgggataaccaggtgcaccatgaactaaaggcactttcttctgttgttcagggtgacaatcctttttctatgccactggtgttttctttatgtcgtgatggaggtgtatctccgggacaaataaatgcaacagcgtatgtcaatgtggttattcagtga

SEQ ID NO: 85556 - DNA, 1203 bp, Citrobacter koseri
atgaaactactgttgttatttatttcccggcgttctttttccttattcgggttgtgttcattactttgtgtgggtgtttttttaaattcccgctgcctggcaggtgaattacgagtgccgcaaaatgacggggatattgttaatatgactgtcccgtggagtatttcgccgatgaacagcactgatccttctccttctgaggggggaaccctaaccttcaaaaaatactttgttgaccttgaatatgggaacggagctcctgcaacaggtagtgggcagggtgcattcagttatgactttgatttacaaagtatgacaatggcattcgataattacaaagtgattattgaacctcctgcattaacctgtagtgtgactgacacgcagcaacccgacatatctacgaatgtcagagtgtggcctgctggtaccagtatgaccccgacatctgcaacaacagctctggacggaagcgggagcgggagtctgtcctggtcaaaggggactaccggagtgagtattctcggaaacccggactcgcagcaatttggttttggagctcctccattacatacatccctgaccccttcggtacctgggggcgggagcatttgggtcagagggacggcccggcccggagactatacagtgagtataccgttgagttgcatttcttatgcaaattccggcggggtgagtcatcagataaagtctctgaagacaacggcaacgatgtcgtttactttgctgcccagactgacaacctgctcagtgacgccgccaggaaccattgacttcgggaatgttttcgccggttcttcaaccacattgattgcccgcagaactgccagagtttcagcaagttgtgatgtgggacagggctctgatgatattggtaagggaatgtatctgacttttacgcccggcggacacggtttgtatggtgatgataataaaaagctggccacatcaatgtccggaatttatatcaccggcggttctgatgcgacgctgtcttcgtgtggctcttctgatatgtcatttgacgggctggcgacacaaagttacagactgaaaaatcttgcgcagggaacaaatcaggccactaaggacctttatttcgccctttgtcatgatacagctaaaccagtacaggctggttcattagagtcagatgctaatgtgaatgtggtgattcagtag

SEQ ID NO: 85557 - DNA, 567 bp, Citrobacter koseri
atgaataaattatcgcggtgtgaaatgaaaaaaatgtctggccaaaaagaaagtaatgtgccgggcctgaaaaatactgaacggaatgtcagaaatacgcgccgtcgaatttccgggcggcagagaaatcacggtgacttttatttgccggcgattatttctcacctggaagagccctctttttatattgcggtggcctggtgggggaaattaacgggccgtcctttttcccgggaagacgtggcgcaggcattccgggtgactgcccgtcgggccgcggacgttatgacctatctggccaccggcgtttcccgctctgtcgtcggactggagaaaaaagtggtgcggatggggagcggacgagccgtgcttctgatgaccatcctgtccgtggatgagcaggcacagggcaccgccggggaggcggaacgacgctcaccggcggcacctgcggtttctgcggggagtgccccgcgcccccgcccgcgcggggcggcggctgaaggacttcaggccgcgcgggacctctttctgcgtggtcgccggccaccaccgaacggagcctga

SEQ ID NO: 85558 - DNA, 792 bp, Citrobacter koseri
atgcagggagagggtgtgggactgcatgtggtgctgtggctgcatcagtatgctgcttactggttacctctggtcacggtgttgttgctgggaatgctgggggggctggttgtgcaccttgtgagaaaactgctgcgctgtggcgaccgacaggaggtgatactccggtggtggcgggaactgggggggccagtgctggtgacctgtgtggggttattgttactggtcagcccgggctggagctggccggatgcgttgattgcccgtgcggactctttttttcaggcattttctgactcccccggggcgctgcaaccggatgcgtgggctgtgccgtccgtactgcctgcccgggaggatatgacggtggagggactggcgctggctgacatgatgaaacactcaggtgaactgacgctgctgtggtgcggtcttgaactggcactgattgcggtgatgttcggtgtccttgtcccgacggtttcccgccgcaggcgctggctgtttcatcggccctctgccacctggcgcctgtttcactgtgatttgccgcccgttgtcgtggtaatgattgtggggctgtgtctggttccggggcttgtggtcagtgagtggctgcgtcacgtaacgccttcctggccgggtacggtactgcaggcggtcatcctgctgtgcggcacggcgttgctgatttgtgtggtccggcgctccggcgtccggtggggatgccgggcgcttatggttgtcccggcaagcctgatgctgttacggctgatatggatactgacctga

SEQ ID NO: 85559 - DNA, 696 bp, Citrobacter koseri
atggtgaaaaaactgatggctgaaatggtgggtaccttctggctggtgctggggggatgtggcagcgcggtgttagcggcaggtttcccggaactgggtatcggttttgcgggggtggcactggcttttggtctgactgtcctgacgggagcttatgcgctggggcatatttccggtgcccattttaaccccgcagtatcactgggcatgtgggtggccggacgatttcctgccggtcagcttgttccctatatggtggcgcaggtggccggggggctgctgggggctggtgtgatattcctgatcgcatccggcgcgccgggttttgatgttcacgcgggttttgccagcaatggttttggcgcacagtcaccggcgggcttctcactgttgtcttgtgcaattaccgaggtggttcttaccggggtatttgtactggtgattgccggtgtgactgatgcccgggcaccggcgggctttgctccactggctattggtctgtgtctgacgcttatccatctgatatccattccggtggataacacctcggtgaatccggcacgcagtacggcagtggccgtgtttgccggaggggaatggctgcgccagttatggttgttctgggtggcgccgctgggtggtgcgctggccggaggattattgtcccgtctgttcagtgagcggggggaggagtga

SEQ ID NO: 85560 - DNA, 672 bp, Citrobacter koseri
atgaactccggggctgatacgatgcccggacaggcccgggcggaagtgttatcgacatgcagtcttgcccgggcagggatgctccggattctggaagaaagcggctggtcggtggcggagggcgcggaaagccccggggtgtcgcttgtcgtggtctggctggcggtgccgttgcgacaacaactgactgtactggaacgtcttggcaaatatcttgatgaacaggacggagagccgtctgtcctgcttgtctgccggatggcgactgactggttgtggcagtacctgccccgtcagcttgacgcaagacagataccggtacaggtgcgggtggttgatgcgggattgtctgtcagcgggtggcggcaggtattcagcggtcgcggtacacccgtatgcctctcctgcatgaaccggcgaggggggcgtaatgccgggctgagccgcagggagatgcaggcgctgcacgacctgctggagggacggtctgtccggtcgctgagcgtgcgtcatggcctgtcacccaaaaccctttatgtgcacagatacagcgccctgaataaaatggcggcagcgctgacacccggtccttcaaccctgcgtgtacgtcgcagtcgtctgctgcgggaactggctatgtcgtatacctggctgtcaggtcgcagggggtga

SEQ ID NO: 85561 - DNA, 135 bp, Citrobacter koseri
atggcagagaggctttcagaaacataccgggtcctgctggagcagtcccgggtgatgcttgaatcctggcctcaggcagtggtgattgtcctgacggggattttgttgtgggtgcttacccgccaccgggggtga

SEQ ID NO: 85562 - DNA, 429 bp, Citrobacter koseri
atgcatcgttgcgggaatgtaattcttctggtggcagccgtggcactgagcggctgtcagggtatgaaaaaaacaaaccgggtcacgctgacgccacagtcaggcaggccggtcctgtcagccccggctggtgagccggttgcaccggtggatgagggcgtcagaaagcaactgactacctgtctgtttgaagcagaccagttgctgaaactgaaccgcgcaaaatacagggaacccgttaacagtctgtatcaggacatacgggcggcgaaatactacgcgtcagtggcttctcatctcagcaccggcgccacggacacgctgacgccgatgtatcagtttaaggtgaatgatgcctgtaatacggtctcacaactgctgctgacagaattcaagaagggtaatacggttccggagggtggccgctga

SEQ ID NO: 85563 - DNA, 1890 bp, Citrobacter koseri
atgaaaacaagagagccgggatttcgtcccggcttactggcgctggcgctggtaatggtctggcagagtggtcatgctcaggcgagggacgggacggattttttgtcggcgctggggggagtggaagtgccatcgctggttccctctgcgccagtcactgaggcaacaaggcctccagccgggcctcatccgtctgctgtgcgggagccggaacagaaacaggaggctgtccgcacggcccgtgccctgcaggaaaaccgcaggctgaaggcgctactggcccggcaggcacagaagttgcgcgagcaggaagcggctgtacgcagggcagagcaggcccggtcacagcctgaactgaccccgcaactgtcggcgttgcgccggcaactgacgcagcaggcctcagtgctgaagacggcggaagcggcccgtgattcgctcgcgcaggaagtaaaggcattacggcttaagaaccatgccctgtcggtgaaggcggatgtcagcagtctcactgcaacaccggaaccggcgctcagtgaagccctgaaacagagccgggaagcgcttgccagggcggagcagcaactgacggaacggtcagagagcctcaggcaggctcagacacaggccgcgacgctgacacagtcgctcgcggcgttgcgaaaacagtatgatgccctgtctgcggagcgggacagcctcagggagaaggccggggggcagcagaagcagatggcggacctgacgacacaggcagaagaggcccgtcgcaaggtggacgcccttacgatgcagcgggataccctgcagaagcagagggatgagcagagccgacaggaacggcataccgatgctgtaacgcagcagaaacaagccgccctgaataaacagctggcggaccttaaggaagcgcaggcagcgctccgcagtcagctggcagaagccggtcagcagaatgagacgctggtaaagcggatgtctgcgataaccgcagagcgggatgcgctgcaacagtccctggcgacatctgagcagcgcgcagcggtgctgacgcagcaggtggacaccctgaaaacgggggcatcaccgtctccggccggagaggacatcgtcgcactgcacaggcaactggccggggcgcagcagaagaatgccacgctgaaagcggaaggtgagacggcgacaaaacaggtttccgtcctgcaggaaaaagtgaacaccctgacgcagcaactggccggcctgaaggcacaacaggaaaaggcagcagcggtacctgacagggaaaagcctgcgctgaccacggatgcacagcgtcagacttacgccagcggtgtggtgtttgcggataacctgaagcgtacgctggccctgcagaaaaatctggggatcacgccggacccggccctgctgctggccgggctgacggatgccatgcagggggctgtacgcctgggagaacccgatctggataccagttaccgcgccctgataaaacggcttgcctcgcttgaggagaaaaaataccaggaaggggaaaaggccctggaaaaactggcgtccggtccggcattgctcaagcgaaaccgttcagtgttttttgtgcaggggcgcaaaggtacgggggcgatacgccccggcgaccgggtacagtttgatatgaccgagtccgtggtgaaaggaaaagtgctgcgtgacactaaaggcgtgaaggccacgctggatgacaaactgccttatctggtcggacaggcgctgacatttgccggccggggagggagtgtgacggtttactgcatggcttccgatgtctatccgccggaacaactgccgccgggattatttgcgtattcattactgaaatatacatttaccgtaaaagggaaataa

SEQ ID NO: 85564 - DNA, 393 bp, Citrobacter koseri
atgaaattaacgcacggaatggtttccggggttctttgtattctttttctggcagggtcagcatcagcggcgggaaataacacctccctgaatacgctttacggcggggatatgaacacctgtctgaatgacctgaatatgctcaagacattcagccagtcgcagtatgacagtcagtccggtgtcctgaacggagttattggtcgtgcgacgcactatctgctgatgcgtaatcagctcagcacagacatgcagggcgtgatggacaatatctggcagtcccgcctgacagcgcagtgtcagagtattcataacgccctgtttgacgggctgcttcgccaggccggaggggcgggtggcgccggtatgatgaccggacggggggcgcagtga

SEQ ID NO: 85565 - DNA, 270 bp, Citrobacter koseri
atggtggcccggatggtgcaactgctgacgctgtcaggtgtgatggtccttgccggctgctcggcgcagcacggtgtggtgaagacgtccgtgtcgcgaccgccggtcacgctgctggcaggactgtcgcagcaggtgggggcgctgaaagcgaaggcgtctgccggggaccggcaggctgaggaggcgctgctggccatgatttcagggcagggggtaaaggtgctgatggcgcagaggacggatgccaccgacagcgcttcccggtag

SEQ ID NO: 85566 - DNA, 141 bp, Citrobacter koseri
atgctgcattattttctgtacgaccttccgggaaatattatttccctgacggcagacctggataaagaaaacccctggctgatatttacgctgtacagcctcatcattctgtggctgattgcactgttcagtcgccgctga

SEQ ID NO: 85567 - DNA, 786 bp, Citrobacter koseri
atgatgagtggcaaaagaagtgtattcagcgccgcactgctgctgtcagcagtatgcagcggcaccgtacaggcacagacaggcggagagccgccggaggcatggcattttactgtgggtccggagttcggggcgaccggttttaaagggaatggcgcggtggggccgatggcggggaaactgaagctgccgtttcataaggtggcgaaggacacccggtttgcgtttgccggcggggtggctgccacccgtggtccgctggggctgtggttcaatggtcagtatctggatttgtctcagcattttcgttttgacgacgggaatattcacggtgaggcgaaaggtcatgccacccagctcagcgccggggcctggtatcaggtgtgggcgaaagacctgggcggacatacggttcatggcacggaacggcaggtaaccgtgtcgccgctggccggggtgcgctggacacgtctgaaggccacgctggatgcggacggcgagtcggcgtcacagcgcgccacgtgggccattccgtttaccggggcacggatgagtgctgacctgaatgaccggtggctggtgaatgcagaggcggatatcggtgcctggggacgggacttcaccacacagggacaactgtatgccggatatcgtctggccctgctcgggttaccctcggtggcgcatgtcgggtatcaggtgctgcatcaggaccataaggagagtgatttccactggaatgtgacccagtacggtcctgtggccggtctgtcggtcaccttctga

SEQ ID NO: 85568 - DNA, 1587 bp, Citrobacter koseri
atgaaaatcaatccccctctggtgacgctgttcatgacggccgttgtgtccctgggcgtgctgctgatgcagcgtcaggttcatcaggatcgtgaccgggctgtggcggaagccacccggaccatcgacggtatactgtctgaggctcaacaggctctggcgcttaaccgggcctttctgggccagccctgcacgccgcaactggcacgtcagttagggcgttctgcttccctgagtccgcatctgcgcggggtcaggttattgcaggagggactgactgtctgtgcatccctgagcggggcgccggacctgtcacttcagccccttcagtcgggacaactgcagttgctcctgcagcgaggggacggagtgacgccccggagtccggtcgtggtgctgacggagcgctttccagaggggcaggtggccgtcagtctgagcggggtgttcatccgtgaagcccttgaaccatcccggggccgtccggctctggtgttccggacgactgaccgggaaatggatgcgcaggggcgggtccggtcttattccccggagggtggctttcatccatcaggaacatatccctttgttctggtgccggacccgcagtcttccgttccgggaatgagtctgttgcgggatgtcctgccgtggttgttgctgagtatgataccggctgctctggcgaccctgctttgtcagcgactgctgcatcgtcgttgtgggccgcaggcacggtttttgcgggcgctgaaacggggggatatccggccgtggtatcagccggtgatggacagcaggacgggggccctggcgggttgcgaggtgctggcccgctggaagacccgccggggacggtttctcctgccggaccggtttattccgctggcagagcggagcgggctgacgatacgcctgacgcaggccctgctcagtcaggtggcccgggacctggaggaaatacgtgatgaactgccggctgattttcatctggcatttaacatcagttcggcccatgccggagacatcacgctggtgcagcactgtcgtaccttacaggcggcgttgcctggtgtgattctggtggcggaaattacggagcgagaacggtttgtcgtttcacctgaactgccggcgctgttaccggcgctgcgggcggccggagtgaaggttgctctggacgattttggcaccggatatgctggtctggccggtctggatacactgcaggtggactttatcaaactggaccgttctttcacggcgcagataacagaaacgaatctggcaggggaacggatgctgatggcggaagttatcacggacatggcctgccggctgaagctgggagtggtggccgaaggggtggaaactgcctgtcagcgggcctggctgacagcgcatggtgtgggctggctacagggatacctgttctcctgtcccctgccggcagacagtttcctccgttttgtgcaggaattccggcggacggatgagagaggttatccgtccgacattgtatgccctgaacgaataaacaatcagacgcacaggcaggaggggccggatggcggacgaggtggatga

SEQ ID NO: 85569 - DNA, 222 bp, Citrobacter koseri
atggcggacgaggtggatgatgcgcaactgcgcacggaacgactgatacagacaggaatacaacgggtacgggaagggctttcacgccgtgatgctccctggtgcgaagactgtggcgggccgatatcaccggcccgacgggcctgtctgccgggcgtggatacctgcgtggagtgtcagcataaacgggagttcacccggcggcatcaccgccggccataa

SEQ ID NO: 85570 - DNA, 1137 bp, Citrobacter koseri
atgatgaaaagacggaatggactgcggatgaagacgacaaagccgttgctgtcgctggcagccggcctggtgctgggcgccgggatgatggcgggaagtcttccggctgaggcctgtaccagttttgtactgccgaccacagacgggaaacgcatctatgcgcgcacgatggagtttgagttcgacatgaagtcatccctggtcggggtgccgcgccatctggccctgtccgggacaggaccggaagggaaaacgggcatgcagtggcaggcgaagtatgcggctgtcgggatgaatgccttcgggcttccctccctgctggacgggatgaatgagaagggacttgcaggggggatcctttatttcccagggtatgcgcattatgccccctggaaggatgaggaccggagcaacacgctggccccctgggatgtcctgacctgggcgctgacgaactttgccaccgttgcggaggtgaaagcggcgctgaaggatgtgcgaattgcggatgtgaaacaggcgaatatggggatttcgcccccggttcactataccctgcatgatgcgacaggggcctccctggtgattgaaccggtcaacggcgagcttaaggtgtatgacaatccgctcggggtgatgaccaactccccgtccctggactggcacctgaccaacctgcgaaactacgttaacctgcgtccggaaaatgtggactcgctgaaaatcaacaattataccgtgcatgcgttcggtaccgggtcggggatgcacggtatcccgggggattcctcaccgccttcccgctttgtacgggcggcagcgtatgtcttgtccgcacaaaaggtgccggacggcgtggaaggcgtgcgcctggcggaacatattgccaacaactttgatatgccaaaaggtctggtccaggatgcgcacatgccgccggaatacacgcagtggacagcgatagccgacacgggaacggaccggtattatatcaagacgtgggcgtctccggtactgcacggcgtggggtttgacagctttgatgtgaacggcacgaagatgatgacattcagtttcccggattctgctgagccggggatgctgaaggcggcatcagccccgtctgacgtgaagtaa

SEQ ID NO: 85571 - DNA, 816 bp, Citrobacter koseri
atgtcattttttatattcacttccccgaaggcggatgatgcgctgatgctgtgcatgctgctgggtggcctggtactggcggctttactgggccagacggcccgtggcgccaggcgggaggctgaggcgggaatcgtcccgggggcggtactcttcctgtccggactgctgacaggtcttgccttcctgatatcagtgaccggtttttcggcgcgggagcaggcgcaggtaagggaagccctgtctgtgggaagggcctggcagtatgccgggatgctggatgagccggcacgccaggcatcaggacagttgctgaaggcctatctgagcgaccgtattcattttttccgggaaggcacgggagaagggctgcggaaccggatggcggagtcccggcagaaacaggcgcagctctggagtctggcagagcaggaagtcaggcgctcgccgtcaccggcagtgatgtcggtactggaggcgtacagcgcgctgggcacctcgttgcagcagactcaggcaacatggcgcaggcaactgccggatgcggcctggtgcgtgctgctgctgtttgcggtgagcgccagttttttagccggataccgggggccgtcaggataccgggcccgccgtatcctgctgttcatgccggtgctgacggcgctgacgctgttcatgataatggagacagacctgccggggcagggagtgatacatgtgactgcggaggatctggaagcgctgaatgaggtgctgctcagcagcggtacgcccggcagcctccctgtcagggcgaatgcggtaccgtcattaagctga

SEQ ID NO: 85572 - DNA, 1140 bp, Citrobacter koseri
atgaccgattttttaccgttttcacgtccgtcgatggacgatgcagaactgatggcgttgcgtgatgttctgcagtcggggtggatcagcaccggtccgaaaaaccaggcgcttgaagaggcattttgccgtctcaccggcaaccgtcatgccatcgcggtaagttccgcgacgggggggatgcacatcacactggtggcgctgggaattgggcccggtgacgaagtcatcacgccatcgcaaacctgggtttcaacgctgaacatgatctgtttactgggtgccacgccggtgatgatcgatgtcgacaacgacaatctgatgatcactcctgaggctgtcgctgcggcgatcacgccgcgcactaaggccattattcctgtgcattatgcaggagctccggcggatattgcggctatccgtgccgtaggcagacgttatggcattccggtgattgaggatgctgctcacgcggcaggagcatactatcagaaccaccatgtcggctggtgtggtaccgcgattttttcgttccatgcaatcaagaatatagcctgtgcggaaggagggctcatcgttactgacgatgatgaactggccggacgtatccgcagccttaaattccacggcctcggggctgactcctgggaccgtcagagccgggggcgtgccccgcaggcggaggttatttcacccggctttaaatacaaccttgccgacatcaatgctgccctggcgctggtgcaactggagaaactgacacacgctaatcagcgccgcgccggaattgcccgccgctatctgtgcgaactggcggacacaccgtttaaaccactggcagtgcctgagtgggaacaccggcacgcctggcacctgtttattatccgtgtggatgaggctgcctgcgggataaaccgcgataccctgatggaaaagctaaaaaccatggggataggtaccggtctgcatttccgcgcagtgcatacacaaaagtattaccgcgaacgttttccggatgtttccctgccgaacacggaatggaacagcgcgcgtgtctgttctctcccgttgtttccggacatgaccgatggcgacgtcacccgcgttatttccgcactacaccagttgtcaggatgttaa

SEQ ID NO: 85573 - DNA, 984 bp, Citrobacter koseri
atgcttacttaccctccggtaaaaaaggtctcggtcgttatcccggtttataacgaacaggacagcctgcctgagcttctccgccgcacccgtgccgcctgcgcggcgctgggacgtcagtatgaaattctgctggtcgacgatggcagcagtgatgactccgcgcgtatgctgatcgacgccgccgaaaccgaagacagccacgtcgtggcggtgctgctgaaccgtaactacggtcagcattcggctgttatggcgggtttcagtcacgtgaccggtgacctgatcgtgacccttgatgctgatctgcagaacccaccggaagagatcccgcgtctggttgcgaaagccgatgaaggctatgacgtcattggcactgtgcgccagaaccgtcaggacagcatcttacgtaaatgcacctcaaggatgatcaaccacctgatccagcgtaccacaggcaaagcgatgggcgactacggctgcatgctgcgtgcctatcgccgccacattatcgacgccatgctcagttgtcatgaacgcagtacttttatcccgattctggcgaacaccttcgcccgccgtgcggttgagatcccggtgatgcatgctgaacgtgagtttggcgattccagatacagctttatgcggctgatcaacctgatgtatgacctggtaacctgtctgaccaccaccccgctgcggctgctgagtatctttggcagcgtgacagccctgctgggcttcacttttgctttccttctgatgatcctgcgcctggtcttcggcccacagtgggcggcagagggggtattcatgctgtttgccatcctgtttatgttcatcggcgcccagtttgtcggcatgggcctgctcggggagtatatcgggcgcatctataacgatgtgcgtgcccgcccccgttactttattcagcgtgttgttcgtctgccggaaacggcatctcaggaggacgtgaattcatga

SEQ ID NO: 85574 - DNA, 1977 bp, Citrobacter koseri
atgaaagctgtggtttttgcttatcacgatatgggctgcaaagggatccagtctctgcgggatgccggttatgacatcatggctgtttttacccatacggatcttcccggagaaaaccatttctttggctccgtggcgcgtcttgcagcagaacaggggatccctgtatgggcaccggaagacgttaaccaccctctgtggattgaacgtattcgcgatatgaacccggatgtgctgttttcgttctattaccgtcacctgttgtgcgatgaaattctgaaaatcgcaccaaagggggccttcaacctgcacggttcgctgctgccgaaataccgcggacgagccccgctgaactgggtactggtcaacggtgagagcgaaaccggcgtcaccctgcaccggatggtgagtcgcgccgatgcgggggacatcatcgcacagcaggtcgtgtctattgatgccagcgatacggcactgacactgcatcataaattgtgttcggctgcttcggacctgctggggcagacgctgccggctatccgtgaagagcggatcagggggcgtgctcaggaccataaccaggcgacgtatgccggtcgccggacaccggaggatggctgccttgactgggataagcccgcgcaaaccctgcataatctggtccgggccgtgtcagaaccatggcctggcgcattcggttatgccggtacaaacaaatttatcgtctggcagtcccgcgtacgtactgacctgatggcggccagaccgggtaccgttatctctgtcatgccgctggttgttgcgtgccaggaaggggcgctggaaattgtgaccggtcagaccggacgtggtgtttacatgcagggttctcaactggcgcagacgctgggcatggtctccggcacggttctgagcagtaaaccagtggtggcagccaggcgtcgcacacgcgtactgatcctcggcgtgaacggttttatcggcaaccacctgaccgaacgcctgctgaaagacgacaactacgagatttacggtctggatatcggttcggatgctgtcagccgctttcttgataatccgcattttcactttgtggaaggcgatatcagtatccactctgagtggatcgagtatcacattaaaaaatgtgatgtggtgctgcctctggtggcgatagccacgccgattgaatacacccgtaacccgctacgcgtgtttgagctggactttgaagaaaacctgaagattatccgtgactgtgtgaagtacgataagcggatcatctttccgtcaacgtcagaagtgtacgggatgtgtaccgacacctgtttcgacgaagacagctctaatctggtggtcggtccgatcaataaacagcgctggatatattcagtatcgaagcagttgctggaccgcgttatctgggcctacggcgataaaaacgggctcaggttcacgctgtttcgcccgttcaactggatggggccgcgactggataatctggatgccgcgcgtattggcagctcccgtgcaattactcagttgatcctcaacctggtggagggatcgccgatcaaactgatcgaaggtggcaggcagaagcgctgttttaccgatatcaccgatggtatagaagcattgttccgtatcattgaaaacaaagacaacctttgtgacgggcagattatcaatatcggtaatccggataacgaggcgagcattaaggagctggctgaaatgctgctgacctgctttgaacgccatccgctacgcgatcgttttccgccgtttgccgggttccgtgaggtggaaagcagtgactactatgggaaaggttaccaggatgttgagcaccgtaaaccgggtatccgcaatgcgaaacgctgcctgggctgggaacccgtgacagcgatggaggaaacggtggaacgtacgctggatttcttcctgcgaaccgttgagcagggggataattaa

SEQ ID NO: 85575 - DNA, 903 bp, Citrobacter koseri
atgaaacaggtcggcttacgcattgacgttgatacttttcgtgggacgcgggatggcgttccgcgtctgctggagttgctggcccggcacgggatccaggcaagtttctttttcagtgtcggaccggacaatatggggcgccatttatggcgcctgatgaaaccacagttcctgttcaagatgctgcgctcaaaagccatatcattatatggcctggatattttgttcgcaggtacagcctggcccgggcgccgtattggtgcgggcaatgaatctgttattcgtgtcgctgcgcaggttcacgaagtgggactgcatgcctgggatcattacgcctggcaaacgtggagcggcgtctggtcacaggagaggctggtatctgagacagcgcggggtctgtcagagctggagcgtattatcggccgtccggtcacctgttctgccgtggcaggctggcgtgcggatcggcgggttgtcagggcaaaagaaccctttcatttcctttacaacagcgattgccgtggaacggctcctttcctgccgcaggctggccatgatgccttcggcaccgtgcagatcccggtcacattgccgacctgggatgaagtgacgggtcgcgttgttgaccgtgaggggtttaaccgctacctggtggactgtatccaccaggacaagggtacgccggtctataccattcatgcggaagttgaagggattgccttttcccggcagtttgaggaactgctggtgatggcggcagaagaggggatccggttttgcccactgagtcagttgttgcccgcggatgtcagcgtactgccgacaggtcgggtggtgcgggggaacgttgccggtcgggaaggctggattggatgtgaacaacgtccggggcccggtgtatga

SEQ ID NO: 85576 - DNA, 1656 bp, Citrobacter koseri
atgaagaaaatctgttactgcgtctctctggtcgtactgtttgccctgtactatttgctgccgctgaattttcgtctgctctggcagcctgatgaaacccgctatgcacaaatcagccgtgaaatgctggcctcgggtgactgggtggtgccgcattttcttggggtgcgttactttgaaaaaccggttgccggttactggctgaactgtatcggtcagtggctgtttggtcataataactttgctgttcgttccggcgccgttttctctgttacgctgagcgcactgctggttgcgtggctggcgtggaaaatctttcgtgataaacgtatggctgttctgtcgccggttgtgtttctgacgacattgctggtttatggtgtcggaacctttgccgtgctggatccgatgcttaccctgtggctggcactggcgatgtgttgtttctggagtgcggcgcaggcacgtacacaacgtggcaaacttgcaggctatgtgttgctgggtatggcctgtggtatgggcgtgatgaccaaaggctttctggccctggcagtgccggtggtgggggtgttgccgtgggtgacggcccgtaaatgctggcgtgaagtactgatttacggctgggtggccgttgctgcctgtatgctgacagtactgccctggggtctggcgattgcgatacgcgagccggatttctggcgttatttcttctgggtggagcatatccggcgttttgctgaagaggatgcgcagcacaaagcgccgttctggtattacgttccgtttttgattaccggaagtctgccgtggctggcatttttgccgggggcgctgaagcgtggctggtatgagcgtgatgacgtgcgtggcgcgttgtacctgctgggctgggtggtgatgccgtttctgttcttcagcatagcgaaggggaaactgcccacctacattctgccgtgctttgtgcccctgtcaattctggtggcgcgctgtgtactggatgccgtaaatgcaggctccggagtgttgcggatcaacggggggattaacctggcttttggcctggcggggctggccggtgtccttgcggtgtcgccgtggggcattctgcaccggccgctctggagccatactgaactgtataagtgcctgctggcggcgctggcgttcacggcctgggcactgacgggctggatggcgatgcagaataacggtcgtcgctgggggctggccgcctgttgcccgctggggattgccctgctggcaggctttgtcataccggaccgcatcatcgacaggaagcagccgcagtttatcattgacagaatgcgtgatgtgctggcgccggatcgctacattctgaccaacaacgtgggaatggcggcagccctcgcctgggagctcagacgaaacgatattattatgtatgacaggcagggtgagctgagatacggtctgggatggccggatgcgaaagataaatttatcgccgggagccagttctccggatggctggcaacacatcgccggcaggggggggtatcgctgatactgattcggggcaaaggagagcgtccggagagtctggcgctgcctgagccggataaaaccaccgtgacggggcgcgtggtattgattcagtatttaccgcgatga

SEQ ID NO: 85577 - DNA, 339 bp, Citrobacter koseri
atgaacgcctggttgtgtctggtatcagccagccttctcgggtgtgcgggacagttgtgtcagaaacaggcgaccagtccaccccgtaccggagggcgtgggcgtcatctttttatctggcagggattagcgctgttatctctcagtggcggaatgttgttgtggctgcgtgtactgcagacgataccggtcagcattgcgtatccgatgctgagtctcaacgttgtctgggtcactctggctgcgcgggtcatctggcgcgaacccgtgacgtgccgtcactgggcaggtgtcggactgatcgttgccggcattgtcctgtcagggagtagcatatga

SEQ ID NO: 85578 - DNA, 381 bp, Citrobacter koseri
atgacgggcctggcctgggcgttattcagcgttggtctggtcagcggcgcacaattgttactgcgtcgtgcaatgacggaactgccgccattaagtgatttgtctgctttcctgagccatttactgtgtctgcagcagggtacagccgttctgtttatgggggtgtgcgggtatctgctgtcgatgatctgctggtatgttgcgctgcgacatctgccgctgtcgaaagcctgtgcgctgttgagtctgagttatattgtagtgtgggctgcggcggtctggcttcccggctggcatgaaccttttcactggcaggcactgctgggggtactgatgatcatcgcgggggtactgacggttttctgcccgaaaacgtcatga

SEQ ID NO: 85579 - DNA, 1635 bp, Citrobacter koseri
atgattaccggtgacttaaaaagtaaaatcgacggactatgggaagatttctgggtaggtggcatcactaaccctctgaccgtaatcgaacaaatcacttacctgatgtactcccggatgctggatacccaggaacaacgagacgagaagcgtaagcaaatcgcgggtattgattttaaaccgcgttttgcgcctgaacagcaggagttccgtttcagccactacagcaaccttggctcggacgaaatgatggaagtagtgcgcgacggcgtattccagcatttccgccagcttgggcaggccgaggatacaaaggtgacgctgttgggcaactttatgaaagatgctcgtctggagatcgtcaaaccctcgttattaactaaagccgtggaggtgatcaaaaacctgccactggatcgtggtgacaccaaaggcgatctctacgaatacctgttaagcaagctcaccactgccggaatcaacggtcagttccgtacgccacgccacattattcgcacaatggttgaaatgatggagccaaacccagcgcgtggtgagacaatttgcgatccggcctgcggcactggcggttttctggcaaccagttatgagtacctgctggaaaaatacagctcactggaatccattcattctgagattggcaccaatgaacgaggcgaactagaagagcaaagaatctttaccggcgatctgctgacgccgtggcgtaaccatgtcgataacaatatgttccacggttatgactttgataccaccatgctacgtattgccgctatgaacctgattatgcacggcgtggaagagccggatatccactatcaggacaccatgagccaaagtttcagcaccaacttcccgcaggccagcaaaaatgctttcaacctgatattggcaaacccaccgtttaccggttcactggatgaggaagatatcgacgccacgctgtcggcgatggtgaaaaccaagaaaactgagctcctgttcctggcgcgcattctgcaaatgctgaaagttggcgggcgcagtgccactatcgtgccacagggcgtcctgtttggctccagtaaggcgcaccagtcgctgcgtaaaacgctggtggaagataaccagctggaagcggtgatcaacctgccttccggtatatttaagccttacgctggcgtggcaacggcgatcctgatctttaccaaaggcggtcagacggaagaagtctggttctacgatctacaaaatgacggctacagcttggatgataagcgtaacccgataaaagataacgacctgccgcatttactggcaagctggaagcattaccgtgctttgcgcgggttgccggttgataactttatgggcgagaaattagcctcgtttctgaaacagcattacccggaagggattaattctggagttgattttaaagatcgcactcagtcggcgtttgtagtaccgaaagcggatattgctgcgcagaaatacgatctctctatcaatcgttataaagaagtggtgtatgatgcggaggagtatgaagatccgaagatgatactgaagcggctgaaggacatagagaaagagattctggcggatctagatgagctggagggtatgctgtga

SEQ ID NO: 85580 - DNA, 3414 bp, Citrobacter koseri
atggagcagtctctcaattttgaaatgttgcgtagccagtggccggaactggcggaactcgcgtatatggcggaacgctatgttcactccgatccggaaagctgtctggtcaagctgcgcaactacaccgaattgatggtacgttggttataccgtcaggaacgactgcctgaaggcatcaaagcaaatctgtatgatttaatgaacgcagatgtgtttaccagcatgatgccggaagccatcatcatgaaaatggatgcgctacgtatccacggcaaccgtgccgcgcacggtggtcgtatcaaagctaaagatacctactggctgctcaaagaagggtatttgttgggaatttggctatatgtccgctacgcccacggtaatgttgataactgccccaaatttactcttcctccattaacgcaatcttcaggtcgtgcagatgataaacgtctggaagatgcgatcagggctcaagatgaaagccgtgagcgagaactggcgttacaacgcgcactacagcaagagcaggaaaaggccgaacaccttactcagcgcctgaatgaagctagagctcgcaaccagcatgttgccgatatcctatctattgatgaagcggaaacccgccgccgcctgattgattctcgcctgcttgccgccgactggaatgtaggggaagagctaaacaataccgatcaggttacgcaggaacaccccgttaaagaacagcctactgcgaccggtgacggttatgcggactatgtcttgtgggatgaggcacacaaaccgctggcggtggtagaagcaaaaaaaaccagcgtcaatgccgagcaaggacgaattcaggcccgactgtatgccgactggttggaaaaagaatatggtcagcgcccgctcatcttctacaccaacggctacgatatctggctgtgggacgaccataaaactcatggttatcctccgcgtcgagtatttggcttctacagcaaggaaagcctgcaatatcttattcagcagcgtgaaacccgtctgccactgaacagtgttcagcacgtaaaagacaacgaaggtaaggcagttgccggacgtttgtatcagcttgaaaccattgcccgcgtcagcgaacggtttactaacaagtaccgacaatcgttaattgttcaggctactggtacaggcaaaacccgtgtagcgattgcgctaagcaaactgatgattgatgctcgctgggtaaaacgagtcctgtttctttgtgaccgcaaagagctacgtaaacaggcggcgaatgccttcaatcagttcaccaatgagccgctgtatgtggtcgggaaatcgaagaaagcagacaggcagaatgccaggatctacatcgccacctatcccggcatgatgaaaatcatggaccattttgatgttggttatttcgatctgatcatcgccgatgaatcccaccgctctatctacaacgtctacggcgatctgtttaagtattttgatgcgctccagattggcctgacggccacgccgatcgacatggtgagtaaaaccactttcggcctgtttggttgtgaaggacgtatccctaccgccaactacagcctggaagatgccatcgctgataacaatttggtgccttatgaagtcgtcacacacaccacgaaattcctgcgcgaaggcatcaaacgggagaaattaagcgacgcacaaatccgtgagctggaagaacagggtatcgatcccaatacgctggaatttgatggcaaggcgctggatgaggcgatctataacaaagacaccaaccgctatatcctgcgtaacctgatggaaaatggcctgaaagatcgggacggccaactgccaggtaaaaccatcattttcgcccgtaaccacaaacacgcgctgctgttgaatgaattgttcgacgacatgtacccgcagtttgccggacgcttctgccaggtcatcgacaactacgatccccgcgccgagcaactgattgatgattttaaagggctggacgaaagcaccaacaaagagctgaccatcgctatctccgttgacatgcttgataccggcattgatgtcccggaaattgtgaatctggtctttgccaaaccagtcaaatcgaaagtaaagttctggcagatgattggccgtggtacgcgtctttgttcagggttgtacggctacgatgacaacggcaaacagctggataaacagaaattccgcatcttcgatcactggggcaattttgagtatcacgagttgcataccgaagaggccgaagtcacggcgacaaaatcactggcgcaaaaacgcttcgaggcatggatcacgctagggactgctgctcagcgtaagttcgacaaacaggcggtggatttagtcgctcaccagctccgcgagcagatcaacacgttggatgaaaagtcgattgcagtgcaggagaagtggcagcaaaaagcgcagtacagcgatgaaaaagtgctgcgccagctttccccgaaaacgcagcaggatttgctatctgtcctggccccgctgatgcaatggctggacgtgcgcgggcaaagcgacgctatgcgttttgatatggatattctggcggcgcaaactgcccgttataccaacccggaagagctggatgtactctggccggtcatcatcgagaaagtggaacgtctgccgccgcatctgactcaggtgcagcaacagggacaacggattaatcaacttcgtgatttgggctggtggaagcaggccaccttggaagagctggaggatatccgcattcatctgcgcggtataatgcacctgatggagaaagatgcgaagccaaaatttggctcgatacaggtagatattaccgaagatgcggacctaatccagagggagacccgcaaaaccaacatccgctcgattgatttcaaactctatcgccagcaggttcagggagcgctggagccgctgttccagcaaaatccggtgctgaaaaaaatccgcaacggcgagccggtaacacaaggcgaactggatgagttggcaaaactggtgctgatccaaaaccccaacgttgatatccgggcgctaaaagagttctacccgcaggcaaccgccagcctggataaacttttgcgtaccatcatcgggatggacagtgatgcagtggaagtgcgctttgcccggttcgccgctgaaaacagcctgaccagccagcaactgcgctttctgtcattgctgaaaaaccacatccgcgattacggcaccattgaaatgcgacagctctttgaacagccgtttacgcatatccacaacgaaggcgttaccggtgtgttcccggatatagagcagatcgcccggttgcaaaagatagtggaagagctgggtgttgtgaccgacacagcgacggtataa

SEQ ID NO: 85581 - DNA, 201 bp, Citrobacter koseri
atgtctgaattcgatttatttgcgcaggaactgctcgaaaaagcagaagctgaagaaaaacaacaacaagagcgcgacaggaagctgattgatcgggtacttgaaatttacgaccagaagtatgtcgcagaactgctaagaaaaataggtaaaaatgagtggagccgcgaaacgcttaaccgctgggtaaatttcaagtag

SEQ ID NO: 85582 - DNA, 1602 bp, Citrobacter koseri
atgaaaagcagactaaaaaatttatacaagcacttgattgaaaaccataagcatgaacttaaaggttggcatgatgcttatcgtgagttttatgagcaggtcgggataattcgcgaacgtataaaatcaggaaaggaattatctccgagtgatgagattttcctaaagcaactcctctttgaaagaagtaatggaattgcttctcgcggtcagtcggttctaagcaacgaaaattttgacggttttattaaaaacaaggaattcattgctatattacaacaattcatcctgaatcccaacagagaggaactgaaaaagtttgagtgcacatggtcagaacaaggaaagtcaaataatcctgttcttattaatcgcgtagcggcagcctgcacgcttgaagtttccacaactgttgattcctctaagttcaatcaggtatttagctggcttacacacgaagggataattcctgcatacccagcagagaatgatcaggactggttttcaaaaaacgtattcctgatgaaaattataaaaaatgagttcagcgatgaacttcgcaataatgaaactgatgagttttatctcagccaatttgtctggattctgtacgagaatctctctaatccattcagtctgaaaaagcagatcgttaagtacgggcctcctggaacgggaaagacataccaggctcgtcaacaaacatcgcttctttttgatatctggaaagaagagtttgcgccaaatagcagcctcacacattcaagtcagattgagttgattcaatttcatccctcttttagttatgaagacttcatggaaggtttgcgcccagtactggataacgacggtaaagctcagctgacgttgattaatggtgttttcaaggaattttgccggaatgcaggaaagtgggaaattgatattgaaggcctcgaccttaacagggattgggaatcaatcacgatcggtgaactccgtccatatcaaaataaattatcaggtaatcattggcaatacatcttcgaaatatctgactcttctaagctgatagcagatgcagtgtctccgttcttttttataatcgatgaagtgaaccgagccgagttatcacgtgtttttggtgagcttatgtattgcctggagtatagaggaattaaaggaagcgtcaaaacccaatatactaatctaaataaccaacaaacaggcatgctacataccgtacaaggttaccaattttttattccaacaaacatctacctgataggtacgatgaatacgattgatcgtagtattgaaagttttgactttgcactcaggcgtagatttcgttgggaagaagtgacgccagatacgagacttttaagataccatcttagccagttctgtaaagcttggattcctctggcagataacctcgaacgactgaatacccagattacgaaggagcctttactgggggctgattaccaaattggacatgcctatttaatgaatctgaagtatgccaggagccttacagttacagaagtgagatctcgtatctgggatgactgtatccgacctttacttcaagaataccttcgtggcagcaacgaatag

SEQ ID NO: 85583 - DNA, 150 bp, Citrobacter koseri
atgcttaaaagcgagttactggagattattgctacctttatcaacggcatgcagggttctgaagctgaagaaaatttgtataatcttcgctgttatcattacagcttaggttctggcgaatccaaggtaacaggactcggttgtcactaa

SEQ ID NO: 85584 - DNA, 2652 bp, Citrobacter koseri
atgtctgtgaactggactaaagctgagttttttaagtgcgctttgcaggtaaaccctgcgggctataacaaatatcgcggcaaagaatcactcagcgaagaggtctacaaccagcaactgctggaggcatgtcttgaagctggggttcaggttgttggtattgctgatcatggtgctgtggatgcggtggacagacttcgtcagctctttaatgaacatggtattgttgtttttcctggttttgagatttgctccagcgagaaaattcattttgtttgtttgtttgatgaaaatcggacagtgcaagagctggaacgttatttgagtaatttggggtatgaagaccccgatgactgtatttcaccatcaaagctcagtgctgtgcagatcattgaaaaagtagatggtctggacggatttatttttgcagcgcatagcactcatgataatggtgtactgaaatgccgtatgaaccatgtatggaaagaaaaagcattgttggcggcgcagattcctggaacggttgatgacttaaaaggggttgaggatgatttttaccggaaagccatcctgaacaaactccctgattatcgtcgtgagcggcctattgctattatcaacgcagcagatgttgctcagcctgaagaaattaaaacagcaggagcatcttgtctgataaaaatgaccaggccatgtttttgctcatttaaacaggcatttttagatcctgaatcacgggtacgcctgaatgcagataagccgcatagctatgcttcggcaattgaaaatatccgttttattggtgggtatctggatgagaccgatattattttttccgaccatcttaatgctgttattggtggtcgcggaacaggtaaatccactttgctggaggctattcgtttcgccctgggtaaacagccttttggtgattcagcacaaaagcagcatagcgcaattattaagagcaacctagggaatggtgctctggtccaactgaaggtccgctctgctgcaatgcaggggcgtgcatttaccattagccgcaaatttggtgggcaacccatcgtaacggacaatgaaggtaatgtttcgccttattctccggatgatttacttcctgggctggagttatacgggcagaacgaaatttacgaaatgactcgtgatgcgcagagtcgcaatcatttagtggagcggtttcttgaaggtgaccataaccagttcgatgtgattatcaacaaagcgttgactcgcctcggagatagtcgcctgactatccttaatgctctagagcaaaaggcggaggcagaacttgaagttgcacggctgccgaaattactggagcaggcagaacaatttaaacaacttggtctggatgaaaaactcaaaatcgttcccttgctggaaaaagaaaagcagcttagttcacgccatcaggaagaattgtccagagtacaggatgctcttctaacattaaaagatagcctccccgatctagcttatctcagcgatgcggtgatcaatgttctgccgcatcagtctcttcttatccaacagcgtgatgtactccagcgggtgcaggagcagacggcgatattagtccagcaactggatgaggttgttcagcgttcatcagcagagcttgctcttttacaaagcgagttatcaggtctaatcggtgcagaagaaggtcaacttgaaaaggcttttaaagatatcccggccagccagggaaaaagcgggcgacagattggtgcagattatcaaacgttgttacgccagattgcttctattcgtcctaaagcaacggctctggagaataggcaaaaacaacttgatgagctatacctacagcgaaaaagattacttctggagcttatccaggcgcgttctcaacgttccgctgcgttggcgaaatcagtcaaacgcctgaacagaaaactagatgaaaaagtgcggctcaatttgcagccagaaggcgatcgtcaacctctgttgcattttctggagcaatgtaatctggaaggggttggtccacggcggcttgcttgggtgatggagcatgattttacaccggagaatctggttgagagtatccggtgtggtgaattagccttgcataatgctgggtgggggataacgccgaccgtcgcgcaggcattgttgcgcttgagtgaaaaacagcttctggaactggaagcactatcgctaccggatacgatgcaaattgagctgaatgtaatgcatgacggtggcggtgttctctggcgtcatattgatgaactatctacggggcaacagtgtacagctgtcttgcatttattgttattggaaaatcaagatccactgatcctcgatcagccagaagataacttggataacgcatttattgcagagcgtatagtgacagagctgcgcaaagcgaagctgtcccggcagtttttatttgccactcataacgctaacataccggttttcggtgatgctgagtggatcggtgtattgagcgttgaagagggtaaaggacgtattcttcctgagcaacagggggctattgatttgccggagatccaacgcctggcggcgaatattctcgaaggtggtcaaagtgcctttaatcaacgccgggaaaaatatgggtttaaataa

SEQ ID NO: 85585 - DNA, 546 bp, Citrobacter koseri
gtggcaaagcagaagttcagaatcaccaactggcacacctataacaacgctctaatcaaccgtggctccatgactttctggctggatgacgaagcgattaagtcgtggtatgacacatccccgccttcagcacgcggaagacctcagcgctattatgaccttgccatcactaccgttctggtgattaaacgcgtattccggctgaccctgcgggccgcacagggcttcattgattccattttcacactgatgggcgttccgctacgctgtccggattacacctgtgtcagcaggcgggcaaagtcggtcaatgtcagctttaaaacggtcacccggggtgaaatcatgcatctggtgattgattccaccgggctgaagtgtaagcatacccgttttagttccacgcactttttgagatttccgggttttcagccatcagccggtattcttccggcgtcaggttattcagggattcatgcgggcgctcgcagttatattccgtcagccagcgctctgttatttcccttacttcattcagtgtcctga

SEQ ID NO: 85586 - DNA, 1698 bp, Citrobacter koseri
atgaactctgtgtactcaatcattaaagaattaagtgatgcgaataagaagaacaatatcaacagtgattttccctcatacgagtttccaccattaatgagagatcttattgaagcactgcatgatgactcgcaaatacccatagagattatcggcaataccgtattggctgcagcttcaatggcctgtcagccactggttaacgttgcgcttcctcacagcatacagcctgaaacatgctgcctttatttactgacaatagctgagtctggcgaaggtaaaacaacgattaacaaacaaatcatggagccattccatacatttatgagtgagctcaacaaggactatgtggatcgtgtagctgaatataaggtggatcttgaactatggcgtctcaggaagaaagtactcgaacgtaatgtaaagtcttcttatgtaaatcctgatgatgaagaaagggaaagtgttgaggatatggaaaatgctttcatactacatttaagaaatgagccacagaaacctgagcgtttaactattctctacgaagacacgacactgaaagcctttactgatggcgttgctgtatgttcccatgccgggattatttctgatgaggctattatctttttcagagggtatgccagtaaccagttcggtatattcaacaaaggttgggaagaaggagaacatgtacagaaaagagctgacggaacatttacatttattaagccctgtatcacattttcattgatggcacagccgaaggttgtaaatcattactttgaaaaagaagggggacttgctaaagatgtcggttttcttcctcgcttcctgtttgcctcagccaaaagtactatcgggagtcggacggataacataaattttagtcgctcacgacagtgtcttgagaattttcatggcaggattcgtgttttactttctcagcaaaaagagtctatcctcaataatacatatgaaaagaaaacgttgatattatcagataaagcactggaaatccgtaatcagttaaaaattgaaatcgaaggtaaaatggttgaaggaaaagagctttatcatatccgagacatcgcttcaaaatcatcagctaacgctgcgagaatggcagctatattccattatttcagtaatgacagttccagtgagttgggggctgattatatggccagcgcctgtaacattatgagatggtaccttgagcaggcccgcaaaatattttatacgtcgtcagaagattaccagtttgaaaaagatgccaaagaaatctatgtttgggtaaggaatttgtttgctgataataaatatatcccgttaaagtttgaatatttcagaaggaaagcgccaaacaggctcaggaacacaagtaagctgaagggattatttgatcaaatggtttctcagaactacattgtttatggttataatcgccctgccggggcaatgtatgtattgccacgtataaataaaaatattgtctcgcaaagcgtgaataacttttatgccaatgagtcaaatgtggttcgtgctcagcaggtatttttactcgatacaggtatttttgttccagcaaagccagagccaggtgaaggtgattctctgttaaatgctccttttactatttttcatacatctaaacatatacagggtaaggaaccccacattgatttttcaggattatag

SEQ ID NO: 85587 - DNA, 657 bp, Citrobacter koseri
gtgtccatcatttttaatggacactattgcgtgaaacaccggacatggcttctcgaggtacttcgcctccactttgaagaaaaactgccgcgcattgaggctggacgccgtttaggcatccccaaaaccacggcctgcgatctctttgttcgcttcaggaaggccggtctgtcctggcctttgccgccacgaatcaacgcaaaaaatctggataaacgcctttaccggcaggactcccgaaaatcgtccggtcttcccgtagtccctgctccctgtgaaatccctgttgcccgcaaacgaacacgacgtcccaacttcccccgtgacttcaaaatcgcactggtggcgcagtcgatgcagcccggcgtcagcgtggcacagcttgcccgtgaaaataacattaacgacaatctgctgttcaactggcggcgtcgttatcagcaggagctgcaggctgcacgggcagaggagccactcatgctgcccgtgacgctcgccgctgaacccggccccgaaccgactcatcctccctccgttctgagcgacgcgccctgctgtgagctggttcttcccgccgggacgcttcgcatcagtggaaagctgacgccagagctgctgcagatgctcatccgggaaatgcagggagggtgccggtga

SEQ ID NO: 85588 - DNA, 981 bp, Citrobacter koseri
atgacccttttggtaacggctgagtgtgtcgacgatctgataaacgatgttcatcaagctatcctggcagatggactcagtaacgatcctacaaaaggatcaactctagagattcttggtgcctatcttgtccttaccgaccctcgccgaagaataagtagaacagaatcccgaggaaaactaattagttgcttaggtgaattactgtggtacctctcagctcagaacgatctcgagtttatcaaacacttcataccacgttacgctgaatccgctgagtcagacggaaaaatacatggtggttatggcccgcgattgtttaatatgcgcggcttatataatcagctgaaaaatgtcatcaaccttttgcaggagaaaaaacctaccagacgtgcagtaatacagcttttcgacgcttcagacttggtaccctcaaaaactgaacagcaagaatacgtagatattccttgtacaatatctatgcagtttattgtcagacgtgaggagctgcatctatttgtttgtatgcgttctaacgatgcctttatggggctcccccatgatgtatttgctttcacgatgctacaggaattagtcgcccgcttgataggatgcgaattgggccactatcatcacttcgtatccagtctacatctctataaaaatgatttagaaaaagtggaggcacttcagaaagaggggttcatgagcactctaccagtcatgggatcgatgcctgaaatgcattccttagatgatatattacccctgcttgaggcagaaaaagctcttcgagagaataaggagtttgatattgacactacttccttgaatgactactggaaggatttactgcgcattttaaaaatccactttttgttacgttcacgtacatccatccacaaagaactagccttccaagagttggctgcaatgaaaaatcaggaatatcgatttatttttgatggaaaattacaatga

SEQ ID NO: 85589 - DNA, 570 bp, Citrobacter koseri
atggaatatataaattatttagaagaagtggcaggattcaacctcgatagaaaggaatcacaacaaaataatggctctaaacaaaagattgaaaatagtcatatagtgttagcaactcacgatccggtggttatttctacactaaaacgtgaacagatacagattatgaaaagagatgaaaatactcttgaagtatatgctcattctcctctttatgaccctaaagggatgggcttttcaggtgtgctgatgagtgatatgtttggtctcagatcggacctagatcctaaaactttagaaaaattagatgagcatgctatattacttgccaatgagaatcgtactgctgaggaagaggttcgattcggtgaattgaaagaagagttagatatgttaggctttttagaagcatattctgatccatatttttccgcctttgtaaaagcttggggtagaagcgaaagaattgaccaatatcatcaggtatctctaactgaaagtacaagagatgaattatcaaaaatgagcgatgatattctttctgagttgaagcgtgaagaagggaactaa

SEQ ID NO: 85590 - DNA, 681 bp, Citrobacter koseri
  misc_feature (413)..(422): n is a, c, g, or t
atgaagtccaaaaaaatagaccatttgttatcgtggataaatcgtcgattaggaggaatattctaccagctgctggcgcaggcatgggttacgcaaattgatatcgcccttgacgtctacaaatgcaagttagatgattatatatggggcttagaacgttcaggaaaaacagcatactttgataaggaaaatggtttaccgggactaaggataggaagttgccgctcgcttttacacatcctgtgctacggaaaagtagatgctaacagcggtagaaaactggtgtttcgggaaagagccaaattcattaacattaattttgatgagtatcagaaattcttgcgtattgaagctcggtacaggccaagcactaaacccacaagcaagaagggtaacgttttgatgttggctcnnnnnnnnnnactccgggtctactcgaaagatttgagggatgacctattggaaagagggtttctttgtacgttgccagatgctcccagcatcgctgaaatgaagcgctacatgctggcaactatgcaatgcccgcgcttgcctcgcaaagtcgatagactcattgctgagtatgagacagagttgttcgataaacactcggtctggacgcaatggtcacgctgcgtcgctcaattaagcggaattttcagtatagcgtctgttttctga

SEQ ID NO: 85591 - DNA, 573 bp, Citrobacter koseri
atggtgatagttgaactgctcggaggtggcggctcaggcggtggtactgtcacatctgccacggggaaacagtcatttgcgggcggtggcggtgctggcgcgtatgtaaaggcgatgattactggcggttttaacggtgtttttgtcactattggcgctggcggaataggcgtaatcggtgaaactggtggaaatggtggtgatacaaaatttggaaataattttgtcgccggaggcggcaaaggtggttcaggaatgcttgcaacaagtggctccctcggtggtggcgaaggcatgggcggtgttgcttccggtggcaatattattaattcatccgggcattctggatggtcaggcattgcctacgatgtaacttattctgtatccgggcgcggtggcgagtcaattatgttcccaggaggccagccatcaggaacacagcaaatgaaagacggatttgacgcctctgaatttggatgtgggggcggtggcgcgaattcacgggcaggtgcgacggcctataaaggcggggccggcacacagggaattgctatcatctgggagtatgcataa

SEQ ID NO: 85592 - DNA, 780 bp, Citrobacter koseri
atgcatcacgccaccccgcttattaccaccattgttggcggcctcgtgctcgcttttatactcggcatgcttgccaataaactgcgtatttctcctctggtgggatatctgttagcgggcgttcttgcggggccatttactccgggttttgtcgcggataccaaacttgcgcctgaactggcggagcttggcgtaatcctgctgatgttcggcgtcgggttgcacttttcattgaaggatctgatggcggtaaaggccatcgccattcccggcgcgatcgcccagatagccgtggcgacgttgctgggtatggcgctttcagcggtgttgggttggtcgctcatgaccggtatcgtcttcgggttatgtctttcaaccgccagtaccgtggtgctgctgcgcgcgcttgaagagagacagctcattgacagtcagcgcgggcaaatcgccatcggctggctgattgtggaagatctggtgatggttctgacgctggttcttctgcccgccgtggcgggaatgctggaaaaaggcgatgtcggcttcgcgtcgctggcagtcgatatgggcatcaccatcggtaaagtggtggcgtttatcgccattatgatgctggttgggcgccgtctggtgccgtggattatggcgcggccgccaccggctcccgtgaactgtttaccctttccgtactggcgctggcgctgggtatcgcctttggcgccgtcgagctgttcgatgtctcctttgcgctgggcgctttctttgccgggatggtgttaa

SEQ ID NO: 85593 - DNA, 591 bp, Citrobacter koseri
atgtcaaatcaactcagtaatatcaataaaaacagcgctctgctggttatggattttcaaacgatcatccttaacaattttctcccgcaagaaatcgctggaaacgttatccgcaataccgcatcactgatagcagctgcgcgcgcagcagccgtaccggtcatttatatcagtgtcggattccgcaaagggtatccagaggtcagcaaaaacaacactatcttctcttcgattaaagagaatggaatgtttatggctgacaatgagagcacggctattcatcctgaagtcgctcccgcagagaatgaggccgtcattgttaaacgcagagtcggcgctttctcatttaccgaacttgagatgattcttcgcgcccaaggcattgaaactttgatccttaccggcgtgaccaccagtggcgtggtgctttctacagtcgggcaagcttttgacctggattaccgactggtggttgcgggtgattgttgcgccgatccagatcatgacaccaatttgtttatacttgacaaaatcctgcctcaacacgccattgttacccgttcaactgaaatatcagaagcatgggcataa

SEQ ID NO: 85594 - DNA, 1203 bp, Citrobacter koseri
atgacccaattttataacagcttttggcagcgaaacctgatcgtttgcttcattggctcgttctcaaccgtctttgcaatgaccctgatgctgccgtttctgcctttatatgtcgaagagcttggtgttcacgggcatgcagcggttgttcaatggtctggtgtggcattcagcgcaacgtttattactgccgggttgattgcccccgtctggggacgacttggtgacagatatggacgtaagtcgatgctcgtgagagccagccttggcatggctattacggtttcgcttatggggctggtgacgaatatctggcaacttgtcggtctgcggttgctagttgggctggctggaggctactcatccggcgcaacaattcttatcgctgtacaggctcccagagaacgtgccgcatgggcgctggggatcgtttcatccggtgtcatggctggcaatcttgtcggcccccttgccgggggatggctaccggggctgattggtattcggtccacatttttctgtgcaggcgcactgatttttctggcctttatcatgaccctgactctcatccgcgaagcggtacaaaagcccgaggatgctgcggcaaaaacgcgggtgagctggccccaattgcctgcccgctctgtgattgtctgtatgctttgtaccggtctgctgctgatgctggccaatatgtcaatagaacccattatcacggtctatgtgcgtacactcgtcatcgacgcttctcagataacgaaagtggcgggatatgtgatggcagccgcggccctgggcagcattatctcagcttcctggcttggtaaactggcagacagaataggacatttacgcattatcacgctggcgctgactacggccggtttgttgctcatcccgcaggcttttgtcacctccgggtggcaactgattgccctgcgtttcctcatggggctggcgcttggcggcttgttgccttgtattgcggcagtcatacgtcaccgtgtaccagaaggcatggtgggtagcatccttggctattccgtcgccgcgcagttcgccggtcagttcatcgggccgctgataggtggttttgtcggcgggcatatcgggatgcgagccgtctttctggcaaccagctgtatcctgctagccggagctgcctggaactttaaaatacatcgccagtcagcaacgcgctga

SEQ ID NO: 85595 - DNA, 651 bp, Citrobacter koseri
atgagccaggcatcagaagttgaaaaccaattaagaaaattgatactcagcatggaactggggccgggagaacgactgaccgagcgctgggctgaagcaacgtttaacgcctcccggacgcctgttcgagccgcattacagaagctggagtccgaggggctggtatgtcgtgacgggttacgctggttggtggcaccgatcgatgtcgctgaagttgaacaactgtgtatttaccgggaagtactggaagtggcggcattaaaactgtcagccagccaaatgacggaagaacaactcagcggtctggaaatcctgcttaaagagaagactgctgttgcgtctgaagggatgttggacgatgccggaacacgattccatctgtatctggcccgtctttgtcagaatgcgtttatcattgaagggataagtgatgcactgcgacggctttcacgggcaagatggcttgataaagcgccgtcgaaccccgcctgggaagagcatcgcgaaatatttgctgcgcttcgctcgcaggacattgagaaagccgcagagttactcgccgatcatcttagggaaagccgaatccgccttctcgacgctatcaattcaagcaaacgtagcctgagggcgagagggattgttatatcctga

SEQ ID NO: 85596 - DNA, 1335 bp, Citrobacter koseri
atgaaagcacgctataaatccatcgtggatatgtttgcagacaggatccgaaacggagatatcccttccggtacgcgtctgccgacgcacagggcactctccgcgcaggaacatatctctctggctacagcgactcgggtttacagcgaactggaagctatgggtctggtcagtggtgaaaccggaagagggacatttgtcagggaaatatcattgccctacggtcacgggattgaccagcatgccgtggccacagatgtgcttgatctgaattttaactacccatcgctccctggacagggggagctactacgtgaagctctacggcaggtcgcggcctccggggatattgaatcccatctgcgttaccagccgcatgcaggcaggatgactgaacgggagactatcgcggctcacattgcagggccgggattccagcctgaagctgaaaatgtggtgatagtgaacggggcgcagcacggactgaccattactgtgatgggcatgctgcgaccgggcgatgttgtggccgttgatgcactgacgtatcccggttttaaagtactggccgaattgtaccatctggaacttattgccatacccgctctggctgatggcccggacttatctgcactggaagcgttatgccagaaaagacatatcagggcagtctatatcatgcctacgttgcataacccccttggctgggtgctcagccacattcagcgaaaaaaaattgccggtattgcgagaaattatgatcttctcgttattgaggacaccgcttatggctatctaatccgcagaccaccaccacctgttgcggtttatgctccggaacgaactgtttatatcaccgggttctcaaagaacgtggcgacgggtctgagagtgggggccgtagtctgtcccgcatcgtatcgactcgcactggaaagagcagtaagggcgaccacatggaatacgccttcagtgatgacaaccctggtatgtaactggatacaggatggcacggttgcccgttttgaaacactgaaacggcgggacgctcaccagcggcaggtggtgttaagatccactctgggggatattccgtgtattacgcatccaggctcatattttgcctggatccctttgtcggacgatgcaagagcagacagggtcgccagggagctgatggactgcaatatttccgtctcaaccgcagaacctttctgtacttcacttgttgtccctcaggcactccggcttgctcttgggtcaattgcgattgagaatttacataaagcgctgcttaaagttcgtgaagccgttgagttcgaacagtatcgctaa

SEQ ID NO: 85597 - DNA, 891 bp, Citrobacter koseri
gtggtgaatacagtgatacataaaacagatcccagctcagtttcaggatggatcaacggactattgggggtcatcatttttagtggctcactaccggctactcgcgtagccgtcctcgatatggatccctttttcctgacgttcctgagagcgtcgattgccggtgtgctggccattatgctgatttacggttttcgcgaaaaacgtccgcaagcctcgcagatcgtgccactcatcatcgtatccctgggtgtcattatcggttttccgttgctgacagctatggcgttaaaacatgtgacctctgcccactcaatcgtttttctgggtcttctgccactgactaccgcgattttcggcgtcctgcgtggtggtgaacgccccaggatggccttctggattttttctgtgcttggtagcctgctcgtcatggggtttgccctctcacaaagcacggccgtctcaccaaccggtgatcttctcatgctcgcagcggtggttgtctgcggtctgggttatgcagaaggcgcaaaactaactcgtgttctggggggatggcaggtcatcagttggtcgttgatcctctcgctgccattcatgctgagcgcgtcatttataacaatgcctgtcacatttaccggtattggactatctgcctggatcgcactgggttatgtctccctgttcagcatgctgattggttttattttctggtacaagggacttgcaacgggtgggattgcagccgtcggtcagctacaactccttcaacctttcttcggattgggcctgtcagccacactgttgcacgaagccgtgagtcctatcatggtgttcattacgcttggcgtcatcctgtgcgtcatgggctcccgtaaattttcccgataa

SEQ ID NO: 85598 - DNA, 894 bp, Citrobacter koseri
atgtttactggtctgagcgcttttccgctgactcccctgattaacggtgatgtagatgaacgcaggtttatcactctgattgaaaatctggttgacgccggggttgactccattggtgctctggggtctacgggtagctacgcctatctgactcgcgaacagcgtttcgctgcgacaaaactggccgtcagtgcggcttcgggcatcccggtaataaccagtattggcgcagttcgtaccgatgatgtaatgagactggctgaagatgcacagcaggctggtgtcagtggcgtgttgcttgcccctgtatcctatcagccacttagcgccgcagaagtttttcgtttatatgaacgagtgacgtcagagttatcggttccgctttgcatttacgataatgctgcaaccacagggtttgatttcagtgatgaactactgatagccctgtcatatctggacaatactggctccatcaagcttggggagtttcctgccgatccggttcaggcagttcagcgtgttgagcatttgaaaagtcagatggctcggggcgtgacattggggatcagcggagatactcagtcgacggcgggattgctggctgggtgtgatatctggtattcggtactgggcggattgttcccccattatgcgctgaatctgacccgcgtcgcattacatggggatactacagcaacccgtctactggacatgcctcttgagccactatgggcgttctaccgccgtcatggtagccttcgtgttatcgccagtatcgcagagattttggggagggtgcagagcccctgtttgccattcccgcttcagacgcttatcggaaaagaaatggtagatctcaaagctacactggagcaactcaacttcctggtataa

SEQ ID NO: 85599 - DNA, 951 bp, Citrobacter koseri
atggacccattatctgatgttctgcaactgctgtcagcaagcagttacatcaccagcggccagtccgcaggttcttgctggtctatgcgttatccgggcttcaccggaatgaaatttatctccattcgcaaaggatatctgtggtttcgtctggaagcggaaaaggaatggctcagattgaatcctggtgacggacttattctgacacgctcagccccctttataatggcaacagatcctagtctgactgccgtcccttcggagagcgtcccgtatcagcgacgcaatggtattgcggattacggcggtgaggacagcatcctgttggccggtaaaatggagattgatccgatgccagccagtcaattactgagcgtgcttcctgtgctaatcccgattaagacagggacagaatcttcctcaacgttatactggctgatggcccggcttcatgaagaaaatttatcccggcttccgggggcgtcactggcaggcaatcatctgatgcagctcattatgattgaggggattcgtggttggatattgtctgaagactcaggcctgagtggctggatgggggcattgaaagaaccacgaattcttaaagccgtcgaagctatgcatacaaccccggaaaagaactggcagctgattgaattggcggccatttctggtatgtcacgggcaggtttcgcgcggcggttcagcgaggcgacaggaactacacctttgagttacctcacgcactggcggatgcatatcgccagcagggcgctaaggctcagcagcgagccggttaaacatctggctttcagacttggctatgctaatgaaagtaccttcagtaccgttttcaagcgtgtttatgggatatcgcccacggcacatcgggctcaatatcgggaagggcccgtataccctcttcgcccttaccagcataaaagcctctga

SEQ ID NO: 85600 - DNA, 1380 bp, Citrobacter koseri
atgactattacacgggccagcaagcggttgtttactgcggcatcctgcctggggatcgttcttgtccagcttgacgtaagcatagttaatgttgggttacattcgcttaaggaagcctacgatgctgcggtttcggatctggaatgggttattaatgcatacgcactcgtttttgctgcattgatgctgagttccggtagcattgttgatcgcttcggttctaaaaaaacctttataagcggggtactgcttttcatcgctgcatctgtatgttgtgcgctggcaccgactatctactggcttgattttacccgcggtatacaggggataggggctgcacttttattgcccagctcacttactcttcttcgccagtatttctcagatccgcgtgaacgcgcatccgccattgcgatgtgggcggctgccggatctcttgcgcttgtggcaggtccagttgctggcgggctgctgattaagttttttggctggaaaagcctgtttcttatcaactttcccctggggatgttgagcgtaatagtgattcagcgtctggcaccagcgagcccgcaatccagcatcaaaatgaatctctccagtcaggtgtttatcatacttgggctggcaatgctgacctttacgctgactgaagccgggaattatggctgggcgaaccctgtaattctaaccacactggtgctgggcgtagcgctaatggcggttttccatcgcgtcgataaccgttcaacaaatcccgttattgccagaggtgtcagagacaatccattgatagtcagcgcagtggtcgttgggtttctgtgtaaccttgtgttctacggggctgtctttattttcagcatcttcttccagaaccgactacatttatcggcccttgaaacaggtatcgcatttatgccgatgatggcattaaccgctctcgtaaatttttgttcaaaatggttctcagcgtggttctctgttcggacactctccatcctgggaagtctgatcagcatgctagggtttgcgataattttcttcattacgccaggctgggctgctgaccagttgttcataccgatgattctcctaggaagcgggacgtcatttgctatgccagtcatgaccaatgtcgtgctatcgcaggcaacacagggtactgcggggtctgcctcggcgtactttaactgtgcaaggcaaatgggaggcgtaacaggagtcgccgtttttgggcttatcctgagcacgtgtggcgatgacatgactcaaggcttacggttggtcgcttatgcggcggcagcggtgacactctgctgggtaattgtcagtttgaaaaaactaccgtttcttaagttgcaggagctgtcttcgcatgagtaa

SEQ ID NO: 85601 - DNA, 747 bp, Citrobacter koseri
atgaccgataacattaaaggcaaagtcgttgtaatcaccggtgcatccagcggcatgggtgaggcagctgcacgtcatctcgctgaaaaaggagctaaggttgtgatggccgcgcggagaatagaccgcatagaggctattgcgagtgaactccaaaagcagaataaagaagtaatcgccgtcgcaaccgatgtgacgaaactggatgacgtcaataacctcattcagatcgcagttgacacatttggtcgtgttgatgttctgatcaacaatgccggtctgatgccgctttcccgcctggaccagggaaatgttgatgaatggaatcagatgattgatgtcaacttacgcggagttctgcatgggattgcagcggcactgcctcatatgaaatcacaaaaagcaggccacatcatcaacactgcatcagttgctgcacatctggtgttccagagctcagccgtctattcagcgacaaaatttgctgtccgtgctttgaccgacggtttacgtcaggaaatggcggcacatcacatccgtgtcacgttagtgtctcccggtgctgttaaaacagaactgctggagcatataacagatgaagacgtgaaggcggcaaatcaggattacgtcgagaacgtcggcgtgccagcgcaaacctatgctcgtatggtggctttcgcaattaacgaaccggaagatgttggcgtcagtgaaatcattttcagacctacagctcaggaattataa

SEQ ID NO: 85602 - DNA, 948 bp, Citrobacter koseri
atgattaataaaacacttagttaccgggaattcggcaaaccagaccgagttctgcaacctgaaagtgtactgaaggaaaaatgttcagtgcatcatctgcgtgtgaaaatgttgtactcgccggtgaatgcgtctgatttaattcccatctcaggagcataccgacaccgggtgactttacccggggttgcaggatatgaaggtgttggagtggttattgaagcgccagcagaattttcatcgttcctgggacggcgggtattacccttacgtggtgaggggacctggcagacatatactgactgtcttcctgagatggctattcaggttcctgatgatattgatgatatcctggcatcaagagcttacattaaccctttagcagcccggttaatgctgcgcgattacccgcctaccgaaaaaaacataatactcactgccgctggctcagattgtgctcttctgttgggccaatgggctctgcaactgggggcttcttgtgtgtatggtgtttatcggtcccctcaacataaaagtaaacttcaacgctgtggtatcacacccgtacaacagaatgatacggtacatcttacaaggtgtgccaaaggcagtgatattgtttttgacgccgtcggcggttcgcttgctgagtttttgctggacaatatgaagagagatggaaggttcgtttcttacggtttactttcgggtcagccctataaaatccagcccgcctcgcctgcgacaagctggtttcatatccgtaattatcttgatgatttcagtaaaggcgactggcagcttgagttcagcaatatctggcgactactccgcaaaagtgaactgaacgagtatcagcttttttcatcgaatcaatggcgggaggcaattgacagttactataagtgtgggcgcttacttaaacccatattgatgttaaataaatag

SEQ ID NO: 85603 - DNA, 834 bp, Citrobacter koseri
atgcgagtgttgaagttcggcggtacatcagtggcaaatgcagagcgctttctgcgtgttgccgatattctggaaagcaatgccaggcaggggcaggtagcgactgttctctctgcccccgccaaaattactaaccatctggtggcgatgattgaaaagaccatcagcggtcaggatgctttaccgaatatcagcgatgccgaacgtattttttccgaacttcttacgggtcttgcagccgctcagccggggttcccgctggcgcagttgaaagttttcgttgagcaagaatttgcgcaaatcaaacatatcctgcacggaatcagcctgctgggccagtgcccggatagcatcaatgctgcgctgatctgccgtggcgagaagatgtcgatcgcgatcatggctggcctgctggaagcgcgcggtcatggcgtgacggttatcgatccggtcgaaaaattgttggcggtcgggcattacctcgaatcgaccgttgatatcgccgaatctacgcgccgtatcgcggcgggccgcattccggctgaccacatggtgctgatggcaggtttcaccgccggtaacgaaaaaggcgagctggtcgtgctgggccgcaacggttctgattactccgctgcggtgttggctgcctgcttacgcgccgactgttgtgagatctggactgacgtcgacggcgtgtatacctgcgatccgcgccaggtgccggacgccaggttgctgaagtcgatgtcctatcaggaggcgatggagcgccaaagtccttcatcctcgcaccatcacccccattgcccagttccaaatcccatgcctgattaa

SEQ ID NO: 85604 - DNA, 357 bp, Citrobacter koseri
atgaaaaacagaaaagattttgtaaataacttaattatctggataaacaaaaatatagagatgccactaaaaattgatgatgtggctatcaggtccggatattcaaaatggcatttgcagagactgtttttttctgaaacagggcagagcctgggaggttttatcagagagaaaaaattatgtcttattttagaggctgttatcacaacaaatgaacctttgataaacatcgcgatgcgatttggctttgactctcagcaatcattaactcgggcattccgaaaaagatataatgtcccaccacaccggtatagaaaaaatgccgtcaatattaaaaataactcttcctgggggtaa

SEQ ID NO: 85605 - DNA, 678 bp, Citrobacter koseri
atgaaagagcgaggaatgatttttaactgtgaaatggtacgggcgctgctggatggccggaagacgcagacgcggagggttatggcaattcagccagagcattcagagctgggattacgccgggtgattgactccaaaaatggcagagataacgggaagtatttttggtcgcagtccgatgcgtgcggtctgaaggcacgctcaaaagtattcggttgtccttatggagacgttggcgatcgcatttgggtgcgagagacgttccaggggccgcttgtttctgaggagttattcgaagaataccgagcctatcctgaaaagttcgagacgccacaatactgcgaatatgccgccaatggtggtaccaagcctgaatactgtgatcttgacgataacctccgtcatggctggcgaccgtcgatccatatgcctcgttgggccagccgcatcacgctggaaatcaccgatgtacgggttgagaggctgaagagtatcagcgacggcgatgcgatacgcgaagggtgcagtgccaccgacatgaaaagtggcgactgtgttgctgatgtgttcgcgcgcctgtggaaatccatctacggcgaggaaagctggcaggccaacccctatgtctgggttatcgaattcagacggatcgacgggggtgatcatgcgactaattaa

SEQ ID NO: 85606 - DNA, 471 bp, Citrobacter koseri
atgaaatcaacggtagaaacaaaaatcattgagttagtgaagttagggcatgagcgcgcagcagatctgaaagcgtcatgcggtgcagtagacgtacgcagcgtagcgcaactgattagcgatctggcatcgcagcttgaagtgcagtttgcccgtagcaatgcgctggctgcggagaatgtggggctgaataagtttattgcagagagttgctatgtgcaggcgggtgaagattcttcatggcatcaggctattgaccatgctccagaaaccccggccaccgacgccttcctggctgaagtgcgggcgcaggaatcagcgccattagtccgagctttaacggttatcgctaactccgaacagcatgatggtgaaacagtagtgtgtgattttgacacgctaatctctgttgctgccggatcgcttagtgaccactacgccgaccaacttcgcaaaggattgcagtcatga

SEQ ID NO: 85607 - DNA, 597 bp, Citrobacter koseri
gtggatgaaaaaataaagtttgtggttatcgggcatcactcaagagaacctcaggcgcgagcactggcttaccaaatcgccccctccgcccacgtgatgatcgaccctgacagccatggagcagcatggaatcaccgacgtgcgcttgagtgggctgctgaacaggactgtcgggttgtaatcattgaggatgacgcgatacctgtatcgtgctttgtggctctgattactggatggttagagcgcttccccgacaccctgttgagcttttacctgggcactggccgaccgccgcagtaccagatgcagattgctgaacgtttgatcgttgccgataaaacgcgcgctgacttcatcacgttgccacgattaatacatggtgtgtgctacagcgtaccgcctcagcatattgagcgcgtgttgtatcgatgggacagcagtaagccagccgattatgccgtgggtgatgcttatggcggagcagtggtctatccgtgttactcactggtggatcatgccgacggtgaaccggtagagcgtcatcctgactcagcaccaagaacagagcgccgacgggcgtggagattatctcaatga

SEQ ID NO: 85608 - DNA, 345 bp, Citrobacter koseri
atgggagaggggttttgtcggcccggtaagcgaagcgccaccggcatgacgccggatggcggcgcaagcgccttatccggcctacgggagagaggttttgtcgacccggtaagcgaagcgccaccaggcatgacgccggatggcggcgcaaacgccttatccggcctacaggagagaggttttgtaggcccggtaagcaaagcgccaccgggcatggcaccggatggcggcacaagcaccttatccggcctacgggagagaggttttgtcggcccggtaagcaaagcgccaccgggcataacaccggatggcggcgcaagcgccttatccggcctacgggagtga

SEQ ID NO: 85609 - DNA, 1725 bp, Citrobacter koseri
atgaagccgattaagcgcctgtacctttccagcgatcaggtacatctggttgaatgcaatatcgtgctggagttgaacgcgtgcgggcggggatttatcacagccagcacagaaacagactacaccggtaaaatggtgcgtattgacataggttatgacggtttagtccttcgctggtttaccggctatgttgagcgctcgcaacccgcagagaacggcacctgtcgcctgtttgtcagagagcttatcggcatctttgacaagttgtggccctgctcttttcagcatccgacgctacgccagatcactgactggattagtgagcaaagcgggcttactgtcacgacgccggttggcgccgattatgccgataagccgatcccacactttacgcacagcggcaccggatatcagcttcttgccagcctggggcgtgcgttttccgtcacggattatctctggtatcagttgcccgatggttctgtcttcgtcggcgccgcaaggcacagcctttttgcgggcaaacccgtagagatccccgctgaatttagccaggcatcaacgggcggcaattcaatgattgtgccaatgatccagagcctgcgccccggcgcggaggtcaacggccagcgtttaaaccaggtgcggttaaataacgacgatatgacaatcacatggcagccccgcaataaagctaccgggcagccattgcaaaaatcccccatccagcgccagattgaaagcgtatacccggaactggcttccggtttacacctgccaaaactcgccagagttgaggcacccagcgaggatgtttctggcgggaatatcgcagatccgttccgcccgcgttacgctgtcgatctgcaattgctggatgaaaacggaagccccgcagcgaatacgccgctctatcctgccgttccgttacccgtgccaatggcgggcagcgaatcgggcatgtttcagtttcctgcgccgggcacgctggttgaggttggattcgttgaggggcgccctgacaagccgtttgttcgccagatcatgccgcaggggcataacctgcccgcagtgaagccgggggaacagctacagcaacagcgtgatggtgtatcccagcgcgtcactgtcgcaggtgactgggtgcgacagactgaccaggcaataagcgagaattcaatgactcgcgaagtcaccgccgatgatgagacccgcaaggttgttgtccgtgataccactattcaggcgacggataagactaccgttctcggcacttccacgcttctggccggtgcggtgatgcatatcagtgagggagattacagcatcggcacttccggcaatctgacgatatcctgcaataaggacaattctgtcagtgttggccggaacgtaatacgcgacgtcggcggcaagctggaagacaaaatcaaaagtaatgtcgatctcactgtaggcggagcgctcacagagaaaatcacaggcattcgtaaaagcgttgccgccgctcaggagttgattgcgccaaccgtaaagctgggcagtgaagaaatcaacgtcctgacgttactgactgacacactggacgtcgttaacgaactggcgcggatatgcgcgacccatacacaccccagcgttggaaccagcgggcaggcatcgcagttcgctggaaccgctgagaaaacagacgttttaaaagcaaaatacagccccctgattgcctga

SEQ ID NO: 85610 - DNA, 543 bp, Citrobacter koseri
atgagccagacggcgttactcgcccttaacggcgaggggatcacaatgcaaaacatgctggtatcaccctctatgcagtttcaggagaaagaccagtcgggacaaacatcgagtaccgtcaattctgaacagggtattaaagcgaaagaattgcgcgtgtccggtctggtcacgtttgatgacgaggcggtgttgcagcggcttttccagttggcatcagcgacagaggccagcggagcgttgaaagtttaccgcgtagccaacgcgacggcggcggcgattaactttcgtgaaggtacgttcacagggcagattgacgccgttccccaggaggatcgccttgcctggcaggtgagctttacgctacgggaaaagggaagcgtaccggaaaaacggcaggccaggaaaagcaatgccacgaagagcacaaagcagacaggaacggcgggaggcgggggaagcgaggcagccgatgaaacacccgacaaaatgacctggttcgaagaaaaggtcttaaaacctgtcaacgatgcactggggtaa

SEQ ID NO: 85611 - DNA, 723 bp, Citrobacter koseri
atgtggcgtgaatctgtcataaaaattgctgacgatatgggggcgctggcatgttccattgtgcccgcgcatccctgggtgtacgggctggggcaaaagactgattcaggtggatatctcagcccggccaacgcgctgggatatctttctaaaaagctgttatccagtgctggcagtggcgacgttatcatcatgatggtggcggaaaatacccacgacatttttatgcagagtctgaataaactttccacagtatttccggcgccggtatttacgcaggtcagccggatggcggcggccgcagcagagttaagcacagtaaagatgcaattaccggggaaggccgatgtattgccccccatcgccccgctgtctgttccgactaaccgactggcgcgtaatgcgcagcgcgttgctgaagcgcagatggccgccgccgtcagtacaacaaccgccgaaattaaaagccaggttgccgggtttattcaggaacgcgctggtttactggcttcgctaagtcagcaactggatggcctgaaagctgccagcgcaaatattctttcattcagttacagcggcaactattccgccgccgctgttgaattacttaaagacattccccgtcccacggcggtgcataccgctgcaatgatgtttatcggggattcattatccgatttagggaaaatgctacatgagccagacggcgttactcgcccttaa

SEQ ID NO: 85612 - DNA, 507 bp, Citrobacter koseri
atgaagactttcaagcaattcaaactatatgagcctgacaataaagacctgccgagcgcactttatttgcgggatgataacgggctggactggtatgaatgccagtcggaatttggacgtaactcttacaagcttgtttttgataatgatggcttaatcgttgcgtgtgagaaagacgcatcaaccctgtttcctgtcgggttgagtgttgcagaagttacgcgcctgccaaaagacttcaatattggtcagtgggtatttaaggacggaaaaattcagcaacgacagtattcacaagatgagttaagggaacaggcggaggcgaaaaaatcggaattgcttgctatggccgatgcggcaatcgcgccattatcccgcgcagtaaaactggggattgcaaccgataaagagatcgccctgcttgaagcatgggagcgatacagtgtgatgacaaatcgcgttgatccgtcagaccctgagtgggagacaatccctgatgtggcgtga

SEQ ID NO: 85613 - DNA, 2016 bp, Citrobacter koseri
atgtcacaggctgtcattacaaaagcattttcagagtggaaagcacaacaggcaattgataataagccggtcattctggatgagtttatttttgcttatattccggggctggatactgataagccgattgataataccgagacaacgcccgccgccgataaaattgttcatcgccaggcggtaagcaaatccggcgtcgtgaatgaacattctgttgtttattccgtgacgatgggcgccgatgttggcgatttcgattttaactggatcggcctggctaataaggcgaccggaacgctggcgatgattattcatgccccgacccagcggaaggttaaaaacgttaacggtcagcagggtaatgttctggtacgttccatgctgatggagtacagcggcgcccgcgcggcaacggaaatcaccacaccggcagagacgtggcagattgattttaccgcccgacttgctgcaatggatgagcgtcagcgccgggaaaatatcgatctctatggcgccgccgcattttttgactcgggttatctggtcgcaaaatccggcaaccagtatttcatcactaagggggcgggatatgtcgccgggttgcgttccgaactgctggcaaaccagaatattacggcgtctgcgaaaccgacaaaggtctggcttgatgtctgctggactggaacactgacgagtgagtgggcagtacagagcaaaatcaccgttgcagcgaaccttgccgattatgtgcaatccggcgtacagcattacgtctttgctgttgcgagtattgacgctgccggaaacattacggatctgcgtccgaaagggacacttgacgatcagacggccagcaatgcgctgaaagaacacgaaaaatcacgtaatcacccggacgcgacaaccagcgaaaagggatttgtgaaattaagcaatgcgacaaatagtgactccgaaacgctggccgccacgccgaaagcggtaaaagccgcaaatgataatgctaatacccgcacaccttctacgcgcaaagtaaacggatacgccttatcaagtgatgttgttctgtcggcggatgatattggtgcaatcccggccggagtccgcggtgttattcgcgatggtcagacgatggcatcagcaaataagccgggatggtggcaggttgccgttccgaatccgtcaacggtttcggattttcctaaatacccgaatggaaactacttatacggctatggatatgtattttttgaaaatacaggtaacttgtggattcagcattattacagtcatcatggcgtaaatgcgaagcgtcaggaatggaataccgggccaactaccgatgttgcgtgggttattgactacaatacagcaaataaacctacgcccgcagatatcggcgctttacccatttcaggcggtcagcttactggcggtcttacgcttcatcgcggaatactttttttccctgagtcagcttataaaaataaagctgagggattaacggggacgtatgcgactgatgctcttgattatcgctgggaactgtacgcgcgtagtaaggcaaacagcagtattcgctctaatatcttcactgttgatattatcgatatttcgaaaggttctaccgcttccggtggtggttcgaataatacaacaacaattacagttcatggacgtattgtcacaccttttcagattcaaccaggagactggacaaactttgacgcccgctatcaggctaaaggtaattacacgccagcagggcaggcttatacgaaagcagaaagcgatgcgcgttttgtcagggatgtcaggctgggtgcccaggtgatggttagtccgtcaaataatggtggtaaggcctcattaaccgcgccagcagggcatatgctcactgccattcttgataatgacacgccgcgattcccacaacctgatacgccagatgctgcttatgcgcgccctgtccagaagttccttaacaaccaatgggtaacggtatctcagttatga

SEQ ID NO: 85614 - DNA, 594 bp, Citrobacter koseri
atgactgagttcgcgcggctgcttgccggtcttaaattgccctcatggatggacagaggcgaccccgccaggttgcttcgtgcctgcgtgaagttctggtctcaggtgtatgagtggatcacatggccgttaaagcagtttgacccgctgacctgcgcggaaccgctgttaaacctgattgcatgggaacgcgatatcacccggtttaacggcgaaccgctcaccctgtttcgcaggcgtgttaactatgcctttatcaacgcccagcaggccggggagatcgcgggttttatcgcaatctttgaacgtctgggcatcggttacgttgagttgctggaaaggcaggacgggcttgactgggacgtgatagtcgttcgcgtgacaaacagccaggttgcagagaatggcgatctcctgcttgaaatcatccgcaaatacggtcgcacctgccgccgttatcagtttgaagtgatcaccgccctgccgctgcatatcaatattggctggtatcagggggaatatgtttgctggcccgccacgcttggggatgcgaataacgagccagcagcaacgtacagcgcaagtttgcagtag

SEQ ID NO: 85615 - DNA, 1185 bp, Citrobacter koseri
atgactgaaaaaccagacgtcgattttgagcaggtactgcgtgacagcgggatgccgacgaccgaggccgaagtgacggcggcgtttaaagccacggtacaggctgagggttttgtcacaaatacgtcgagaatgtcaccgttctggcgactcattacgaaaatagtcacaacgccggttatgtggcttaaagatgcattaatcagtgttgtcctgcgcaacatgtttgttgcgactgccaccgggtcaatgctgcgtctgcttgcctgggcggtcaatatcacggccaaaccagccagcgcggcggttggcgttgtgcggttttataaggtgaatactgccgatgcggtggccgtcagcgccggaacggtgatccagactgagcgcatcaacggcgtggtttattcagtgtccgtcagtgaagacaccatcttgcctgccggggatgaaagcgggcttattcctgtgacggcaacaggcaccggcagcggctataacctcgcgccgggctattaccgcattctgcccgtcgccatcgccgggatcgccagtgtggttaatgaagatgaatggttaattacgccgggcgcagacgaggaaagcgatgatgagctgcgcgacagggcacgcaaccagtttaacctggtaggcaactatcacacggatgccatttatcgcagcatgattgccagcgttctggggctgagtgttgatcgcatcttctttttgcacgatgccccgcgtgggccgggtacggcaaatgcttacctcttgcttgacagcggcgagatctcccagccgtttattgatgcggtaaacgactacgtcaacagtcagggccatcacgggcatggcgatgatttgcagtgttttgcactgccggaaactgctcacgatctggcggtcattctgtacgtcagaagcaaggaaaacatgacggatgaagaacttaacaggctgaaaacagatgtcagcaatctgatccgttgcgcgtttcgtgagaacgcaaattacgacgttaaaaagacctggccttattcgcggtattccttttcgaatctgggccgtgagatccatcgcgcgtttcctgtgattgattcggtgagtttctcactgacagatattgtcagcgaattatccgtcccgcgcctgtctggcttaacggtagaggttgaaaatgactga

SEQ ID NO: 85616 - DNA, 336 bp, Citrobacter koseri
atgagcaccgaaccgctttacatcgacctgttgatcacggatggcgattttacgctggacagcggcaacgagccgcgccggtgcgataaccgcgacagcatcgcacaggacattatccacagcattctggaaagtggcatcacggcccgtctgatcggtgagcgcagcccgacattgcgcggcgatgttctcacccagttgacgttgctcgttgagagtgatgagcgtctgatccctggcacgattgttattacggaagaaagcctgtcgcgcctgtatgtcaccgctgaaacctacgattttggcagcgttgatactgaggttaattatgactga

SEQ ID NO: 85617 - DNA, 2115 bp, Citrobacter koseri
atgagccacctggatttcacattaagccttatcgacaagctgacgcggccattaaaaacggcccagtcaacgctgacgggctttgctgaaaaatcccaggcatcctttgcgaaagtggggatcggggcggctgccgtctgggctgttgcacaatcaatccagggtgtggtcggcccggcgtatgagatgaatgcggcccttgccgaagtcggttctaaaggcgtggcagaagacgcgctcaataagctgtccagttccgcccttaagttcagtatgcgttacggcaaaagcgcggttgatgttgtgaactccagctatgccataaagggcgcgatgtctggcctgtctgacatggatttaccccgcgtcactgtcgccgccaataccctggcggcaggtgtgaaagcgagcggcgaggaagctggcgaatatatcggcgcgatggcatcacgtttcaacgctgaactgtcagacctggggcatgttcgctttgcagaagaactggccgggaaaacggcttacatggtgcaaaacttcggcgtcaaaatgcagaccatgcaggaactgatcgagggcacaaaaaacgccggtgcggacttcggcgtcagtcttgatgagcaattcgcggtactgggtacgctgtcgcgcacgctgggaacggaggccagcggcatctatgagcagtttttacgcagcgcccctgccgctgctgaaaagctggggatcagcttcgttgacgccacgggaaaaatgctgccgatgggcgatatcctgcaaaaactccaggacaaatacggccagagcatcgaagggaacgtcaaggcacaacaggcgctggacgcagcattcggcggtggcgccgacgtcattaaaaagctgtacggccagcaaaacattttaaatcgcagcatcaccgaactggggcgcaatgacggtatgaaacgcgcccaggaaatggcagagcgcatggcgaagccgtgggaacgcattaaagcgacattcttcgcaatgcgtgttgccctgggcaatacgctgatccccatcctcacaccgatgatgaaccgcgttgccgatgtaggggcaaagtttgcccgctggcttgaaatgttcccgaatatcgcccgctggctgggttacatcaccctgggcgtgctgtcattcgggctggctggcgccgcaactaacatcgtgatgggcgtcttcggtttcacaatggttgggctggctgcgattgcgaaagtgctgggcggcgcatggaaagccctgttatggacgctcaacctgttgcgcccgtctttgctgacgacccgtattggtcttgcggcgctgtgggtacagtcgaaattgttagcgctgtggactggcgtttgccgcgtggccctgattgcctggaacgccgtgttaaaggccggagccattgcgatgcgcatctggggggcggcaaccctgtttgccggggtggctatgcagttactgaccagcccgataaccctgattattgccgcgctggccctgctggcagcgggtatctggtacgtcgtcacccactgggatgagcttaaaacggccattatgaacacgtccgcgtttgcgtgggtgatggacgtcgccggtcaggtaggccaggtctttgccagcgtatggcagacgatcaccgatggctgggcggctgtggttgatttcttcgcgggcctgtcgccgctggcggcgtttgatggtttcgcggcggccattggcgacgtgttcagcaggctgtttgccgtacttaaaaacacatttgcgtctacatacaactggatagttgaaaagctgaacaaaatccccggcgtcagtatcgatctgaaaagcgttgataaccctgctgccgccgccgttccggcacgcgctgccattcctgacagtgctgctgcgctgccaaaactgaacgccccgtcaatgctgacgggcaacaaagtaaatgcagatatcccgcgcggcgggatcgtgagccaggtcaaatctgacagcaaagcgactgtcgataaccgcaaaacgtggggcgatacctatatcactgccccgaatggaatcaccccggcccaactggccgaatggcaggaacttaacgcaggatga

SEQ ID NO: 85618 - DNA, 270 bp, Citrobacter koseri
atgagtaagaacaacaagattgtaatgactgtagcgggcgtaagtctggcttttgaaccgaataaaaccgcgttcaacaacctgattaacgaaatgaccatgaccaacaaagtggcgccgatggcaacttatttgcaccggatcgtcgccgctgattgcaaaacccagttaacggaactgcttgaaaaatacccgggcagcgaaatgcagatcgtcgagaaagttaatgaaatttactcgccgaaacttgagatcgaagtaaaaaactga

SEQ ID NO: 85619 - DNA, 384 bp, Citrobacter koseri
atgcgtaatctggttggtcatttgctgatactggttgccgcaatgtcggcaggatggcaggcgcatgactggcacgatgcaaagctgaaacttgctgccagtgaaacggcagaggaaacccgccagattgtcgttgaagtgacgcggcagtctggtgaagcgctggaagcaaaactcgcggagctgaaagccaatgagatccacaccgaacgggttatccgcacggaaaccattaagccggtatttagtaacgtttgcgcttctgatgattacgtccggttgttcaacgaaagtgcagatcaagccgaacgaaaattatcaggaaaaccagctaaccctttgcccggtaacgctgccgcgtctggccgggccgaccggaaatga

SEQ ID NO: 85620 - DNA, 339 bp, Citrobacter koseri
atgagtctgagtgaaaaacaacaacgttttacgtcaatgattgcgttgttaattcagtacgcaaatgcaaacgggatgtggctgacgttcggtgaagcgtaccgtacacctgagcaggctgcgcttaatgcccggaaaggcagtggtatttccaacagcctgcatacgctgcgcctcgccgtggatttcaatttgtttatcaacggccagtaccagaccgacagcgccgcatatcgcccgctgggggaatactgggagtcgctcggcggatcatggggtggccgtttcagtaagccggacggtaatcatttcagtcttgagcataacggggttcgctga

SEQ ID NO: 85621 - DNA, 312 bp, Citrobacter koseri
atgccaaacggagaaacgtcactgctggcaaagttgctgcttatcggagccgtgatcggcctggggcaactgatggtcagcaatgagcaaattacaacccgcctgctgatcgggcggatgattctgggatctgctgtcgcacctctggccgcaatcccgctgctgaaatttcccgaaatgccggaactggtcgtcattggtctggcctgcgctctgggcattctgggaagtgcgtttattgaggcggggttaaagcgctgcctggaaatgtatatcaaacgatgggggagcaaacgccatgagtctgagtga

SEQ ID NO: 85622 - DNA, 456 bp, Citrobacter koseri
atgacagaacgcatcagcggcggatcgttcgatgtgaactatgacagcgtcatgattcacgtcgaaaacgccaccgtcaccattacagataacagcgccgtcgcgcagacccgtggagtgcctaacgggcatacgaagggatctgtttcggcggatgtggaaatcgaagtcgatgcccagaacttcaaaaagttttccgctgttgcccgcgcggcggggtcgtggcgcggtattccggcaaaagacttcctgttttatgccaacgccggtgacgacgaagaaaaaatagaggtgttcggctgcgttccttcgttgtccgacatcgtcaacatcaaccctaacgaggcaagcaaaaccacgaaaaaaattaaattcgtggtgacaagcccggactttgtcgcgattgacggcgtgccgtacctgtcagcccgtgacactcgcgacctgaaaggctga

SEQ ID NO: 85623 - DNA, 1143 bp, Citrobacter koseri
atgacctggccgaatgtcaatgtcagtcagaaaaaccgctataacggcaccacgaaagacgtcgaacgtgtcgtcctgtttgtgggttatggcaaaaccaacgtcgggaaaacccaggcgttaaataccggaagtgacctggacaaagcgctgggtgacgacgacagcctgttaaaagcgatcgtgtcggccgccgcgaacaacgccgggcaaaactggtttgcctatgtccacgtactgagtgaacccgacaccgacgacgaagggtacacgccggatgaggactggattaacgctgttaagcaggcccagaacgttgcatccaccgaaggggttgtcctcgcattcgatacggcagacaaggcgacaattaaccgcgctacggaactacgcaccaccctgcaagcgaatttcgggcgattcgtctggttcgcgctggctgtcggcgggccggaagagggggaagcctgggcagactatgtgctgagggccaccgaactgcaaaaagggatcgcgtctcctggcgtgcaactgatcccgcgcctgtggggcaatgaaccgggcgtccttgccggtcgcctgtgtaaccgttcggtcactattgccgacagtcccgcccgtgttgccactggcgcagtgacggcgctgggcagcgacacgctgccagtagatggcaccggtgccgaaattgatctggccgttctccagtctctggaggtaagccggttcagtgtgccgatgtggtatcacgattttgacgggatctactggtctgacggacgcacgcttgacgtcgagggcggcgattatcagaccattgaaaacgtgcgcattgttgataaagcctcgcgtcgtgttcgtctgcgggctattccgaaaattgccgatcgttcgctgaacagcacgccgggcagcatcgctgcgcaccagacctattttggtaaaccgctgcgcgaaatggcaattgctacggaaatcaacggcgttcccttccccggtgaagtcaagccgcccagggatggcgatatcaccatcacctggacaagtagcgttgctgtgcagatctatctcgttgttcgaccgtatgagagcgcgaaagagatcggcgtcagcatcgaactcgacacttctctggagagctaa

SEQ ID NO: 85624 - DNA, 696 bp, Citrobacter koseri
gtgatccggggggaactgaaccagaaacagcttaagcaaatgcgtgaggcgctggcgaaagctgatttgccccccagaaaacgccagcgccttttgtggcgtatcgcaaaactggggatcgttgtggcggcaaagcgccatcagcgccagcaaacagccccggacggtacgccctgggcaccccgaaagcgtggcaaaggcaagatgttaaaaggactgcccaaactgctggcagtgcgggaaatgccggagatccagggggtaaggatttacctcaagggcggcaactaccgcaacgggaataagcccattgctgcgggtctggtcggggccgtccagcaggacggtgcccatatccagatgaaagcgggtaacgccccgcgcaggccccaggcgaataagcctgcactaccgcgccaggccaaaaggttgcgggcgctgggttacaaaatccgtcagggcaaacgctgggttaggccatccagcaaacaaatcatggaaaccatgagcatggcccaggcgggcgtagtgatcagaaaactgaaaggcaccccgtcaaagcgcacctggacaattgatattcccggacgcgtttttctcggtgtcagcaacgaagagtttaaccaaattattgcgcggcaaatgcaggcaatcggcttcggctgggacgtcaacgcgcagagcatcagggggtaa

SEQ ID NO: 85625 - DNA, 477 bp, Citrobacter koseri
atgagccagttagaaagcctgaccgcattcattacagcgaatttgccaggcgatgccatgcagatgttttccagcgcaatggaggactgcgaactgttacgcagcgctaaagcgctgggaaacgaccagcgacgggtcggcgtgctgacctatagcgcccgtttgtcatgggataacttcccgtttcgccggtattcgccgggtctggtgtatgccctggtgctggcctgggtcgatgaacacgccaacgaactgcgcgaagaactgcgattaccagatcccacggtagaccctgaatttgatgatgaggggtcatgcattctggatgtggttgtcgccctggctgacccgctcatcatccgggaacaggaagacggggcgatccctttcaggggcaagcgctgggaaatcgttaacccggaaatctgggtggcagaaacggccgaattcattgtccggcgtggtgatgcgtcgtga

SEQ ID NO: 85626 - DNA, 474 bp, Citrobacter koseri
atgagtggccctagtttcagtatcagcggtaagccggtaacggtgacgccgacagtcatcaccaacggggtggcgttctggcccgatctggatctggctgagtttcagcaggcgcgaacgctgcccgcagacctgccgactgacaccgcagggatggccctgctggcggcgattgcggaagtcaatgcgacgctggccgacgtagtgacgtactggagcggaaaagggtgcgagcgtgcggctgatgcaccaggcgcgaagatggacgacgaaaaccagcttacagcccagtacaaaaaagccgtttacgcccgtgcaaaagcggatctgctgggtgagtttgccactatcggacggcgtgaatcgcatccgggacaggaaagcctggatacacgcgcgaacctgctggccgaagcggccagcgtgatgcgcaacatgctgcaacagccacgtgtgggggtacatctgatatga

SEQ ID NO: 85627 - DNA, 669 bp, Citrobacter koseri
atgaaagccgcaaaggcgctggataaccgcgaagccctgaccgcgtcgccggtcagcttccacctgcaaaagctggaactggaaaaagatgtcgcaatgcttcgcagcctgccgcgcacggaagaccgcatcgaactgaaacgcgatgttcttctgccgcgctggatgccgaccgttgaggcgtatcttgccggtgatgctcgcttcgcaaatccggcgctggtttactgcgtgatctggctgtttgacacgggggaaatgggcaaggcgctggactgggcagatgtggcaatcgcagagagccaggcgaccccggaaaacttcaaaagcaacctgcccgcctttgtggccgacacggtgctggactgggctgtcaccgaggccgaagcgggtcacagcattgagccgtatttcagccggacgtttgaaaacatccgcgaaaaatggcgcctgcatgaagacattaacgcgaaatggttcaagttcgccggtctttatctgctgcgtgatgcgtcaggtaagccccgtgccactgcggtggatgatgttgaaacgctggaacaggccgacgctctgctggcccaggctgcgacatacaacaaaagcgtcggggtgaaaaccatgcgtgacaaaattcgcgcccggattaacagcctgaacgaacaataa

SEQ ID NO: 85628 - DNA, 1032 bp, Citrobacter koseri
atgcatcatacgcaacaactatctgcccaggccgagggaatgctgcaaagctttactgctgccctggctaaatcttatggcgtgcgcgacacctcaaagatgtttgctatcacgccaccgaaagaaactttgctgcgtcaggcgctgctggagtcttccgaattcctgcgcctggtgaatgttaaagatgtgaagcagaccaccggccaggtcatcagcaccggtaagccgggaatctataccgggcgtaaaaagaatggtcgcttttcccgtgcgcttggcgtcagcggtaatacttacgctctcgcggaaacggattctggttcattcctggactacgacaccctgaccaactgggcaaactccggcgatgaggatgagttcttccagttgattcaggcattcagcaatgaacaatttgccctggatatgctgcgcgtggcgttcaacggtacgagtgttgcagaaaacaccgacccggaagccaacccgaacggcgaagatgtcaacatcggctggcatcaaatcgtcaaagagcgtagcccgtcccaaatcatcaccgacgcggtcacgctgggcggtgctggcgcggattatgtatcgctggatgcggctgtcactgacctgcttcacgcctgcattctggagcaataccgcaatgacccgaacctttgcgttctgatctccggtgatctgattggtaaggatgccacaaccatgatgaatatggttgaccgcccaaccgaacgtgtcgcggcgcagctgctgaaccgtcagatcgcgggcaaacaggtgtacaccccgccgtttatgccggaaggtcgcctcatcattaccaccctgagcaacctgcatatttatacacagtcgggcacccgtaaacgtaaagctgactggagcgacgaccgcaagcagtttgaaaacaactatttgcgcatggaaggttacgccgtcgagcatgacgagctttatgcagcgttcgacaaaatcacccttgcggccgatgcggtggcaccggagggggacgcgtaa

SEQ ID NO: 85629 - DNA, 1065 bp, Citrobacter koseri
atgccgcaatctcattaccgcacggattggctatgtattgccacatctggacaggctgtggacggtcgcaccattgaaccgcaatggttgattgatgcggcagaaacctacacccgcaaaacctacacggccatgatttggccgcaccatccgcaatatgatatcggagagcgtgaatttacctgcaacctgggtgaagtggatgcgctgaaagtagaaacggaaggtgatgttactaagttatatgcccagctaatcccgaatcaatttttaattgatgccaaccgcatgggacaaaagctatttacgtcagccgaatttgtcactgattttgcaggcagcggtcgtgaatatcttttcgggctggctgtaactgatattccggcaagtctgggaacggaaaaacttaaattcgttttagcaggtgaagaaaaggacgccgagcgcgggagtctggaaacattcagcctggggaaattacagacaagtaaaccggataaaaaagattctttctggtctcgtttattttcggccagtaaagattttacgccaacgccagagccaaacactgataagcccaccgagggcgacggagaaaaaatggaagagttaaaagccctcatccagcaattactggatttagttaaaagcggtaaagacgccgcaacgggtgacgctgaaaaggttgatacgccggaacaggccgccgacgaagtggcagtcattgccgacgaaatcgcagacgctgccgccgaagtggcagatctggcggaagaagtcgcagagaacccggaagacgaagttaaagcggaagagttcagcgttgcaaaagccaacctggcaaaagcgatgaaaaaattcagcgcagccccggcacgtagtcagcgtacccgacgccgccgccgtgagttttccgcaggccgtcagcccgttggtaatccgcttaacgatctgtccgagcaactgaccgccgtcatgaccaagttgtcagcgatggaaggtaacggaacgcgtcgtccaggcaatgcgccagcgggcgacaaaaagccgcgtgaattagtttaa

SEQ ID NO: 85630 - DNA, 1812 bp, Citrobacter koseri
atggctaaatattccgatgaaataaaagacgcggcacgcgccctgtatattaaacgctgggcaccaaaagatattgcacaggaattgaacctgccgccgcgcactatttaccactgggctgatgtgggccagtgggcttcactgctgcccattgaatcggtcgagcatgtgatcgcccggcgcatcgacctgctgacgcgccgtgagaaaaaaacggcgctggaacttgaagaactccgcgatctgattgcccatcacgtcaagctgatggcgcaacagaataagcacgctgaaaagctggcagaaattcaggccaggaagtcggcatatgacggggaggggtattgcctcagcgcggcgggcggggaacccggcgaaagaaaacgccgctataagaaaaacgatgtttccgggctgacgcctgaaatgctcgacgaatgggcgcaggaacatcttttcgaataccagctacactgccgcgcacataaaaatgaagactggcgcttcatcctgaaaagccgacaaatcggcatgacctactatttcgcatgggaggcgttcgaagacgccgtcgtcagcggtgacaaccaggtctttttctccgcatcacgcgcccagtcagaaatttttcgtgaatacatcgtccagatcgcgcagcagcacttcggcatcacgctgacgggtaaaaatatccgcctcagcaacggtgcaatcctgcgttttctgtccaccaacgccaacaccgcgcagggatttaacggccatctgtatggtgacgaagtcttctggataccgaaattcacacggttgcatgaagtcgccagcgcgatggcgacacacaacaaatttcggacaacctatttttcaacgcccagcgccaaaacacaccaggcctatccggtatggactggcgaagaatggcgcggggatgatccgaaacgaaaaggtgttgaattcccgaaagatgccgacatgcgccagggtgttatctgcccggacgggatctggcgctatgtcatcacgatggaagacgctatcgcgggcggcctgagcgcacttgttgatattgaacggcttcgcaataagtacaacccgactgcatttgcgatgctctacatgtgccagtttgttgacagcaaagacgcggtgttcaagttctccgcgcttgttggctgcgaagtggatcgggcgacctggggtgattatgacccgaccgccgcacggccattcggcaaccgcgaagtatgggcaggctttgacccgtcacgctccggtgacaattccacatttgtaatcgtggcgccacccattcacgacggtgagcgcttccgcgttctggccgtctggcaatggcaggggcttaactttagctggcaggccgaccagataaagcagcttatgcggcgctttaacatcacttacatcgggatcgacacaaccggcatcgggaaaggggtttatgacctggtcagcaaattcgccccgcgcgaagcaaccgccatcctctacagcgttgaaagcaaaaaccgcctggtcatgaagatgatcgacgttgtcgagcgtaaacgcatcgaatgggcaaaagacgccatagacgaaaccaacaaagagcgtgcggagatccccgcgtcgtttatggcaatccgccgcacgacaacaaacagcggcaatgcgctgacgtttgttgctgaacgttccgacgcaaccggccacgcggatgttttcttcgccatttcgcacgccgtcattaatgaacctatcgaccacgaatttgaccgcccatcgggctggcactttgggaaagcagcatga

SEQ ID NO: 85631 - DNA, 1062 bp, Citrobacter koseri
atgacaacgaaacagcgcaaaaataagaaattcagggccgcaactgcaaagaaaatggagacattcacgccggggcgcggaagtgtgatcaccttcggcgaaccggaacccatcctgacgaccggcacggattatcacaatatctggtatgacaacgagtatgaccactggcgacttccgattgatcgcctggcgctggcccagttaccaaatctgaacgcccagcacggtggcgtgctgtacgcgcggcgaaatatggttgccggtggttacatcggcggcgggctgacaactgaccaggttgagcaaatggcctttgattatctgctcttcggtgatgtcgctatcctgaaaattcgtaatgtttttggggaggtgatcgacctgctgccgctgccgtcgctttatttgcgctgccggaaggatggctctttcgccatcctccaggaggggcctgcactcatctatgaaccggatgacattgtctttttcaaaatgtatgacccgcgccagcaggtttacgggctgcctgactatatcggcggcatccactcagcattacttaacagcgaggctaccatttttcgccgtcgctattacaacaacggggcgcatatgggctttattctctataccagcgatccaaacctgacgcttgaaatggaaaacgaaatcaaggccaaaatcgctgagtcaaaagggctggggaacttccgcaacatgtttatcaacatcccgaaaggcaacccggaaggggtaaaaattctgccagtcggggaggtcagcgcaaaggatgagtttgccaatatcaagagcattacggcacaggatatcttcacggctcaccgttttccggcaggcctggcgggcattattcccaccaatggcgccataatgggcaaccccgacacggcccgcaccacatacagaaaggatgaggtgatcccgctacagcgtaaatttatgaacggggtaaatacggacaaagagatcccgccgcgcttacatctgaggtttgatgttgaaatcccggcaattaccgccgaaaagggcgaaaaatga

SEQ ID NO: 85632 - DNA, 327 bp, Citrobacter koseri
atgaacgcagttaagttaaaatcatccccattgttagcaatggcgtgcgggatggtgaacatgcgagtttttaaaattaaatgcccggaatgcggatcaccggccatcattcgtaaatctgactggaaagacaagaaactggcggatttgtactgcgcctgcactgaggttgaatgcggccacacgtttgtttttaacgcgcagttctcacacactctcagtcccagcggcttaaccggcaacaagctggttaaattcctgatagaccagcttaagccggacgaaaagcaattcgccctggatcttctcaacggtcacagcgcataa

SEQ ID NO: 85633 - DNA, 720 bp, Citrobacter koseri
gtgagttatctgggaagtaaagcggcaagcggtgtctatcagaagattatcgcggaaatgcccccgcatgatacctacattgaaacgcatctgggcagcggtgcggtgatgttttacaagccacctgcaaagcggaattatggtgcggatcttgatgaaacagcacgtcggcaaactatgcagcgctgggaggctaaaggattgaagccaccacgcattgatttttttcatggtgatgccgtgtattttcttgaaagtatgaaaaggcctggcgtgctggatggggttacgtcttttgaaaagctgggtaatgtgctgatttattgtgatccgccgtatatgccggaaacacgcaccagtcgcgcccgctaccgcaacgaatacaccgtcgccgatcatgagcgccttttgcgttgcctgatgtcgctgccggaaaatgtgagtgtcattttgtccggctacccgtcgcagctttatgacagcacgctgaccggctggcgaacgcgagaatttcaggccatgacacgaggtggcgtgcgaacggaaaaaatctggatgaattacgaggaaggaaaagcctatacccacacgtttgctggaaaggactacaacgacagggccagaataaagcggaaggtggcacgctggcgggataagttcgccgccctgccgccagcggaacggctggcaatcatgaccgcgctttgtgaagttgaataa

SEQ ID NO: 85634 - DNA, 2631 bp, Citrobacter koseri
gtgactgattttgcatggacctggaacgcgccgcgcccagccgttggcccctacatctacgagccgaaaaaaatcgccccgcttgccggggcggtggtgcttcatcctgccgtcgaaaagcatatcgaccggattatcaaacgcgccggttataacccggcagaggttcgcaatcgtgaagcgctgatccatgcgctggacaaatacgagccgcacggcctgccattttccgtacatcaagaaatcgtcagaaaagacatggccgccgcaaaggccgccgtagccgcatgggccagcacgccggaaggtgtggaggcccgcttgttgtctgagccgttctttatccgcgaagtctggcgcaaaaaaatcgactggttacgcaccaaccgcgaagcccgacacgttaatgattttcttatgggaaccgtgaaaaaatcattactgcgtcttgatgtcgtacgcagcaagcaaggcgtttcgacaaacgttaacagcgaactggccgcctactggcatggccgctggcaacggctggcagatttcacaaaacgggaggcgttaagcgccgcgaatgagattgccaaccgcctggctgaaatgcttgaaacagaatgtgccgctttgggcctgactgccgagggcatgagcgttgaagaactggactggatttattgccacctgggccgcgaaatgctggccttgcgcgttgtgcctcctgcatggactgcaccgtgggaacgggagcgaatctttacggccattctaaaaatgtgctcgcctgactggtgggggcgcaaaatctggcgtcttcgctgcgactggcgcgaaaaccagttgcgtgcaatcggcgcggttcaccgtaaggcccacgcctatgtaagcgcctcaagcctggttgaatggcaggaacagcgccgtaagagccgcgaatttttcaagagccatgagcttgtcgacgaagacggaaacgtttcatcgcttgaagatatgataaacaagtccacgtccaatccggcgatccgccgccatgagctaatggcgcgtatggctggagtggagcttgtcgcgcaacagcgtggcgatgtgggcatcttcctgaccatcacttgcccgtccaaatatcacagcaatgtcgaatccggtcaccataacggcaaatggaatcacaccaccgttgcccaggcgcagcggtatttatgccgcgtctggaaccgtgcaaccgccaaacttaaacgtgaagatttgcgcccttatggcttccgtgtcgcagagccacaccacgacgggacgccacactggcacgccctgttattcatgccgcaggcggaagttaaagccaccgttgcgatccttcgcgcttactttatagcggaggaccgcgacgaactgggccgcaataccggcgctcgcttcaagtctaaaaaaatggacccgcgcaagggatctgcaacggcgtacatcgcgaaatatatttccaaaaatatcgacggccacgccctggccggtgagctggacgacgaaacgggcaagccgctgaatgaaacggcaaaatatgcaatggcgtgggcatcgcttcaccgcattcgccagtttcagccgctgggccagccgcctgtgtccgtttatcgcgaactgcgcaaactgagcaaccagttaacaaaccagcaaaaaattgcgaataccttcaaacgtggcgcggcaatgctggccgatcccgaaatggatgcggtctgcgccgctgctgatgtgggttgcttcgccacatacattttgcgccagggcggtgtgttgatcccgcgtgaaaactatgtcgtccgcctcgcctatcagccagccgatgaaatgaatgcttactgtgagatcccggaaaaggttttcggggtctggtcgccgcgtctgggtgatgcctcccgtatttgtacccgtctggttaagtggaaaatccgcgctaaatccaaagctaccaccggggccaaaaacggccccggtttgggggttgaccttttgccgtcgccaaccggcgacgcttggagttctgtcaataactctacggaagatgaaaaaaacaccgatttttcactgtcagaaatggctgtgccagctgacggagagttaaagacagaagattcagacggtgaaatcgtcgattttgaaaatatggaccagccaacgcgccgcagattgatgcggcgactacgtgaaacaccattcaaaaggcagcaaagcggatcaccttatgagccagggagcgaattagatgttgcctggcgttctgccgtggaaaaaaccgaggccagatcggcggctgaaaaagccagacgggcggcgctttcccctgtggttgccaacctgctggctgatgcagcgttgtattcggttgagatttcagagattcaggccgtttcgctgttaatggggagccgtctggagataggcggcaaagtttatcgggccagcgctgacggccagttgataacacgtcaattgcccgacgagtcacggacggtaaataaattatgggaacgcctgcgggataaccacggcattgatacaacacgcctgcggtttgatccggtcggggagtatcaaaaaatgctggcgagtgtgggaggtcgtcaccaaaaagagtga

SEQ ID NO: 85635 - DNA, 180 bp, Citrobacter koseri
atgattatccgccctaatgtgtaccgcataaaaaaaattgaacgcagttccaatggtcattattggcttgtatacgttgatgtgatctgttgcggcagcattggcccaaaagtcattatttgcgattccgaggctaaggctaaaggaattgcggtaggtgacgaggtaggccgtgactga

SEQ ID NO: 85636 - DNA, 1011 bp, Citrobacter koseri
atgcagacaatcaaccctctttgctttgcttctgattcgatcaacgtagggtcaatttccggggggaaggactctacggcgacctggttatgggccatcgagcacgacattcagccgcttgcggttttcgcagatacaggtcacgaacacccaataacaatggaatatctggactatctggaaacgaagttttatcccattcgccgcattaaagctgatttcacagcgcggattatggctaagcgggaatttgtaaaaaaggtctggcctaccactctcgtagttgagtgtggcatgacagacagcgaagccgacagggcgataaaacgcgccctggaatgccttgttccgtccggcatcccgtttcttgatctttgcctctggaaagggcgctttccatcatcacaacgccgtttttgtaccactgaattaaagcaccttcccgtgcgtgatcaggtgatatttccgttactggatgagtataacgaggttattaactggcttggtgttcgtgcccaggagtcacaggagcgcgcgaaacaaccgatctgggaagaggatgcgggcgaagtgcgcgggttgaatgtctaccgtccgatccatacctggacgcatgatgaagtgttcgcaattgcgcgacgtcatggaattaagccaaaccctctgtatcaggaaggattttcccgcgtagggtgctttccctgcgttcagtgtaataagagtgaactggggaatgccttccttcgtcaccccgaggaaatgagcagggttgcggaatgggaacgccttgtgtcggcatgttctcgccgtggtaattccacattctgtatttcaactcttgatccgctcagggctgaaaaagatggtagcaaagtcaccgtagagaaatatggcatctcttcctatcaggactgggcgctaaccaccaggggagggcgacagttcgatcttataaccgctatgaccgatatcacagcatgctcaagcatttatgcgggggtgtgtgaatga

SEQ ID NO: 85637 - DNA, 204 bp, Citrobacter koseri
atggctaacaaaattaataacggtctttctgaataccaacgcggtgcccttgccgcgcttcatgaagccaaaacccttgcgattgcacatgcaactttagcgggcgtgcttaccgggggagacgtagccaacgcgctgttgatttccttcaatgcactgcttgatccacttatcgaaaagcattcgcgtaaggaggatgcctaa

SEQ ID NO: 85638 - DNA, 966 bp, Citrobacter koseri
atgattcgatctctcgttaaatggcctggtggtaaaggtcgcgttatgtccgatttgctgccggtactgccgaaagccgattgcctggtggaaccgtttgtcggcggtgcttctgtcttcctcaatgctgaatatcgccgttatatcctgggcgatatcaatcccgacttgattaacctttaccgccagataacgcgctggccggatgcggtgattaacgctgctcgcccgttgtttaaggtgtatggggataaagacggttatcagtgggtccgggatgatttcaacgcccgtgccagagataatatttctgtgcgggctgatttcggaaatggcccggacgcgggcaagatccttcgcgctgcgcaattcctttatctgaatcgccacggctataacggcgttgtgcgctacaaccgccagggcggatataacgttccctttggtaagcataaaaccccgccttacttcccggaagaacagatccgtttattctctgaaaaagctaacgacacgaaagctattttcgtgtgctgcgatttccagagcacgttaaaaatcatgattggcagtgatgccgttatctactgcgatccgccgtacctgccagcaagcgaaacagccaattttacccagtaccacaccgccccgtttggtgagaaacaacaccgtcagttggctgctgccttgctggctgccaatcgcctgactggttcgccggtgatcctttcaaacagtgataccccagtcacccgtgagatttacagcgctttcaaattccaggaaatcagcgttaaccgttctgtcagcgcgaacgccattaccagaggggccgccagtgaagtgatcggcgtcctcaaaatctgcgcaacttgtcgccgtgccggtggtgggtgttgtcctgactgtggcccttgtgctggttattccatgtggggtggaacggctgacgaggtggtcttctga

SEQ ID NO: 85639 - DNA, 390 bp, Citrobacter koseri
atgtttatggataaaaccggtcaacaaccagggcgccgcctgtttctggagcaacgcgcccgactgcaagccagcttgaacgccgcgcgtgtaaatgacacggcaacccgttttaaccgcctggatgatgcctgcaaaaaagtgattttcatcctggcaaacgatgcgtccagatacatagccggaatgccgaaactgaccgccaaacagttgggttgcacttacgaaaatctaaccgaaaaggaacaaacgtgccttttgatgggcattaagcgcctttccgaatttgcagcatcaatgccgtgggaatttgaggactacgccgcaccacgcgccgaaattcaggcgatacgcgacaagccacccgcgccagataacgcagtcaattag

SEQ ID NO: 85640 - DNA, 222 bp, Citrobacter koseri
atggatatgactgaatgcccgtcactcgccagcctgttgacccacggccaacaaatcacacatcgggcgcatcaacgcggctggatagaaaccccggatggtcgtttcttccagccaaaagcaacagacgtccagtttattaaaagctgccgtctgccgtttatgtcacgcccacgcaacaaacgccgttggtttgcccgtttaatgggtatcttcgcttag

SEQ ID NO: 85641 - DNA, 273 bp, Citrobacter koseri
atggaaacgaatgattacgttatccagtacccgttggatgcggtacatcctgacaagtttgcagaattgctgggcaagccaatcaccgctattgaagcgatgatcaaggcaaataagttgccagtcattgagttacgcgacccgactaaaccgaacgcccgcgccggtgacaaattggtttacgtaccggaatttaatcgaggcgttcgtgaagcgtattacaaccgcccggcagcgcagcgcgatgcctggcttttgtggatgggattataa

SEQ ID NO: 85642 - DNA, 294 bp, Citrobacter koseri
atgaatcttgcgcaaaagctacgagcgatcagaaaagccgaagggttaacccaagctaaattttgcgaaatcagcgggatagcgttaggtacagtgaaaaactacgaagggggacatcaggaacctggcattaacgtagttatgcaggtaacacattcaaagcagtttgaaaaatacacattatggctaatgaccgataagacagccccgcaagctggtcaaatagcaccggctctcgcacacattgggcaagaatcaacggaatcagaccactccgagaaacagactggctaa

SEQ ID NO: 85643 - DNA, 981 bp, Citrobacter koseri
atgtcaattaagaagcttgatgatggtcgctatgaggtggacattagaccgcgcgggcgcgaaggacgtcgcattcgccggaagtttgaaagaaaggccgaagcggtcgcatttgagcgttatacgctggcgcacgcaaacaccaaagaatgggcaggccaacgggcagatcgccgcacactgacagaattactggatgtgtggtggaagtaccacgggcaaaaccacgaacatgggacaaaggattttaatcacctgctaaagacgattaatgccattagtgatgttccagttagtcgcctgaataaaagggctttgatggattaccgttctgccagaattcgtgacgggatcagtgcatcaacgattaaccgggacatgtaccgtctgtccggcatgttcactaagctgatccaactggaagagttcgcaggaacgcacccaattcacggtttgccaccattggcagaatcaaaccctgaaatgatgttcctggagaaagcggagatcaggagtctgctggatgcactaaccggcgatgcccgattaattgcattgttaggggttagcactggcggcaggtggtcagagcttgcaacgttgaaaccttcacaggtagttaactgccgggtcacgttccttaagacgaaaaacgggaaaaaacgaacggttcccatttcgtcggaactggagaagatgatcaagaaggaagccagcgcaaagctgttcaaggttgattacgaaaaattctgcaaggtgctgaaaatggttaaacccgacataccgcgaaaccaagcgacgcacatcttgcggcatacattcgccagccattttatgatgaacggtgggaacatagttgcgttacagcaaattctgggccacgcgaacattcagcaaacaatggtctacgcgcatttgtcgcctgactatctgcaaaatgccgttgcgctaaacccgttagccggtggtacatcgctttaa

SEQ ID NO: 85644 - DNA, 1851 bp, Citrobacter koseri
gtgagtaacattcagatttccaatgttgtcctctggcaaaagaacggtatcaaaaggactcttgagttcttacataaccgtgtaaacgtcattacaggggactcaggtaaaggcaaatcatcaattctatttatcattgattattgcttactagcaagcgaaactactggaatatcgaaaactaatatcgattccaaagtagactggtacggtatcaaaatcgctattgatggcaaagagctggtcatagcacgcccttcagaaagcaatggaacaacagaccaagcctattttagtgagaacggcgtaatcccaactttgccagttctaaatgtccgaatagacaatctaaagaaagtcctgagcagcgcctttgggattgatactgagttgaaagtcccctatggcggtcgattcattcaggcgggttcgaaggtttccttcagaaatttccttgcatacagctaccaagaccaaaacaccatagtcgcaccagatcatctatacattcggccgacagatggccgctatcaggaagcaattgaacgaacattcagaatgaccattggagcggaaaatgtagacaccgcactttcacggaatcgcctcttagaattggagcgaaaaaaagctgttcagacaagaaaaaatgagtcttacgctatatccgcgattatattttctgaagaaatagatactctatccagagaggcctattctttaggagtgatcgagcgtgttcctgaatcgcataaagacagacttaacgtactctatgaattgattcaaacacctacagcaccaagtgattataagcatgaagtggaaaggatagaacgtgaaatatttggcttgtcagccaaaaatcgtcaattgaaagcatttatcgacgataagcctacttataccaatgcattaaaagaaactgaagattcgctcaagcctgtcaatgtattcaactcacaagttgacaaaatatttccttccgatttagcaaatgaagttatcgctaaattacaacgtgaactttctgatattaagtcttcattgcgtagccgtaaaagcttcccgtttcttgaggaggtaaaaattttacacgcagagaataataataaaatatgggagctcaaagaggaactgtcgctactggagaaaaagcagcctattaggtataaccctaatgattactatcgttatttaggtcgattggaagcaaaccttgcggtctataaccaaagcaataagcaggtcgctcgtgtagtacaagataatcttgatgattctatcgccgaactacgtgggatagtcgagcaaaatgaagagaagagtactctggcaaaacaggggttaaatcttttaattaacaagcgactcaaaaaactaccgctaaagggctacaatgacttttctgctttctactatgagaaagaaaaacttatacatctacattctcccgatttaacaacaatagaaaaaatgcctgatgtggggagtgcttcaaactacctttatcttcacatatcctttttccttgctatacatgagatcgccaagacaaggcaggttccatggattccgtctttcttgatacttgaccaagtcagtacaccctacttttcaagtgacgggaagcccaatgatgacatcctaagcttagacaaggtattaatagagttaaaccagttcgttattgacatggataaactaggtggatttcagattatcttgttagagcacatagataaagagcactggacgacgctagaactggatcggttccaccttgtggatagagagttacgagatgactatggacttattcttgacgatgaatttcctatagaatcataa

SEQ ID NO: 85645 - DNA, 453 bp, Citrobacter koseri
atgaatcgattaattcaaaatgaattgataggtacggttgctattcaaagtgcattggaaaattcaaaattaaacagcctacctcttgccaaagtaatgttggtattacccttgctttttgatagtgccatacgctctattctgaagaggaaaaacagtgttgttttaagcagtaaagaccttctaatttctaacccaactgcatttataacggtacgtgcaaggtatgaagacttaactatcacttccttgaatacaatactcctaacccaggaacttggcatagctacattgaaaaataatgatcttgttctcaaggaaaagattttttttcaaagtagttccgagattggaaaaattgcattagatattttagcggctggacccaaactcggtctacttctcagtgaagccacctcagatctctatcaaacttttaggattgaattgtga

SEQ ID NO: 85646 - DNA, 1215 bp, Citrobacter koseri
atgaatcattcagataaaatagcagcggacaaaacatcacttgggtttgaattccaagatcttgtatatatcgaaaaacttatcgaactcagaccaggacaaacattaggtcttgaactctacgatgatattcacgtagaaactatcgcagaagattcctccatcaaagatcttatacttattcaggttaaacattctgtcaaccctggcaatatcacagaacgagatattgatctttggaagaccctatataactggctcaagctcgttccggatcttccgtcttgtcgaacaattacattccaactttacacaaacaaaaatatcaataatcaaccgtttgtaaacttgctaaaatctccgcgccagaatattcaagcaatcctcaattatattagaaaaattgaaaaagaaatttcgttgacagagtcacaaaaaaaaaccggtgacaccccaaatccgttagcaaaatatgtagagtcagtatcccagacagatgatacagagctcatttttgtcttggaacgattcgagtttcactctgataactcctccgtcataacaagaatatcgtcagcacttcggcagctttcgatccctgaatcacgtttggaagatacaagaaagcacgtgatcggtgcattcaaagagtcaaaattctcaagaatcataagtggtgaaaaaataatcattgattttgacaattttagaactgaaatcggctttgatagaataatcagatccgctcggtctgatcccaccgacttcgatagattccttgatatatactacagttatcagcggccagataagttatcttttaacaacagtaagtttcatgaccaactcaaagacattggcatcagcaatgaagaaatcattgatcgtggagtcgaaatgatgctagctgagcagtttatggagtccttgagcaaagctggctcatttagtgcgagcgaaaatttacgactagaaaacaaggccgtttctgattggcaactgttacacaaccaatcgcatagaaatataaaagaagaagatgatgttgcacacatgcaagcatcacaaaactgctatgaccaaacaatgtgcaataccttgaaggctgaaaatatagagcttccaagcaatttgagttgtggaaaatacatgaagctttccaacctcccccgtattggctggcgtaaagactggcagagtaggtttaaaaaatga

SEQ ID NO: 85647 - DNA, 918 bp, Citrobacter koseri
atgttcgataagcaaaagaagattgatcaaattggatttgggcttgcatatctagagacctcaatcaaaaccttctcgactgctaattataataacttggctgttgtttctgaatatttaataagctcgcttttcagtttgcagaaagggtacaacttagtgtctactaatgttttaaagtcaaattatcccggtatagatgctgtggacgtgaatgctaaggttggccttcaaattacttcggttaaaacttcagctaaagttaataaaacattaagagtcattagggagaatgatgtaaatagggatattgatgttttatatatattcatgagtgcagggaggcaaagtagttattcaattactgagagttgccctggcgttgagttttctgacaaaaacataataagctttaaagatcttaagaggttactggctgaggatgatttcaagatcgctaaagcttcagaactaatagtgaaggcattaccaagtatctttagtgagactcgtgagagatatcaggctttacttgataacattgtaaatgtgagatctttgttggatcgtaaagctttctgcgggcattatgccatagaagagcctgagttaatgcttaaagcttatcaggaaacaaggatcagtatacaaacaagcaaaatattacatatagaaaataaagatgttgcgaatgctttttctaatattagattgttgataagtaatgctgaggatgaggtggcggtcaaatatcctgatgaatatattctatataagcatgggaaaacaaatgcctttcaaaaggtctctgcggattgtgttcaaattttaatgaaagtgcgtaatgagatagctcgagagataagtgttattgataaacagaaaaatgatgttctaaaaagaatatccacgatgtag

SEQ ID NO: 85648 - DNA, 360 bp, Citrobacter koseri
atgaacagaaaactgttggccttgctgatggcagccatagcacttccagctttggcagcgcagtacgtaaaacctggagcgattctaaccctgaatccgggagagggtaaggctgaattcagcattaatgcctcaacaggggatggctcgggcatatgcaatatggatggtacggcacaacaaatagctgccggagaacgccagaagcgtcgctggatctggaatgacaataccagccagtgtgttgcagtaattagtgaactgaaaaacggtaaggccagcgtgatgactcgtgcttgcgaaggatactgcggggcttctgcggcaggcgcaatggatggtctatttaataagatgtaa

SEQ ID NO: 85649 - DNA, 309 bp, Citrobacter koseri
atgacatttgatttcgactatgacgcacttcgggcctcagtattcaaacagcattatgttcctgctgttgagtctatcggaaaaattgggcgttactggtttggaggaacaaggcaggccgcctcaatggtggcatccttgctaagagaaagtgggatgtcgatcatcttgcataatgcaccacctcgctgggaattcgtggtttacctgacagaaagtgacgtcgatagtgacgacttagatgaaattgcgcttcgtcgacatgagctgattgaacaaggtgttgcagaacgggatttacctctttaa

SEQ ID NO: 85650 - DNA, 669 bp, Citrobacter koseri
atggaaaataacaattctgacactaataaaaacagaatatcagttagttatgctaaaaattcagaagatccgcctaataccactcacaccaagaagacaagaaagtcccgaaacgcccgctacaagagtaaaacggagtcaattcatgagaaatcggggttcacaacgctaaagctgcgtgtcgggcaggatgtcatgcaaaagctggaggaaatctaccgggatcatcggggctatgaactgaatgaaacccgtaaagatctggatgccctcagcaaagttgtcagctattgcgtgagtaagttctataaagaaatgtatttgcagaaaaaaaagggggcattgcctgacattcttccggcaaaaaccccgcgcgcacaggagctgtacgacctgtaccaggccgttacccacagggcattgtctggtatgccccatcaaatgattgccattgagatggaacacgacagataccagtctcctgccaatatcattgccagtcgacggggtttacgcaaaacgccattaccctgggatgcttctcaggttgatgatctgctgagcattcagtgggtaaacgatgaaatcaagaagcttaataagaaagagattcatcatccccctatccagcctgctgccgtggataatctgagtgattctgaaaagtga

SEQ ID NO: 85651 - DNA, 195 bp, Citrobacter koseri
atgaataaaggtcggttaattaaaatagatgaagtaacgaggttgtgtgcaatgtcccgcgcgacattatacaggttgctcgccagcaacaattttcctcctcaggtatcagtaacagggggccgtgctgttgcatggtatgaggccgatatttataaatggattaatgagaggccatcaaaaaaagaggaataa

SEQ ID NO: 85652 - DNA, 789 bp, Citrobacter koseri
atgttggcattatctataccgggctttgaaacaccagagcaggcaaggaaggaaagggtgttcaggattgccagtttatccacatataccggagcatgttacaaagcgctctgtgaaagattaacggaatgccacccgaaatacccctgtaacagcgcagcatgcccggaatgccataggcgataccggctacagatgacaagggaagtcctgcgattatgcaacaagacacataaatggcgtagtgtgaccttgattttctaccaggatgcgttcacagatgcagaagcacccatatggtcgccagatgcactgattgcacgtctccggcggtggttaaaagaatgtggattcaagtatatggtgattggtggtttcgaaatggattaccacataggcactggattgtggctacctcattttcacttaatcactttcaatgaagaggaggcattaaataaacttcggaacagaatgaaaaacaagcgcaatatgtcggtcagaaagagtgtcatttccagaccaatgtttgatacaggaatagacaacccggagaaacaaataagttacttgttcaaggctatatggtggcgcgttgaatcgtataaagaaaacaagcctatacttatcaacaataagagtattaaacctaagcgccgaactaggaagttcagattatgcccaaaacagcatgctcattctttagttatgatggataagcagggaatacagacattaacctttatgtataaagtaaggaagtatggtgaccatttgatattaaaataa

SEQ ID NO: 85653 - DNA, 1689 bp, Citrobacter koseri
atgaaagaatataaagagatattgaataataaaaaagaaaagctatttgttacattgttggctcgtacaaaaatttccgaatcatgtccagttgcataccgacttattaaaatcactgattttcaagagatggagtcgacccgtgtgcttgtaccagccaaggcacttgtcagtgtattggagttaaaaaaaacgttattaacgtgcggacataatcccaatgtgactaaagaatactggattcaagctcatcaagaagtaattaaggaaaccgataagataatcacactgtgctataagccaggtttttatggtgatgtttatttgcgtgttaacgatatagttattggaaaagttaaaggggataagcctgtactgcatcctggtgctaaaaatcatttaccagttgaggataaacaggagacattaaaattatggaaaatgaatgtcgctccatatgcactatatagctcgcgtattatgttagctctgtgctgcggattttcaggttttctccttaagctttcaggtatggaagggggtgggtttcatttgtgggggatgagtagtataggaaaaacgtccagtgcctacatgctggcatcattagcaggatcacctaaagatgttgtcgtactgtggaacaatacggataaagggcttgaggagattgccgtggcccataacgacagctacctggccctcgatgagtcgaagctgttagataaagacgtactggcagccgctaaaatcatgcagaaccgcgtgtatacgttatcgggtggtaaagggaaaacacgttcggcaatttatgagaacaaagttgctgaatggcaggtaagcattttcagtacgggcgagtgcagccttcaacaacttgctgcttccgggaacgttgagcgccttgaaggcgaaaatgtgcgtgtaatcgacgttaatgcagatgctggtgctgaaatggggatcttcgaatcactgccagatggtattaattccagcaacgaacttgttcatgcgataaaggatgcaactcaccgctattatggcagtgccaaaccagcttttctgaagcgcctggtagcggatattcaggatgatcgtgagagtgtgaaacggaagctcgaaaaagggattgagttctttctgaataagcacaaggtagatcgtaactccggcattcaggtacgtattgccaaacgttttgccatcgcttatgtagcaggttccatggctgtgaaatatggtgttttaccctttacaaagcaggatgtgatgaaggggatctcaacctgctacctggactcccttgaggtggttttatctgaacctgaggtaatgaagtcaccattaggtcgttcgtttgatgcaattattgatttttgcaaaaaggatgatcttttaaatctgattggaaatgatcgcgaaacccaaacggcgattaaaaaggcaccggtcattatccacaaagttaaaggacgtatggtatatgcagttgataaggatctggtacataactgcttgccgaaatctcagcgtaagggcattctgacattattaacaaagcaaggggtattattatccgatgcgaacaaggagtacagcaccattcagattatttataaacgtaagcaggttggccgtcgctattgttttatttgcaaaaatcttgataagtttatgacacaatag

SEQ ID NO: 85654 - DNA, 1053 bp, Citrobacter koseri
atgacgccattagatccatcctattaccctgatttccagtaccagtctaaaggcatcataaaagatttatttggtaagaagaaagagcagtctcaactcaacgccctacttgaaaatgttcttttgaaatatgctacacttaaagacccctactttactaatttcattcacacatcaagattttcgtataacaaccaggatagcaacagtaacataaatagtgaacgcaatagtgattattcagagatcagattattccaggaagtactgattagaaaaggattcaacgaactggagcagttaccatcattgttagataagctattgctgaccacttcattcaactctatttattcagggtttgcccgtgaggttaaacgacatatcaagccaacccttaccgagacattaaaatcatggatcgaagaggctggtacaacttatcgtgcagatctttcgttattcctgtattacctgtggagtaataagattcagtaccctgctatagcatataacgagcaggcagaaagtacaccaggcacaccattattatcatttgacactatcgataagttccttgctatctgcgagagtatctattttgatattttagtagacagattagctacccgccttgaacattttaatccaaacaaatttgtcacaatgtatcttgttgatgcaatggatgggttccagtttgaggccttcttggttgaaatattccagactataggatatgacgttaaagaaacaaagaaaacacaggatcaaggggcagatttattcgttacccgcttcgggaagaatatggttatacaggcaaaaaattattctggctcagttggcaattcggcagtgcagcaggcaatttcagcaaaagcattttatgggtgtgatgaagcaatggttgtgacaaactcttacttcacccgatccgctaaggaattagctgattccgcaatggttcgtttgattgatagaaaagaacttcaaaactatctggatgattacaatcagaaaataattgaagatttccagtcagaatcatga

SEQ ID NO: 85655 - DNA, 453 bp, Citrobacter koseri
atgaataccgatttgatgcccaatttctggaagctgtcacatggctggaaggagttctcattcctggatatggtcgaatgtattgatgaaaagctcgtctacattcaccgcacgaccgctggtaaagggcagtcttccgtcagccaggcagaggagtttgtaaacgctccgattggtgattacttctacctgacccacggtaatcagggtgtatacctgcttggtcagttcactggcccggttaactatttcacaaaacacagtgatggttggatggacaggccattccggctgatccacaaagctaatgccagagaggcgtattatggtgtcgagaaatggtggacacctaatcacaactctacctttgttaaggttccgcaccacgaatatgatttatttgaagaactgatattgacgccctatttcaatattaacctaaaagatttttag

SEQ ID NO: 85656 - DNA, 495 bp, Citrobacter koseri
atgaaaagacttattttagctttagtcattggagcatcgttttctgcaaacgctggtgtagagaaagtcggttcgtggattaccaagtcagagacaaataagatgactgaccagactgacttcgtagctcttaatacatcgccggacacctacaacaaagcgggttcaacccgtgagacaactctcgtactgcgttgcagcgacaataagacggatgtctatttatcattcagcgactatatggggtcagatagcccaagaataacaatgcgacttgatgacggaaaaccagttaagaaaacgtggggtggcggggaaggcggtgatgcggcatttgctccgcagccaatacaatttataaaggaattggctaaacataaaaaagtaatatttggttttgaaccttacggaaccacgatgcaagtagttgaatttgacctgtcagaaattgataaagttttggaaaatttatcacaggcttgtaagtggaaataa

SEQ ID NO: 85657 - DNA, 231 bp, Citrobacter koseri
atgctagggcgcggaaccatttacgacatgcttttttgggtactcatcctcttagttctttatgtttttgtttttgcgaagaaccgtttatcagtagcaagtaatgaggaaaaggagaccatgatggataaaaacctgtatatctatgttttatcgttttttgaactggtagcaaatggcatcacaggattggtagtcaattcagcatgcggatctactccgctaacctaa

SEQ ID NO: 85658 - DNA, 573 bp, Citrobacter koseri
atgatgacaaatatcccttacgattattttctaagtgccgatgataagcttgttgaatttctcgagagacagggcgaggagtgcatcaaagagatcgagcaatcaaatgctattaacagagagaacggttacaagctgctaggcatcctcattgtaggcattggttcttcatttttattgctgacgcagaataagcagccttatttcatgactcttgggcttggggtttttatactgtactgggctgcctgcgctatttatttggtgtctggggtactttcggtgcaggttcgcgctctccttaactcagctccagcagatctataccctcagctttataagtcatttggtcctgagcattacgatgaactgtcaggtagaggatttaatgctgatcggaccccaattgcagtaatcaggcgcgtccggttggcaaatctgcataatacggctgaagaattatgtgtagttaatgagcgcataaggacaagattggatagggtgaggatcgcgacaatcctcaccccagtttgcgcattagctatttctactgtgggttattttttttcctaa

SEQ ID NO: 85659 - DNA, 330 bp, Citrobacter koseri
atgcaggagtttacctttgcatatctgcgtgaggctcttgtttacgaccatgattccggtttgtttacttggagggttaggccagtaagccacttcagaagcaagaaggcttggaatcagtcaaattctcactttgctgggaaggtggcgggaagcaaggatcctaaacatggatatataagaattaagctttgtgggaaaaatcataaagctcaccgtcttgcatggctttatgtgcatgagcactggccggagggagagattgaccacgttaatggcataagagacgacaaccggattggaaatcttcgcgatgtttctcataaatag

SEQ ID NO: 85660 - DNA, 432 bp, Citrobacter koseri
atgattagtctgactcttaagcaagaggctttctgtcaggcatacatcgagacgggtaatgcttcagaggcttatcggacggcgtatgctgctgacaagatgaagccagaagcagtgcacgttcaagccagtaaattacaggataaccctaagatcgccctaaggctcaaggagcttcagggagagattaagcagcgccataacgttaccgtcgattctctcctcgctgaactggaagaggctcgacaggctgcattaggtgcagagacgccacaatcatcagcagccgtagctgcaacgatgggtaaggccaagctggttggactggataagcaaattatcgatcacacctcatctgatggaacaatggcaactaagccaaccacgattcgcttggtaggagttgacccagccaatggaaagccaagttga

SEQ ID NO: 85661 - DNA, 315 bp, Citrobacter koseri
atgtctttttccataaaacctgacggtgattttgagtacattcttgatggtgaggttcatcaagctgaaattgaagaagttggcttgcctgtaaaaacagctgatcgccgtttcaaagaagataccgaaacttacgcgtttaaatttgccgccactttagctgatggcaatgttgttacgtgggctgtaaacgtagatgttggtgacaccatgtatcatgacaccagttcaagcggtgttttgaacctgccaaaaggggttgaagtagagcgtgaccctgaattcgtgtgccatcctgaggaagatgacgagtaa

SEQ ID NO: 85662 - DNA, 675 bp, Citrobacter koseri
atgttttggtgtggggtttcagttagtacaatttatttttttgttcttggtataacaatacataagttaaatctagagcccatgagtagttggaatgagtttggcgactttcttgctggggctttttctccagtcgcctttttttggctggtgctaggctatcttcagcagcaaaaagagttgcagcaaaacactaaggctttagaactgcaagcggaagaattaagaaattctgttgaacagtacaaagagatggttgcggttgctaaagatcaacttattagcgatagaactaattctgaaaacgcaagaattgaaaaggaaaatcaatttaagcccatcatctttgccccaacaattgcgccaggtttgatatatggaggagatacttacaaataccgtgggcaacttattgtagcaaaagcggatgtaatcaaccttcaggttaaaacgacgccagagttcaaaccttttcacttatttaataaagaacttgcaagtcctggaaccatcactttgggagagtccccagagattaaatataacaatctcccaaaaagtattgtattaacaatggcatacaaatctgtttcaggtgtaagttatatagacgaatatacatatattctcaaagatggcggggtttactcaataattgatgataaactcttatag

SEQ ID NO: 85663 - DNA, 690 bp, Citrobacter koseri
atgaacagtcagcaactggaatacgtacgtcagcaactcattgtggcgactgcagatcttagcggggcgactaaagggcaactggtagctttcgccgagaacgcgcaattcaccgctacggcgcgaagccggggcaggaagaaagtctatgacgtgcagaaaaagcgcatggttaaccctgatagtccgccgatgagtggctgccagtcccgcgccaagggctcgtcaatcgcgctggtatgccaagtagagttcattaccgcatcgtggcgccgtgctgtcctgtcgctggaagatcaccagaaagcgtggctgctgtggaactacagcgagaatatccgcttcgaataccaggtgtcgatcactcagtgggcatgggctgagttccgggagctactcggatcgaagaaggttgctggcaagaccatggagcggcttaagaaactgatatggctggcggcgcaggacgtgaaagcagagttggcgggcaaggatgtgtatcagcaccaggacctggcagcactgtgtggtgttaaaccggataactggtgtcataactacgccgactattggcgggccatgtgcaccatctttaagcggcttgatgctgattcccttcggtgcactgtgagaacacgatcacaacaaaaggcgactttttcggagcatggtattgcaaaagtcaattaa

SEQ ID NO: 85664 - DNA, 297 bp, Citrobacter koseri
atgaaagggatagaagctattagattttttggatcaccgtcaaaccatgagtttacggaaattgttgttttttctgattcagaattcaaaaatgcccctaatgggtgcccaacgggaacagattctatttgggaatatttcagaatacacggtgattataaagggatgacggaatgcgctattgatgaaaatggttttctttttgggtttaaaaatggcaatgtagtccttctatctgacgtagagtgtcaaatgaacgggaaatattacaaaagggaagatcgcactaaatcctga

SEQ ID NO: 85665 - DNA, 303 bp, Citrobacter koseri
atgagattgctctgtgtattgccactccttatttccaccatgtcggtagccgatgattttaattttgggtcaccgatatctcaatgcttgaacaggaacactatcccctatatcgatacaaaaagggatgcgactgaaatagtaaattccgcatataaaatatgcgctaaagaggtatctgactgggaaagtgagcgcgatgttctgcctcaagaaatgcgagtgcggcaaagtaaagagctacgtgatttctatgtacacatgatagatacgcgccgagcattcaatgcaagcaaacactag

SEQ ID NO: 85666 - DNA, 255 bp, Citrobacter koseri
atgagtaagttaaacatagcagcaaggaaccaggaagagcgcgacaaggttaacgttgaccttgctgcttcaggtgtcgcgtacaaagagcgcctgaacatggcggttatcgctgagcaggtagcgagagaacaaccagagcacctgcgcgagtattttatggagcgggtccggcactatcgagagcagagcattaatctaccgagagcttccgatccgcgttacaccgaaatggcggaggctaataaaaaatga

SEQ ID NO: 85667 - DNA, 399 bp, Citrobacter koseri
atgaacgacagatatcgaagcaagcgagactttcatccttttgatccgtacataaaatggctggcaaatcgtgttttcatgcttgcatcctggatagcaataatggcgttaggaatatttctttccgaatattattcacagtgggccatccttccaagatttggtgcaattggaataatgattggtacattactaacgctctctccgctttttgcagatgggatttatctgtctcaagctgaggcatttggttttgcagatcttgatgaggatgggaagacatcggtaacgtcggaagaaggtagaaaggtctcaatcaacattttttggggagtgatattaatagtattgtcttccttggttaatgcttttggtgactatcttggtgaatacctatga

SEQ ID NO: 85668 - DNA, 1047 bp, Citrobacter koseri
atgcttgacttcatccgtgacatttacgcatctttccgccagacatctcttgagcgagtgaaaagcccgttccttggtgcatttgtattctcatggtttggttttaactggcaaatgctgacaattcttttctttagcaaaaatgatattgaaaaacgcttgttttatatcgatgaaaaattcggtattgaaagttttattattggcccacttttcacatcagccttaatcgctttcctgctacctcaaataaacaagatagtcacgaaaatacaagccaagcccaatactgatactgtggagatgagtcttgaatcaaaaataaagatcgctaaaaaacagcaagagattgccgaaattgaagccagaaaaaaacttgctgaaaaaaaagaagaaaaatacatagaggagagcatttatcagataaaaaaagaacatgatgaagctattcgagatctggaacttgcccgccgccaatataaagagatatcttcaaagctgaacgaagcggcgaaatcagctgcggaatctcagagtcaactcactgtcgaaaaagaagccagagccaatactgaaaaggaaatccttttaatcaaggagcaagccaaggtgttaactgaaaaattgatttcggctaacaatgataataataaagcaaaagtagaaattgctggccttatgcgtgaaaatgatgtattaaaagaacaaaacttagaaaccaaatcatataacaatcatctattaggtgagctaagtttcgtaagtgaaaaaattcctcaaattgtgagactcgtaaatatcgacggtaaaatggaaataacattcaataaaaccaattatgataaagtactgagcaccatgaacttatatgatataaatggttttacacaggatcaaaatgattctgcgtcctttgatgaacatcagtttaaaggccaaactatccaaggtaaaaataccaatttaaaaaatagtgttctaaaaagcaaaaaagataacaattatatcattgcacacaacgaactccgatccaatgatgaaaaatga

SEQ ID NO: 85669 - DNA, 348 bp, Citrobacter koseri
atgactgacaaatgcgcgttgcgtgaagagttcaatacgatgcaggagtgctacagcgacccggctgaccgcgaccgtcaggttatttacatcgccgcagaagcgctgctggatgagctggaagccgataaagagcaaatcaagacactcgaaagccgaaactgtcaacagagaggaatcatcttatcagcgcgtcaatttatcagtgaatacgcagtgcgtggtgatgctggtgctgaagagttcgtgaaggtaatcgaccgcgccgctggtcatcaatataggtactgcgatgctgatgacgtttgcttttccgatcagaaaagagttaacgacccgcgccagtag

SEQ ID NO: 85670 - DNA, 414 bp, Citrobacter koseri
atgatggacagcataaaacaacgcatcgtcagctacgtgaaagccaatcagccagtaagcgtagcagacatgatccgcgatttgagtatcggtcgctcccgttactacgaggaagccaaagcgctgagaagacttggcatgttgtggagcgtatccggcatcggtgtattcgccaacgaagccgaccatcagacctggctcaatcacggtggcagggaagcaatttcacgtcgagcggtcgaggcaaatgccgctggccagcaagccaaaggcatcgtgaaagcaccggctgacaaagacgaagcgaagatgttcatgccctacaacccggataaaaacggggtggtggcggagttcatgaaaagcgaagcgcatcagcgcctgatgatggtttacggaagggtagggacatga

SEQ ID NO: 85671 - DNA, 945 bp, Citrobacter koseri
atggaagcatgtgggattgcggaaacagacgatatgaagttcagaattgtttatgatgggccggcactggacaaccatgaaatggatgttcgtgatcttgctcctgctcttctggctttatctgatgtgtttgaagaagcaggcaagaccttatacggaaagaaagctattgttaatgtaaaagttaatgcctcttttaaggcgggctcctttggcattgacttacttgcaagctctccatcatggcttaaaagtgcagtcgaattcttttcaggggatacagcctctgcaactctcaatctgattgcttttctcggattctgcaaggttgcaggtggtaagactgccaagggattaatagaccttattaaatggattggcccaaggaaagttaggaaaatccacaatttgcctgataataatgtgcaaattttcattgatgatgagtctgaagtttttgaaaaagaagttattgatttatataaaaattataaactcagagaagctttacaggaagtaatagcaaaaccacttgaaaatgatggaattgattcatttgcagcaacggcagatgatggtaaaacatttgtctcagtcacaaaaaaccaatctgattacttctatgttgagcggccagttgattcaatactctctgaaagcactgtggaaaaagcattacaaattataaacatatcttttcatgagggtaataaatggagattttcagatggaagttcatcaggttttttggctgaaatatcagatgaaaaatttttatctgatatcgactcaatgaaactcaacttttctaagggcgatatgctgctcgttgatctcaaggtgactcaatacatgtcaggagaaagtattaagacaatgtatgaggtcgttcatgttaagaagcagataaatccccagagacaaatagaattcccatttgaataa

SEQ ID NO: 85672 - DNA, 255 bp, Citrobacter koseri
atggaaatgaattttggtaatgctgttaatgcaatggaagcagggaaaaaggtagctcgaaaaggatggagcggaaaaggaatgtttcttttcctcgtcgctggtgatgcgtggggattcgaaagcgacattgaaggaattgacggtctttacggcgcgccatttatttgcatgaaaacagctgataacaagctaataccttggctagctagtcaatctgatgttttggctagcgattggcaggaagttaactaa

SEQ ID NO: 85673 - DNA, 156 bp, Citrobacter koseri
atggtaacccagcaaaacggaatgctgatggttgccttgatttgcctgttgtatgacctgcatccggcagacctcgaatcactggcccaccagctcgcagagtttgacgcagttaacgaccaccacacggagatgaagcatgttgcgagtaattga

SEQ ID NO: 85674 - DNA, 885 bp, Citrobacter koseri
atgaaatacggaagcgtgtgcagcggcatagaggtcgcaataccgattgaagagcctaccctgcgccactggaagcgcccgttcctgaaatgggctggcggcaaatattcgctgctgccggaactggatcgcctgatccccgcaggtaaacgactcgttgagccattcgtcgggggcggctcggtattccttaactcagacaagcacgaacgttttctgctggcggacgtcaacgcagatctgattaacctctatcagatgcttgaagtggaccacatcagagtatgctcgcttgccagaatgctgtttgagcgcgccaacattgaagaggcgtacaaagagctacgggatgagtttaataaccagcgcatgggcgcgcctgagcgcgctgctgcctttcttttcctcaatcgccactgcttcaacggactgattcgctacaaccgtgatggtttctttaacgttggctggggtaagtacgaagcgccctattttcctgaagctgagatcaaagcattcaaacagaagtcgcacaaatgcgtgttcatgagcgccggatatcgcaggacgctggcgctgactggtaaaggtgatgtggtttactgcgaccctccatacgagccattaccaggcaccgctgggttcacaaattacgctaccggcgggttctcatgggatgaccaaattttcctagtggaaagctgtgtcgcagcccaccagcgaggcgcgaaagttctcatcagtaactcaacagcgcctcgcgtccttgacctttacgagcggcacggtttcaccattcaccatgtatctgcccgtcgcgccatatccagcaatggcagcaccagaggaatagcgaaggatatcgtcgccacactgggagtttaa

SEQ ID NO: 85675 - DNA, 300 bp, Citrobacter koseri
atggaagattttaaaggcactaaaggtaattggtcatatagcaaagagaccggaacaattcgcggtgatggtggccttctcgctgagttactgattaatggctccgaagaccataacggcacgctcatggctgccgctcccgaattgctggaagcactgcaattatcacttaccgccatgaatgaaatgggtgacatcctaaattttcacgacatggcagatgcagaatcagtagagaagctcactccagcatttgaaatggctagaactgctatcaacaaagcactcggtaaggaataa

SEQ ID NO: 85676 - DNA, 633 bp, Citrobacter koseri
atgatttttaacggcgagatggtgcgcgccatcctcgacggacgaaagacgcagacacggcggatcatgaaggtccagccagacactccagagtttggcttgcgatgcattattgaatcgtccatagccaatgagatcggactgtatttctggtctcaagaagacgccagaggaattaaagcgcgctcaaagcagttttcatgcccatgcggtgacgtcggcgatcgcatctggttgcgtgaaacatttggtgactgcggtgagcaccttgtctaccgcgctgatagtgacgacggtgcgcaatgcaaggtcaagcgctggacgccatcaatccacatgccgcgctgggccagccgcatcacgctggagattgccgcagtgcgagttgaacggctgaacgatatcagccaagaggatgcgcaggctgaaggcatggagcttaccggctggcggccaacatactctgacccggatagcggcggtgaagtctggactccatatgacaactttgcgcagctgtgggaatccatctacggcgaggaaagttggcaggccaatccgtgggtctgggtaatcgaatttaaggtggtccccaatgttccagctaattcaacggggtcatatttacgctga

SEQ ID NO: 85677 - DNA, 1824 bp, Citrobacter koseri
gtgactaaggcatacatctatacaagggtatcaacattacagcagatcgatgggtttggtattgacaggcaaatcaatacgttaatggacttccttgagaatgcagaactaccaaaggaacttggctatcagttagacccgaagaactatgaaattcttgattctgatgaagggttgagtggctacaaaggtcacaacttcacaaaagggtcactcggaaaattcaaaagtcgagtagccaacggggagataacatcagggtgtttgttaatagagtccgttgataggttttccaggagacaaggatatgatgcaattgatgaatttacattcttactcaagcgtaatatcgatattattgaagtcgaaacggagcaaattttcagctacagacttgatcacaagctgacgcagttatctacaagcattgaaagggcatatcaagaaagcaaacgcaaatcgagattgatcaccaaaagctgggcaaacctaaaacgcaaagccgttgatgagggcatagcactaaagcgtaatgtaccttactggctggctcttgatggagatcattatcgactaaacacatcagaagccgaacgcatcaggactatatttaatgattacgctaacggtaaaggtgttaccgctattgttcgcgacttaaataaagccggtggtaagtatgatgagaaggcattcagtacaaattttataaatgtaatgctcagagataggcgtttaattggttggttgacaggaaagcgtaaaaaagatgagacaatagcggattggaaattacgggagataaagatttatcccgaagttattgatgcaaatctatttgaattagtacaacgaagaattgatgctaatgctgtgacaaaagaagtacgatcttcatcaaaacaagtttcattattcaacggggtagcacgttgtggtatttgcaatgaaccattagtgggccattttacccaaaagggaagttatttgcgttgtttaggtaaacgttcaaaattgggcacctgcaatagtagtttgattcggtataaagagtgtgagcttgcagtaatcaattatgttaaaaatatagattttaaatcaatatacggtaataataaaaacaatacgcctatgataaatttgctacaacaaaagatgtcggttgctacggctgaaataaatggaatagaatcattgctttatacatcagataatagctcagaaattgtggcgttgaccaaggcaagacgcgagaaggttaaagaaagagataaaattagttacgaattaacagagctaatgcgtactgtcgatgtctgcgatgaagattttattttagatttggaatcaatttgtgatcataacaatgctgaattacgcgaaaaatttaatggtgttttaaagaaagtaattaaatcaataaaaataattcaggataatggcagtgataataagatctttattattaaatttgagtatcatactgactacgctatgcattgtgttgcattaaatttagatggtagtctgattggatatagctacatagaagacaaaggtgaactgtgcctaaaatcatcctgtatggatgttaattttaaaacaggtgatattactactaaacatgtacctgattacattgaggcgttgattgttaaatcaacactggaaaacattgagcaagtattaaatgaatttgatgacaatttaaaaaaattgaaattacatgaactgtataaaactgtgttgtgttcttgcaaaaatttgaaatgtaatgtttggttgttaatgacgtgttttaaatttgaccaagataattattaa

SEQ ID NO: 85678 - DNA, 663 bp, Citrobacter koseri
atgattgttagtgttactaactgttttttaaggggatttatggattttttaattgttgtaatcatctgtttagcccttaccgccgttacatacaaaacatggtcaaaacgctgtatcagtagagggaaaggaagaaccagcactgtaattacctctctattactaagtttcgtggtacttacagttaccttcgtcattggcgtcatcagtttcattccggcaaaatcaggggctgtgagtaccgttacagaatccatgccatctgagcgagaacagaaggcaaaaaggtatatcgagagtaaaattaacagcctcaataggaatagtggtaagtacttagtagctgaaaatatctacaagcaacatggcgtttgggttgatgattatattgctattcaaaagaaatcatgctcacgtgaattcaatcgacttttagctgctaatgcagcatctgagcaagccattgagtactggaatcaaacctctgattctttgacccggtcgggcgtttcgccatttgcaggggggagaaaccctactacagatcccgaaattcaaagaaccaggaatgacatcgattttgctcgttcccaattagataaatgtggtgtagctcatcttaatgagatagaacaccgtgttacagtacaaattgataattaa

SEQ ID NO: 85679 - DNA, 858 bp, Citrobacter koseri
atgtattttaaagcggtaattataagttcaagcttactattgtgtttatcagcctctgctgaagaactgaagcaagatattgatagtaaattaaaaaaatgcaaaatggatgctgttagtactattgacttacagaattgctatatcaaagctacaactgaatgggatttagaactggggaaccagtacaaactactaatgaatggtcaatctgataacgtgcgtattgctctcagagactcacaaagacaatggattaaatatagagatcagtatgcttctgccatggatgtattctacaaacaacaaggtggtactatttcatcattaaatgttgctgaatctaaactcaacattactcgtgataaagcaattgatctttatcgattaagaaatagtagtgatttatcatcgccagcaacggtagacaataataaaatagaaagcattgaagttaataatagcgttggtgaagaaaaggtaaatgaaaaagttgtttcaaccgtatcaaataatgatgcctccgattcaaaggtacgggtgtgtaaatttgtaatacaagctgataaaactattaaggaaatgcctgggttcttcgcagagaataaaatgactgtattagataaagggacacaattcacagtacttactggcgattattttaatataccagataaattaattagccccgatcatttaacttcagtaaaaaataaaatgttcggcacaggaagtcaacaaaaggatggtactgtttcaactttttctaaagatagctctaattatgtagtcactacgtgggcgaatacagcatttaagcacacaaaatttcaattaactctttatgcttgtaaatga

SEQ ID NO: 85680 - DNA, 567 bp, Citrobacter koseri
atggcacacgtcgcttatattcgcgtatccagcttgcaacaaaacagcgatcgacaattagcagatactgggatcacctttgacaaaacattcactgagaaagtaagtgcgaaagataccaatcgtgaagcattcttagcgatgatggagtacttacgcgagggggatactttacatgtgcatgacatcagccgccttgcccgtaatacagcagaccttctatcaaccgtagatgcattgactaaacgaggtgtcgcgatccagttttataaagaaggaattaaaacaggggacaactccccaacaggtaatcttgttttaacgttacttgggggaatcgctcaaatggaacgtgagcaaatgctacttcgtcagcgtgaagggtatgaagcggctaaagctgctgggcgtatttccgggcggggaaatggcagaagcatcccgcgtactgaaatcgtcgcggcattgacatctggcggaagtgttcgctctgtagctgctgaattcggtgtaagtaccaataccatcagccgcataaagaaagaaatgaacagtgtagcggcttga

SEQ ID NO: 85681 - DNA, 531 bp, Citrobacter koseri
atgttagatgtacttatgcgacatgcggttcaaacttttttccagaaagagcgggctaatattctcaatggagtagccgaaagaaatttgtgtgctcgtttagctctttatatcgaattggaaatggagcaagttggcttacagggatattatgctgatgttgaatacaataggaaacaaaatggagctgtaaaaacgataatggatgatgagtaccaaataattagaatcaattgtgacctcatccttcacagtcgtggtgaaattatacagagagataatctgattgcagtcgaaatgaagaaaattgaaaggccgcaatatgaaaaagatagtgacatcaatagactccgggcaatgacgaaaaaaagttatgatgatatatggtcatttgatggagaaacgcacccagagcatgtatgtggttacgaatacggatatttccttgaaattgataacgttaataggagttataatgttatcactgttgttgaaggtgaagtaattaatcaatctaatttcttattttga

SEQ ID NO: 85682 - DNA, 951 bp, Citrobacter koseri
atgaacttagtggatttaagaagtgaagtcatcaatataatttcgaacataactggttcgcgtttgatttttttattagatgacgggactaactacatacccaaaatttccaaagtagatcctacatcactaaaaagcattactactggtttcgtagaaagattaaagagtgaagtcattgacaatacggatttaacattaccattgctttcaaatattgatgagcgtaaaaacgctttatatcaatttgattaccaaaaacagccacaagagtttgcagcattggattcagcagcaaaactaccgccaaactcacaagaatattacattcccactccctcttttgaagatgttaaagcaattgccttcattatctatggcaatggtaaaacaatatcgctttacaagaacaaaacacctctgactgtattgaaaaatacatctaacctcgtaaattttgtaatgaataaacaaggaatccttgaagaactgacagaaaatgtgtttaagttagattttaattttgaccttttcctattagacggtcaatattatgtcaagaatcatagaacattagaagtagcaatgaaattccatgaaataatatcagaacaagcaacccttgcaatttcctcactggcagactcaggaatgattgatgatattagccatttgcaaaaaagttcttctgaattatcttctgcaagaaaattggcaaaaattgcaaaacattcacctgttttagggaaaattgattgcccttctgtaattagcttcgtttctaaacataaagtactttcaggtgttttaaaattaaatgagagtggcgataaatttatcgtaaaatcgaaggaagctcaaaagcattttattaaactaatgagtgatgattatctggagtctgaactgacaaaaatcctatatgatagtttagcaaaagatgctttatga

SEQ ID NO: 85683 - DNA, 612 bp, Citrobacter koseri
atgaaaatttcagaacagttcaataagttaggactgtacattgtttcgttgatcatgctttttgtgtttgttttgatactaagtgccaaagtaccattctgctttggtagtaattgttctttcatcggtttcaaaactctcatatcttcgaatatagtccctctaatatgtgttgctcttatattattaggggtatattttttcgtaagattcaaaaacataacaaaatataacggacttgattctgttaaaattactgagtgccaaagtgagagctatgaaaacctaacatttcttgcgacatacatagttccttttattggttttagcttcgatgatccgcaaaagaatttcgcttactttcttcttataattgttattggcttaattttcattaaaaccgacaagtattatgccaatccaacgctcgctctttttggttacaaattatacaaagtgagcattactcatgcatcaaatggagaaactaaaaatctaatagccattacaacagataacttagtcgtgggtgattatgtttattacagctttttcgatgaactatttttcatagcaaggaaaaacaatgaacttagtggatttaagaagtga

SEQ ID NO: 85684 - DNA, 744 bp, Citrobacter koseri
atgatgaaagagcgggtctggaactccaagaagtttggtcccggaatattattgtattcatcatcttatttgaaggagcatagctacagtgactctcataaggactttccatcaaatgagaaaagcatcgagttagctaagcttattgaacgttattggagtacattggaggctgaacttctgagagataatgttgctgtcattattcctgaatatatctctatggatgagctttttaaatttcaccttaggtatgcacagaagtgctataaatggggggagttagttatatcagacaatgaggatgttgcatttgaagcatttaaaaaagcatctgagttatttgataaaagcatggggatggtttggtataagatctctgtagataaacaaactaaacttttatctactaggaatagatcaggaagaaacggtggaataaaaaaatctgaaatgtatcgacctattcaggaaaaactggtggaacttatcaatgatttggctcctgaagaaggatggagaagtaaagctgcagcggttaatgttctcattgaacctttgtggctatttatagaggagtcaaaattgaatgttaataagcaggataaaaaataccgaatgccaactaccagtcaggaagccttagccgatactattctgaaatcatggtctacaaatgttgaaagtgtgaggcaggctttcgaggacactgtaagcagaaaaaaaagaactagtcagttgtag

SEQ ID NO: 85685 - DNA, 1515 bp, Citrobacter koseri
atgtctaaaaaaaacagttcaacgcaaaacatagaactctgtcttaaattccagacacttcccacttttgcacaacagttaataagttacataaattataaaacaggagctgccgccgagcttattttaatagtgttacttgggataatggcatttgcttgccaggataaatttgatattcagcttaaacatgggaaaacctttacatcgctttatcttctgtttttagcaaaatcaggcagcaggaaatcaacagtattcaggttgttgatggaggaaatctatcggctggaaaaagagttgaaagatgattttctgttaaaggagaaagtttatgagcagaaatacgcatcctgggaagtagagttaaaagagtataaaaaacaatacagtaaagctattcgtcagaagatcgatgtaactgaagcgcttgaagcgctggaggagtgccaaagaagaaaaccagtagttccagcaagaaagtatcttactaagaacgattcaacaagtgagggacttagaaagattttagcacagggatctccgtcgttgatgctcggatctgatgaggccggagggctattcgacggtaatcttttccgcaatacaccagttctcaactctctttggggagaagggaaaattgcagacagcagggcttcccgtgacagctacgatgtttatgatgcacggctaactatgctgctgacgatgcaacctggtttgtttgatggctttcttgaaaaacagggaaaaaaagcaaaagactcaggattgttagctcgtttattacttattgacatggaacagttacctgaactgtgctgtatccctgatgctggtacatggcctgatgagccaggaattgaagaatttttctctattctcaccagacacttgcaagatgggatggtgcgtagagaaaaaaatgaagaacggatatgtattactttttcaccagaggctcaagttctgtggaattcacagagtgaatacattcagaaaaaaataaaaaaaggaggggaactacaacatcatgatgattttggtgctcgatttatggagcactcctcgagaattgcagcagtaatgcaaatgtttatcacacctgattcacgaataattactaaggatacttttatgtcagctttgaaaataacacaatgttttacgaatcatgttatctcgaaggttgaatctactcgagagcctagagatgacgaaaaattattgacgtatcttgaggataatcttgtcaataatggctcttacgaatttaggcagaatgatattatcaaaaaaggcccatattcattaaggcgatcagaacggctaatgtctgctttgaataaacttgaagctgaaggggttgtacaattattcaaaagaggcgggactaattatgtaaaattcatcaaatcgaaaatggaggttagagaactggcggagaaaactaacactcctattttacaatcaggatcacttgcgataagtaaactgcctatacctgaataa

SEQ ID NO: 85686 - DNA, 699 bp, Citrobacter koseri
atggaatcacaatattcacttaccaacgaagagaccgatgacttgatagaaatagcctccagaaagtatagatcacccattgacctcaatattctcaacccactacttaacatggtctacggcactttggagcagaataaccgaatactaggtattcgttctgatctgagatttgcccagtctcatgtaccaggagaacctgatctacccctgtgcttccagcgcgatgatacgcaggcaatctctcgcttcttcgagtcactgaaaagccagctacgagcagatcataaccggtccgggagaccgggtaacccaacgttgctatcttatggatggtgcagagaacgtgacacaagcgagcatccccattaccacctgatgttgttgtttaatgcagatgtgtatggatacttgggcaattaccaagaactcaatgttaaaaatatggcaacccgaatacagaaagcctggtgcagtgctataggacttgctcacgaagattactcaacattagctgaattcccacctaatgctgtttacaggtttagcagattcgatgctttggatcgtagcccagtctactgggatttcctgattcgactggcgtacttagccaaaaccagaactaaggatgcccacagcggttaccgcaactttggcgcaagccagtgtccacgcttaggcggattagcctgttaa

SEQ ID NO: 85687 - DNA, 3627 bp, Citrobacter koseri
atggccgataatgatcgagaacgactacaaatagcacgtcaggtacgaaatacccttgctgttgaaaataccttgtctgcaatacaggcgcgtgcatttgtcaggtgtttgcaaacaatctgggaggtgccgcttatccattggaacgagcaggagtccgaagaacagtttgctgatgcccggcgtttgcttcatgcagcggagatttatcgccaaattgagggaaagtattcgctcggtgcgattgactgctaccggcgtgctggtgagcttcttgagtggttatcgcgagcagaggacaagcttcgactaatcgcgccgattgaattgtttgccgcggcagcgctccaacttggtggattgcctgcgatggctacaggcctacttcggcaagttgatttgggtaaccctggttcacaactctatgccagttttttgcaggcagattttgatggagtagtgcaagtcgtgatggagttctggggcaaacatccagagctcactggtcgagatgcaccgcgtaagctgctcttggattcagaggacgaaggccgaatagcttggtacttcaccaccgaacttgtccgttgcatcggactgttcgccgaatcaatgcgacggggggacagtgttcggctcgcgcgcgcgatcgaaaagctcaatgcattggaaaaaatatccacacggacgtttagtgaagatgcctcgttactcattacactcttgtgtgcagttgctgataattatcgagaggcaagcatctatcttcctgtgaagcgtctggcggacaagaaagctgaccgaactacgagattgctgcgttttgctcgagatcaattcagtcgtggtcgtggagttctttggccttcccagcgtgatgggctgaaaaggctactgcgtaactcatccttcgcgctttgcacacctactggttcggggaaaacattagtcgcaaatctagctttggtgaaagagctacttcttcatcctgacgagaatataaccgatccgatggctctatatttggtcccatctagagcgcttgcgggggaagtagaaactaaattgcgaagtgaattaggtgaagatctgatcatcactggtctttatgggggggcggattggggaattacagactattggcttaacgctgacatgccgaccgttctaatcgccacagttgagaaggctgaagcgttgatgcgttacgtggggcctcttattttggcacgtctgcgcttgcttgtattggatgaggcgcatcaagttgtaccggaggacaacgacaggacgcgtgaggcatttgcggatcatagcagtcgctctctccggcttgagggattcgtctcgcggttgctttcgctggctccggatattgcccgaatcgcacttacggcagttgcaggtggcggtgctacgcctgtagcacgatggactgaagggaggtctgacgcggtggcagttggaacacagtatcagagcacgcgtcaactgataggtattctcgaaactgcgccagagcagtcaggccgtatcctactggagataatgaatggacaagcactcgatgtgagagatcgagatgccccagtttatctgccattacgtactcccccaatagcaccgcttcccgcaaccatgcgaaatagtctgtatcggttcaatgaattaagcgtattgtggacagctttacatcttgttgacgacgagagacgaatactgatatctgtggcacaagaacctgaaaaaacgatgcgttggtttaaagaggctttagagcttcctacatgggcctcactaccaccttttattgtacctgctgggagacgtcgtgagcggtttaacgaggctcgagctgtaaccgtcgactattgcggtccaaattcctatgaagttgcgttattggatcgagggatcgcaactagtcacggtcagatgcctcaacggcttcgccgacttatgactgagatgatcgaccagcgcatctgcccaatcacggtagcaactgcaacattgactgaaggtgtcaatttgccatttgatattattttcttgacgtccctgaagcggcgttcgtttgattccataacccgaagaccaattattacacccctttctacggctgagttccgaaacttagcggggcgggcgggacgtcctggcgcaagtaagggaatggaaggtatgaccttggttgctataccacgaaatgtctctgccacggcccgtacaatgcgggtaacccaacaaaagcaacgtagagaactcattgccgactatcgcttgttgcgtgggcgtttattagatgacgcgagggatgctcaggttgtctccagtccacttgccctattgattgatacgattgctgcacgcgctgcggaactgtttggaatagaaggtgaagatttcttggaatggcttgactttgcgagcccaggtgaaataagcgatatggctgggagagccgaaacaatccctattgctcgccttgccgatagtctggacgaacttgatggagttttgctaagcgcgatagaagaattaaaccaaggacaggctcaggaattgactgctatgcaggctgaagtgcaccttgttcagttgtggcaaaaaacgtttacaaatgttgtcgcagcgcaagaagaatggcttgaaaagacttttgtgaggcgcgggcgggcacttatcgacaatatctacccagatagtgatgaacggaaaaaactttacctctacggttttacgccttatgtcggccgtcgcttcgaagcagtggcgcagaaaatatacgagttgattgtgcaggcaattaactatggtagtgccaccgatgctgagcgtttggcactcttcgagaacattggtgaactggttgctaatgatcgaggatttggcttccgtattcgcaacacggcaactgaccagcgtcttctagacgattggccaagcctcttatcatggtggatgaaaggaaccgttgcagattttccagctcctggcgacctacgggcgtggcaacgattcgttaccgataatcttgagtttcgattgggcgtggctattggagccgtagttgctagagcttggactaacggggaaggggatccgctggctgtaccaacgttagagaagtggcgtgctacaacgggattgccgtggttcggtttctgggctcgagaattattacgttggggtacacttgacccatttgttgcatttgttctggcacagggactggcaaaaacgcgaaatgaagcgatagaactccgtgcagaatttgagaaatggcttaacgaggggtatgaaaaccttgaagatgaagacatgattgatcctcaattattcctcaaatggcaacgcagccagcaacacaacagggtaaagcaagccgaaagtggagtggaaaacgcggagctgacaggtacggacgggaaattgaaacgctatgccgtcgtccctgttctacagggcaacactattcattggatagatgcagcaggttatgaactcgcaaaatcgcgtaatgaagaaggggtatactctccagatgcgaaccgtaacgatttcgagcttcgactgcagcatcatatagcgacagtggagcgtacttttaaagtccgaagttaa

SEQ ID NO: 85688 - DNA, 960 bp, Citrobacter koseri
atgcatacatgtccacctccgaagagggcgatcaatagttggttgaaagaatatccctcggtggagggcaactatggccatctgctccttgagcaaaaagaagatctggcaccagatctggccagtgcacttattccctattttgagtcagcgcatctggacgcccgtgattatttctgcgagcagatcggaattgaccttcatccagatgcagaaaaggacgatgaagatgaggttgaactactctatcctcaatgtctgccaatgagtgctcgccggggcctctttggtgaagtaatggcagggatgcttaccgagcactatacctacgttggtaaccacaaatgggatataccaatttttctatttcgttatcatgccgatgtcgaaaagtatttgttcgatcttgcccgagacacatcccgtacgcgacaggtttttggacggtttggttcggactttctcggtctatgtctggatagtaacggaaatgtagttcgatttattgcgggtgaggcaaaatggcgcgacgccttgaacaaggcgacgatcgacgatttaatgcttggaaagtgggtcacgaacaaaaagactggtgaacgcacccgatcaggcaaaggtatatggttcgaagtaaatcgcgatacgactgttcctcacggtatgagacaacttcaacgtttgctccaagagtgcgatcccgatggtttcagtgcagctatcttgtctatcgatagagcgctagtgatacgaaatcccaaaccattgcctcgtacaaatcttatcctgatcgttggtaacgacgtaccaagccgtggcgaacgttgttccctcatcccatggaaaaagcaaccggaggagtacactgctcctcatgacctacaggtcgtcgaattaatcctttctaatggtgtggatttgatcgaccaaatctatgattcgctatggtccgaggattga

SEQ ID NO: 85689 - DNA, 258 bp, Citrobacter koseri
atgaaatttgaaacttatcagacacccatgaatcgttcggattttgagcatagattccatgtgttggcgcatataatggaagagggtaaatttcatataaattctggtatctctgtagaaagtttaatgatggttcgtaccttgcctaacggcagaatcgactttttgagcgtcgatgaaatggcacgtcttatggcaaatatgatgctgaaaatggctgatatgccagtcgttgctccaccattagaggaatcctag

SEQ ID NO: 85690 - DNA, 2748 bp, Citrobacter koseri
atgattgggtatttcccttcacaattaacaaatttcattgaattaattgaagagcaatttgacaatcagtgtggtatttactctgaaggtttcagagggattcttacgcaggtaatcgacactgttagcctccataaacttgaagctgaaacagaggatagaatatttacattaactcaacgatggcgtaattatgtagtttataacttgaaaaatagagcagagcttattcctgaacttcttacaatagtcccattttttgttaggcttcaggcctcggaagaggctaaatacacttatcaatgtgtattggcacactcgatgggtcctggatggtataaagaggatcagtttagcttactcattacggcgctcctttcgctaggcaatgagactacacccatatctggatttttagcccagacagcagctcttctcgatgccgcaagtggcgaaatgactttccaaaggttcgtgcgttacgccaaaaaagatttcatcaaagctctgtctctccgtggtgatttctcccatgcagttgagtattacatcgtacaaacgtatggcactttagaacagatttatgaagacgcaactgatggtgaaatggacagattgtcacaatttgaaggttcacgatacccaggaaatgctttagatgaacaggacgctgtcttagaaattattatgttagcgattcctgaagctaattggtccatatgctgggcattacttgaaaccttccaatttggtgataataggcatctaaaagactatgcgaaagcatacgctataataatgaacaaaatgcaaggtgatagccaagcacttgaagaaatgttcaatcgcataggccttatttgcgaatcagatgtaattggaactagtcgctctgaattcctttcaacaatatcttctacacttggcttagaattaaaccagagtttcaatgctatgtttggccctattttagctcctaacaagccagatacatttccagagacaccatcttcgtctattacccaaaatgatatcttgttacctggtactttcggtgcacatcaatcaatttctactgcacatgaatctcttgctaatgctgaacggcaattacgtcgaagtaatactattgcggcttgcaaatccgcattggaaggactcagacaacttcaagatggagggtggtcgctttggacaaattcaactgaggagatttctggagccaaatcactactattgaaagcatcaaattctgtcgcggacatcattaagggaatgtctagcttgattgttgatgggcgatatagtgaaaaatggagaattgctgataccttgattgagtggctagcgttctcttcggaactacaatcaaagtctgaattagcggcagtcactattgaccatattcgaaacatggttggtgacgtagacaactatcttccacgctatcatttccttgaggaaagaaataacgattcattatcttcatctcttataaaactccttctacatgcagtgaatcatccctcgtggttgcgcgctgagaaagctgcagaaatgttgatgtggctgatggataccaaagaggaatacattcctgttctgggcccggaagcgtttacaatgaaagcagatctgcatcccgatattatagctggtgccctagatatcttatctaatacagattcaatgaaaatttggaatcttatcaatccatctcttgatttctcgaaaatttgcaagaattgccagcatgcgggtcggtacgctattttaactcgtataattaagcgtgcatcggatgaaggagctcaggatgctacagctaaattacatcagcttgaaatggaaaatctagctacgtctttccatcaaggctcattaatacctaaaagcatgccttgccctacatgggcgaaatgtatagaacttgaatgggaatggatggttgaaaatgcatttatgactgaagaggtattattgaaagcccaatcttacctcgaaaattattgtgcgccattatcactggaagatagtctgactttggaaaaactgttagctgtaggttaccgtgcgaacaatttatatccagaaagatggcgcgccagattacgtatggcgtttcagaatgctctttttttatctaacccgcagcaacagttaaatgagattgggcaagctttttgtgtatacaatccatcagaaatagcctcattgaggattatcggatttgaatcccctacagcgaaatggatcgatatacttaaatctgaagcacaaacatcagagttggcacctattatagatgatcttattttattagacttttacgaacatgtatggatggatggttcttatgtccgtctgcgtgtaacggcttatttggttgacggtgataatatacctcagctgacttctgggcattttttgtcaacggagttacctgatcctgataactcctcgaaacacgatgtcagtacaagagtcattgttcgtaatgcttattttggtagctttacacctgcacttccttcaacccactttattaaactgacgcaagcaccgctagcagagtttcatcgcgcctgttggcgtacaggaagaactccgctaagcatggggggggcacccgaacgagaaggctgttatctggcaatacacgaagacgcactaattctgccgacaggtttacagttaatctgggtttacaatcttaatggccggaatatcttagccttatcacactaa

SEQ ID NO: 85691 - DNA, 2925 bp, Citrobacter koseri
  misc_feature (2889)..(2898): n is a, c, g, or t
atgcttgaagatgaaatcagattagctacctgtcgaattgaatgtggtaaagactcaggatctgggtggctgatagcacccgataaaataattacggcatttcactgtatcgttgatgccgttaatggtaatgcttccatttcagttttttttgattctcatctttctggtacctccttaattgccactattattgatcacgacgacgctttagatgtttgcctcctcgggcttgaacaggaattggatattaatcctctgataatcaaatctgaaaagcctcttaatggaatcccttttcattcatggggatggccagctacaaaattgaccttagggcaccggattgatgggcatatagctcaagttttgtcttctccaaagctcggtatagatattgaaattcacccctctcaggagacatctcttagcaaatatgatggaatgtcaggtgccgcgcttatttgtgagggagtctgtgtaggcgtattttgcgtatcagttgacaaaactattggtgcgatttcgctggcacatattgaggcttttcttaagaaaaatgatctccttacaacaaatagtaattccaaaaaaaataatgaatcttctcttgtcgctcgtgaaaacttcacagacattttcgactcattcattagtcagcgtgacggtaattatgtttttcttgagggtgctcatggcataggaaagtcaaccttttgtatcaattatcaaccccaacaacccgtgcttgagcacttcagtacttacagtttttcatccggaagcaataacataaacgcagtgcagatggcgcagcctttagaatttgtaaactggttaaatgtacaagtttcaaagcttatttctggagtgtcctgcagggttattcaagaagactatgcaaagctaattggtaaaactgaagagttgcttaatcgtgcagggactatattcaaatcgcgcggaaaaattggagtgctcttcattgatggtattgatgaaatagctaagcatagtaaggaaacaatagcagcattttctgggttgttaccaaaggctatatcgtctgggatcgtggtagtgatctcagcaccgggtcacggtcaatttatcggaacttttagccattggctcaatcaaaatgcatgcgtaaccatgcctgcactttcattatacgaatcacgagaattatgtcatcggacactaatttcagaacgaaattcctctatgactatacaaatcatttgtgaacgagctggaggacaccccctttaccttcgttatttaatagaccttgctaatacaggaacagatgatataaatttagctgctcttccactaattgagggcagcattcggaattattacgatgctttatgggcagggctacaaagtgatgctgaagtagtcaatctcctctcaataatagcgagattgcgttggggaataccaatttctcttttcacggagatcctcaatcaggcagagcgctccgtgttaattactacgcttaatcggcttcagcatcttctgcaatcgcctgaaaatacggcaatttatcatgcttcttttactgaattcttgcaggagaaaacatcccttctagaatgcacgattcaaacacgtctgtctgaatattgccaacataatcagaataacagatatgggctaattaatcttattcaccatggtctgcgtgcaaatgatagtcgcactctgttgacagttaatctttgtaatcaaaattgggtagataattgcgtcagcgttggagccaaccctgaccttattctcagtgatatcagacaagcacttgaggctgcgactaagactggcagcctgacagaaacagtacgtcttcttttgctatctcaacggttatattttagatatgacacattattggcgcagtctgcctatcaaagtgcattggcactgatcgcactgggtaaaaatcaggaagcattgcagcatgtagtacgatatgaccaactgctactttcattcaatgaagcactggcgatggcaatatcacttaatgattcaggtgacgaatctgcagcattccgattattggagctcgttgaggtaaggctcgatgatgaatctctttccgaaggggatgatatatccttcggagattttcttagttcgttttcatgtcgagcacagctttacagacttaaaatgatgatgggggataataatgcacgccatcaatctttagcaaatgagaagttttattttcactcagcggaaagtggagtgagtgatgaaaaaaaactaaaattcttgaagtcagaaatgatggtttacaaccatgctacaataatggcacttcagcagcaatacgtctcgattacacatctcagtaaattttaccgtggcccgattgaagattttgctgaaccgcttgtgaaaacaattgttgagtataaacatctctgtgatgattttgatcttttaatatcaactcaactacttcagaatgcattcaatgacttaaaaatattgcttgcaaaaaattggacaccaacgacaccagtgcaccctatgttggtagacttactaattacacttggtgcccccgcagtaataatttcagcgttaacaaaagaaatatgtccaaccccttcaaagataacgtatgttgcagaggatggcgtttcatttgacatagaactattcaaactatcgatggcggattggaaacgcaaggcatttttggatcctgcattcatgtctccacctgcgatttctctctcagaaaataactggaagcttagcattgaagcaatatgtcaaacggtcgcttgggcggagggtgcagcccagcgttgtttagaaaaagatgatactgctggtttagattttgtatggaaagtggtnnnnnnnnnngattatatgaattgctggcaaaattaa

SEQ ID NO: 85692 - DNA, 1194 bp, Citrobacter koseri
atgttaaaaataaagatgtatgcggcgaatgacggtgatgcattccttctgcaatcaacagacactcatatacttattgacggtggatacgcgagcacgttcaaccgagaaattgctaaagatttgcgtacattggcatccgaaaataaacagctagatcttgtcattgtgacccatatagatgcagatcatattggcggtcttgttcgtttattctctgaaaatggagcagctgcgaagccgaatttaattctggtcaaacaaatttggcacaacagtctacgtagccttactactcgctgttgctatgaagtcccttctgatcaatatccacttctgcgagctattaataaacgcggacatccttctgatatggtaaacacaaactctgaagctgaagcagagaaaattagcgctaaacaaggtagtgcacttgccagattaatatttgaaggtggctattcctggaatggtggtaatggagttacccccgttgtcaaaggatactgtcatcattttgaaggctccgcagatagaatctcggtccttactccttcagaaaatcagctgaataagcttctagaattttggaagaaatatttatatcgcgccggtttccgcgtaccttcagattctggagagttaatcgatgatgcattcgagtttactctggaacatatcgaggatgaagctaatgtgaatgtcaacaggatttcctcaactgaaagaaaaagtttggaggaaatctacattgccgatacttctcctacgaacggcagttcaatctcgttagtttttgaggcggacggaaaacgcctattaatgctcgcggatgcttgggcggaggatgtcattcagtcattgcaggaaatggaagctaaaggggtatcaatgctttttgatgcaattaaaatttctcatcacggtagttatcgcaataccagccccgagttactgaaaatgattgatgcgccaatatacttcatctcgactgatgggagtaagcacgatcacccggatgatgcagtacttaacgcaattgttgatagaccatctgaatttactcgtactctttacttcaattactcaacacctgcttcacgcaaacttcatagttatagtgttaaaactaaaaccaaatttttagttattgagaacgtaatagactggattgaaataggaaatgaaaactaa

SEQ ID NO: 85693 - DNA, 864 bp, Citrobacter koseri
atgaatcaatttgaaagtttacagtcactgcagcggtcgctttctggcctgccacagtgggcatcagaacgtattctgaagcaaataaaccagcttactcactatgagcctgtaataggcattatggggaaaaccggcgcaggcaagagcagtctgtgcaatgcgctatttgcaggggacgtttcaccggtcagcgatgtggccgcctgcacacgcgaacctattcgctttcgccttcaggtgggaaaacgctatctaacactggtggatttacccggcgtaggggagtctgagcgaagggatacggagtacgctgcattgtaccgggaacagctcccccagttggacctagtgctgtggattattaaggctgatgaccgggcgctggcggtggatgagtatttttaccgtaaggtaattggtgaggcatatcgacataaggtgatgtttgttatcagtcagtcggacaagatcgagcctgccagcggagataataaaatatccaccgctcagaagcagaacatcagacgcaaaatctgccagctacatgagatgctccagccggtaaatccgatctgtgcggtgtcgctccgtctgcaatggggaatgcgggtgatggcggagcgtatgattcactgcctgccacgggaggccagtagtcaggtggcagtacagctcagtgcgccacttcgtaccgatgccgttaataaaaaagcccgtgacgattttggtgaaacggtcggctcggtactggatacagtaagttccatgcccctgataccggcccaggttcgggcagtcatccagtctgtacgcgacatcgtggtatcggtcgcccttacagtctggaacttcttcttctga

SEQ ID NO: 85694 - DNA, 696 bp, Citrobacter koseri
atgccactgacagagcgccgctacgacaggctggcggtcaggctgtcgctgattatcagccgtcttgtggcgggtgaaacgttagagatgcaaaaactggcaaccgagtttgatgtgtcggtccgtaccctgtaccgggattttcgcgaacgactgatgtatctggacctcgagtgtcatcagggatgctatcgcctgcggaccggtgcaggtccgcagggtgagctggatgtgctcacttttgcataccgggccgggctggccgatatctttccggggctggaccggcgtctggcgggcgcactgctggcatcagatggaaccccttgcctggtgtggcagtcaccacagccgataacggccaccagcccgctggtattttatcggctggtcagcgccatcaccagcagccagcgtgtattgcttctcgcggacggtaaacgttgtgacggactggccccgtaccgtctgatatttctcgacggctgctggtacctcaccggtgaacttaacgggcatataaccgtgcatcctctggcgaccatccatgcagtgacaatcctgaacaccacttttacccctcgaaaacgtctcagtctgttaaccactcaggcaggctttatccgggcacttcctcacttcagctgtatccgtgaagttttgtcacaggttgccgataacgggggatcgggatga

SEQ ID NO: 85695 - DNA, 225 bp, Citrobacter koseri
atgacctggcattacgaaataaatggcgtacgtcacgacaatgtgaccaaagacggcatcaccggcctgattgttcacggtgaactgactgccgccactctggtttggcgacagggaatgacggagtggcaaccggtctccgccaccccactagcttcggtgctacttcagagcgccatacgccagcatatgcccacagcccctgacgcatcaggggctttataa

SEQ ID NO: 85696 - DNA, 909 bp, Citrobacter koseri
atgaaaagaaaatctttctctgcaaatgtgaaatggagttggttggcattgtctgtggcactgatagccccgactgcagcccaggcaaccgccaaaacggcggttgaagccaggaactgtcagtcagaaaacaatacctgcccatatcctttcgacctgtacaaaaccgaccccgcgtacaaaaagtcgtttgatgagaccatgaatcagaatggttttccggcgatgctcgacgagatgaatggtccagcgggtccgatggaaccagtaaaaattgacggtaaagtctacctgaaaggttttatgtgtgaagacggtaactgtggcaaccacaatctgacattcttgtaccagcctgacctccataacttcgtgggcttctacagcaacggtaaagatgggcagtgggttaacaccccaagtgatggtgagttgaaagttttacgtgcattagtaaaaggaacatcggaaccatcacacactccagccgccactaccgtgaccaacgatacaccgccgccggataccatctggggatttattcggggtaacggcgacaccatgtggaagatgtgtgggggtaaacaaagcacctgtacaataattgccaacaccaaatactacgtggcgataatgaatcataagtctgccaaccattgtgccttcggtgatttatatattgccgagcgcagcgctcgtgtctggacacaggcagaaagtgtgacatgtagtcccaatgcctggatccgtaaagggtcgattaaaggaggccaatacctgtctgtggatattggaataggagataccatcgtgaaacagtacccaattggttattggtcggaccaaaaagaattctctggcccaaaccgtccatcctgggaaaaagcaaaacaagcggctaagcagtag

SEQ ID NO: 85697 - DNA, 300 bp, Citrobacter koseri
atggaacgcttctgtgatgagtacagcggtggtatctggtccttttacacgctcagtaatggcggcgcgtttatggcccctgatgctgacgatggtgataaatggcatctgttcaacagcatgaacgccaatgatgcggaaatgagcgtggaagccgcaggtatcgctgtctgcctgattgaatacagccatcacgcctgtcgcaccgaatgcgatgtcatgacggagcactattaccgcctgcgggattacgccctgcagcaccctgagtccagcaccattatgcgcattattgattaa

SEQ ID NO: 85698 - DNA, 585 bp, Citrobacter koseri
atgatcccatcgattaatttcactatcctgaccgatgcattacacgctctgaaagaaggtaatattcgtcgctgcgaatcgctcggatttacttttgacgaaatgaatgctctcaaccaattatcgcttgatgaactatttactgtaagccgagcggcagctacttttgtttcaattactgtccgccatgatgttctgcatcaattactggaacaggcccgccaagaataccagcgacaacagcagattaaccgcgctatccggctgagtggttcaattgcgctgcttaaccactattttggccttacgtctaatgaagtctgccttcgccgacggttgattggcatcagcgtaccttttggccggacacctgaaccgtgtgaagaaacggatgctgctatctggcggcaatggcaacaatgtcgagtagacaaccttgagtcgcctgatgcactgatcgccatgatgcaggtgacggaaacgctgctgccggacgctgaaggcctgtctctcaccaccgtctgcaagcgcatcacactctgcgaacaagaagccgccaacaggagggcatcacatgccagatga

SEQ ID NO: 85699 - DNA, 921 bp, Citrobacter koseri
atgcaagaaaatacgcacaacataaaaagtaacatgaataactggtttaccataaatgaagccaaacaaatagcccgccgggaatcaaaccaagaactatcggacagttgcatttatcgttatgcactttgtggcgacatttctatttcaatatattttcaatcgccggtgatactacgaaagataagaagaacagaacacaagataaaattaacacaattaccctattcatctgtaaatagaatttgctttcttgaaaaaaactgtttcctaaatgacagaaacttaatcctgagcaccgaaggaaaatatatacaccctacacatcgcgttattgacactgatttatatgggtatgagtacgtccttattcaacgcttacttgcacattcacttaacattcctcagcctataacgggcgctaatgagatcaactacggaattacagtttctttgtcaggtaatacatatcagattttagaaaaaatgacattcgaggaacgtataaaaaagcaaatgctgtactttccagaaactctagcgcacagtattaatgaattcatcacaacacagaaaaccagcagactaaacagaaaaggatattttccgatccatgatttacctgcggatgcttgttttgtgatccgtcattctgaacttaaaaaactaaccgccttatatagcggaaaagaagttacatcttccattcctacccgtgtctccactccgttatctcgtttattctggcttgcatgtaagcataatgaaactatcagcccgttaattcgacaaccctataaactcctatccatttttgagcagtgggcttctgatgagggtattactgaccatctgagcggtgacacacttaaaaatgcactgaagcgcggctcaccttcctccacatccttaaatggttaa

SEQ ID NO: 85700 - DNA, 819 bp, Citrobacter koseri
atgcaaaaaactctgcagaaggaagggggcgatacagggcatttattttttcttgaatttggagatattgagaataccgctgaaaacaacatcctgacattaaacaactatgtagttcccttcctggtgattttcagtgggatgcgggcaaaagacaataatgatcgctgtgatatcgataaaaatctggtgaaaagcgatgcggcgacgactggttttcataccctcataggacttcataatgagagtttctgcggtatacgcgatggggtatctaaaacagcgttgctatacggtcatggactcggtgcagaggtcaaaacagttggtgcgtatggagcccttcttcccgaagctaacacaaggcgccttgctacttacgggatgacttcgctcggagagagttggaatatagcacctgcctttctggtgcagagcgacaaggatcgctatgtgaacggaggcagttatagatgggcaacgttcaacctccgcctgatcctggcgttgactgagaattttgaaatgcagtatgaaggaccctataaatatatggatctgcgtactcagggatataacgatcgtcaatcagtcagtggcaacttttataagcagatgatcgcatcaacactgaaagcaggggttatcggtgaattcctgaacgatctgaattacgactatttgcaacatggatggactgggatcatcggttggataattatgccagtaccgatgcctttggctatgacggttttaaatctggcggggaatggaattttgctattcagatggaaacctggttctgaagatagtatttaa

SEQ ID NO: 85701 - DNA, 1371 bp, Citrobacter koseri
atggacattaatgaaattgtaaaacagctgattcctttgctcggtggcaaaggaaatatcgttacagcggcccattgtgctacacgcttacgtctagtgttattagatgactctctggctcaaataacggagcttgataagctggagggggttaagggatgttttcagaattccgggcagatccagattatttttgggggagggctcgtaaataaagttcatgcggaatttatacaggttacgggaaccagtgaggccagtaagaatgatgttgctaatttagctataaagaaacttaatcctttacaaaagattgctcggttgttgtctaatatctttgtcccaattatccctgcaattgttgcatctggtttattaatgggattgctggggatggtaaaatcgtacggatgggccaaacccgacagtgcgatatttattatgctggatatgttcagctctgctgcatttatcatactgccaattctgattggatttacagctgcgcgcgaactcgggggtaacccttatctgggagcaacattaggggggatactgactcacccagcactcacaaatgcttgggggatcgcaagtggtttccatacgatgaatttttttggtatcgaaattgcgatgattgggtatcaggggaccgttttcccggttcttcttgctgtctggtttatgagtattctggagaaaaaattacataaaattgtaccggatgcactggatttgattgttacgccttttttaaccgtcattattaccggttttgttgcactgctggttattggtcctgcaggacgaatgttgggggatggtatctcttttgctttaactaatatgattacccatgcaggctggctggccggtctggtatttggtgggctaagttctgtgattgttataacgggtatccatcacagctttcatgccatcgaagcggggctgttgggcaaccctgctataggagtcaatttcctgctgcctatctggtctatggcgaatgtggcacaggggggggcctgccttgcggtctggtttaaaacccgcgatgtcaggatccgcagtatcgtcattccttcgacatgctctgctatgctcgggatcaccgaagcagctatctttggtattaacttacgctacatgaaaccctttattgccggacttataggaggggctgccggcggggcatgggttgtaggtcatcatgttggcatgacaggcattggcttaaccgcacttcccggactggccattgtgcagaccagttcaatgcttagctatatttcaggcatggtcatcgcattcggtgtggcatttactatttcattagttctgaaatataaaatcgaggccaaataa

SEQ ID NO: 85702 - DNA, 1389 bp, Citrobacter koseri
atgaaagaaattcatttgctgaaacaaacggcaaaatcattaatgtcaggtatgacgttagccacaacagacccccatcgtcctgcatggcacttagcgccaccggtagggcttttaaatgaccctaacggatttatccagtttgaaggtcgctatcatttattttaccaatggaatccgctggcgtgtgctcatggggcaaagttctgggggcactggagttctgaggacctggtccactggtgccatgaagcacctgcgcttattccttctgaggagtatgaggccaatggttgctattcaggttcggcagtcaataataatggtgtattaacgctcatttatacaggtaatgttaaatttggaggtggaaggacagcatggcagtgtctggcagaaatgaacgatcagtatgaatttaccaaacttggtccggtactgggcttgcccgccggctatactggtcatgtcagagacccgaaagtctgggagcatgacggggaatggtggatggttcttggagcccaggatattgcgctgcatgggaaaaccctgttgtttcgttccccagacctgcatttatggtcatttgtcaacgaaatagcgggtagtggattaaacggattaccggcatttggttatatgtgggaatgtccagaccttttccatattgctgatcaggatatactgattgtctgccctcaggggctggaaagtgaaggaatcaggtatctgaatttgttacagagtgggtatttttgtgggactctgaattatgataccggaggataccagcatggcgaatttcatgaactggacttgggctttgatttttatgccccgcaaacgatgtgcagcgaggatggtcgacgccttttgtttggctggatggggatggcggataacgatgaattcagtcaaccgacggtcgaatacggatggattcataccatgacctgtccccgagagcttagctgggaatcaggaaaattgtatcaaaggccggtaaaagaactacagtcgctacgtactgatcgacgtgattttaataatattgccagtcagttgcctaaactcaccacggaaacagcagaatttatgatcacgggggaaggtcagttcaaccttaatttcgccgatatacttcatctgaagtgcgatgagcaggggattactttgatgagaactcatcccgaggggacgagatactggaaaggaaaggtgagttcagtacagatattgtgtgatcgctccagtgtcgagatttttattaatgatggtgagtcagtcatgtcatcaaggtattttccgtctggagagccatttgttcagtttgcaggtgacgcatttcttgaagtgactatctggagactcaagaagatgtgttag

SEQ ID NO: 85703 - DNA, 282 bp, Citrobacter koseri
gtgcttttttgcgcggcctctggacttcaggagggggtactccgttatcttgtgcaacatgggttattgaatagcgggataagattatgcagttttgacgatcactacctgtacgattcacttgctgtttctattgacactgtcgaacagaatgaaatgttgcttgcgtggaattgctttgagctgatgacaaaacttatcaacgaacaaacttatcctcaggtacaacgatggctccccggtatgttgaagctacgttcatatttcggtgagggaaaataa

SEQ ID NO: 85704 - DNA, 804 bp, Citrobacter koseri
atgcaaaatataaaaattgttgcgtcagatcttgatggaactttgttgtcaccggaacatatgttacgtccatttacaaagaaaacgataaaatcccttaaaaacaaaggagtgagttttatctttgcgacaggtcgtcaccatattgacgtagcacaaattcgtaacggattagggatctcttcatatatgattacatcaaatggagcccggattcataatactgatggcgaattgattatgagtaccagtatggaaccagagattgcgagggatttatacaacatcgtctatgacatccctgagatcctcacaaatatctatctggatgatgactggtatattaaccgcgagagtccagaacaggctcagttttttcaggaatctgttttcaattataaactctatcaccctgcaacgttaacaacatccggtgtttctaaaatttattttacctgtgataagcatgaaatccttgtgactcttgaggataaaatcaatcagcggtgggggaataaagtgaacgttactttttcacttcctaccgtacttgaagtcatggatggacaggtctccaaaggagaagctctgaaaaatattcttaaattgatcggtggtgatttaaatgagtgtattgcctttggtgatggtatgaatgattatcagatgctaacattatcagggaaaggttgcatcatgaaaaacgctcattacaagctgaaagaagcattgccggatatggaagtcattggttccaatgccgaagaagccgttgcacattatctttgtaaactgtttgaataa

SEQ ID NO: 85705 - DNA, 1038 bp, Citrobacter koseri
atgcggagtcgtaaaactataaaagaaattgcggaaatttcagggttttccactgcaacggttgacagagtgatcaacggacgagatggggtaaaagatgaaacccgaaaaaagatactcctgaccgctcgccaggtgtcttataaaaatattgctgtcagggaggatgctgcatcaaagcaaatcctcacagccgcgctttttgtacctgatacagacaatgaatttatcaaccggctaatcgcagaaattagagaaaaatgccagtctgatccgacactggctgttgaggttcactgctacgaaaatctgaatgcaacatcactggcgctgtttttgaacagattagataccgggggcatcgatgttgtcggtcttatcggtgtcgatgatccacaggtaagtatcgtcctgaacagaatgattaaaaatgatataaaaatcataacattactaagtacaattagcggtatcacacccgtttgtcatatcggaatgaatgattatgctgctggcagaacagcgggcttgctaatgtcaaggacggtcaatagaacaacaggtaatgtgctggtttttaccgggagccttcagtatcagggacatctgcagcgggaaattggttttcgtagtttaatgcgggaatcgggcattgcgattaccatggcagatgcctacgagacactggaagaccgaagccatacattttcctttgcgaaggagcagctttctggtgttaaaaatattgccggaatttatgttataggaagtggtgctgcagaagtgatagatgctatggatgaactggcattaaatgaaaagcccattttcatatgccacgatcttactgaaagcgtcatgaaaaaattattttctggtaaagttgattatatcattcatcaggacttgcatattgagtctagtaattttatcagggtgcttcacaatattcaatgtgatgctgaatatatctctggtcttttccccgtcagaattaacgtggttacatctgaaaacatttataatgatgaggtataa

SEQ ID NO: 85706 - DNA, 1392 bp, Citrobacter koseri
atgaataaggtcaatctgcggctcgctttcattgcatcacttggcgggctcttatttggatatgaaacagcggtgattgccggtgcaattaaacatctgacaacatatttcgcccttacacctactgaagtcggctgggctgtatccagtgcgttggcaggatcaatggcgggagcgatctgtggtggctggtttatcaatgcgcagggaagaaaaagaacgctgatgattgcagctgttcttatttttgcatcagctgcggggacatccctgacaccaagttttacgcttttctgggttttccgttttattggtgggtttggtgtaggccttgcgtcattaacggtacctgtctatatcagcgaaatatcagcacatgaagtccgcggacgaatgacgggtatttatcagttgatggttacaactgggatccttggtgtttatattgttaacgcctgcattgctgtttccagtaccgatcctatatgggctcttgacttctcatggcgctggatgtttgcttctatggggattcctgcgattctgttttttatcgggctgtttagcattccggaaacaccccactggctcatccggaataacaggatagaagaagcgaagaaggttattactctggtacatggcagtgccagcgaaacacttaatgttgtcagtgcaattgttacatcctttaagcacagtgaaaaacgtcaaagcagtggtaaattattcagtggcgagaaccgattactaactctggttgtttttggtacagccatattggttaactcaacagggataaactcagttttatattacggtaatattttgcttgaaagcatcggtctgggaagtggtaataatgtgtactggcaacagattgccatcggtgttatgttgttttcctcaacatttattgcactgaaatatgtagagcaggctggacgacgtaaattattgttgattggaacagcaggttgcggcctgacaatctgtctgcttggtctgctcatttacctgcatctgacctctatgtggatgctcgtgttaatactggcctacattgtattttttagcgcctttgttggtccgatcttctggattatgttacccgaaatggcacctaaccatttacgcgataaactagtttcatctgcagtacttctcgtgtggttatctaatttctttgtcgcacagacattcccgatgatgaatgataacccagtgttacatagcttcttcaatggtgcatttccgttctttgtgtatgcctttttttgcgccctgtatttcctattgacattaaaattccttccggaaacgaaaaataaaacacttgaagaaattagtttagcactatcacgtaacaaatctcttatcaatgacaattaa

SEQ ID NO: 85707 - DNA, 789 bp, Citrobacter koseri
atgtctctggaaaatagagtaatcgttgtgaccggttcttacgccgggataggttttgccagtgcagaggaaattgtacgtcagggggggaaagtggtgctgacggctacagaacagcatgcgtctcaactacaggctgcctgcaagaagctgggcgaagattccgccagctggatcactgcagatctgtcagtacctgaatcgccggaacttattattcgtcaggcactgacccgattcgggcgtgttgacggcctggtgaacaacgcggcgtattttcccagaaacgatctgcattctgtctcagaatcggtttttgacaccatgatggccgtaaatgtccgtgccccactgtttttgattaaaaaacttgttgctgcaaataaggataaggggcatccggttactgttgtcaacataggctctatcaacgcctactgcgggcaaccagaccttcttggttactccatttcaaaaggggcattgcagaccatgacccgaaacctcgcggatgcccatgcggggcaagatttccgtattaatcagctgaatgtaggctggacgctgacacagagtgaaattgatctccagaaaaagcttgggcggcctgacgactggtaccagcatatatcccccgtttttgcgccaagaggctctattctggctccaaaggaaattgccagccatgttgtattctggctttcggagcattcggcgccagtcaatggttcgatctgtgatctggaacagtatccggttattgggcgcaataaaattgccagcagctga

SEQ ID NO: 85708 - DNA, 1215 bp, Citrobacter koseri
atggttatgctttacggtaagacttatacccgggaacaactggaacaaagaacgggccaactgtcccaactggctggcataagggaagtgacgctgcaaaatggtccggagcagggattgcgagctctggagtttcgttccggctccggtctgaatttttctgtcattatcgatcgcgggtttgatattgctgaatgccactggtgtagctacaacgttggctggacttcagcgaccgggttcagaaatccggccctgcatgaacacgatggtgaaaatggatttggctggctacgctcattctcgggaatgaatgccacctgcggtcttgaccagaatctgtttccggcaaccgatgatgtcacgcattatcattatccaccacgtcatacgatgactcagccactgcatggacgggtggcgaatacaccggccaggttactggggtatggtgagcgctggaatgatgatggcacctgtactttctgggcgaaggggctggtgaagcaggtcgccgtgtttgcagaaaatctgtggttataccggaccgtcgaagtggacatgggaactgataccattcgtttacacgatgaagtcgtcaatatggggttcagtaaaaccacccatatgtatctgtatcaccttaacttcggttttccgctgcttgatgaagggactgaatatcatgccccgatatcaaaagttatctgggctgcacatgcggagcaatatgagcagcaaggggtcggatatcgtcttcagagcggtcctcgtaaggattttcatgagcaggtttacgaacataaaatgcaggctgacagggaagggaaagtccctgttatgcttgttaaccgcacaatcaatggtaaagatggcttggccataaaagtgacaactcgtaaagagcaatttccgtgtcagtttgagtggcaggctctgagtgaaggatgttatgccctgggtattgagcccagcactcatcatgtactgggtaaaaattttgcccgtgaacgtgatgagatccgctggctggaacacagggaaagttatcactacgaccttgagattgaggtgttgcacagtgccgagcgcattaatgccgaaattgagcgcatacaacagatttgcttacaacctcaggaaacctacccccgcccagaagaagagtggttttgtcttaagggttacattaatcctttgaaattcggagaataa

SEQ ID NO: 85709 - DNA, 660 bp, Citrobacter koseri
atgctgcagcatgaaagtatcagtcataaagtgtatgagctgctgaaacaggaaatcatttccagtcagcttgaacctggaacacggctgattgtaaataccctcagtaagcgctttggcgtcagtggtatcccggtacgtgaggctctctttcgcctggcagcggagaagctgatagttctcgagcataacaaagggtttcgtgtcgccccaaaaccagatgcacaggatatttaccagtggcagcaggcacgactgctcattgagcctgaaattgcggagatggtacttaaaaatataacacgtccggaacttgagcatctcaggaacctgaatcagacgatgcgctcgcaccactatggaccacgctatgagcagtacagcacttttatccatctgaatgccgagttccataatcatatagttatggtgactcgtaacgatcttatcattgaaatgtaccgtaccctgaattacggtccccaggtagggcgttttcatgaatccaggggggtgcctgatatcaatttgctatgcgatgaacatgatgaaattatcagcgccatagaatccggggatgtggatggataccgccagcgttcccgcgaccatattattttaggtttcgaccgacagatatcctacagttatagtcactga

SEQ ID NO: 85710 - DNA, 642 bp, Citrobacter koseri
atgccaacaaaccgtttaacggctcttgacgtcatgcagttaggcccggtcatcccggtacttgtcattgatgatgtagatacagcgctgcccgtagccagagcactgattgacgggggggtgaaggttcttgaggttaccctgcgaacaccttcagcattagaagtgatcagacgtattgccgataatatacctgatgccattgttggtgcaggtaccgtcatcaatccccggcagttcagggatgcagaagcagccggagcccgttttattatcagtccggggttctcattaaaattacttgatgtggctagcgcttcatcggttccttaccttccggggatcagtactatttccgaactgatgtatggtaaagatgctggtttatcagcgtttaaatttttcccggcagaagcgaatggcggtatcactgcgctgaaagccatcggggggcccttctctgatattcgcttttgcccgaccggggggattactttaaataatgcaggccactatctttcccaaccaaacgttgtctgcgttggaggctcatggctggttacccgtgaagatctggtgaaaagaaattacgctgctataaccaccagggcaaaggaagcctcattgctgaagacgatttaa

SEQ ID NO: 85711 - DNA, 942 bp, Citrobacter koseri
atgaaacagaatattaaaatcgccatcattggtgaatgcatgatcgagttatcacgcaacaatgaagggctcaggcaggggttcggtggcgatacgctgaatacggcaatctacctgtcgcgtctcctgagcggaaaaaacattgaaattcagtacgtcacctgccttggagaagatgaatacagcaccatgatgctgaacacctggaatcaagagaaactccggaccgatctggtcctccgtaccccgacacgactcccgggtctgtatttcatcgagacagacccaaccggtgaacggcgatttcacttctggcgaggcgagtcagcagctaagttactgttcagtcatgaaggaacacccgacctgtgttcgacattatccggttttgatgcgctttatgtcagtggtgtgacactgggcattcttgatgaaagctctctgaataaactctttgctgttctggaagcatgtcgttcaaaaggggggcaaattatttttgataataattaccggcaagtgctttgggcatcgcctctggctgccagaaaggtatatgccagaatactagctctgacagatatggcatttctcacccttgacgatgaaaaccaggtctggggggaaagtacgcctgaccaggctatcactcgcagtatagaggccggcgtgaaggaaatcattattaaacgcggtagccaatcctgtatcgcttggggggacggacagaaattcgatataccggcatatctgattgaggccagtaaagtcgttgataccactgctgcgggtgattcattcagtgccgggtatatggccagcaggttccggaacggggatgtcccgtcatcagttgcctgtgggcatcagcttgcttcacgggttatccagtatccgggggcgattattcctgccacggccatgcctggaattccttgttaa

SEQ ID NO: 85712 - DNA, 1146 bp, Citrobacter koseri
atgaattatttcaaagggttaacatgggatcacccacgagggtatcgccccctacaggcatgggcaaaggcagatgacactctgaaagtcgagtgggatatccagaaacttgaaggttttgagtctcatcctgtcgatgaactggcagaaaaatatgatctgttgattgttgataatcccagtattggagaggctgccgaaaaaaaatgcctgtggccacttgaagagtttctgacatctgaacaaatgacttatcttcgagagacaagtaccggacattcctgggaaagttaccagtttggggggaaacactgggcgatccccgtggatgcggcatcacaagtctgtgcacttgccgacagcaatattactgctgcgccagcaagctgggatgatgtcctgctgctcagcaaggaacatgaaggtcgtgttgctctctctctaggtggaccacatgccctgcttactttttattcaatttgtcagtcactgggggggaagctttttgagggtaatgatttcattattgatgccacgactgcgactcaggcattgcaaattttgcaggcagttttccggcgtcagaataaagccctgacgcacctgaatccgatcggtttgctggatgagatggccagagggagtttcgacttgtgtccagctatttttggctatgttaattacagtacccctgacgctggcagaacagtaaaattctttaatacaccccattgcggtgatccgacagtgcatggttccgtactgggaggaacaggcctggctgtctctctccgctgtaccccaactcctgagctcatccggcacatcatgatgtatgtttctgagcaggtacagaaaaccctggtggttgaaagtggaggacaaccagccaacatttatgcgtggaaagataaacgtgcgaatgatattaccaacaactttttctccggtacgctcgatacggtttcccgggcctatctgcgtccaaaatatcatggatatattccttttcaggacacgtcttcagcaatcattcgtgatggtctgattaatgatatcaaggcagaggatatatttattgcggttaaagaaaactacgggaaatacggtccgcagcaaagggatgcagatgaaacagaatattaa

SEQ ID NO: 85713 - DNA, 1215 bp, Citrobacter koseri
atgtcaattctgaaagggtatcgggtactggattgttctatcgctatggcaggcccgtttgcggctttacgtatgggggacatgggtgcagacgtcattaaagtggagccaacaacgggggaatggcagcgccatacttcagccggtggtgcctacggtaacgttatcaacacctctttcctctctctgaaccgcaataaacgcagtctggcggtgaacctgaaggatgaggagggtaaagcattactttacaagctggtagaaactgcagatgtgtttatccagaactaccggccgggggttgcagcacgacttggtgtggattatgacacgctgaaaaaaattaaacctgatctggtctatgtttcaatgtcaggttatggcgaaaccggcccgtactcaaaacgcccgggtcaggacttactgttgcagtccctgagtggtgcaatgctgagcaccggtgtggaaggcacccctccacaaccggccgggcagtatctggttgatgcgattacagcctataccgcctttgaaggtgctctggctgcattactgcatcgcgaacgaactggcgaaggccaactggtgcagatcaacatgcttgatgcgattatcgcaaatcagatgcaggaaatgaccgtctttacccaggggctgaaacctcaacgccgcagtgaagaacctcatggacactgctacatccgtgcaccttatggggtgttcagaacgaaagacagctttatcactctggttactcctcatttgcctacgctgggcaagattctgggtgtgccggaactggaatccatggaggatgaagtggatggtcataccctgcctcagcgtgatttcattttccgcgtaacccgagaaaaactggtggagcggaccacccaggagtggcgcgatatttttgatgcggaaggcctctggagcagcgaagtttatggctatgaggatgtggtcaaagacccgcaggttatccataacgaaaccttcgtcgaatatgaccatccgagtgaaggtaaagtaaaaacaccgggctttgctattaaattcagtaaaactccctgttcaatacagcgcccgacgcctttcgtgggtcagcatacggacgaaattctcagcgaactgggctacagcgaacaggatatcgcgtccctgaaagaaaccggtaccgtaacccgtactaatggagaaaaaatcaatggctga

SEQ ID NO: 85714 - DNA, 795 bp, Citrobacter koseri
atggctgaactaggttttgaaattgatccgaacgtgcagttttcgcttgaaaacagggtagccaccataacattgaatcgtccggaaaaattaaatgcggtcacgccgtcgatgtccgttaccattacaaaacttgcggcattctgcaatgattcaccggatgtccgcgtggtgatactgacggcgaatggccctaaagcattttgctgtggcagcgatattaaagaactggatacctatcagtcgccgtgggttcatcgtatgaaacatgaccattgtgacgctatcgccgaaattaacaaaccgacgatctgcgccattaacggttatgcgctgggaggcggtctggagctgtcattatgctgcgatattcgcgtcagcacccgaaatgccctctttggtgcccctgaaataaaactgggctgggttggtggtggggggatggctgtatatctcaacaaaacgattggtgcttctcgcgcttcaagaatgctttataccggagacccggttgacgctgaaacgggttgtgcctggggaattgttgacgagctgtttgattctgcagaagagatgctggcagcagttaaaacactggcaaccacaatcagtgagcgtccacctattgcagctcagacggccaaactgaatatgcgggcagcagttaacatgccgctcgatcaggctgtccgttacgaaagagatcttcgcaccatctgcttctacactgatgatgcacgtgaaggaaaagctgcatttaaagaaaaacgcgcaccgcacttccgcggggaataa

SEQ ID NO: 85715 - DNA, 1359 bp, Citrobacter koseri
atgagtactcagaaaaaatcaatgaaaggtgtagccgctgcctctctggtcggttccgcactggaatggttcgactattttctgtatggcacagctgctgctctggttttcaacgaaatcatgttcccgaaagggcatcattttgtttcgactattctggcattctcaacattagcgcttggttttgtcgttcgtcccttcggagcgatatattttggacagctcggtgacaaaataggacgtaaaaaagtactggtcatcacactattacttatgggctctgcgacaactttgattggtttcgtaccgacttatgaaactgccggagtatgggcgccaattatgctggtctgtctgcgtctgattcaggggtttggtgctggtgcagaatttggtggtgcggctattctgacggcagaaagtgctccggttaataaacgtggtttttactcatcatttccgggagtgggggtttatatcggactgctgctatccgccgggacatttgctgtcctgacccaactgcctaaagacatatttcttggctgggcctggcgtgttccatttttattcagcgcactgctggttgttgtggccctgttgatccgaatgaagctttctgagacggctgcgttcgaaaaactggctgagtccgggacggtcagtaaaagtccgttacgtgatctggtaaaaacggagaaaaagagtctgtttgttgttgctggctctcaggttgcccagagtggtgtcagttacgtataccagacctttgtcattgcttatattgttggtactctacatatggccccctcagtcggcccagtcgccgtagcggtagccgcagccttcgccatgtttaccacacctatgttcggggcgctgtctgataaatttggtcgtaaagctatctatatgtttggtgcagtattttcagcactctttgcgttcccgtttttctggctggtaaacaccggaaccacgtggggagtcgttgttgccatgacgcttggtgtcggtatcggcgttgctgcgatgctggggactcagggagcatttttctccgaagtatttccgtccaaggttcgatttagtgggttatcactggggcgtgaaattagcgctgcagcttcaggtggtatcgcaccgctcgcggcagtacttctgtccggtatggccgatggggcatcctggcctgtagcttgccttgctgtagcgatgagcgtcatcactatgattgcagtatggtttgcccctgaaactcacaagttagaccttacgaaatttaccagtagtgaagttaagaatgtagtggataattcaagttcttttaataaagcggactcgaaaagactggtataa

SEQ ID NO: 85716 - DNA, 1269 bp, Citrobacter koseri
atgtctcttactgacgcgaaaatccgtactctcaagccttctgataaaccctttaaagtctccgattctcacggtctgtatttgctggtcaagccgggtggttctcgccactggtatctcaagtatcgcattagagggaaagaatcccgtcttgctttaggcgcttaccccgatgtatccctgtctggcgcgagacaacaacgcgatggtatccgcaagcttctggcgcagaatattaaccccgctcagcaacgtatcgccgatagagcctcccgttcttcggaaaaagcctttgaggcagtggcactggcctggcataaaagcagcaaaaagtggtcaaagaatacagcagaccgcctgcttgccagtatgaacaatcacatttttccgataattggccatcttcctgtgacagaactaaagccccgtcatttcattagactgctgaaaggtatagaggaaaaaggtctgctagaagtcgcgtcccgtacacggcaacacctccgtaatgtcatgcgctatgccgtgcatcagggattaatcgaaagcaacccggcagcgaatctggatggggtgaccgctcctcccattaagcgccactatccagctctgcagctggatcgtcttccggaactgcagaaacgcattgaaaattatcagcagggacgggaattaactcgtctagctgttctactgaccctacatctgttcattcgttccagtgaactgcgtttcgcccgctggagcgagattgatttcaggaacaaaatctggaccattcccgccactcgtgaggctcttcctggagtccgctattctggaagaggaacaaaaatgcgcacgccacatatcgttccactttccaggcagtccattgatattctgaaaaaaataaaggaaatatctgggcatctggagctaatattccccggcgaccataacccttacaagccgatgtgtgaaaatactataaacaaagcactacgattaatgggttatgatacaaaaaatgacgtttgtggacatggtttcaggacaatggcctgtagcgctctgatggagtcaggcctctggtcgcaggatgcagttgaacgtcagatgagccatcaggaacgaaacagcgtgcgtatggcctacatccataaagctgaacatcttgacgcccgcaaatcaatgatgcagtggtggtcagattacttagatacttgctggaaaagctatacccccccctatcttttgaatagtaaaaaagtctgtcgggaaatctga

SEQ ID NO: 85717 - DNA, 1254 bp, Citrobacter koseri
atgaatgaaggacaccaccattctgtctctgatgaggtccgaccgtctccggtgcagacggatgacgatattagtgtgctggagcgcgaggcccggacaaagcgggaagcggcgcttctcactgggcaagatgataaagagaatgatccgatacaacccgctatcaacaaactgaaaaagcgcaggcgcgggaaagccaccgcgtttctggcgctcgccgccgttgcgctgattgcgctggcgtgggcgggcaactgggtataccgcaatcttctctggcagcccggtgaggaaaagcggcaggatgccgctccacagccgaaccggagcgattaccggcagcgaaccgatctggggacgcacgataccggagcatacacaccggaaccggtggacaacagcccacgcagtacgacggtcaccgggccggagacgccgccggaactggataaagcccgttttctggttcgccgggacagctctgccgctgcggcccgaaacccggtccggacccggcagcaggaaatgacacagtcagtcgctgccgggcagccgtcaggaacgccatcccctggtaccgatcagcagcccggcaccacaccgccacagccagaactgtccccggcagcggtccggcgtatcccttacaacccggatctgtacgtgccggaaaataccgccattccctgttcactggattaccgctttgtctcagatcgggcggggaaaatccgctgcacgatcgccgacgatatctggagcgccagcggcaacacgaagctgattgaaaaagggaccaccgccacgggcatttaccagacgggtgcggaaacgggaatgacgcacggacagggccgcgccttccttatcatcaccagactgcgtacccgccagcccccttatcttgatattccgctggttgatacccgcgctgccggggaactgggcgaggctggtgttgacggctggatcgattcgcatttcagcgagcgattcgggggcgcattactggtcggtatgatccccgatattggcgcatgggcttccgacagcgcgggtcagaaagatcgtaataccgactacaccgaaaacagccgtcaggccatggcggatatggcacgcaccacactggaaaacagcatcaatatcccgccgaccgtgcacaaaaatcagggtgagatcatcaacctggtcaccggacaggatattgatttttccggcatctatacgctgaggatgaaaaatgaccgctaa

SEQ ID NO: 85718 - DNA, 423 bp, Citrobacter koseri
atgcgacaatctaaacgtgatgatttcatctcgaattatcgaattgccaaatcggtatcaactgttttaagagaaaaatcatggagttataggaaatgcgcttaccaattcaaccaacactatagggatcaagaagtttcagtcactaaagatttagtcagccgtgtagctaatcaggaattcagaatagtaaatgacagggtacgccttctatgcgaattccttgagattagcgtctacgaggatgaatggccggataagtcacaatgtaccccatcggaagttcttaccgatcttggttccaatattagaaatgaaattgctagggttactgaattagtaaaagaaaatcctgcacttgaagaaaccatcgctattctgttgcgcgggattactaaaatcgcctcaggtaagagagaataa

SEQ ID NO: 85719 - DNA, 1038 bp, Citrobacter koseri
atgcaggacatttcttcaataccatttttttcaaagtttaccgagcaaatatgtattcgagactatgattttgagtttggcaatccaggtctcttagccgctgaagttgatggtaggcaagttatagtaaagttctggcttaaccgtcatcaagatcatactgaaatactgaaagagatttggctgtacgaaaaaagacaattacaaagattaaaaggctgtctcggtgttggagactacatatcacctatatatgaatcatatacagatgaatttgggttttacttggtactagatagtgggtctcgactaccgctttcacactattacgaatcaacatccggaactttgcagttgaaacgcgcttggatattcaacttgagacaaatatccaatagattgaaattctggaagaatataaaaagaatagtttctgcggtaagtgtactacactcccaaggtcttctgcataggcatcttaactttgattcaatacttactgaccctaccaacgagttagacttccagctcacaggttttgagtggtcaatgcgtgttcagcacatgcaggagtctaacttaattaatgaacgcactgaaagcaatagaaaacaattctcttttctcacagattggatggatcttggttatctaattgcaaaaatactcaaaattaaaaaagaaaatatatccaacactcagcattccattcaaaatatcatagaccaaactgaactaactataaacgaaatagttttcattagagggttaattggagttattgatatagataagagcatttcaagcaaagttataaatgctgatatagcgtcattaaaaatagacgatataattaaagagcttaatagcctgctcgaaagaagtcccagcccactagcaatagcattactttttaatacatccacatctaacggaaaaatcacttcgggaataacttcagtatttaatgccgtacaacaaattttctttgaaaaccattcatatatctttcagatactgatatacctgaacttctag

SEQ ID NO: 85720 - DNA, 495 bp, Citrobacter koseri
atgaaagtaacaaataaaaaggttttttccttattggagataatattggttttaggtattggtactgcaatggctttcataaagtttcaggacatgaagaacgatcaggaaactattacggcgaataccgtagggtcacaaataaagcagataggtgaggcgactaaccgctatatcagtattcgctttgagaagctttcaactctaacttccagcagcagccagagcagtgatccgggaccaagaacctgttcggctaatggttgtgaaattacctatcagacgctggtaaatgaagggctgttgactgcagggtatactggtgtcgacatgcaaaagtcttcttgtaagatctcgttaaaacgtactagaacaacacctaactacggtatcaatggactggtagtaacacgttgccttggaccgaaggaagccgtgttcgttatgacttgttgggctgagccatgcaaaccgcgggtatcgatcgcggtatga

SEQ ID NO: 85721 - DNA, 129 bp, Citrobacter koseri
atgcctttttccgaccctcaactgatgaagtatggctaccggagcgtcatctgttttcagatgcagctaatttctatgctactggcctgcatgagctggttcactggagtggtggtaaaaaacgcctga

SEQ ID NO: 85722 - DNA, 204 bp, Citrobacter koseri
atgtctatcaagggaatctacgggatattatccgattcctttatagtgccacattgccgtgactcctgcgttttcgtcttttttgtctggaatttacgctcgggaaatttgcacgggtttcatttgcactgcgttctgctgaacaactcatctgccatctacttttcgataggatcaggttttaatttattataccaaggataa

SEQ ID NO: 85723 - DNA, 417 bp, Citrobacter koseri
atgcagtttttcacgcctacagatctacgccatgtggcgctcccaatgtttagtgaccttgtgcaatgcgggtttccttcccctgctcaggactatgttgagtcgcgtatagaccttaacgaattgctggtgaggcacccaagcgcgacgtatttcgtgaagtccacaggagattctatgcgtgatgccggaatcggcgaaggcgatttgttggtagtcgacagttcacgaaaagcagggcatggggacattgtcattgcagcggtcgatggtgagttcacagttaagcgcctgttgctgcatcctgctgtcatgctcaagcctgaaaactctgtgtataagccaatcatgattgggagtgaggataatcttgaggtctttggcgtcgtaacttacatcgtgaagtctgctggctga

SEQ ID NO: 85724 - DNA, 564 bp, Citrobacter koseri
atgccacagtggaataatccattcgaggctgaagtcgtatttaatttactgacatttcttcgaaaaaagccagaagtaaaaaaattgccaaaactagctttattgactccatataataaacaaatagaacgaatttcaaatttgctagaaaaagaaagtcataatatcgaaaatctcgatgatttttcaaaaccagatgattcatcttcattctgtagtacagtcgatgcctttcaaggagcggaagcagatctaactataatttctttggtacggaataacagcgattcttatgcgctgagcgctctaggcattttgctagatagtcgacgcatgaatgttcttctaagcagggcaaaacatcaattaattatagtaggctcatatgaatttttaaaacattggtcggaaaaaattcaacgtgaagaagtgagcaaaggaaatgctaaaaacgattttctttgtagacttgtgttaaagcttaatgacctaaagttatctaaaaaagccgtatttataagttcagataagcttaccgctcctaaaaatcctaaagaaatttga

SEQ ID NO: 85725 - DNA, 513 bp, Citrobacter koseri
atggaattcaccaaagagcagttaatcaagcgcctggaagagcaggagtcggcagcgcgttatgcgttaagttttgtgcaggacagtgaaatcctgcgagatattgaaatggatttgcgcattactgaaatcgcactggcatcgcttgacgctggcagcaacagccacccggtgcacgccccgctctcaaatgaccgcctgcaccgcatcagcgacatcctgagcaaagccgcagcacaaagtgacggcggcaatcttggttacgcaatgtctgacgctgtgaaagcgattgatgaattgttagcagggaggaaggcggagccaatggcgtgtggctggaagcatcagcctctctacacagccccgccagcgccggtggggccattgaccgatgaacagatcgacgatgtgctcgattctcgcggtaatattttatacgtcattgccgacaaaagggagcgcctgcgtatgtttgcgcgtgaaatcctccgcgctgcaatgggggtgaaatag

SEQ ID NO: 85726 - DNA, 276 bp, Citrobacter koseri
atgggacttgaaatgattatcggcctggctgttgctgtgttggccgcaattgcaggcgcttttggtcttggaaagtcacgcggaaccactattgctgagaccaaagcggaaatccagcgcacagaagaacgcgcggcagccactgaagctatagccgaactccgggtagaaacaacgaaagaggccagcaatgtacagcagaccgttaaccatatgcctagtgacgatgttgatcgcgagctgcgcgacaactggacccgccccggtggtcgttga

SEQ ID NO: 85727 - DNA, 240 bp, Citrobacter koseri
atgaacataatggataacttcgaaaaacaaatggaaattaacgatcggattgatttgttgaatgaaggagccaaatcccttggttcggacttcaaaatctcagaggcattttcaaaagaaaatcttcgtactagtatcgtttctttttatcaaagcaaaggtctggcaactgaggcgataaaggttatcgaatggtggatctcccttacacctgaagaacagcgaaaatacgacagatag

SEQ ID NO: 85728 - DNA, 384 bp, Citrobacter koseri
gtgcgccagaatgttcagttcggtgtgcttgatcgtgatgtactgtttaacaaagaagtgcttccggcgttctcaacattcattattgaaaatgtccgagtggtggaagtaacggaccaaaatctttatggaattggtccggatgaatccttcttggttccgcgctttagcaaaccgctatcctctgatattgctctgcctttcggttatgtagcaacggctaccagccgcaatcttgatcttgcatttgctgatccggttgatttccgtatctggagcgtacaggacaagtttaagaacgtggagctattcgcggaaagctcaatcttgcctgtggtgtaccgtccagactttgtgaccaaactggcgaacgacgcagcttaa

SEQ ID NO: 85729 - DNA, 402 bp, Citrobacter koseri
atgagagatatactaaaaaaaattcggatcttcattgaggcaagcggtaaacttctattagttacagtaatactaattgctgttattttgctccccgccattttaaatcttggagtacctattaccttagtattaggggttatctcgctttcattgacagtattagcaggaaccgattttgttaaaaaacacacacaaatcaactttactgaaaatgggacaaaatatgatctatggatgatagttagcattgcaatttcaattagcggcgtaatagctatatggttagacaagaacgctgacagattagataaaattgtatattctataaccgtagggattcttgcaattattgttgcttgttcagtatatatgacatgtaaagaaaaaaaagccccataa

SEQ ID NO: 85730 - DNA, 204 bp, Citrobacter koseri
atgactgaatcagaattctacaaaaaatatccaacaaaagattatgaattgaatcaagtacaccgtaaagaaagcggctttcaggattcaattgaagaaattacatatgatgttgtagataaaaaaaccaaagaagtagtagctagggttaaaagaacagaagtaagtgaaccccgtagagaacctagtattttttgggaataa

SEQ ID NO: 85731 - DNA, 927 bp, Citrobacter koseri
gtgtttaaatctcttgttggaattgtactgatactggcaaccaccctggcgcatgccgatcgtattcgggatctgaccagcgtgcagggggtgcgggaaaactcgctgattggttacgggctggtggtcggcctggacgggacgggcgaccagacgacccagacgccctttaccacccagacgctgaataacatgctgtctcagttggggatcaccgtcccgacgggcaccaatatgcagttgaaaaacgttgcggcggtaatggtcacggcgcaatttccggcattcggtcgccaggggcaaacgatcgacgtggtggtgtcctcaatggggaacgcgaaaagtctgcgcggcggtacattgctgatgacgccgctgaaaggggtcgatagccaggtgtatgccctggcgcagggaaatattttagtcggcggcgcaggggcgtctgcgggcggcagcagcgtgcaggttaaccagctcaatggcgggcgtatcaccaatggcgcaattattgaacgcgagctgcccagccagtttggcggcggaaataccctcaatctgcaactgaacaacgaagatttcgcaatggcgcagcagatcactgacaccatcaaccgtgcccgtggctatggcagtgcgaccgcgctggatgcgcgcacgattcaggttcgcgtacccagcggcaacagctcgcaggtccgtttcctggcggatatccagaatctggaggtgaacgtcacaccacaggacgcgaaggtggtgattaactcccgtaccggttccgtggtgatgaaccgtgaagtgacgctggacagctgcgccgtcgcgcagggcaatttgtccgtaacggtgaatcgccaggcgaacgtcagccagccggacacgccgtttggcggtgggcagacggtcgttacgccacaaacgtag

SEQ ID NO: 85732 - DNA, 1218 bp, Citrobacter koseri
atgggtacacaactagcgcacaaacagtacacattggaaaaggggtacttatggcgcaagcgttatcagaaaaacattctcagcatccatctaaaaacgagagatgaggataccgctataaaaatggttgccgctataacaattcgctatatagaattaaaatcgcttgatgttccatttgaagctatgcgggaaatgctaaaaaagtttcgtgatggtctgattacgtcacatgacattgagcgcttaaggtcgattgcgatggcttcacaggatgcgccacaagccactgtaatcgatgtgccaatgcaatcacgtacacaggaggttaaaacctctcagaaggccgcacaggggcattctctaatggatgctcaaaaagcgtactttgacgctaacaccgaatggaagccaaaaaccgtaaaagattataatgcttgtcttgagcgttttattttttggtgcatagataatggcgtgtcaacaattgaagaaataagcaaagataaaataatcgccttcaaagcatacatggatggtgaaggattagcgccattaactaaaagcaaaatcataacgcgaatcggttcattccttaatttctgtgtgaacattaaagaatggatagataaaaataacataacaggtttgcaatataaaaaggtttacgttcaaaatccaaaggaagaaattacaccagaacatttcaaagctgtcatgcagcaattcagggtaattaacgatagtcaaacatattgggcgatgaatatcatgtattatacgggcatcagggtaagtgagttaacacagataactaaagttaactatatagagctttacggaattaagtgtctatcaataaacacaattgatgatggcgaagcgagtaagactgttaaaaccgaaaatgccaaacgtaacattccgatatgccaaaaattactagatttagacatatggaatgttaagccagtaatgaaatatggaaataacagaacgatggcggcaacaagtgaaagttttaagggtattggtcttacgcgttcaactcattgctttaggcattcattatcaaatagattgcgtgatgtcgatggtgtggaagatagcacgcgaaatatgataatgggacatgcgcaggaaacaataacagatagagtttatatttctcgattacctttaaagaaaatgttaaaggcattgaacgacgctaattaa

SEQ ID NO: 85733 - DNA, 504 bp, Citrobacter koseri
atgaatttcgaagggttcttacagaccgcaagccatcaatataattgcaaataccaatattctgatttcgtagatttgttcacaaaagtaagcattcattgtcctgtgcatggcaaatttgagcgtgttggcatttatcatctatacggcgatgaatgcccttcatgccaaactaataaaaccaagacttattataattacgttatgcaaaccgataacattgtaaaaataggcagaacggcaaatgtatatgcccgtatgggtgaactatcatttagattaggccgtaattgtattttaaattacctgtgtgcttacaattcaagaagggaggcgtgggattctgaaagatttgcacaagcgatgtttaagcagtatcaagtatcaccttttaacttaaagtttgcaggttcatcggaattcttcaaaatcatgccatcaatggcttttagttctctcattatttcagggggtaatcctgtttacagaattgatagtatttag

SEQ ID NO: 85734 - DNA, 990 bp, Citrobacter koseri
atggctaatttctttaccgacttaaataattttatcaagcaaaacccaatcaaatacatgcacgattttagcattgaaattgaaccaggaaaacaaatgccatgccctgtatgtggaggcgttgatagatttgaatggcgaagcaaaggaacatatgcaaatacagggtattgccgaaatgaaagtgcccatgatggacaccatataatccagcctttaactataattgaggctgcaaccaagatgagatatttagatatcggtgcgcatataggatttaaacaaaatggaggttatagaaatccaaaacactttgtaatgaggaatgcgccaaagaaaataatttccacacgcgaacacagccttgcagaactggactctaacaggctagatttattttctaataatgtacgcaatgaatctaaaaatgccacatggcgcgaatccccttacctattaactaaagggattagcaaaatgatgtgggttggcggtcatggtcaaacgctattggattattaccgcgctgatgggacgctctcagccctgcaaagaatacccattgaaggtaaaaagaattttatacctaatagccaaatttcaggcgcttttcactgtgagagaaatcaagatgggaatattgagtcaatatttattggtgaaggttttggaacggttacagcatttcaatactcaataagtgatttatatccggcatctctattcctgactgctggcaatgacaacaatttattgaatattgccaaagaagcaaggcgatgttatccgaatgccgacatttgtattcttactgataatgatgatgcaggtttaaaggcgactgtaaaaacaatatcgcaagtaaataaatgttggtgggcaatgcccgtaactactggtgaggattggtgtgatgtttttcagcgcggaaaatttgcagtgcgtgatgaatttcgaagggttcttacagaccgcaagccatcaatataa

SEQ ID NO: 85735 - DNA, 327 bp, Citrobacter koseri
atgacagacacaaattatcttaaagaaaagttacgctcaatggcaattgaaaagcatgttaaagaaaacaaaaaactaattgcagcgcaaataaaggagcaatcacaaaaggtacagcttacggggcttgtgtgcggtaatgatgcagttgctttagctggtgtcagtaagccgatgttttacgctgcaaaacgctttaaccctaaagaatttccacaagaaattcaccatgagacggagggttatatttggtatcgaaaacaagatattgtagatttctttgctaaataccctgcgcggcgatacgggagtaaatacaatggctaa

SEQ ID NO: 85736 - DNA, 1110 bp, Citrobacter koseri
atgcacattctatcaccgcaaataaatctttttgatgtgggtgttcaaaacataattattagcaacataaatagcatcaccaataacaaagggggcatcatttgctttgatacactttcttcttttctggcgtattacagcaaacaatgtattgatggaaaaaccactttagacatggataatccagatgaaaatgatgctattgcaatgcgcaaactggtttcaatattaaaaagaatcgcggttgaaacaaattcctttgtgcttatggttcaccacggcggcaaagatgcggctaaaggcatgaaaggcgcaatcactctaaaaaatgattgtgatacggtaattaaattagcagttcatgacgatatgcaaattcaaaatagtgatcttgcattctcggtatcattaaccgtggaaaaaaaccgcagcgccgcaaagcttccggtaatgaaatttgatttatgcttagaagataacggtattacacaacaggaattacatgaaattgataatgaattatgtgattatcctgatgaaaatgaaaaaggctatcggataagcaaaaacacgaaaacattagtgtttattgataagccagaagcgattaatgatattggaaaaattatacgcaaaaataatgaattgaaagaagaagattatgtgtatatgcagcccagcgaacctaaaaatagttatcagactgcacataattaccagcttcaaccaatgacacaacaacagcaacaggacaaaattgaaattaatcagagtgatggtgaagcgcgtgagtctgccaaagaatttacggaattagcgagagctaataatagcaatgactattgcatgtacaaacatgcgcttaacaaattaaaaagctcaccaactcagcgagaattatatgaaaagatttatggtgaaattagaagcggcatgtataacaagtctattaacttaaacctatttattgacaatgaagcaagcgcatcaggcaagaggaaggatgtgataaaagaagcattaaccaaaatggcgagaaaaaacgtaatcgcgattgataacaaagcaatatcattgccaaaactagcaccaataatgacaagcccttaa

SEQ ID NO: 85737 - DNA, 2112 bp, Citrobacter koseri
atgtcaggtacagatgctgaattaggttttagcgttgatacgtcgcaagtcgaaagcgctgaagcgagacttgacgcactatctaaatccgcgcaaggtgttacgagcagtattgacaaaatggctgattcatttaagtctcaaactttgggcgatgggatgcgacgtggaataatgggtaatatcacccgtgattttcaatctatgcaaaactccattactaacgaaattataaatgatggcgaaaaagcgggtaaaggctggtggtcaaattttataaatggagttaaagagaatcataacgcgcaacgtgaattaggcgtaatggggcatgaacttatgtcagggcgttgggctaatctgcgcggttctgcggctatcatgatgggttcggctggtatcggtggccttgcctctactggcatcgtcatggggcttacagccgccgttgatggtatcgaggcactaaccgaaagcatacaggaagccgcacaagcgcaaaaggatttacagcaatcagcaatattatctggaaatgctggcgcattattttccggtagaattgatgaaatcgttaatgggctacaaactgttaaagacgcttcaagggaagttaaagaagaatttgttactaatgcactaaattctggattaacgcctgattttttgaaaaagaatggttcaatgcttcttcaatatcaacaggaattcggtgataaacaagcagaggcattagaaaaaatccttgcagaaacacaaactgatgcaacaaagggttatgccgcactttataaaatgggtgacggcttacttgataaagtgaataatgatattcaaagcggtaattataaagctgctggcgctgatatgattacacagttaatgcagggggcgcaaaatgaactgcgtgaatcacagaaaaatcaacatgaattagatggggcttcttggtgggatacaaccttgcaatatatggggatgggttcgttggggtattctgccgctggagtacaaacacagcagaaaatcttaaatggaattaagcaaaagaaagatactattgttgatgccaataaagaggccaatgcagcaattcagaaatcaattgactctgttaagtcgcctgatttaagccggactaaagcctaccacaattttagtgtttataatcatccatcattcggcactcacaccggaaaaacagaagccgaaaaatccgctgaaaaagcacagcgagcacttgaacaattaaaatcatcaatctatggaattgacgaacaatcatcatccttgttgaattctgttaatcgtcgatggggcgctaaaatgcaacctttcagcgatttaagccatgatgcttatgattttcagcaatcgcaagaccagattaatcaacagtttgataaaatgattgatagggtaaatgagctgcgccgccgtcaaggtaaaagcgcgaataattcagcatttgattctgaaattaccaaaataatgaaccagcgcgattcagtattaaaggccaatcaagacggatttgaaagctatgaagatagtttacattccgctgttgctggtatgaaagaagcgtggaaaaactacgatgagaaagttgatgatattgcagcgcaacaggccactgtatggagcaaatcacttgatttaatgacagatgatttaactgattttctaacgaccggaacggcagattttaagaaattctttaaaaatatcgccgtgatggaagaaaagtatatggttcaaaattggcttgtgaggccaatgaatgattacattggcgggttaatggggttcggttcatcatcaagcctagcgtctcaagcggcgaattcatttgctgtacctgaaattcctaaactgggagcaactcatttaggtggtggattgtgttcgactgcgccaacaatcaatatcaccattaatgataatggtaataaaggtgtggatagtaaggtaaatgccagtggcggcgatgcgcaaaaactaggaattgcacttgataaattcatgcaaaattatatcaagcaacaaaacgtcaattcgaatcgacaaggcggcattaataaatcaatggggaactggtcaacgcgctaa

SEQ ID NO: 85738 - DNA, 297 bp, Citrobacter koseri
atggtggacgagcgttttattaaatggtctatgattttggttcctgcgggaacgccatcacctagccttgcaagtttttactcaggaaaaacaaaagggttattattctttaaatcgcgtgatttagccttaaatgcagcagctaaacgtaatgagcaattagccggaactaaatcaaccagccgatttaaaatcattaaatgtcatgacgctgaggcgcagaaaaagcattatgatgaattaaaaattgataagttacgcaaagaggcactgcgaaaacgtaatattggtttctaa

SEQ ID NO: 85739 - DNA, 378 bp, Citrobacter koseri
atgaatgataaaaaatatggcgtctttttctggcgcaagagtgataaagttgaagatgttccttcggataaaaatgttgcgaataagggagtaaaaccgagaaggattttttctgattatattgaaggtatgcgatttcaggaaaaaatgaatgcaacaatacccgcgcctcaaaaaagtaagtatgaatatgttttagtagaaattgttgaagcagacaaaaatggtgctaaagaattatttaagtctggaaatctgactgatgcactaagagcaaaacgtaaaacacaagaccagattaatcagggaaaaattgatggcatgattaaagagggcatcaaaaattattatgaccaaatgacgcagggaaaattttaa

SEQ ID NO: 85740 - DNA, 204 bp, Citrobacter koseri
atgaataatcaaagtgaatctattgtgtgcaccatgagttataatttttcaattgatgaagaagttagtaatgttgaggcaattgctaacgcattgcgtgcaaaggggttatacagtaatgaacttgttgtagctatttataatgggattattaataaggaacgaaaccttataatgactaaatcggagggttatttcggatga

SEQ ID NO: 85741 - DNA, 423 bp, Citrobacter koseri
atggccgcatttgatattttttctggtgccaaccttcaggtagaagtaggtactcatacgcctggctctactactccagctaccgattttgttgtaatcccggagattgctgcatttccaacagtaggggctgaaaacgtagtaattgacgttgttacatataataacgcatataaccgtaaactacttggaaccaaatctgtaccagacattactctaagtgttaactatcaaccagataatgcagtacaccaaaagttattgcaacttgaagaatcacaaactcgtgcacaattcaaaattacctattatgaaaatgccacacatactaacgcatatagtatcacttacgttgctttcgtatcttcgtctgttgatggtggaccaatcgcaactgagattattacaccagaaggtgaataa

SEQ ID NO: 85742 - DNA, 333 bp, Citrobacter koseri
atgtgttgtatctgttggtacgtaattaactacaatttcgatttcgtcaacggtctgttgtccagtaatcgcatttgcgtattcatcattgtacgtttcaatctttgctacttcatttcccatactgaaagatggatactgtgcgagttgcgatatttcaatattacctgctgtaactactgccctgtttccggtatcgacgttataataaatcttaacgtttttaccactaaaaatatctgccataattcatccttaaattcttttctctatcgcttcaatatttattgtgaaaacaatagaactactccctgtagttttatctgttattaa

SEQ ID NO: 85743 - DNA, 252 bp, Citrobacter koseri
atgcaggaaacagactggcacaaagcggatattcttgccgcgctaaagaaaaagaaaatcagcgtagcgggattatctcgcgaacatggtttatctgatggcacattattaaatgccctaaatcgagactggcctagaggtgaattaattattgcaaatgcaattggcgtttcacctcaagaaatttggccttctaggtattttgaaaaagatggctctccgataaatcgtgtaattcgaaaacctgtttaa

SEQ ID NO: 85744 - DNA, 264 bp, Citrobacter koseri
atgaattacaggcatatactgcaattccttttctcaaagcagaaaccgaaaatgaccaaagcggaaaccaaaaactatttatgcggcatttaccgtgagtggattcaagagaacatgagcaccagcgaaaaagaattatcttttcatggatatatttgtcaccttccaaacttttcaacatttagatttggtgccgcccgtgactatcaacaaacagccatgtgggttagagaatggaatgagcaattaggtattagctcttga

SEQ ID NO: 85745 - DNA, 615 bp, Citrobacter koseri
atgagttatttaaaacgagtggatgccgagcatgtggccagtatgcttgcatttcaaaaattggcaaaaagttattcttcggaaaacgcagatgagcatgtaaaacttattgaaaaagaattagctggaaaaactatcagagaaaaaaagtggatagcgagtagccttgccgaaatgcagatggaagagaaaaccagaccattatcggatgatgaaaatgtgttggttaaagctgtgaatgttttggctgtacttggatatacagaccttgccaaagagttaggcgctttggctgataggtttgggcgatgcgtagcgttatcggatatttatattaatcacattattgacggtgctgttaaaaaaaatagaagtgatgcagcttcagggcaccggcatcatttgcatgatgaaattgtggcgattatgaaagttacctgggagaataatcccgctttatctaaaaagaaaatgatcgcaaagttgatgaaccgttatgagggacgagttgatgaaggaacggtagatagctggataaaaaaagaaaagttattaccgcctaagcctaagaaatacattaattctgatttggtttttccaccggattacgcatag

SEQ ID NO: 85746 - DNA, 726 bp, Citrobacter koseri
atgttaactgcgctaaataggcaaatagtcgtatttgcctcggaatcacaaaaatcagactcgccgttccattgcccggagtgtgggaaagaggtgaccctgaaaaagggaacggtcatgacacatcattttgcacataaaccacctgtaacctgttactacggtgccggtgaatcggaacttcaccggaaagccaaactggagatttttgaaactctccaggggaatggttttgttagtggtgcggagattgaaaaatcatttggtgatgtccgcgctgatatatttgcctatatcaaaggcgtccctgttgctattgaagttcagcgtagcaccctaactccccagcagatttatcaacgtacgatgtcatatagcctgaaagggatctatgttctctggctcggtctcccggacaagcgacatgatgaagagcgatttatccctaagtggtgggagaaatggatacatgcagcttatttcggtcaggttttctactggcacgctcgggagtttgttacacctataaagtttggggcagcaactacctatgtggaagccactgattggggtggggggtacacgaagactttgaaacgctacaaggttccatataaaagccgtcccgtgagtattgttgacgactttacaccaaaagtaggggatgcctggtctgggagtacattttccatacctgcaaggaaaatcttcactcaaaccagataa

SEQ ID NO: 85747 - DNA, 204 bp, Citrobacter koseri
gtggctaaacagaaagcaatgtcggtatacatcgataatgaaaccaccttgatgcttaatcgtctgcgtgaagaagttcgccagcgctatgagcgtgaaggtattcctggtagtgcccccaccattggctggcttgcccgttccctgctgcgtgaaaaattggggatggctcctgcaaaaaacgacgcgcccggcgcgctgtaa

SEQ ID NO: 85748 - DNA, 543 bp, Citrobacter koseri
atgaaagataggattacaaatgaccgtaaacatcctaaccattggtttaatcgggcgtctgacctaaaagcttccgctcatgttctttggttaactatgcaatcagatagtttacaaaaagaaatgggatatggtggaggtttttctttgaaggttgcatgccatccagtctatgaaatgctctgcgggttggcattagagttaattcttaaagctgttattgttcaaaaaaataagctagtgccaaacagtcataatttaaatcacttagctagtattgctgatataaaaatcaacaagaaaactgcggacttactgaaattttatacagaagtgattatctggtcgggacgctatcctgtccctcgggattgtgacgacgagaagttgacagattattggaaattagtttcgaatacactgacagaacgtgtaggaaaggttgggacattgcaaattcgccgtagtaatggtgcatccaattgggataattttaatgagatttataatttatttatgaaggattttaagttcggtgtttaa

SEQ ID NO: 85749 - DNA, 147 bp, Citrobacter koseri
atgactaactctattaagggctcagacctgctgtcaaagcgtatgcttgccttgagtggcttgctaatgacgctaagcaatattggtctaagcccatttgttgctctgccagttagtgttgctcttgtctatgtattacgtaagtaa

SEQ ID NO: 85750 - DNA, 396 bp, Citrobacter koseri
gtgctcaccaacgatggcgcattgcaggctcgtctgacgcagcccggcaaacgtaccggtaagatttattacgttcaggttgaaggcgaacccaccgcagaagcgctggaagccctgcgcaatggcgtgacgctcaatgatggccccactctgcctgcgggcattgaggtagtggaggaacccgaatggctgtggccgagaacgccgccgattcgcgaacgaaaaagtattcccacccgctggctcaaagtgaccttatatgaaggccgtaaccgtcaggtacggcgtatgacggcgcacgtcggctaccctacgctgcgactgatccgctacgcaatgggcaactacacgctggataatcttgccaacggtgaatggcgagacgctaccgattaa

SEQ ID NO: 85751 - DNA, 210 bp, Citrobacter koseri
atgatgcagtggtatgcgacttatattggtgagttgggggaagattgggctgtggtggagggaatgttcgagacgatattaataaatagccattcagcggcaaaggtggctatttattatcaggattcagtgagtttttacagtgatatatttcatcgcagccagcaaataggatgctttgaaagtcacatcttggtagtctttagctaa

SEQ ID NO: 85752 - DNA, 1983 bp, Citrobacter koseri
atgctgaattcgtttgagatataccaggctttgaatgaattggggtaccggcttgaggctggaaaattcgagccaagctatgcttctgagcatgcgctcggtaatggaaagtatctgtacgtcaaacgcagccgggacggcgtggttaataagagcccattggttcttgcaccagaaacccttgccttaaaggcggaaattgaccgtattgcgggtatccactgcctttgggaaaaagtaaaaagcaccagctaccgccgttatccgaaagataacggtacatcccaatatggtttcgcggctgatgttgagtcagttgaagcgttgcaggcgctggtggctttgctgggtggtaaaccatctataactacccaacccggactaaaaagagacaacgaaaataaggaacaatcgttaatgtatcccttaaaccaaattctctttggaccacccggcacgggtaaaacctacagtaccaccgaaatggcggtcaaaattgccgataatgcgtggtaccaacaggcgacgcgcgaacatcatggcaatgacttacgggagttggtaaaagaacgctataaggcgttggtagaaaagcagcgcattatgtttaccaccttccaccaaagcttctcctatgaagattttatcgaagggattcgcgcgaatactgatgaaaagtcaggcgcgcttcgctacgaagttgtggatggtatttttaaacagctgtgcctgaatgctgaagttaaaacgcgtggtagttcaacccagtcattgtccttgaatgggagacggatttggaaaatgtctcttggaaatactcttgacggtgaagattatattttcgatgagtgccttgcgaacaattatattctattaggttggggggataatcttgattttagtggctgcacgacatcggctgatgtccgactgcgcatagatggagcgagtgatagcctggttgagcgaagcgaatacatgttgactgcggtcaatatgtttaaaaatatcatgcaaaatggtgacttggttattatttccgatggcaaccataagtttagggccattgccgagatcgctggcgattatcaatatctacctaatgatgaacgcgtaggttatcatcaaatgcgtaaggtcaactggctacgaacctattcgccgagcttaccgaaagaacagttgtttttaaaagcactttcacagatgacgttatatgaattgagggacacctctattgacagggaaaaactgtctcaactactggctcctgttgaaacaactgacaatcaagcattgccgcacgtactcattatcgatgaaataaatcgtggtaatattgcccgcatctttggtgaattgattactctgttggaacccgataaacgattgggtgccgaagatgcccgcaccttagtgttaccgtattctaaacagctgttttccgtgcccaggaatgtctatgtgataggtactatgaatacggctgataagtcgttaattcagatggacctggcgttaagacgccgttttagctttaaagaaatgcctgcacgaccagagttgttagctggggtcactgcgtttggcgttgatgtcgaaacgttgttaacgcgtattaatcagcgaatcgaagcgctattggatagtgagcatacgattggccatgcttactttatgccgctaaagaaattagaaaataacgctgaccgcgaagcctgtcttgctagcatcttccaggacaaaatcattccattgctgagagagtatttctttgatgattatgaacgcattggttgggtgttgaatgattcggtgaaagcgaaagaaaaccgttttattctgttgcagcagtcagcacaactaccatcattttctgcactattcccgaaagatattgcggatagcttgtctgacaggcgcttccgtatcaatgaacatgctttcgcgtctgcagaagcttatcagggtattgtcgcatga

SEQ ID NO: 85753 - DNA, 1353 bp, Citrobacter koseri
atggttaagtataaggcgtatccggagtataaggattctggggttgagtggctggggatggtaccctctcactggaatattaagcggcttggtcaattttttgaggaaagaagagataaagttagtgataaagactatcctcctttatctgtaactatgcagggtattgtcccccaaattgatactgcagctaaaacagatgcaggggataatcgtaagctggttttgaaaaatgattttgttattaatagccgttcagataggaagggctcgtcgggggtgtctcagcttaatgggtccgtttcattaattagcatagtaatggagcctaaaaggataaaccctaaatttgctcaccatttactccgcagttatccgttccagggagagttttaccgctatggtaaaggcattgttgccgatctttggagtacaaactcttctgaaatgaagaatatccttatccctgaattggcagatgatgagagtaatgcaattgcatgtttcctcgatcacgaaaccgccaaaatcgataacctgatcgagaagcaacagcaactgattgaactgctgaaagaaaaatgccaggcagtgattagccattctgtcaccaaagggctaaaccctgatgtgccgatgaaagattctggtgttgagtggttgggggaagtaccggagcactggaatattataagattgaaatatttaattaatatcttagagcaaggttggagccctcaatgtgaggctagattagccgaggaaaatgaatatggtgtcctcaaagtgggttgcgtaaattcgggagaattcaatccatttgagcataaggcattgccttcaaatcttcaaccgcaaaagcaatacttaattaagaaaaatgatttactaatatccagagcaaatacaaaggagttagtaggcagcagcgcggtagtagaaaaagactataataatcttattctttgcgataagctatatcggttaaaatttgggagtcttgttaatccacacttcatttctgaatttattagaacacctatagttcgaaaacaaatagagttatctgcaagtggcgcaagtcattcgatgcaaaatattggtcaagatacaataaaagagctatttgtggcattacctcccgaatctgaaactcaacagctaattgcattcatcaaaaataaaatcaatgtatttaactcgttgattggtttatcccaaaagcaagtttctttactacaagagcgccgcaccgcccttatctccgccgccgtcaccggaaaaatcgacgtccgcgattgggttgcccctgacacgcaggatattgaggcatcacaggaggccaccgcatga

SEQ ID NO: 85754 - DNA, 654 bp, Citrobacter koseri
atgcgaacaaacagtgtattagcaaaattaagatgtccgcctctgaccaaattagatatgtccgcgctacagtctcaccacagcgattactgcttccaaaggatgagactcatgtcggcatacggaacggagttttcctcaatgaacgatgtgaaccgactcaggatccttcaggacgttatcgaccggcgtctcacttcgcatctcgcggccagccggctggatatttctgatagacactgccggtgtttgcttgagcgttaccgcgaacacgggccactttcgctggttaaccgtcgccgtagtaagccaggtaaccggcaactgatgccgggcctcgctgaacgtgcactgcgtattatccgcaaacgttatgctgattttggtccaactttagcctgtgagaagctcgccgagatccacggtctgtatctggccaaagagacggacggtacgcaagctaatgacataggctggtttatggatccctcgcaagttacgtccaccgcgtgtacatcagccacttccgcggcgtgcctgtaccggagagttgactcaggcacaaaacccgctcataggccctgccatcccttgacggccagacctcacgcagaaagaaacagcccagacaaaactgtacaacagcaaagttga

SEQ ID NO: 85755 - DNA, 906 bp, Citrobacter koseri
atgaaagaagcatatcttagattaaaaccacttcaacttgaaaaaagtttggaaatcactgagattaacgtacgaaacaattataatcaactcataaaattgattaacgccttaggcgagctaaataaaaatatattgatggggaacaacaacaaagctgataagattcttggcgacatatgtgaaaaatttggatatagccatttagctcttagaaaagcagcattacttcaatcctttgaggatgagaatgaatcacttattttctcttccgctttgattagaaatccagatatttcaaataataatgttatagtaaactcagtttttcaatgctatcaggaacgccaagattatcttattttaaaaaaatcagttcttaatattaataataaaggaaagtttaataattacactagagatattacacgatttcttttttatcctcatacattcagtcaagatgattttatcagcatgcttcaaagctgtttgcagtcgtctctactagatgcaattattcttctaaaatacaatcgtacttatgttgattgcaaaaatcatcctacacttatcaagatattagaaaaactaaatgacgcatcacctgatataaatgaaatagcaggtttttatctcaagtttgtagaactagaaagagatatagagtacttcttttataaacactcaagtgtttggtttgaatgtaatggttttgaaaactatagattattcttagatacgttttatgaggatccagaagctaagatttggaattgtgacactgataatttaaaaaaatgtaagggatggatttgtattggagcaatcacagagcttctaagtgataatttaactacacattctttagataatttaaaaataatagaaaaaaagggatggtaa

SEQ ID NO: 85756 - DNA, 468 bp, Citrobacter koseri
atgaaaaatgcaggttgggtattgtcattattcggttttttgctcgcggtctatgcattcttttttatggatgtgagcgtagcgcttcctgacgggactagagttaacaacatagggctgttatcgcttcaacaaaatttaattatagtatccgctgttttatttattggcggtgtcattgttggtgcaataacaggaagaaagcaattaccagatgttaaatacaaagaacctaatgagtttgcactcgattcattcttgcttttgaatgacggagaaatgattttaaataaagaggcaattgatgagttttctattgtccttttgaagaagcatggacgcagtagtatctctgatattatgctaatgaatggcccttatatagataaggtagctaactctcttccagatgatttaaaaaaagagtttcgaagagaactaaccgaaaggttaaaaagtaatagttaa

SEQ ID NO: 85757 - DNA, 561 bp, Citrobacter koseri
atgaaagattctcaggcactgacccagcaaacattacgtgaatatctggtgtatgagccaaacactggcatctttacctggataaaaaagacaaacatcagaatcatcatcggagcccatgcaggtagttttgaccgctatggatacataagaataagactgctcggggaaacatataaagcgcacaggcttgcctggttctacatgactggtaagtggcctcagaaaggtatcgaccacattaacggcataaagcatgacaattcgtgggcaaatcttcgggaagccaaccagatggaaaacatgaggaacataggccctcacaagagaaatacatcaggttataaaggcgtcacataccataggggcgctaataaatgggcagcggtaattcgttatggtggtaaaaggcactatttaggtattttccccacaccagaagaggctgctaaagcatatgaatcagcagcgaagaaaaatcatggagaatttataaatctacagagtggcggcattgaaatgattacgggacagataaaaggggtgaaccatgcagcgtga

SEQ ID NO: 85758 - DNA, 261 bp, Citrobacter koseri
atgtcaatttcaccaaccgaggctgctatcaaggccgcaggacggtcgctatcagaggtagcgcgtagatttgagttcaaatctacacaatccgttgccaactggatcatcaacaaccaggtgccatctgagcgagtattgcagctctgtgagtttggtggatggcggataacccctcaccagttaaggcctgacatctatccaaaccctagcgatgggctacctgacaacaagcatcagattacaacgtcagtttcttaa

SEQ ID NO: 85759 - DNA, 255 bp, Citrobacter koseri
gtgggaagaaaggaaaagctaaagtcaaagttggatgggttgcccaaaaattttacctgggatgaactcgttactctcatgagccagtatggattcaagcttttgaaggccaaacgtggctctggccgtaaattttacaaccaaactattgatagactggctatctttcacgagccacatcccgaaaacaccctcaaaaggtacgtcttggaagaagttaaacagctgttagatgagattgatgatcatgaataa

SEQ ID NO: 85760 - DNA, 459 bp, Citrobacter koseri
atgaataacctgatgaaatacaaagggtactatggtagctccagcatttcatttgaagatggggtgatgcatggaaaactcgaatgtataaatgatctcgtcacttacgaaggtgcaactgttgcagaactccgtgctgcctttgaagaggcagtggacgattatctcgcaacttgcgaagagatcggaaaatctcctgataagacaatgagcggttcgtttaacatccgaattggtgaatccctgcataaaaaagcctatttagctgctaaatcaaagaatatgactttgaatgattacataaaacaggctgtaaatgagtcagtgaatgggagaaaagaggttcactaccactttgagaaacccaaggatgttaagggggttacattcttttcatccaggagacgtatagaagaaacccattgggaagtttcagtagacaacggagtgcaacattaa

SEQ ID NO: 85761 - DNA, 426 bp, Citrobacter koseri
atgcttgatcaaattaggtttatgggatttgatttagaaggctcttcccttttcatcaatgaaaatgacaactccgatggcggcaaatacagcttaaaattttcagggcatcacgtcgttccacaaaaagatgaagatggaaactggatatttattgatgttacaccttctgtgactggcttccctcgcgacaaaaaaaatattgatgatggcgaagacatactattcaaagctgaagcaaccttaacactaacattcgagtgtgacattgatgaagaattgaccgaggatttttataatgaaaattcttggttctttgagaattacgtgtatgtttgtacaaaatcagtttttgaaaacatgtttaaaaacacagtgttagataccataaaattaccttggtcaccaaagcactctaaaaaataa

SEQ ID NO: 85762 - DNA, 195 bp, Citrobacter koseri
atggatgaaaaatgtattgattctcaaattatgaccggggaacgccttctagttattagttctcaaattctcatcgttttaaaaagcgagctttcatccaggggattaaagcccacttccagtaatttacgagttgtaatggagattattgacaaatctcttcccgattcactcagcgagttttttgtcgagtaa

SEQ ID NO: 85763 - DNA, 180 bp, Citrobacter koseri
atgactaaagaagaaaaagtaatgtttttaatgcgtcttgctgttgaaactcacaatgcctatcgttcaggccaattggcggcgggtaaatcagggaactttttgcaggaccctattgacgccattgaacgcatctatgagaaatacgaagtattactcgacaaaaaactcgctgagtga

SEQ ID NO: 85764 - DNA, 297 bp, Citrobacter koseri
atgataaataaaggtggaattaactttgaaggagcgaaatttttcgttaatggtcgcacttcaaacgtactcccggatggtgctgaggtgaatattcgacaccagttaaatataacactgtcggatggaacgcagtttataaaaagcatctggtatccattcaattgggaacgatggattgataaaaaacagcattatcgctatgcggatattggtggtttttaccggaaggtatcgccacgtcaagccatattgctgcaaaaggcatgggatgaatatcaggagcgtgcagcatga

SEQ ID NO: 85765 - DNA, 504 bp, Citrobacter koseri
atgtatgggtggttcaaaagaccacttagtgtttcaccaaaggcctcactttcattattgtataaagccgttgtagctgaggtaaaagaaacatttattaattttgatgctgacacagtatttgatgaagaagatgatattgaattagttggtggcccttatcatgttctttatgatgcattttatgtggtaatttataatgcagctaaacatggtaaaccatctacaaacttggaaaaaagtttcgaagtaagcaggtctgaaatgaaagatattgttacgatttcttctgatattagagatgaggatagagaagatgaaataaataacagacttcaaataacatcagactcagatatagataatgcacagtcctcggaagaaagaagcggcattcgcaaattatatcatctacagcaaaatgattctaaattccagattgaaaccattatatgtgcaaatagaaaagttactatatctgtttcttattcactggagcattga

SEQ ID NO: 85766 - DNA, 441 bp, Citrobacter koseri
atgaaaatattacttattgaagatgatggttttaagtcagagagtattgtaaattttattgagcttttttatccaaatgctgctctccatctgtgttctagcctttcagaaggaattgaatatgtgaacaaaaatatatatgattatgttttagtagatatggcaatccctagccacccaatagaaccaggtggtggttcgcctttatctcttttgacagggggcttagaaattattcttgaacttaaatttttagaacgaaaagattcttgcataataattactcaataccctgatcttgaattatgcgggcaattattttcattagatgaagccgttgaagagcttagagttcagttggaatgtaatgttttagcctgtatagaatacaatgaaggctcagagcagtggaaaaaaaaattacgcatggtgcttaaatga

SEQ ID NO: 85767 - DNA, 1161 bp, Citrobacter koseri
atgaatattttaatattagaagatgtccctaataaacttgaagaaataaaatgttgcattattgatgtatgttctgaagcactaatcatagaagctgttgattgggaaagctatttgagggtggtaaactctagaaaatttgatcttataatagcggatttagtagttcccagatcaaggggtgaggctaaaacgatagaaattgctcaaatgttggttgatgatgcaatggacgttgctagtcccaacttatatacaccagtaattgcgctaactcaatatggggatattgatatttttaagaatcttaataataacaaaataatagtcctttcatattcagatacttccaactggagagatgctttgaaagacatcgtacttaaaaataaacctaatcagatttatgactttgtcgtgatatgtgcgctttctaaagaagcaaatggttttaaagatgctggttataatgtaggtgccacggaaataatttttggacttgtgtgccacaaattgacgattgattctcgtaatggacttttggtaacctgcccaagaatgggcctagtaaatgcagccataatatcaacaaaaataattgaatgcttcaaaccaaagttgatatgtatggcgggaatttgcgcgggcatagagaagaaagttaatatttatgatgtagtaataccagaaatttgtcatcaacatgattttggtaaatggggaaaagatggatttgaacctgaaccatacagtgtgcaactaaataataacactagaacaaaaattagtcacttaatagagcaacctgagtttattaaaaggatctctgaaggtctctctcccaaacgctctgagatacctgataactgtgaagaagtacgtccaaccgtcatgctcgctccagcatccagtggtagtgctgtgatcgcggatgaaaacatgaatgaaatagtaaaaaaacaacatcggaaaatgactgcttttgagatggagtcattttctgtttatgaatccgcaagactttcagaaacaaatgtcgattttttcagcgccaaatgcgttgttgatgatggcggtataaacaaaagtgacaattatcaccgtttggcttgtattatttctgccaaagctgtttatgaaataattaaaggttgttattag

SEQ ID NO: 85768 - DNA, 1017 bp, Citrobacter koseri
atggtcgccaccgcacagaacacccagtcacagacgctgaccaacagcggtctgttgcagggcgatgcacaactgctgctgaacactcgccaactggataaccagcagaccgggactctgtacagtgccgcgaatctgacgctcactattccgggcatcgtcaataacggttttatctccggtgatgccgccctgaccatccagaccaccaccctcactggtgaaggtctgttgcagggggtgagcgccctgacactcgcgggtgacacactgacgcaaggcaccgcaggccgctggttgaccgcaggtgcgctggatatcaccgccgcgtcgcttaccaacagcgggcgtgtgcagggagaatcactcgatctgaacatcagcggtgagctgaacaatgccgtgaacggggagatgttgagcctgaatgcgctcaatctgaccacggcgacactcattaacagcggtacagtgcagggcggcagcgcaaccacactcaccgccaccacgcgcgtgcaaaacgacggcgacatcctcgctggcggcagactcacactgaccacgtcgcaactcaccaccggcaactacgggctgctccaggcactgacgctgctggttgatgccatgcagactattaacggcgggaagatagtggcgactggcgatgccgaactgcgcggaaccagcctgaccaacaccggcacgctacagggtgcaaatctgcaggtactgaataatacgctcactaacagcggcaccatgctgggtactacttccctcactgtgaaaagcgctaccgtcagcaacgcggcaagcggaaaactgttcagcgcaggaaatctgttactcgacagcaacacacttaccagtgccggtcaggtggtggcgctcggtgatgccacgctgacgccagtcatggcgcgggctgaaggcggttttacggtttttgggagaaatggggtaatgccaggatacacgagctcgaaggtagggatgagggagggacaggcaagatag

SEQ ID NO: 85769 - DNA, 234 bp, Citrobacter koseri
atgcaacagaaccggatcaaagcggtacgcggctataaagcccacgtcgtatcgctggcagatcttctgttgttgcccctaatcgcgtacagcggcagtttaacgtcgtgcgggccaatcaggtctgggtcaccgatattacctatagtgtgcccggagttcagggcgagcatggacaccgaaatgaaccacgagtctgtctggaatactgaacaggtcactcacgatgagtaa

SEQ ID NO: 85770 - DNA, 309 bp, Citrobacter koseri
atgtttacgattgtgaggtcactccacaattctaaaatggagttcagttgtaaccatgccccgattggggagttgcttgctttctattcaccattaaacgaaaattatcatacacatcatcgagtgctgtctgaatgcacactagaagttagagctttactcgagttgactactgtgattgcatacagttatatgagggtggcatgttctcttcaagtggttcacgtttttgaagagatgtgtcaatccatttacaatgactataaatgtaacctgagcgatgcagcaacatctgctttaatcgagtga

SEQ ID NO: 85771 - DNA, 1194 bp, Citrobacter koseri
ttgatatctccctgtgatgtgcctacacatgacgtgctgactgcgggttttccctgccagccattctccaaagctggggagcagcttgggtttgagtgcacgaaacaaggtgacttgtttttcaatgtggcagcaatactcgagcagaagaagccgagcttctttattcttgaaaatgtaccgaatctgctcaagcatgatgaaggtcgaacctgggaagctattcaggagatcttagggttaggtccaaaaggactaggctatcacattgctgctgaacgcttctcaccgcaccattttggtatcccgcagattcgagagcgcgtatatatcattggttcacgaaagcctctaaaagatttttcttggcctcaaagaaatccggtagagacaaacattgacagcattctagatgatcatccagctaatgcgaagccgctttctgcgcaggttttagactgtctaaatgtctgggcagattttttgaaacgctgcccagcagatgttgaattgccttcttatccgttatggtcaatggagtggggggcaacatacccatacgaacaggaaacaccctacgctttaaaagaggattatggtattgacggtcttaaggggttttcagggagccatggacgcaaaatcggctacctgcgcaccctcgaagaacgttggttggctttgcctagccatgcccgtactcctcagcgaaagtttcccaagtggaaggtagatttcattcgccagaaccgccagttctacgctgacaataaggaatggattgatccttggatgaaaagtattttgaagtttccgtcgagccttcaaaaattagaatggaatgtcaagggtggtcagcgcgatctgtgggagtacgttctgcaattccgtgcatcaggagtaagggtgaaacgccgtaacactgctcctagcttaattgcaatgactgacacgcaagtgcccataattgcatggcagcggcgttacatgaccccagaggaatgcgctcgtctgcagagtttagacgaattgaaggcgctgccatctactcctactaaggctttccatgcacttgggaatgctgtgaactcgacagtcgttgagttggttgcccgtgctctgttgggggattttataggacaatctccggtaactggagacattaaaattagcaatggaaaggtcgaagcatga

SEQ ID NO: 85772 - DNA, 1599 bp, Citrobacter koseri
atgactgatagtcaaaagtctagccaattaccagctattgaaatccggcccgaagtaacgatgctctcggtgctacgccatctaaattacaagccatggtttgccatggccgagttcgttgataacgcaattcaaagtttgatcgccaacaacgatcaattgcaattgctgcatggtggtaaatttcaactcaaggtggatataaaaatagatacttctggccctggtattattgttattagtgacaatgctgctggaatctcagaagttgattttcctagagcatttcgggctgctcaagttccagaggatcgtagtgggctttctgaattcggcatggggatgaagagcgcagcatgctggtttgcggagaaatggagtgttcgtaccaaagcaattggcgaatcaatagaacgtacaatatatttcgatgttagaaatattgtcgaaaacaagattgaaagtttgaatactgaagttcgtaaggtcgacccattgtcgcattacacagtggtgattctccgaggcctacatcacatgccgcaagggcgaacggtaggcaaaattcgagaccacctagccagtatttatcgaatgtttctaagagatggacggttgtcactaagcttaaatggttcatcgctttcatataaatgtcctaatatactcactgcagttgcttatacatctcccggggtacaggcgcagggtgataacgtagtacctgttgaatggcggaaagatatcgatttggattttggtggaaatcagcgtatcacaggttttgccgcactacgtgaagttggttcaacaccattggccggttttgctttatttcgccgtgacagattaatagaaggtagcttggacgagagctatcggcctagctatgtatttaaacaaactaacagttatccctatcaaagattgtttggagaactgcatgtcgaaggattcgaagttagtcatacgaaagatggctttcgctgggaagaatacgaagatatttttttggaatatttgaaagctcaaatcgaagagcccccactgaatttactcgctcaagccgaaaattatcgggcacttccttcgcgaaaagctattgagacacgagctgttgcagcgactgccgctgttgcaaactacgtcgaaaaagaagttgccccactgttgattgaggctaataaatatccaacagatgtagatgagttgccgtccgaactcgttgctggagagctccaggcttctgagcgtgttgtcgaagttaatgatggcaattaccaatgggtcataactttgagaacctctgtagatcctgcaacagaggattgggtttcagtcgcagttactcagaaacccactgactctggcgaggacatccggcgtttgactattgatctttcattggctcatcctttttccattgaatttttgggcgtgaacaatgagaacgttgaagtattgctgcgtatttcaacatcgatatgcattgccttgatcttaacggaggatgtttcaggagtgccaccagagagttttctttatcatttcaactacttgatgagaggtgctctgttgagaacctcgttagagaaataa

SEQ ID NO: 85773 - DNA, 2259 bp, Citrobacter koseri
atggcaacctctatagaaatcctaaaaactcttcaaccacctttacgttgggtgccggaaaaaaaagacattactgaggattttcttcgaagcaaatccaatgatcctaatggtcctagctacgaggatttaactgatggtatgaactctgtgcttcaagaagcacaaagaattcttggtcgttgcttgcctccgacagagccctcagggagagaaacggggttagtagtgggttatgtgcaaagcggcaaaacattgtcgttcgaaacagtaatttctctggcacgagataacggttatggacttgtaattgttttagcaggtacgaagaataatcttcgtgatcaatctgaaaaccgcttgaagaaagaccttggtatcgatgatggagagaactggtatcactattccaatcctaccgataacgttaaaagacagatcgaagacaaacttgttgcttggaagaaaaaacctacaaaaaaagccattttagttaccgtgctcaaacatggtggccatctcgaaaatttagctactttagttaaaaagttgtcggtatcagatgttccatctttgattattgatgatgagagtgaccaagcaagtttaaacacgaaggcggctaagattcgtagtggtaaaattgcaccttcagaaatgagtactacctacgaaaaaattagtaagctacgtgacaaactcccacatcattcatatctgcagtacacagctacaccacaggcgaatcttctactggcgcaaactgatttactgaatgcttcgtttgcagaactggtgacacctggtgaggcttatacaggtggaaagtctttcttcggaaagaatacccccctcgtcagagatatcccatcagaggaagtgcccggccccacgaatatattgaaagcgtcacctaaaagtttactgagtgccttacgttacttcttattagcatgtgctcatcacgcgttgacgcgtgagcgaaagaaagacagaaaccgctcaatgatgattcatccggcgatggcgaccacatcccatactcattacaaggattggcttgataagtccttaaagacgttaaagtcattcgtcgaaaagcaatatactaataaaatcgatgctgtgactcagatgtttcaacctgaatatgattcgcttaaaaaaacatatccaaaaattaaaccattgattgacttgatttccgcaatggttgatgaagtattcagcgaaatgaatcatgtcgtggttaatggaactaaggacgcggagaaaaatattgactggaaagccacgccatactggattctagtgggcggcgctaagctagatcgaggttatacaatcgaaggcctttgcgtgacctatatgccacgtcccttggggacttcacctgcagcagatactctgcagcagcgagctcgatttttcggatataagaaatcatacttggggctctgtcgtgtttttgttcagcggaatgtaagcgatgctttcaccgagtatgtagagcatgaggagtttgttcgagaggccttagagaattcgcggggtaaacctctttctgactggcgccgagattttgtgctcacatccatgcttaaggctactcgtgcgaacgtaattggactcggtacgcgccgtattccagctaatggctggatggtgcctgatgttctgcaaagggatgataatgctgctttagccaatcaagagttgctttcttacgtggtaaagaaatgggctgctgaatatggtgctcctgtcaacgcagcagaattttctcaattcagaggcggtaaaaatttatcaccgcacttcatgtttgaccctatcccgttaaaatcggtacttgaagattttctgcttgaggtaaaagttaaagatccttcagatgctgaggaacatagtgcgatgttgctcgcgatagcagcacttctcaggaagagtccagatctcaaggccgatgtatttcttatgaacaacttagtagcaggttatcgaacacgatccactggacgtggcgtagaagctaagcaccgctttgcaccaattaaccagtatttcagccaaagtgcagacactgttaatgacaggagtttttgctctaatgaacgtgtctctatccagctacgtcgattcaatttaggtacgacactgcgtgactccggtagtgccgatattaaaaatataacttggtttgcattacatgtgccaagcaagttgaggacggatttactaatcgaggagcgccgttag

SEQ ID NO: 85774 - DNA, 975 bp, Citrobacter koseri
atgagtatcttcgataatttcttaaatttgccctgtgccacgtcagagacgagttttacggcgatccctttatccgcacaccgtaatgactttctcgcaaaaggctctgatggctcccccatttttttattgcacgatgccagcgaagcacaatatagccctagtatgcagttcaggtatttgagtgcgcagtttcatgctacttgcagaattcataccgatgataaggtgctacaggatcaatttgccctcgtttcttgcgatggcgctgtgacggatcttcatgaaatatttgtgcgttgtttcagcgctgcgatcgaggaacttcctattaattctggcacgcgagaattgaatacttgtattcagaaactagtggatctttttagggccctatctcagccaagtgggaaagacgttctgggtttgtggggcgaactttacgtaatcgcaaatagcggcaatattgcgggcgccatggcaagttggcacgaagatccattcgatcgctttgatttttcatgggagcatggatgccttgaggtgaaggcatccatgcaatcagctaggcttcataccttttcacttgaacagttgatgaaccctaaaaaaggaattggttatgttacgtcattgctattacaacctttgaccgcaggacttgggttaattgatcttgcgaatttgattgaaatggaagtgaaacattcatcggcactgaaactgaagctttggaaaaatttggctaaagctttggggggagatttttctgaaaaactggataagcgatttgatatctcttatgccgaacgtaatatcattgtgtacgcaatggatgacgttccaaggcctgaaaaaccaaatgatccgcgtgtgatggcaattcggtttaccgcagatcttacggctacatcgtcctcacttaaaaaaagtgctttgccatcattgtgcggcatttttgaatctgcattgtga

SEQ ID NO: 85775 - DNA, 201 bp, Citrobacter koseri
atgagcatgggggtttttaccgtcaagatcatgaaaagcgatatcagcaatcatgcccttatcaacgaaatttttctggcagtattcaacgaccagttttattttatcttcattgttcagctcacatggaatagcgacatcaaaataacgggctgtttgaccgtctttctgacgctcaaccttttctacctcattccataa

SEQ ID NO: 85776 - DNA, 270 bp, Citrobacter koseri
gtgaatttgatgcgaaaaattgaaatgtttgatagttgtctaaaaacatactatcaaaatatagattgcattcggatgagtgaaattgaattcatcagacaaaagcacatcgaaataatgaatgctactcttcctacagtaattgaccaatataataaatccatagaatatatcactttcattttgagttacaagcaaagtatttttgattatctgactatagtaaaaccaaatgaagagacacatccgattaaaattaccatttggtga

SEQ ID NO: 85777 - DNA, 840 bp, Citrobacter koseri
atgtcaattcctgatagcatcgctgccaaaatacttgttaagtcagctagacattgctgcatttgcagaagattttcaccattgcagattcaaatacaccatattgtcgagcaaagtgaaggtggttctaacgatgaagataacttaataccaatatgtattttatgtcactcctctgttcatacaaaaatgcacatgactaaaggatttagcagggaagaattaaaagggcatcgcgatgctgtgtacgatatggtggaaaaagggaagctacctttacagcctcagatgactggtgaagaaatgcacgcactatcggctgtcatcattgaaaccttgaaagtagagggtaagagcaaggatctttctgatcgtgcaacggaaattttattggcggtagcatgtgaaggaagcccagcattcatagaacgaactgatggaggattttttattacgatcaataggcagaattttttctttgattcgaaggacgcaaaacaataccctgaagagctatttgaacttgcgcactctggttttatgagccttgatggagggcgatcaaacataacagatgctggtcttgctcatgtacaaaagctcgtaaaaacaactgccaaatatgtggaaaaaaaagtcaaatgtatgaagtgcagtctgcattttactattttttcatggtttcccgccgggcatcgtgcagatacgcttcattgtccagagtgcggacagtctgaagggctatttttggtttggactcagcagaagtttggttttatttttgaccaagttcctggtaattctgctttatgggacatgggtgatctcacaaaattatag

SEQ ID NO: 85778 - DNA, 2385 bp, Citrobacter koseri
  misc_feature (1048)..(1057): n is a, c, g, or t
atgagtttagaaataaaaaaacaaagtaacccgttttctactggtggtggaggagttaatttcgaaacaagagttcaagcagctttcgcactatccttattgactaaatcctgtgttccttgtttgagtaactatatgagggctaaagagttaaagtttcagaacaaatatgatggtgtaaacactgatgattttgtattgactgccacagacaattcaaataatgaaagtaagatctatgctcagattaagcatgaaataactattagcggctcatcaaactcagtatttgcagaagttataaatagtgcttgggcggattttaaaagtgtgggctttaagtcagaaagagattctatcgcgttaataacaggtaatttagccaaaactgacataaataatactttgccgttacttgaatgggctaagttttcatcgaattcaaaggattttataaagaaatctcaaacccaaggatttacaagtgaagcaaagctcgaaaggttagaagtatttagagatcaacttacttatgcgaataacggggtagctatctcagaagaagaattgtggtctttcttgaaatcgtttcagatattaccttttgacttagatgcagaacattcaatcgtagcaaacttactttgttcattgattcagtgttactcagacatattaccttctctagtcttagctagacttgtttcctgcgttcaaagtttcaaccagaatgcgggggttttaactcaagataatataccagaagacgttaaaggattatttaataaatcaagccgcttatattttgagaatgacttgataaagctttatgagcgcagtcagcatatttttgaaggtatttctacaaatataaatggactccatgttgataggtcagaacaactggcagcactatctagttgctatagagatagtgagtttttatttgttaccggtgcaagaggggctggaaagtcgggcgttgttaaagattttatcacaacaaaaaatatagatgttccagtcttctacttaagagctgaagatnnnnnnnnnngtcacttaaatgaagttttcacttccatgggaattacatcttctttgggagaaattgaaagtcatttctcattgcttcacgaaaaagtactcgtaatagagtccctagaaaaagttttagaactaaattatccaaatacttttgttgagttattgcaatacattagaaaacagtctggttggactatcattgcaactggccgggactatgcttatcaacaactgtcatttaatttcctacagccttgctctataaattttagcagcgtgaatattgaagggcttgaagatagtcaagtcgagcaagtttgcgagcatattccagagctaaaatctttagtatctaataactcattagtagaactactaagaataccgttttttattgagattgctgtaagagcaataaaaaatggcgctcaatttggggttggagatactgaagaagactttagggatatagtgtggcggactgtcgttgcaaaagaagctgatagaaagtcagggatgccagatagaagaagagaaacctttattaaaatagcaatagagagagctaaaaagatgctttttggtgtcagagcaagcagttttgacccggaagtaatcgcaaagttggaagaagaccatttgatctacagagatcaaaaatcatcttgtgtaagtcctatgcatgatgttttagaagattgggctttagaggagttcatcgatagggagcattttgataattctcataatgttgcaagctttttgttaaatataggaaatgaacctgcgataagtagggcattcaggttatggctatataggaagctaaaatttgatgatacaactaatgaattcgtagaaggtttattatcttctgatgagatagagagttattggaaggacgaggcaatttctgcaatcatgcagcatgactcccctggaatatttcttaattcacttaagcaccagcttcttaaagatgattgtgctcttttgacacggttttgttttattctcagaataacgtgtcaaagaccaatatctttatacaacggactactgataaaagataaaaaatcgggattgctaaaatcccttttcctaaagccatatggagaaggttgggaagcactattcaattttatttatgaggaaaaagataatttgagtagccctgtgcgtactcaaactattgaattgatagatgaatggtctggtctcattaatatacatgatgagttgccaagagcgtctgaaaaggttggttttttaagtttatggctccttgaaaaggttaaagactcatatcgtggtgaggggcaaagaaaaaaatattaa

SEQ ID NO: 85779 - DNA, 306 bp, Citrobacter koseri
atggcaaataatacatcatcaactcaatatgtttcacgtttattaagtaagggagaagacgataggctagatgagctaaagaatattctatctgaattagatataggcatcagactaaggaaaataacgcaactccaaaaacatgagatcattaatgaaataaagcgagccattgcgggtgaaatagaaatttattccgatgagaaaaactccccatctgataatattcgtcgagggaatactagcgctagtaatgatgacttagtggatttgatagcaatgcttaatagagggagaagtcaatga

SEQ ID NO: 85780 - DNA, 507 bp, Citrobacter koseri
atgagtgatagtgcttataatatgtattcattagccgtgtctagtcttgcattgctactgtcagtgtatacgttcttcaaatcaagaaaagatattaaatttgcacaagagaatgcaagtgaagcattgaaattgcaacatggtacaatcgagcttcaaattcgaactggtataactaacgcaagaaatacaataaacaacttaacacctatattaacaccatacttagcaaaaaaacaagcaggttcattgagcgtcgaggaatcttattctcttgatttattatataaaacttatgattcttgtattgaagaccttctcaaccaatatgatgaggcatgcaaaaaatatatttacggcaaagttgacagagcaatgttcaaagagacatattttcatgaaataaaaaacataacatcaagccaagacctttcttcctattataatttagaggcaacgaagtacacatccaccttaagggtgcgcgatgagtggataactgaatga

SEQ ID NO: 85781 - DNA, 1752 bp, Citrobacter koseri
atgaaagatcttcgttacttcctaaaggaaagttatatcaatagcagggccttagttattggtataaacaaatataagaatgtatcccctctcgcatatgcagttaatgatgcattagaaataaagagtttactcatcaatgaattcgatttcgaggagagtaacatatcatttcttcttgatgaaaatgctaccaaagaaaatatattaagagcattttccagacttacaagggatgatgtcgaactagatgagaggattttcattttttatgctggacatggtgaaacacgaactggaatttatggtgaagttgggtttcttgtgccgcatgatgcaatcacagatgatctatctacctttatacgctgggatgaacttaccaaaaatgcagagttgataagagctaaacatatacttttcgtcatggatgcctgctatggtgggttggcattaacacgaggaataggtccaggaagtactcgcttcttaaatgatatgatgttgcggtattccagacaagtgctgacagccggtaaagccgatgagactgtcgcagattctggtggtcctttgccaaatcattctgtattcactggccatctaatagaaggccttaaaggaaaagcattaacagaaaacggcgtattaaccgccaatggtttgatgacttatgtttacaacaaagtatcaaatgataaatcttcaaaccaaagtccacattacggatatattgatggtgatggggattttatttttaaatctccttcttggtccaatgacaattcagaggaaacaacggataatgatagattaatttcgattccctattttcagacagaattctctcctttaaaggctgaagataaaataagaaaaacaaaacaattactggcgaatgattcatcctctatcgagttacatgactttgtgattgatgaagttaaaaattttctttctgaaacaagtgaagattttttctcagtaaacgggcagtttactaaagaagaactccttgagaggatttctaaatatgaaaacatatctaaaaatataatactaatagtttcttgtgtttcatattgggctcgaacaattcatattccattattaagtaaagcattagctcgtgcaaccgacagactggaaagaggaagtggtttaacaatatggttaaatctacggtggtatcctttaataatgcagttttatgcattggggatagctgcatttgaaaataaaaagtatgacacattatttaatattttctttataaaattagactcatcactttcgagcaatggtaagtcgttatatttctctgaagccatttccaatgccattcttgagctgactaggcaagatgtgtttaagcaactccccggttttgaaaggcatttcgtaccaatgagtgagcatctccataccatcttgcaaccattaattgatgataccctgtttattggaaagaattacgaaaatgcttttgatgattttgaatgtttctttgcacttgtcattgcagatctgtatcatcagcaagagcgaacagtatggggacctatcggtcgttttggttggaaagaaaaaagatcgtacaattctccattatctaatatgatcaaggaagccaaagaacaaggcgttaactgggcgccattaaaatgtgggttctttgggggggatatttcgaggttctctttagttgccgatgaatatttaaaaggaatatcaaacttacattggtattaa

SEQ ID NO: 85782 - DNA, 381 bp, Citrobacter koseri
atgcaaaccttatcatcacacccgacacgggcggctcagtcctgcctgtcacccgttgaaatctggcagcgcctgctgactcatctgttgtcgcagcactatggcctgacgctgaatgacacaccattcagtaatgaaaccaccatccaggaacatattgatgcagggatatcacttagcgatgcggtgaactttctggttgagaaatatgaactggtgcgcactgaccacagcggctacacaattatggagcagtcaccgttcattaccagcatcgatatccttcgcgctcgtaaagctacaggattgatgaaacgcagtaactacaaagtagtgagtgatataacccgtggctcaggcgaaaaaggaaacgaacattga

SEQ ID NO: 85783 - DNA, 366 bp, Citrobacter koseri
atgaacattcactcagaatccggtatcaaaccggagaatcccgcctgccagcagtggggacttaaacgcgctattacaccctgttttggagctcgtctggtacaggaaggcaaccgagtgcattttctcgcggaccgggccggatttagcggtgctttcagcgatcatgacgcgttgcgcctcgaccaggcatttccattgatgctaaagcagctggagctgatgctgattagcggtgagctcaatccccgtcaccagcactgcatcaagctgtaccataatgggctcatctgcgaagctgacacactcggctcctgtggctatgtctacatcgctatttatcccgaccagcctgaaccccattaa

SEQ ID NO: 85784 - DNA, 876 bp, Citrobacter koseri
atgaataaacctcatggccttcagtcatttgaacaaccgctggcatctcttccgcacacgcttcgccagcttatccttgaacgtattcaaaatctgacccactacgagccggtgattggcatcatgggtaaaagcggtgccggtaagtcctcactctgtaatgaactcttccagggcgaggtctctcctgtcatcgatgtgaacgcctgtacccgtgacgcactgcgctttcgcctgcgcagcgatgaccgtagtctcgttatcgtggacttgcctggtgtgggagaaaaccggcaacgggatcatgaatataccgcgctgtaccgccgtattctgcccgagatggatctgatcctctgggttatcaaagccgatgatcgcgcattgtccgtcgatgagttgttctggcacagggtgatgaaaaatcaccgccagcaggtgctgttcgtcatcaaccaggcggacaaaatggaacccagccatgaatgggatgccgctaccggtacaccttccgtgcagcaacgggcaaacctcagagctaaacaggctgcggtgacggcgatctttaaaccccaccatccagtctgcgtggtctcagcccccagtgggtgggggattgaggaaatggtggagacgatgatgtgcagcctgcctgaccacgccaccagtccgctggcgactcaactgcatggcaggctctgcacggagccggtaaaaaaacaggccagggacagcttcagccatgccgtgggaaaggtgtttgatggcgtggagtcatcccctctgcttccggtcccggttcgggcggtcattcgtaccgtgcgggaaacggttgtggcagtcgcacgggccgtctgggactggatattcttctga

SEQ ID NO: 85785 - DNA, 729 bp, Citrobacter koseri
atggttaacattcgagatgaatttactgaaaaagtaaagaaaacccttcaggaaagagtcgctaatcgttgctctaacccaggctgtaactgcctaacatctgggcccaattatgatgaggaaaaagctacgcgtattggtgttgcggcacatataaccgccgccgctcagaatgggcctagatttaatccatttatttctaatgaagaacgtaaacatatatcaaatggaatatggctgtgccagaattgtgcgaaacttattgatagtgatgaaaaaatctatacagaagttgtgattcgtgaatggaagagtctaactgagagtaaaattagacaagagcttgaaggtagacatttagaagatgaagggccagaaacccttggatggtactgtggccactgtaattctttcgttgcccacggtcagatggtatgtactggttgccaagcagaagttgcgtatgaggctacaaaacatgaagttactaatgccagggtacggggaggaactcttggagcactggtggggggagtaattagtttcggggtcccaagtttttttaattctcactttaatttttccattccggatggatgggggctcggtatatattcactgtatattattgcagtgccagcaatgctgggggttattttattcgaaaactttgaacgaaataaatttcgtaataagcccccaaggttttttcggcaacgcaatatttaa

SEQ ID NO: 85786 - DNA, 1767 bp, Citrobacter koseri
atgaatagagactggatacttcaaaccagcgagacccgccgagctttcgcgaatgctacatgggtacctctgcgggcatcccaagagcaagcccgtgacattatacgggataccgaaattggttatgtgggagagttcttcgggtgtggttcagtagcgttcccaccacagcaacgagaaattgctgagcgattgagttggagtgatcttgggattgcacacagtgcaaagccatacgcctacgaggatggacactactcgcctatagatgagtaccagtacaatgataaggagccaattggcgttgagctggtatttgtccacaatcaacctgttgtcggcggaacagaatggatactaaaccctgatctggtcgttgctcttggcttaattaaggatgggaataactgggttagacctgaagaagattttgtgatcgtagctcgagagattattgataaaaatgggaaataccaactgattgagatcaagcgggcgtttcttatggactacctggctgccagagggctcgcgctgcgcctttcatactatcggcaacgtgtagagattgtttctgttcttgaaggcactagttacgaaggcttagagaatcatcagagtgagcgagatcacgggcgcttcgaattgctaattcgcagtctcagtgaagtgtacggaggctgttgggcatcttttcgtgtttggagaactgatgttgatgaacaagaggacgctccagttcttggcccagaggatgatgcaaatacagggtttgaacaaactgaaggtattcgaactggcccaaatggagtgcgtattgaaggagagttttggagggatgagtggattgatcaccagggtttaagtgtgcgtgtccgaggcgatgctgatcaaacattaccgaatttcattattgaaactgatggaacaagagctgcatcttcagcgctcaacaatgaagatgttggtcgttggctttggtttcgttcaagcgtggtgcttgaacttttaagtcatcgaggtttcgtcttaaagtggtatacagcagaaacaggtggaattctttctacctctggatatgtgacacatttcggtataaataccgctgacctggtaacggtctatgcgtacgacattgcccgtcttgctgcctgggaacaacacctttgggctgctcataatgttgcgccggatgggaaggtttcagtggaactgctttcgtctcaagtcaggacacaagtggcttccacacatgcagttgaagagctcctatttgtaagcatgcggatgctcgaacagggattccgtaataaatttgacgtaagcttgtttaatcacgatatagatgacggagcggctatgcaattggtctcccgtttcatgtgtagagacaaagcatcattgctgcgtctcgcgaaggagatcattcgcgtgttttcagatcgtttaaatattcgtgagctacgcaaactttcaactcacacggacagggataaacttggctctaacaagctactccaagatatattggtaaaagaagttggggaagcgagagctcgtttagtacttggtccggtagtaggcgcttatgagttaagacttggagatgctcatccgacaggctcaaagattggtgaagccttgaagctagccggcattgatgagagccaatcatctttacggcaaggggagcaacttattcacaacgttgggcaatccatatggtggattgggaagctactttttgagaaaaaggataatgcttaa

SEQ ID NO: 85787 - DNA, 1428 bp, Citrobacter koseri
gtgatcctgcttcaacattttatcttcgatgtttatgccttatcgttacccaaaggcttgggatttggtgatgatcctccagtatgcgcatggagcagtagtgatcatctcaccgtaggtgcactgacaaagaactgccttagcgggaggcacggtattcttattatgcggcgtcgagaggacgatgtatgggcagtgttgcataggaaagtagatttctacagcgaagaggaggccctaacaatcattcgtcaggagtgtgatgagcctgcttgccgtgttcccgtgccttcaggtactcgcaggcgcgtgcctctttgggatactaaaggatgtaagccgagtggcatctttaagctgcttggccaatcatgtagagagcgtggcgcatggatgctcaatcagttgtatctagcgatgcctaatccagacccaaactgggctagagactgtcaaacagccaattttcatactcgactctgggaggctcagcttcttgctagctttcgtgagcaggggttattagtaactcaagattatccctccccggattttcacgtgacgaataaagctggcggagaagcttgggtggaagctgtgacagtcaatccactagagcgatacgatcacgccagcgcagtaacagctccgtttcctcaagatcgacgtgaaagggtgctgggaactgcagctgaacgctatgcccggactttgcggaataaattgagcaaaaattataccgatatgccacatgttgctggcaaaccgtttgccattgcaatagctgactttcactcaccggggtcaatgatgtggagccgtgaggctctcatttcatatctctacggattttatgtaagagaagtattggaagaggaagagattgtggctgtagccgaaggtctcgttaacctgccaggcgatcccaatatcagggccggtttgttcttttactccgaaaacataaccctgtcggcaattattttttcgaatgctgctactttggccaaattgagtcgagtgcctatttccttcggtggtagaagtgaagactatcgctatgtgagagttggtgaattcgctgacgacacccccggtgcagtgcgtggaattccttttagcatggatgtgaatagcgacgaatatcgtagtttatggaagccatatagttatgagccatggaccgcggagatcgaggtgttccacaacccgaatgcgctacatccaatgaatcctgcgttatttcctgaggcaacgcattggattccaaccgatggtgggatagattgcaagcgctactataagcatagcatcctaaagagccgaactttgattcaatcttcactcataccaatccccgtagcgaatagtctgattttccaggacacatatgacactgatggaacactggacgatatgagtgaataa

SEQ ID NO: 85788 - DNA, 555 bp, Citrobacter koseri
gtgaaatttttcccttactacttatgtaaaaacttacaagaagcaaagaatataaataaacaccctgttcactttgcaataaataaagaatttcatattccagaggagaatgtagcgattgagatagaaggttcccggagacgaatactaaaggaactcataaacgatattggcaaaggagacacaattatcctgactgacttaaacagcctgggagagaatattgacgatgtgcaaagcacgttattttcttgtttcaagaaagatatcaacatctactgttatcacccctacagcagaattgaaccatcagcggaaagttgtatgtcgtttttgatctcggctcaaacccagattgatattcagaacttaaaatcaacccgaagcaaacaccggacattaaaaaaaccgctaggccggaaggagggaagcaagcacaaactaagtatctataccctgaaactgaaaggctataaacagtcgcagatagcccaacaactgggcatcagcttatcaacagttaaacggcactggagtaacggaattatcggttag

SEQ ID NO: 85789 - DNA, 687 bp, Citrobacter koseri
ttgaacatatcacgctccgctgtatttgattacgtaatgaatgcacatcgcccttttgcgaatcaaataagccattaccattatgaggtaaaaaaactcgaagagcgttttttaaatcaatcagtagatgcacatttatcatccgttcgtggcaaaccagaaattactcgtgaggagctatttagttcggcctggaagcacaatatcaaaagtcagctttacgtacctagttttgaacactatcggcataacaccagcgatgggacaatgggaaaaggtgagaaaaaaatcatagaggaacagcttgaaagctttgttgatacttaccgcatgaaaggagctattcacattaaaaccgaccgtatcgttgatacaaatggccctaacgccagagggtgctccagcacaatcctcattaaagagaaatcgtggaatggttatttttttgactttaatcacatagtaaccctgcctatctccgacctaatcatctttggtgtcaaagaggttttaaaacgcgagaagatctattttgacgctccatacatctgctggataaacatttaccacaccaatgacctggcagttatgattccaattattcgtgaggaggagatatcagaccatcgcaaaaatgaaaaaagcattattattatcaatcctttcaccagaggtgccaaaaagtaa

SEQ ID NO: 85790 - DNA, 225 bp, Citrobacter koseri
atgagcacattcgaactctcagatattacccagccacaactcctttcaacaattgagttagctaagcttattaataaaaagcctcaaaccatccgcgcatggctttgtcaggatagattacctgatggtcttcctcggccaatacaaatcaataagcgaaattactggttacgcaatgaaattgcggaatttatatatgcattatctatacgaggaaacctatag

SEQ ID NO: 85791 - DNA, 1326 bp, Citrobacter koseri
atggctatttcacgacaaaaacttaccttcgaacgtctccgtaaatttgaactcactgaaggaagatcacagacctttctctgggatacggaagtatcaacattggcatgccgtgcaaccaaaggaacaaaagcatttatttttcaaagtgtctttttgggaaaaacactacgcatgaccatcggtagcatcaacgactggaagattgatgatgcccgaagtgaagcccgacgattacagacattagtcgatacaggaacagatcccagaatcgcaaaagctgagaaaattgcagcgctgcaatctcagcaagcagaatctcgtaggaggaaagtgattttctctgccgtttggcaggaatatcttgaggagttaaaaacgggtaccagtgcaaagacaaagcgaccctattctcagcgttatcttgatgatcacgtccggctctcagatcgcggaggaaacaccaagaaagtcggcagcggtctaaccatggctgcccccctggcatactttcttgatttaccactcgcagaaatcaccccatcgctcgtgactgattggctaactcgcgaaagaaaaactcgccccacagttaccgcaaactcctatcgaatacttcggaccttccttaagtgggttgaagaacacaaacaatatcatggagttatacccgtagatctaacacaagatcgaaatgtcagaaaaatgattcccgtttcaaccagtaaagcggatgactgcttacaaaaggaacagcttaaaagctggtttgctgctgtgagacaattacgcaacccaataatttcaacctatcttcaggttctattattgacgggagcccgacgtgaggaaattgcgtctttgtgctggggcgatattgatttcaaatggtccagcatgcgtataagggataaagttgaaggcgagcgcaccattccgctgaccccttatgtctcaacaattttgtccagactagccgatgcgcagaaagttaagcacgatcttagccaatgggtttttggtagcactagcaaaagcgggaaacttgttgaacccagaaaagcccataaccaagccttgaaacaggcaagcttgcctcatatcagcttgcatggtctgcgtaggagctttggtacgctctcggaatgggttgaggtaccaacaggtgtcgttgctcaaatcatggggcacaaacccagcgcgctcgccgaaaaacattatcggcgtcggccacttgatcttctgagaaaatggcatgaaaaaattgagacatggatcataaaagaagcagaaataagcaaaaaaagtgaagttgataagcgttga

SEQ ID NO: 85792 - DNA, 186 bp, Citrobacter koseri
atgtcccgttttcatgtaggcgtaaacctgagaacgcttgagaccgattttatccagaacctgtcgcaatcgcaggaatcgatgaaaagccaatcaaaaataaacagaaaatatcaaattagatcatttcatttgattcatgaatataaaaacaattctcctaaaattatcaacaacaggatatag

SEQ ID NO: 85793 - DNA, 960 bp, Citrobacter koseri
atgaatagtgaacactttgtacgcctggcattacatatccttaaatgtagccaaaaagaactcgctggtcgcttgggggtttcttcgactcaaataagcaagtggaaaaaaggtgaacatatgtctgatgaaatggaaaataaattcagagaaatcacacaaataggagaatattccccacaacttgttgagtggtcaggttcagtcgaaaatgcagcaaagtgggatcatttacttcacttccttgctgaaagggcacaagacaatgctgaaactggttatatcactatgcctctccaagatgaagagggcttcttgtgtgaagaaactattgatgtactggatagaataggtcttccggcaccaaaatcctttccaaaggagttgaatgttgactatgaatatacagaagacaaggagggagaatgtttatggaatgccatcgacaacaatccttatagttctgtaatcgataaaatttattgctcactcaatgacgtatatggattctacgcggcttatgttgatgagttaattcaagatgatggattggatatttattcaaccgatgccatcaatatcatgaactcattaatgtcgcttgccgcctgtaaaattgaagtcgatgctgctattgctccaaactttaaccactttcgttacgaagtagaaaaaaactatgagaattggttgaacgaactcaaacttctggcatttcgtgcaggaattccattgagagctgagctcttacagatggtttacgatacagccgacaaactgagcgtagcagctgaagctgaaagccttgatctcaacaaatctcgcattcatcccgatatctatatgaacgaactcctgactggcatgcgaattatccaccaagtactccctgcaatcatggagaagctagaaattaccgatttcaaactggatgaaacggatttgcgagcaagaagataa

SEQ ID NO: 85794 - DNA, 3147 bp, Citrobacter koseri
atgaaaagaatgttaatcaacgcaactcagcaggaagagttgcgtgttgcccttgtagatgggcagcgcctgtacgacctggacattgagagtccagggcacgagcagaaaaaagcgaacatctataaaggcaaaattacccgtatcgaaccgagtctggaagcggcttttgttgattacggcgctgaacgtcacggtttcctcccgttaaaagaaattgcccgcgaatatttccccgccaactacaacgcccacggccgtccaaacattaaagatgtgttgcgcgaaggtcaggaagtgattgttcagattgataaagaagaacgcggcaacaaaggcgctgcgctgacgacgtttatcagtctggcagggagctatctggttttaatgccgaacaacccgcgcgcgggcggcatctcccgtcgcattgaaggcgacgatcgcaccgaattaaaagaagcgctggcaagcctcgaactgcctgacggcatggggcttatcgtgcgtaccgcaggcgtcggcaaatccgccgaagcgttgcagtgggacctgagcttccgcctgaaacactgggaagcgattcagaaagccgctgaaagccgccctgctccattcctgatccatcaggaaagcaacgttatcgtccgcgcattccgtgactacttacgtcaggatatcggcgaaattcttatcgataatccgaaagtgcttgagctggcgcgccagcacatcgcggcgttgggtcgcccggatttcagcagcaagattaagctttacaccggcgaaattccgctgttcagccactaccagatcgagtcgcaaattgaatccgccttccagcgtgaagtgcgtctgccttccggcggctctatcgttatcgacacaaccgaagcgttaaccgcgattgatattaactccgcgcgtgccacacgcggcggcgatatcgaagaaaccgcgtttaacacaaacctggaagcggccgatgaaattgctcgccagttgcgcttgcgcgacctcggcggcctgatcgttatcgacttcatcgacatgacgccagtacgccaccagcgcgcggtggaaaaccgtctgcgcgaagcggtacgtcaggatcgtgcgcgtatccagattagccatatttctcgttttggcctgctggagatgtcccgccagcgtctcagcccgtctctgggcgagtccagccatcacgtctgcccacgctgtagcggcaccggcaccgtccgcgacaacgaatcgctctccctgtctattctgcgtctgattgaagaagaagcgctgaaagagaatacccaggaagttcacgccattgttccggttccgatcgcctcttacctgcttaacgaaaagcgcaccgcggttaatgctattgagactcgccaggatggcgtgcgctgcgtgatcgtaccaaacgatcagatggaaacgccgcactactccgttctgcgcgtacgtaaaggggaagaaacgccaaccctgagctacatgctgccgaaactgcatgaagaagcgatggcgttgccttctgaagaagagtacgccgagcgaaaacgtcctgagcagccagcactggcgaccttcgcaatgccagaagtgccgcctgcgccgacgccagcagaacctgcggtgaaagcagcgacggcagcaccgaaagccgttgccactgcgcctgcacagccaggtctgcttacccgcttcttcggcgcgctgaaaaacatgttcagcggcagcgaagtcgccaagccggttgaacaacctgcaccgaaagcagaggaaaaaccggagcgtcagcaggatcgtcgtaagtctcgccagaataatcgccgcgaccgtaacgatcgccgtgacaaccgtgataatcgcgacaaccgcgctgaagtcggtgaaaaccgtgatgacaaccgtcgtaaccgtcgtcaggcgcagcagcagaacgcagaagcgcgtgacaaccgccagcagtctaacgacgttgccgataaggcgaagtccggtgacgagcagcagacgccgcgtcgtgaacgcaaccgtcgtcgcaacgatgaaaaacgtcaggcacagcaagaagtcaaggcgctgaatctggatgagcaaccggctcaggaaacagaacaggaagaacgcgttcgtcaggcgcagcctcgccgtaaacagcgtcagctgagccagaaagttcgttacacagactctgcaacctctgaagcagaagctgtcgcaacgccagtcgtcgaagacgctgtcgccgcccagcctgctacgcaaagcgcgcctgctcagcgtactgaactggcgaaagtcgacctgccagcgatcgcagacgttgcgccagcagagcaggaagaaaacggcgaagcgcgtgataacgcaggaatgccgcgtcgctcccgtcgttctcctcgccacctgcgcgtcagcggccagcgtcgtcgtcgctaccgcgatgagcgttacccgcttcaatcgccaatgccgttaaccgtcgcttgcgcttcaccggaaatggcgtctggcaaagtgtggattcgctaccctgtcgcccgtcctcaggatacgcaggttgaagcacagcgcgaagaagagaccgtacaagctcagccggttgcagtagagccgcaggtcgtcgctgccgcagccgaacaggttgtagacgcaccggttcaaactgaaaccgttgtcgctgaacctcagcccgctactgtggaaacaacgcatcctgaagtgattgccaccccggttgaagaacaacctcaggtgattgcagaggctgacgtccctgttgcgcaggaagtcgctgcgcaagcggaacctgtcgctgacgttcaggaaaccacgacggctgaagaatccgctgacgttgtcatcgccgaaccggaagagattgtcgctgcgcctgttgccgttgccgttgctgaaaccgtgtcagaaagcgcggtaaccaccagggagaaacccgtcagccacgccagtgcgccgatgacccgcgcgcctgcgccggaatatgtcccggaagcgccacatcacagcgactggcagcgccctgccttcatctttgaaggtaaaggtgcggcaggtggtcatagcgcgactcatcaggccgccgcgccagccacgcgcccgcagcctgtagaataa

SEQ ID NO: 85795 - DNA, 612 bp, Citrobacter koseri
atgcttggtgacagattaaatacattaaatggaagtcatcaggtttatatacaagatgctagtgatataaatatagataatgtaagtatatctggtgctgcgcttaaatgcatgtggctgaatgggcaatgtcagcgtataaaaggaaatgttagaacaacaaactgtaatcagacaagccttgcaattacaggaactgcatcacttccggctagcgacatagaaattgaacttatttcgacaaatgaaaatatctcaggaactttagatcaaggattagggtctgcattatggatatctagtgcgcagatggtgaaaattagagggagatgtggaaattcctcatcagcttcaagctatgtccatggtgtatatcttgggtctacatgtacggattgtcaaattgagatgagagttggtcaaccctcagctacatatggcgggaggtgtatatatggcgatgggtttgcgtactccaacaggaatagaattgatcggtcagaaattttaacacatggaagtatagtcgggaattttatcagttatgatgctgtaggacaccgagttataatggggggcatatccttctactggtgtatggcatgtcggtga

SEQ ID NO: 85796 - DNA, 1068 bp, Citrobacter koseri
atgttgattgtcagctatatactatttacaaaaacacaagcaccaggctatcaacatgagattccgtttgcaacatggctaataataccagtaatcattgcatttaatcaaaaattaaaagctatcaaagataaaaacataaaagctttgttatgcattatagttattttaatttcatccacctatacaattacatcgttgatacgatcgagcctttcatcaaacttacacgcaagcattttcccgcaaaaagtttacccattgactcttaataattatgataattatcttgatatggttgattatttaatcaaacttacagtaacaaaagaaaggaaatcattctctgttatcagctcaggatatgcgttaaaccaagatcttattaaatatatggcaaaaggaagactggatagagcattccaagttacaccagatgttgatttacgagatggtatgccggctagatctcttttatctgattacctagtagtaacaacgcctcccgatatacatttaccgcaaggccaaaacgttattaaaacaaccgctgaaaatatattgagcggaaaaggaattggttctcactatagtgaaattgctagatttacattatcaagcaatcatactggaatcatttttgagaaaaaaacagcatttaacaaaaacgatattgatcaatatataagtcaattcacacatatttacccagagtgggaaaataaatataatacgaattctttcgtatctttccttaccacttgggtgaaactgggagatggtgttgcctggttgtcgaaaagccataatgacagtatagttacacacccaggcaataactccgatacttatattagttttatacctttacgaaaaaccgttaagatagaattaataaacaatacatgccttaaagcagatggcgtaaacatttacatcaataacgatctaattcacatagaacaaaataaaaccacaagcatcaacatcaaagaaacagaacaaagattatttttgcgtataaataaaaacaagaatgatatttgcgatgcgattagaatatactaa

SEQ ID NO: 85797 - DNA, 816 bp, Citrobacter koseri
atgaagcattgttacaaattaacatttcttagtttcgttatagcagcaactctgtgtttcttactcgtcaacttttacgttgcgggtgaaaatgatatctactcttacgattatctttcgtattggcaatcatactcacactatagctcattattaatctcaaatcctttaagctatatcaagacaattgctcctctagtatactcagctaattacaacccactggccccttcattgttatttccagtgtactttttgtttggcggatcaagggaggtatacatttcagccgtatctattatatatttaattccaacagcctttctaatatataaactaatatctatttgtatcaatgagaaatccacaagcctgatgattctgagtgtatttctttctatcacatttattggtttttggaaaccgattgtccgtgggtaccctgacataatagcaatgatacctttattgctagcatttattgccgctaataaaaatccagcatcacaatcaatcaatataaagaatgctctatttataggatgtatgctatggctcccattcttatttagaaggtggtatgcttacactatcgtttctttttacgttgtagttccacttattgatattgtatggagcaacaataaatcttattttaaagcagcatactacacttgcataaactatttaatcgctggggtaaccagcatttgtttagtattgctatttcaaaaagagcttgcagtaaatgtatttaacactgattatgcaaatatatattctgcatattcactaccttatcttctgtttttataa

SEQ ID NO: 85798 - DNA, 750 bp, Citrobacter koseri
gtgttaatcgctatcgataccctgcaaagctgggtgatgaagctggtgcgcctggtaatgcaactgacgccatatggcgtactggcgctgatgaccaaagtcgtcgcagggtctaacctacaggacatcatcaaactgggtagcttcgtggtcgcgtcttatcttggcctgatcatcatgtttgtggtgcacggtatcctgctgggcgtcaacggcgtcagcccgctgaaatatttccgtaaagtatggccggttctgacgttcgcctttaccagccgctccagcgccgcgtccattccgctgaacgtggaagcgcaaacgcgtcgtctgggcgtaccggaatccatcgccagcttctccgcctcttttggcgcgacgattggtcagaatggttgtgcaggcctgtacccggctatgctggcggtgatggttgcgccgactgtcggtattaacccgcttgatccggtctggattgccaccctggtcggtattgtgaccgtcagctctgccggtgtcgcgggcgtcggcggcggcgccaccttcgctgcgctgatcgtcctgcctgcgatgggcctgccggtcacgctggtcgcgctgctgatttccgttgaaccgctgatcgatatgggtcgtaccgcgctgaacgtgagcggctcaatgactgccggtacgctgaccagccagtggctgaagcagacggacaaaacccttctggacagtgaagacgatgccgaactggcacatcattga

SEQ ID NO: 85799 - DNA, 648 bp, Citrobacter koseri
atgaattttccattaatcgcgaacatcgtggtgttcgttgcactgctgttcgtgctggcgcaaactcgccacaaacagtggagtctggcaaaaaaagtgctggtcggtctggtgatgggcgtgatcttcggtctcgccctgcacaccgtttacgggtctgacagcccggtactaaaagactccgttcagtggttcaacatcgtcggcaacggctatgtacaactgctgcaaatgatcgtcatgccgctggtcttcgcgtctattctcagcgccgttgcgcgtctgcataacgcgtctcagttgggtaagatcagctttctgaccattggcacgctgcttttcactaccctgattgccgcactggtgggtgtactggtcaccaacctgttcggcctgacggcggaaggtctggtgcagggcggcgcggaaaccgcgcgtctgaacgccatcgaaaccaactatgttggaaaagtcgccgacctcagcgtaccgcaactggtgctgtcgtttgtgccgaaaaacccgtttgctgacctgaccggcgcaaacccaacctccatcatcagcgtggtgatcttcgcggcattcctcggcgtcgcggcgctgaaactgctgaaagacgacgcgccgaaggcgaacgcgtgttaa

SEQ ID NO: 85800 - DNA, 786 bp, Citrobacter koseri
atgaacgcgtcgcagaatgctgaacagttccatgcccaactggcgaactatgtccccgtgttttctcccgaatactggcctgtctggttagtcatcaccggactgatgctggtagcgatgtggctggtgttggggctgcatgccatgctgcggtttcgcgccgccaacaaagccgcggccggtcacggtgaaaaggtttacctgtactcaaaagcggtgagattgtggcactggtcgaacgcgctactgtttgtgctcctgctcggcagcgggctgatcaatcatttctctctggttggcgcgtcggtgatgaagagcctgctgacggtgcatgagatctgcggttttctgctgctggcgtgttggctgggttttgttttgatcaacatgctgggcggcaatggacaccattatattattcgccgcgatggctggattggccgagcgatgaagcagacccgcttctatctgttcggcattatgcagggtgaggaacatccgtttcccgccaccacacagtctaaattcaacccgttacagcaggtcgcttatctcggggtgatgtacggcctggtgccgctgttgctgataaccggactactgtcgctttatccgcaggcggcgggcgatctgttccccggcgtgcgttactggctgttgcaggcgcatttcgcgttggcgatcgttagcctcttttttatcttcggtcatctttacctttgcacgacaggtcgtactcccggtgagaccttccgctgcatggttgatggctatcatcggcactaa

SEQ ID NO: 85801 - DNA, 468 bp, Citrobacter koseri
atgattaaacgtgtgctgatcgtttcactgatgggcttatctttagcgggttgtgtgaataacgatagcctgtccggtgatgtctataccgcgtccgaggcgaaacaagtgcagaatgtcacatacggcactgtcgttaacgttcgtacggtgcaaatccagggcggtgatgattccaacgtgatcggcgctatcggtggtgcagtgctcggtggtttcctcggtaataccatcggtggcgggacgggtcgttcactggcgacggccgctggcgcagtcgcaggcggcgtagcgggacaaggcgtccagggcgcgatgaacaaaactcagggtgtggaactggaaatccgtaaggatgacggcaacaccatcatggtggtacagaaacagggcgatacccgtttctccgcaggtcagcgtgttgttctggccagcaacggcagccaggttactgtttctccgcgctaa

SEQ ID NO: 85802 - DNA, 645 bp, Citrobacter koseri
atgcctgttccagaacgccctaaaatttatcatattttgcatattgatcggttgcgttctgtgattgcagacgggctactttgtgatgaacaaatttcgcagcgtaacaacgctggtactgtaattggtatgaatagcattaagcagcgacgtcttacggagttaacgcttgattgttatccggacttgtatattggacaatgcgtgccgttctacttctgtcctcgttcggttatgttgtacttgattcatcgcggcaatcatcctgatctcggttatcatggtgggcaggatcctgttctgcatttggaagctgatttgtttacggttatggattgggctgaacgaaatcagcagcgttgggcgttcacgttgtctaacgccggggcactttatgtcgagtcacgttgtcaaagagatcaactaagcgacttaaactggcaagcaatcaatgcatcgcagtggagtggcaacggtctgaaggagtcgaagcaggcggagtttctggttgaacagcatttcccatggcaactggttgaacgcattggcgtacattcacgatccattcaccaacaggtagctgatattcttcccgctgatgggcatcgcccgccgattgagatacaggaagcctggtattactga

SEQ ID NO: 85803 - DNA, 1035 bp, Citrobacter koseri
atgattgagtacagacatggcgacattcttcatgccgatactgaagccatcatcaataccgttaactgtgttggtgtgatggggcgcggtatcgcgctgcaatttaagaacgcttaccctgataatttcaaagcctatgcgaaggcctgtaaagctgaacaggttaaacctgggaaaatgtttgtttttgaaactaaccaattaaccggcccgcgttatattgttaatttcccgacaaaacggcattggaaggggaagagtcggattgaggatattgtttcaggactagaagatcttgtgcgtgttgttgaaaactacaatatccgatccatagccatacccccactagggagtggattaggcgggctggaatggcaggatgttaagccgttaattgaatccgctgttaagccgcttaagcaggttcagattgctatctacgatcccaaaggcgctccttcttcagagcgtatggcgcataagacggaagtgccgaagatgacggctggacgtgctgcattgattgaacttatgcagcggtatcttaacggtctactcgatccgtttatctcgctacttgagctccataagttgatgtatttcatgcaggaggccggagagccacttcgcctcaagtatcagaaagcgcattacggaccctacgctgagaatttgcgtcatgtgcttaatgctattgaagggcatatgatctccgggtattccgatggcggtgatttaccggagaagcagttaatactggtaccaggggctattgacgaggcccgacaatttctcgcccgacatgaagaaacccagcatcgtttccaacgggtttccgaactggtagagggctttgaatcttcttttggtctggaattgctggcaacggttcactggacaatgaaacatgagtcaataacgtcttccgaagaagtgatcaattacatctataactggaatgagcgtaagcagcagttctcaccccgccagatcacactggcaatggatatattgaaaaagaaacagtgggtgtag

SEQ ID NO: 85804 - DNA, 282 bp, Citrobacter koseri
atgccaaaaatatctgtcatgggggataaaatgaacgtaacttcaccaaaaatgctggctcaggcactcagaaatacacgcaagcaacgtaaactgactcaacgcgaagctgccgaaagtatgtgtatgaagcaatcaacggtttctgagtttgagaaccatcccgaggggacccggctagatacgctctttaaactgcttgccgctctggaccttaagcttcaggtcgtaagcaggaagggtgaaaacaattcttctgatggctgggaccaggagtggtga

SEQ ID NO: 85805 - DNA, 747 bp, Citrobacter koseri
ttgacggaggatgcgctgtggcttatcagcaaaaccaccgccgaccgggttcgcgcctggctgctccagcatggcgtagccagcgtaccggaaaataataaccgcctgtttgacgaactgctggcacatcagcttatcgttgccaatgaggataaagcgatctggcgctgcattatccgatcagataagggctggtcgcccgttgaaccgttgacgctgctgcgcctgacgccgtctgcaatatgggaaccaagcgaacaacgtcccgcctgttttgccggtgatgtgacgccggtaagcgaagctgaacccgtccctgaacttagcgctcccactcaaccgctgccggagatagcagacgacccgaggcttggtgacaataataatttcctgcagtggctgaagaaccacaccagttcttcagccacggtgaatacccggaacggcaaggtacatgtggtggaagactatctttttttgatttcgccggggatctttaaaacatacgcagcagaaaccacaggcgatagcggcgacggctggaaactggcgcaacgaatgtttcaggagtcagggctggccctgcgctgtaatgatgacagttttatctggacctgcgaggttcgggttccacaaaagaaaagtagtcagttgaaagggtttctgatggaggatcctgggctggtgcttggagagaaaatgccggtgaataacccgtggctgaagctggtacccgctctggaataa

SEQ ID NO: 85806 - DNA, 381 bp, Citrobacter koseri
atggcacgattagtcagaaaaaattatccgcaactgggggaagttaacgctccttatgttcatgcagttgcacaccagtgggcgctatatatatcgggtctgacagcttttggttctgaggcgcagagtggtgatgttgttgcgcaggcaagtgaaatattcaggcaacttaaggtgatagcaacagcggaggggattacgcttgataatctgatcaaagtgacgatttttgttacttcaattggttcgctgaaagcattgcgtcaggtattgtatgcaaactatggcgagagcctgcccgccagttctcttgtcgaagttagtgcactgttctccccggatcttcatattgaaattgaggccgtgcttgcactgcaatga

SEQ ID NO: 85807 - DNA, 390 bp, Citrobacter koseri
gtgttgcaaaacactaaacagcaaagtatattaaacgctatgaaaaactttggtgaaaccatccgcgaccttcgagtcgcccaagaccttgggttgcgcgagactgcgatcaaggtaggcatttcccccgcctatctaagtcgcatcgaacgtggcaaggagcgtccgccaagaccagaggtaattaaggagctggccaaggtacttgcggccgatcctgacgtgctgttccgcttgtcttcctccacagacccggaagttgtcgactaccttcatgaccaacccgaggtcatgaatttgctccgctatgtcaaggaggcctgttttaccgaggatgagatcaagagcctcgttcaagcagccgaaagcatcaaggccaacactaattaa

SEQ ID NO: 85808 - DNA, 207 bp, Citrobacter koseri
atgagcaatgaagaggttctgaaaataaaggatgtcgccgccttacttaaggtcggcgagaagacggtctattccatggcccaaaccggggaacttcctgctttcaaggtccgaggccagtggagattttcccgaaaggatatcgacgcatggatagagcaacagaaacatacaacacaagatttcggtgagggtaatacaaaatga

SEQ ID NO: 85809 - DNA, 2004 bp, Citrobacter koseri
atgagcaaaaagatcagcacacaagccgaaaacacgataccggctgggtatacgctcgactacgtttccggcaaacaaatcaaggaaacgaagaaggagctagtccggcagcggatcgttcgcgccctaatccacgaatatggattctcgccggaagacatggagctggatttttccattggcggtcgcaagaaggtggacgtggccatcttccaccatggtaaggaacacaccatcgataatttaggccgtgccgtgctctgccgccaggaaccgaacgttggaaaaaatgccgtgcgtattcgcgattttgagcaggccgctcaagatcttgatgaaattgaagctattatgcgtgaggttgaagccgttaagtatggtttgtggactaacggtttggagttcttctttgttgaaaaagagcaaaagcgcttcgaaacaaagtgcaacccaatcggcgactggcctatggcggaagagtctgttggcaccaaagaggttatctctgatgctcacacgcgcgtcgctgacaatgagatgcttaaaatcacattccgtcgttgccataacttcatccatggcaacgaaggcatgccaaaggatgccgccttctggcagttcctctatctgattttctgcaaaatgcatgacgaaaaccttagaggggtccaacgtcagtcatggaagcgacagttctgggcaggtcctaaagagcagtttgaagctgagggccgaaaggccatccgtgcacgtatcgaggaactctttagcgaggttaaaaagcaatataagaacatcttccggggcaacgaggagatcaccctctccaaccgtgccttagcctttatcgtttctgagttagctaaatacgatttcacccgtacggacgtcgatgccaagggggtggcctaccaagagttggtgggcgttaacctgcgcggcgaccgtgggcagtatttcactcctcggggtgtagtcaagctagccgtggaaatgctcgatcccaaggaaaacgagatgttgctagaccctgcttgcgggaccggcggcttcttggtcgccaccttgggacacatgctgaagaaattccgcgaggagcagaatacccagagcgggaatgaggacaccaccgagtttctgaacgtccacgaacggttgaaagaatatgctgcagccaatgtgtttggagccgactttgaccctttcctgattcgcgctgctcagatgaacatggtgctggcgggtgacggtcggggtcacatttacaacatcaactctctagagttcccgctgggacatctggccgatttgtcttccgctaaaagggaaattccattggggtcagtggatatcatcgccaccaatcctccgttcggctcagatatcccgatcaccgacaaacatattcttgaacaatacgagttagcacatagctgggaatcagatggcgaaggtggtttccgcaatacggggtcattgaaaggcagtgtggccccggagattctctttattgagcgatgcatcaaatggctcaagccaggtacaggtcgtatgggtgtcgttctgcccgatggtgttctcggtaacccagctgcagaatacatccgttggtggatcatgcgcgaaactcaagtgctcgcctctgtagacctgccggtggaagctttcatcgccgaggccaacgttaacatccttaccagcctgctattcctgcggcgtaagagtgaagaggaaaaacgcgccgaagccttgggggggatcgatgaatatccggtcttcatggccgtggccgacaaggttggctacgaccgtcgtggaaacaagctctacaaacggactccggatggtgaagaaatcattgagcccaagcagcacattgagcgtattcgcataggtgggcgcttcttggaacggactctgatccgcggcgaaaagatcgaggacaacgatctgccggtcattgcagagaggtaccgcgaatttctcatggagcagaacggatga

SEQ ID NO: 85810 - DNA, 2019 bp, Citrobacter koseri
atgagtgaccaaaacgacatcattgaagcactgcaggattccaccgaagagagcggcccggataacttttttatcgacattctgaccggcaacaaggagaggacctcggccaaaaagttgttggtgcagaaaattctgcgtcaactcatcgagagctacggttttgatcgaaacgatttggaggttgattacaatccccagattcccggccaggggcgtaagcgcatcgacattgccatttttcgccccaatgccgagcacaacaacgactacctacagcggataatcgtctgcaagaaccagaagaagcgtgacaagctccgtttcattaatgaggcagatactgacttgcttgagctcaaggagttgctggagctgatccccggagctacgctgggtatgtggaccaatggtcaggaagaattcttgtttcaggtagagcgcactcgattcgaggtccgcaccaagccgctgggtgtatggccggtgccgggcgaacgtaccgcagatctcgaccgtgccggaggtgtcattcaggttagcgccgacgcggaagacttggaggatgctctactgcgttgccgccagtatctgaaccgtaacttggggctcgatcacaaggattcctttaaacagctggcagtgctgatgctggccaagatctttgatgagactcagcctaccagcgaacgcaaattctggattagaggggacgaacctttcaccgaggctggtcaacaggctattgccctgcgcatcagcgaatccgttgccgccgccaaaatttggcagccgaacctgctgactcgtggttgggatctaactctggaaccccacgaaacgtcccgcgtggtgatggagttggcccgttataacttaagtgaaacccagccccgttaccgcaccggagcctttcgaacagttgcccgcggtgcgatggacggccgcgagggccgctaccctacgcctctaaacgtggctgaaatggtggtggagatgcttgacccacaacccgaagagcgcgttatggattgctccagcggcaccggcactttcctagccatgactgccgcgcatatcttcaagaagaaactggctggcctcggcaccactcctgaagaggcctctaaggaacaaatctgtcaggcacaaaatgaaaccgccgcctgggcggccagcaatgccttaggctgtgatattgatcccttcctagccgtcgcaagtcgcatgaacctgctgttcaccaccggcaatcctggacgagtgttccgcatcgatgcccgcacgttcccggacggtgatttggatggcattgaaagcgcccgcccggctatgcagctaggcagcatggatatggttatgctcaacccttggttctcaacccaagacacggtgaccgacccctccattctggagcgctatgacttgggcaactactgggagcgcgatgaagaaggtggattccgtaacactggcaatctgagtaccggtggcgtacctcccgaggtgttgtttatcgaacgtgctttgaaatgggtaaaacctggcaccggtcgtgttggcatccttttacctgatggcttgttgggcaaccctggcgatgaatacgtgcgctggtggattttgcaccactgcgaggttttggcctcggttgacctgccggtggagcctttcaaggttacggtgaaggaatatggtctatcacccgcactaccgagtttattgctcctccgccgccgcagtcaggaggaactgataaataccgaacctcgagaatatagggtgttcatggcggtggtggatcgagctggggttgatgcccggggtaatctcctattcctgcgtgcccccaatggtgaagagctggtttttgatgacgaagttattgagcgagttcgtgtaggtggcgaagtggaaattcgtagagtcacacgtcgcaaccgccgcattcatgacgagctaccgctggtggcagagaaatacaaggaattccgcgcaaccggcgaggtgacattatga

SEQ ID NO: 85811 - DNA, 1398 bp, Citrobacter koseri
atgagcagaaaatttcaggtaaaaacagttccgagtagctggatagagaaacaggctcgccgccttgattgcggaccgtatatgtctggagcaattgaggcacgagagcttctcgggcaacttagagtaagaaaagatcatcttcaagatctaactgagggcggcatatctggaataataaatccaggccgtattactcgcctttgggttgaggatgagcagaatgggtatccatttctatcaagcactgacattctccaatccgacctgagcaatgttagttacatttcaaaagctgcggcacgtcaaaatagtcaacttctcattaaggagcgctggacccttatcactcgctctggaactattggacgcatggcgtattcacgctcagatatgaatggaatggcctgcactgaggatgttcttcgagtggttccagatgaaagcaaaataaagcctggatatttatacgcctatcttagctcaaaattcggtgtgccacttgttatttcggggacatacggctccattatcactcatctagagcctgaacatattgcagacttacctgtgcccagacttgggataattgaagataaggcgcatgaactcatttgtgaagctgctgctttgagggttgaggcttctactgcattaaggcacatcacaaaagatcttgaggaagaaatcggaggtggtgaagtaaggtggaaaaaccgccatgttcagtccagtgcaattcaaattgtttcgatgaagaaattttctgagcgccttgatgcctttcattatattggttttgtaggtgaagcgattgagaaggctcgagtccctctaagtgaagtaggaaattatgcgcgagcattgcgcccgccaattctaaagcgaattaaagttgatgggaccggtattgattttctcggtgggcgtgaattgctcagaatggatcaggcagccgatgatcaaatagccttaagaacaccaaatcttgagcaattcattgtaaaagagggaatgatcttatttcaatgtgttggccaaagatatggaatttttggaaccccggtacttgcaaataaacgattggttgggcgggcagttacagaagctgttatgaggctagtccctcattctcccgaagatgccggttatatatttacatatttggcgacaggtttcgggcaaagattagtaatgcgacattctgctggaacatccattcctgtattacaggaagttggagctaacaagatactaatctactggcctcataaagcacggagactacagattcacgagatagcttctagtgcctgggaaaagagagccagagccattgaacttgaagatgaagctcgtgctctcgttgagcgaattatcgagacaggggaacgctaa

SEQ ID NO: 85812 - DNA, 4158 bp, Citrobacter koseri
atggcgaaggtcatacccatcgggcaacctgcaaacgaatctgaacgccaggccatcggtttccttcgggatcatcttcccgatggctggttgatcttccacaacttcgagatgcgtcaaggggaggaggtgttcgaaatcgatatcgccatcctcgcgcctcatgcgatttatttggtggatgtcaaaggaacgcgtggcaacatcgatgtgtatggctcaaagtggtatcccgaggggaggcaaaaatttcactcccctctggcaaagctgcgcaaccacgccaaggtgatgagcaccttattggctgacagcaataaagggataatcgagttacgtaaagtgcatgtacatgcggttgtattgcttacagcagatgatgcccagctatatgatcctgctggcatcgatagcccggatgtgactgactacaagcgctgcttaaaactctttactgataaggggaaaatcccaagccaccgtctttctgatattcgttcttatcactcacatattgacaaagccattcaaggtagagccaagccaaaatcagctccccctgtgtttggaagttggcaggttatagaaaaacttggtggcacagaccgttacaccgagtaccgggcaaagcacaatttattgggtgcgaaggcgggtcaggttcgcctaagagtttatcgcgcagacccctatctagaggaagccgcccgcaaagacgaactgaaaaaaatcagtaatgcttttgtggctgttcagcacatgagtgctcattcgaatgtattggctgtgcgtgacctgattcaatctgacgatggtaatgaaattactttggtggccgatgatatttcaggtcaagcgctgcgtcagcatttaaaaaagcctacttttgcgctcacaacagatcaaaaataccaagtgatcaaaggtgtactttctgcattggatcacgcacatcaacatcaggtcattcatcgaaacctcacaccagatgcgattctcatcactaaagggggtatagctcgcatcaccgatttcgactttgctcgagtaggtaaaaaccgatcgatttcagaaactattgctaatcaaattaccgaagatctcgattcggcttatcgcgctcccgaattagtgatatccgagcaaaagtctgagccgaaagaggcctccattgcttctgatttattctctgcaggcttagtattttacgagttgctaactggtgagttgccctacgaaaatattgatcaaatgatcgaagccgatggtaaattccctatcaaaccctcggagcacaaacctgatttccccaaaggcattgatgagtggttgcaaaccttttgtgagttcgatcctgaagatcgttttgccagcgctgctatagctaaaaagcaatttgaagatctgatattacccgaaggcaaaagtgaaaaaaaaccttctgcaccagcttttaacattcctgatgacctaaccaacctgcctgccgattttgtattagctgagcgtttcagtgtgcaaaagaaactcggcagcggtggctttggggtggtctataaagtatttgatgctttaggcgatgtagttcgcgttatcaaacttgtgaccaaagaccggcgtagcgtttatgagcgcctgcgccgcgaatataagacactcactagcctgccagatcatccacatgtcgttaaggttatctgggccgatcgaatggctgatgcaaatcaaactccttatatcgtctttgagtatgtggaaggcctggacgtgtccgatctaatcgatactgaagccttggcgttggatgatgctgttcgcattgttcgcgaagcagccgagggcttagcgcatctccataaacatggtatttatcatcaggacgttaaaccctctaatttgctatggactgataaaggtgttcgtatcattgatttcaatgtcgcggtatccgaaagtgacgaggttcagggaggtggtggcactcgtcgctacctgccgccggattacgattacaattccgagccggatgcttctgatcgggtagaccgcgacatctatgctttgggtatcaccttctacgagtgtctgaccagcaagtatccgttcgacgatcccacgccgccgatcaagactcaacccaaggaccccaagcagttcaaaggctgtgccgacctcagctcgtcactggtcaacattctggtgaagatgatcgcgccggagcgtaaggagcgcttcacgtcagtcgatgagttcttgactgccatggctgaggtcaagcgtctgcgctcggtgctgaccaccggcgagattggagccggccccaaggtggtatccaggctgggcttcgagccgaccaagcccaatagcaacccctttgtcacccatctgctgaccctctacagccagagccaagtatccaacgcgggaacccgtggcctcgatgaagttggtaaggccacctatgtgccgacatatctggacgagaagcttaagcccgccttgctcaaaggcgagtttaagctcgtgatcattagcggtaacgcaggtgatggcaagaccgcctttattcagcaggttgagtcctttgccgagagcaagggcgcgcagatgcaacgtggcgcgaatggagcagtgttccagatcaaggggcatacctacctgagtaactatgacggcagccaggatgaaggcgatgagcgaaacgatgcggtgttgcggaaattctttgctcctttcgcgggtaaggatgcctctagctggcccgaaaatcagactcgcctaatagccattaacgagggacggctagtcgattttttcctggagcatgaagaggagtacccgctgctagccaggcagatccaacagggtttggccggggccgttccggaaggcggtatagcgatcatcaacctcaatttgcgctcggtagttgctgaccccgaagaaagtcagccttcgatttttgagaggctgattgcccgcatgacacaacaggaatactggcaagcctgcgagaagtgtgacatcaagggcaagtgttttgcctaccataatgcccggactttccaggatccggttgccggtcccaaggtgatcgagcgtctgaagatgctctacaccattacccaccttcgcgggagattgcatatcactatgcgcgacctacggtcggcgttggccttcatgttagtgggcatccaagattgtgacggtattcaccagctttatcagaccggtggtgaagaggtccaaaaccgcatcctggacggattctatttcaactcgtggcttggtggggaaaaaggctccaatgaccgacttattgctctgctgcgcgagatcgacattgctgaagtcagcaaccctgatctggaccgcgagttaggctttctccatcccagggctaaggctatgagtcgtttctcgtttgcagaacgagccggatatgacaatgaattggttgaagcgctgtttgacagtctgcctcgcgattactcatcgaaaaatcgtgcccgattgatttccagacatcggaattacatttcacatatgcgacgtcgccatttcttcgaacgaagggacatggggtggaaggagatgctgccatatgaaagcatcgatcccttcttggtctccacgcagcggacaggtacaaaaagcaacgatgaggtgaccgcaattctccgagccatcaaccgaggcgaaggtttaagcgaccctgcgaggttaggtaaccagttggcactgcgtgttcgccaagtggataaaggtaccattcgcagttaccggcttttcgacggtgactatttttcgcttcgtaccgaacaggagaccgcgtttcatcctttcctcgagtgcctgtctcaggcgttggtcctgctttatgactccggcgaagggcacaaggccagcctacgtatcaatctcgatatatatgaaatgctgatgcgccttaacgacggctaccgaccaagcgtagaagagcaagaaggctttttgttgagcttgtccgtctttaagaacttgttggcctctgtaccttacaacgaagtattgttaaccaaggctggccacaaattttacgaaatccgtcgagaacaagatggacggctagtaatggaagcatctgaaaagggggccgaatacaatgtcaattaa

SEQ ID NO: 85813 - DNA, 1683 bp, Citrobacter koseri
atgtcaattaaaggccgtgacaaagagtttcgaatcccgaaagtttcttatctcgattttaaacatattgagatggatcgcgtactcactatgttgtttccacgattgaaatacgatggttatggtagtcgcagacctcctcgcggtggcgatctttcagttgaggagtttctcgaagatttccttgaacatcccgagtggtttgctggtttcgatcaaaaccctgaaattgttcgagcctggattgaaacagatcttatggatctagtgaatagaggtaaaagcaaccaagctctagctgcaccacgtcctttgcatggcaatacctataagtttcgtaacgcgaagcatacccgagattacggcgctgcagagcaaatctactggatgcttttctatgcccgcaaaggtaagggccaagcggcgcgagatgccttgaagcgtttcttcttcccggggatcgacttggtgacggaccgttacgatcccaacgcttccgtggatgtggaaacgcaggccatcttgcgcttagaccaacaggttacgcaggatatgaaggattccaaggagcccgcacgtttccaacctttatgtatcggccaggccgatattttggctgacgatattctgcgtctactcgcctatgagccttatatcccgcgctcggtgttggttgattatctcaaaactctgatggctttccatctggcactatatcacctcaaactactgcaaatgctgcccaagctggtgaagcagcgttcaggtaacgatctctgcgccgctagggaatgcccgatcaacccgggtctcgacaatgctctggaaggttgcccttaccgcttggcgttgatagtagatatgggggacgtaaacaatcctcacatggtcgagttagctcgaaaatccactgaccggctctatcgtcagatacctgcttttgtgcaggccaattttgtcgtcaagaaactcgatgaaatggcggaatacctgagcaaaaagactggtaaattggctccccctggaggcggtgtgttcaccgttagtgatctgatatccctgctgaagcccgaacacgacaccgagcgtcaagcctacttcaaattccgcttggcgagcctaattgaagaatcggcctccaggaatgaggatttagacccagagatcagggacgtcaccgccatgggcttgggtgaattcgattccttcattgagatcctgatggcctatcgaggtaagtatcaccgccaatacatcactgagtgcctggattctcttctgctgaagaataaagaaagcgggcttctggctcaagcacggactaagggaagtccgcgtcggttcgtgttgggaagcaagctgctcgaagtgctcctccaggtagccgtacttacccaagacggcgggcgtttcgtgacccacgaggttcgcatcgaagaattgttagcatttttaaggaaccgctacggtctttacatcgaccagttaccggaaggaaccctagctaacagcagcatactggacagacgggccctgcgtctcaatctcgaagccttcaagcgccgccttcgtgaaattggattctaccaggacttgtcggatgcttatgtaacccaaaaagtatcgccccgatatgcaattgaacgatttgatggaactgataaaaatgggagacacacatga

SEQ ID NO: 85814 - DNA, 5454 bp, Citrobacter koseri
atgagtaacgcgttcataaagcttccacaggataaattgaatgcggcgttggcaggggtgctgtgtcctcgtatcgaagcgatcttgggtgatcgtggcccaggacattgtgtacgggtcaccgaccttgatgacgcagttatggagtcagtatgtcgggaacttaggcgaatttggcctgacggaaacatatttatactcggcagtcatgaccaagaaggcatgtctttccgagtaacttccaccaaattggtggaactgcgtaatcctgacgcgaacggcgaactgcgccagcctttgctggtgttcataccgacctcgctccgtactagcgccgaggattcttttggcgtggcgaccttcgaggagcttgccttcaccggtatctacgaggatctgatcgactcgctgcttgaccggctcccggcaacgctggctggctatgttcgcgatcttttgggtatcctcaccgaggaggaatggctgtttgccgacgatgtttcgcgcgcgcggtatctactcaccgcgctcgaaaacgggattgatggagaaactcttggggcaagtctgtatgaattggcgttgatcccggacttcaagctctttgccgatccgggcatggtcattggaaaaattcgccgtaatcttggcagcgtccgcagtttgatatcctcgcacaagtcggttcgtggtcgtattgctgatctcgggctcagcgataaggcattggagtcgcgtctattcacctactttgaaaaatacgatgtccatgagtccgaatcctggacgccccccattgcgacagacaaaagttggtggagcatttctttcgataaatggacgttcaaagaagagctatcactggacaaggttcttctgacagtgttggaaactgacttgcctgtcgttgcggatgatgagacggacgatcaactcagtggcctcatcgggcaacaggttctggtaccgaacgaccgtcgtaaaatgaacgtggtgtttgaggttaatcctcatcccggtaaggtcagtgggcttgaccattttatggtgcaaatcatttcgcagaatgacggcccggtagggaaatctaaaaaggtaaaagcctggacgccgaaccgcctgcaatgtactaccagcctggctaaactcaataaaatagaattcgaggaaggatggcatttcatccgtgtaatgccctggactgccgatggcgaccctattccgctggaagcggatttcagctccgagggcgctaagcgctcttacgagagtgagcctttctacgtcctgcccggtggcaacattgaagaagagcccccccaacgtgccattcctattgagcagagcttggagcatgcacgtttccgactgcaattgacagccctgggtgatgaacgtgatcccaatgatatcgctatcagtggtgtagcttggtccgagggcggtcgtaccaagaagatctcccgcctggaaaccttgcacgcaaaattcggtcgtgagggggccgttcagattccgctatcacgtacgctcaaaatcatcgagcaacgcatcttagcaaagcctaaacacccgtcaggctggcgaatgcagatcaacctggataccgctgagccaccctccgaggtcggactcatgctgcctacttctgccgcgatggcatctttcctggctgcccgtgaagagttttttgcagtggtgcgcaaagacactgccgaactgagcatgcaggggctgttgttccaggactctgaaaaggaatgcctcgcgtatgctgaaagctatcttgacttggtcaggaatctcatccgccaggccgagatgacttctggtgtcgagcgccagcaacacctgcaatcgctaagaaacgtactggccgttgattcaatccatgtcatcctgaccgacttccgtggaaggcatcgcgaggctgttttggtctccccaacccatccgctccgagccttgtggctgaacagttgggtcactctgggcaaggattggatcgggaagatcaagtcaggtgggaaagaatacattcctcatgtccgttctgccctattagatggccttgtgccctcagcctatcctgttggcattcccgtagaggatggtcgtatcttcacgccggtggacaatctaaatgcgttttgggcgctatacgctccaacaaccgaggataattctcgtggcctgatggcggaggtctgctcggcacttggcttggtcgagccctctgcggcgggaactgatatttccggaaaggttattgcggataagattgagcgctatctctcccagcatccttatgtgagagagctatcgctgaatatctttaaccccggatcaggttcgttaatagctgaggctctgatagcgcttcagcagaaacgtgagtatgccgatttgcgctatgacatacggctctttacctccgagcctgactcgccggttttgggtgaggcgcttgaatccatagttcgtcccggagcgacggtgaatgaggcttcagacgcgtttgcggcctcaactggcagtcatctgttttccaagctgaacttggccaagcacgcgctgaatgaattccatgcaaattccaaggagtttccagcgcacatcagcgttcttttggatgtgttccccgccgaggagctttccatttccgagaggccgatgggggtgactccgttgtatgggttgatacagggttttgacaccgaattcgtggacgacgattcgggtaccttttggaataagcggccgattattgggcgctccttcagtgcgaacaaccaggctgcgtgtttcgatttgctgtcgtcgctgagccgtcacctctgttttgcaacctcagcggttgccacttctggtgctagtttcaaggccgtacccgttgtaacccttggcctcgatgtggcccaacgagagctgatctacgaggttcaccagatcagcgattgggtgttcactatcgaccgaaatatggggattgagtttttcgaccatggaggtcggaagaacagaccggattatctgattgactatgtgccaggagccagctcccaggcgacacataatctgataatctcctcgcgctcgaacgatgagttggaggccatgctgaagccggtgctgcttgagcacggtttgtccgccgacggagagcagtcggttcagatactcgcgaacctacgctcgctttctggtcagcttgccctgaaactgatttccgcacgtacgcaacaggcggaggctcttggcctggctctggcgaggctctatctcgaatatcaaggcgcgttaagcaatcagatcattgtgccattagacgcacacacggacctctatcgctcaagcggtgagtcagacgatgttaacgatgctatcagcctacaacgtaccgacttgggtttgtttgatttagatttaaccactaggacgatcacctgtaatctggttgaggtgaagtgttattcgcaggttggtgcctttgcggctttcaaccaactgaaggaacggatctccgcccagataaatcagagtgagcgcatcctccagcgtcactttgatccggccctgaaaaaaccggatcggccggataggttgctcaagagccgggagttggctcagattcttaggttctatctggaacgctcactgcgttatgggatctttgaagagactgccgcgcacgaagcgagaggactacttgaatccattgagcagggctactcgcttcaattcaggcggtgcgctttggttttcgactttgacaagtctggaacagaatctccggacaacgaggttggcatcgaattccatcgtatcggcaaggatctcattcatgccttgctggagaactgccgcaagcctgtgtctgtcgagagtgaggaagtaccgaccgctcctactctgagcgaacagttcatttcgaacgtaccgaagctcgagactgccgctttcattgcccctaatagggcccgctcgacatcctggacggtggacgagctttgggacgatgagctggagacaccagtcaccctgccaacatcttctgtctcagaggaaaccatcgcacctgttcaaaaggaagcacaggcgaaacccgtcgagcaagtacctgaacctaccaccattgtgcccaaacaagaaaaagatgacgaacaacccgccaccgttgatgtggaaccggaagaagctgttcaacccgagcttgaagtgcaggagcatctgacatccgagcctcaagccgaaatcagctacgacatcatgctgggcgttaatggtagttcaccgcagtacggattgctcggagaagtttccggacggaaaatcgcgctggacctcaatcatacccacacgatcagtctcttcggggttcaaggcggtggaaagagttacacccttggaacagcaattgagatggcctcaatgccgattcagcacatcaatgtgctgccaagcccgctcgccacagttattttccattatagcccgacgcaggattatgcgccggagtttacctcgatgattaatgccaactcggtagaggatgagatccgtatccttcgtgagcgttacaaggccaacccggaagcattgaaggatgtcttgattcttacccctgccaacaaggtagatgatcgtagggccgagtacccggatattgaggttaagccgattgctttttctgccgctgaacttaaggcagcacactggaaattcctaatgggagcgattggtagccagagcatgtatatgcgccaaatcaatctcatcatgaggggactgcgggataacttgaccttggattctctgcgagcaggcatcgataactctggtttgtccgatcatctaaaggagctggcccagacgcgcttactgtttgcaagcgaatatatcgatgataaccagcgtctccaggatctgattcgtcccggccggttgattatcgtggatctgcgagatgaatacatcgagaaggacgaagctctcggtttgttcgtggtgatgctacaggttttctcagaagcaacctaccagggaagcgccttcaataagctggtggttttcgatgaagctcacaaatatatcgagaacgatgatctggtttccggcttggtcgaggttgtccgtgagatgcgccacaagggaaccagcattatggtcgcctctcaggacccgccatcagtcccgatctctcttatcgagttgtcttcacagatcattatgcacaagttcaactcgcccgcatggttgaaacacatccagaaggcgaatgccgctcttggtgagttgacctccgataagatgagccgtctcggcaccggcgaagcctatgtatggtcgagcaaggcctcggacgactcattcacccggggtgcagtgaagatcaagtgccgtcctcgcattacccagcatggtggcagtaccaaaacggccgtgggtcggtag

SEQ ID NO: 85815 - DNA, 3069 bp, Citrobacter koseri
atgggcgtagaagttccagattcaatagtctctatgttacgagattgtcaaaatgatagtattaagactatatcaaattatttagacgaatcatcaaaaggcgcttgccttattagtttacctactggttcaggtaagagtggtgttatatgctgtgtggctcattatagtaaaattgataaaatcctggtcgtaagtcatagacgtgctgtatgtaatcaattatacagacaactaaagggaggtttttttgagaaaatcttgcaagatgaatatgaaccatcattagtaaaaaagaatgttattaatggtatctcgttagatgttcttgatggtgtctattgtactacattccaaaagcttacaagtttatcggaagaggatgtaaatcaacttaaaaattcttttcaattaatacttatagatgaaggtcatgctgaaccatcaccgcaatggggttctgttattagaaagtttgaatcaaagaaaataatcataacagcaactccttatagaaacgatcttttcagttttgacatagatgtgaaacatacctttatatatacatataagaaggctataaatgataaggttatagttaaaccaacatttgaggagattacttctgagcaattgatacataaaatattagactttagggcaaaatatccagatattgtttgtattgtaaagtgccgaaactttgatgatatttgtaaatattattcccttcttaaggacacatttaaaacacttgcaatccacgaccgttttaaagatgaacctctagatgataacttgaactatgtcccagctaaaattgacgaacttgagtatgaagtttacatccatcaacgtaaacttgacgagggaatagatctcccgcaggcgaagatactaattcttacttattcggtcggtagtggtaaggagctagttcaaacaattggtcgggtcgtgagagtatttcgtgattataatccaattgtatttgagttaggaaatagtaaaaatacaagactctgggataactatattgagtttgatgactatatatcagataaatcttcagctgaaaaattcttaaatacactaaatacagcttccttgctagaaagttatttggatgctttccctgaacatagttattttgaatcttcgtataaaaagaaattcaatttctcggagttcgaacctgcaagatccctagttatacctttagcatcggtgtgctttataaataaacttccaaattttgatttggcagactttatagataaaatttattgggaatttactagagagggagctttgtcgaaatatgataaagagactggagtgataacttctgtttgttttaataattctaaatttttaattgatagattgttctttgaaccttccttagaaattgttatagtaaaagatcttgggaatttagttgctatatttgatagtagtggtcgtcgatttaatcataggactgacctcaatttaggtagagcggtcaattccgatattctttataaggtatttgctcaaacggaaaaatccagaacaacacaggcaacatctcgtgcattattgggaagttcattaaaagctgaagggatcgcctacattggtgagaacctagagagtacaaatcatccacaatcaaattcaagttatgctgtgactacagcaaagggttctaatttaaatatagatgataaaattgcatcctcatattatttaggaatcggttctggtaggattagtgatcaaaaatttcgaaattttgactacgatagtttttgtgcatggattgatgagattaaatttacattcgatagcaataataaactgagaagtaattttttgagttctttctctcaacctattgacggagctccggaggaggaacctatatcctgtgtaattgactttagtggtatacatggtgtcattgagttggaacattctaattgtagggttttggttcagaatacgtttttatttaaaatgtataatagaggcgtttctttttttagatttgaagatatcaacatgaggattcttaaacaaatatcctcgccatttatatttagattgtctgattataaacagtatgtttcatcatgtttaaacaataaaatagtttttaattttaaagatgatgaatttaaagttaatgtcaatggggttaatatatacttaaatggaaccattatatcacctgaaaatgtttttaacgccaatacagttaaattgttatttaacaaaggtgtgacttttttgaatgggatgttttataagtttcaactaccttctgaaagcggagagataagtcaagccatgcttgataagatttacccattaaaatgtctttctaaagatacattaaatgaaaaggatattccgaatttaacaaaaactgcatttggggtaaattcaatatttagtctgattgataatctatcaaatgtgaaaaatcataatccgacgatctctcaacttggggagttttatgaacatatccctgacgtcgatatgatcttatgtacagacatggatactgaacctgcagattttgtaatttcttcgaaaagtaaattagtatatgttcatgtaaaatgcggtaaaaccataaatccagaatcctctgctggggctataacagaagttggaagtcaagcattaaagaatatacatttcttgatctctcaaaattcatcccttgagtttgcaaatctttcaagattgaaaaaaagttggccaagtgatagcggaaatgacaatggtataaaacttaatagccgcattcggttatacaataaaacatttgatattaatcattcattagaagatgttcttgacttaattaaacatcgccgctccatgatatctgttagaaaagaaatatggattgttatcggtaatgctttttcgaaaaaacatttcgaaagccaattttctgggctagggaaaatatcccctgaatcattgcaagcatatcaacttatagatacatggcttttgcaggcatcaagttatgatgtcgatgttaaattttttgtttcggattaa

SEQ ID NO: 85816 - DNA, 615 bp, Citrobacter koseri
atgttgggagattatgatctatatgatggcattaatgaactgtttcatgaacgattaaatttattatctagcgatgatattttatttttatcttcaaactgcttaaaaatgtctaaactagatatcggtgatgatctcggattaaatgctaagttgataggacttctccctgtcccttcattggaagtgaatattaatgatattattgaattcaaggataaatatagaaaagaatatataagattgcataattcaattgatagtgcggctcaggatattttatctcgcaatacaatatcgagtatgaaactaaaaattgaagaaattaccgataatgttaatgaggtggtttctttatctaagggtgttttttttgggaggctaagagttaattttactttgaaatttccaatccaaactcttgaggatttattcgatttgtctaagtctgctttagatatcaatggaagtaatggtattggtggttttttgagtcatttagttggtagttctattggtatgaatgttgagcggaatagtattcccaaaaatctagagaaatatatgtatgtttcacatatgaaggattattttggtttgttaaatgaaaagtaa

SEQ ID NO: 85817 - DNA, 372 bp, Citrobacter koseri
atgacctactgcgcacgtatcgtcgctatcggcctgtttgtcgccgacggcctcaccgacaaaatgctcatcaccttcgacagcaacgggccgaaggactgtctggactactccctgtcactcgaaccgaccatacgggaagaaaatctgttcattctgccaggcgataccctgttgctggccggatacagctacctcattacggctgtgggcagagaagcacagcagtcgctgtttgagctcggccacctgaccatgaaatttgacggcagcctgaatgccttccatcccggggtggtccatctgtccggcccggtaccattgctcccggccctgcacggggaactggtgattgcggagggacggccatga

SEQ ID NO: 85818 - DNA, 1014 bp, Citrobacter koseri
atgaacaaaatcagagccgccgtggtgggcgcaggtatctacggcaaacaccatatgaatgcgtaccgccacaacccggacacggtactggtcgccatctgcgacactgacgcagagcgctgcgacgaccttgccatgtcatacggcatcatgggctatacccggctggaaacgctgctggaagaggaagctattgatgtggtctcggtggcgacgccggacccgtaccacaccgaatccatcctcatcgccctgcgccacggtaagcatgtgctggccgaaaaaccgctcgccacctcggtacgcgagtgtgagcttatcgtggagatggcgcagcagcgtggcctgctggtcggcgtcgatttccacaagcgctgggacccggcagtgatgcgcatcaaagctgaactggagaagccggaagccgggcgcatcctgcgcggccatatcagcatggatgatgtcatcagcgtgccgacggagtggctgaactgggcgggcgcaagctccccggtgtggtttctcggctcccactgttttgacctggtgcgccatctttccggccaggaggtggtgtcggtgtacgccgtcggacagaagcgcctgatggtcgaatgcggtctcgataccttcgatagcgtgcagagcctgctgacgatggccgacggcagttcgtgggtggtggaaaactcgtgggtgctgccggaaggctttccgaaggacaatgacgggcgcatcgatattctctgcgaggcaacctatatccgcagcacttcacagcatcgcgggctggaaatcaccacgccgggcatgacgctcacacccaacagctatttcatcaactaccgcaacggcgttgccagcggttttggtatcgatccgattaatgattttgtacgggccgtcaggaaccaatcaccgtacccggtaatggcagaagacggactggcagtcagccggatctgcgaggcggtgcatcgcagtctggagagcgggaaacctgaaaatctataa

SEQ ID NO: 85819 - DNA, 1239 bp, Citrobacter koseri
atgctcaataaagaacggcactatgcaattttgacctggcttaacaggtatgaacgggcgacggtgaatcagcttgcgaaagtattcggcgtcaccagggaaacgattcgcagcgacctgaatttattagcacaggaaggcggtattgagcgatgtcacggtggcgcaattatcaaacgccgtatttttcatacccaatccgtcaataatttagatagcaatatcattcatttttttgactctgcacagtcaaaaaaagcgatcaaatcccgacataaagggcgaaagatgaaaggtaaagcctgtattctgggttcattcaacgttgatattattgctaacgtcgatcgttttccccaaagcggagaatctattttctccgaaaacaccattattggccccggcggtaagggagccaatcaggcactggctgtcagcaaatgtcatgttaaaacccattttgtcggtaaagtgggtaacgatcagtttagccagatggcctttgaacatctttcctcctccgctatcgacagcttcacgctttatcaggataaagagaagaaaaccggcaccgcgcttatttatgtctgtcaaagcgatggtgaaaatatgattgccatcagccctggggctaatcggtccattactgccgatgaagttgaagcgattacgcctgaagttaaaaactccgatatttttttaacccaactggaaaataatctgcccgcgacctttcgggccattgaaattgcccgccgtaacgggatcaaagtggtattaaacccggccccctggtcatctgatgtggttgactgcctgaagaacgtagacttcctgacccccaatgagactgaggcctcattgctgtctggtattcatattacagaccttgccagtgcaaaggaagccgccagagccattaaggccaagggggtaggccacgtcatcatcaccatgggagcaaaaggcgcgctcatttatgacggtgagcaattcattcatatcccggcgctgaaagccgtttgcgtggataccacaggtgctggcgatgccttcaacggcgcattcgccgccgcgatggcgaaaggggaatccattattcaggcagcaaaatttgcctgtgctttcgcctctctggccgttgaaaaagaaggcgcgtcaaatatgcccgaatataaagatgttctgacccgcctggcacaatataacgataaaaacattctcactgagaaaaattaa

SEQ ID NO: 85820 - DNA, 978 bp, Citrobacter koseri
atgaaagcccttacagagtcaaaacccggcggcgtgataccgcaggcaaataacatacctcagcagcagacaatatcccgcatggcaagttgccgccaaaagttacgccggtggtggcccttctatgtcatggccctgcccggggttatctatttttttatctggcactatttaccgatttgggaaaccaaaatcgcgtttgagcagtaccgtattatcccgccaaatatctgggtcgggatgcagtattttgccacgctgatgtcatcccctgttttctggcaggtgatacagaacacggtgatcatcggcgcaatgaaactgatttttatttttccggtccccattatggtggcgctcttactcaatgaagtgcgctcatccggataccgtaaatttgtccagtcggtgatttacctgccgcactatctctcctgggtggtaatcgccagtatcgcgattgccacactctccccggttgatggcgcggttaacgagatcattaaatcgatgggctacgatccgatcccgtttatgaccgacagcggttccatccgctgggtgctggtgttcactgaaatgtggcgcagcgcgggttgggactcattactttacatcgcagcgatcctcgccatcgatccacagctgtatgaagcggcggaaatggacggagccggacgctggcgcaaaatctggcacatcaccctgcccgcgattacccccaccatcgccacgctgtttatcctcaacgtcgggctgtttctgagccagggcttcgatcaggtcttcaacatgaccaacgacgtggtgaacgggcagatagacatcatcgacacttacgtctaccgcatgggcctgcgcaccggggagttctcgctggcgaccgccgcaggattattcaaaggcgtgatcggcatgattcttatcgtgctggcgcataacgtgtcaaaacgcctgacgggtaaaggagtctggtaa

SEQ ID NO: 85821 - DNA, 900 bp, Citrobacter koseri
atgcgcatctcatcacgaagcaccccatttgagcgcatcgaatacgtgctcattctctcggtactgatgctgctggttgtggtgacgctacaaccgctcctcaacctggtggcaatctccttctccagcccggcaaacgtgcccggtatgagcggcctggaaattatcccgcagggcttttcgctggacgtctggaagctgttgctgaccaacgaagccgtgctgcgcggctttggcaatgcgatgctgattaccgtggtgggcaccatcatcaacgtggttttcacggtgctactggcctgggcgctggcgcaaaaacgcctgccgggacgccgctggctgtttatgtttgtcctgttcaccatcgtctttgagccgggcatcatccccgatttcctggtgatgaaaaagctcgggctgctgaacagctactggtccgtcatcctgtatcgcgccgtcttcgcctggtacctgattattcttgttcgcctgttcgaagagatcccggaggagctgctggaagccgccgaactcgatggcgcaaacccgttccagacgctgtggtacgtcattatgccggtcgccaaatcgtccattgccatgatcacgctgttttacatggtgctgcactggaatgaatttttccgcgccatggtgtacctcaacgacccggacaaatggccgctgcaggtggtgctgcgtcagttcgttgtcgagggcgataagctggcgatggttggcgtcgaaagcatgtcgaactacaccgatgccagccagatcagcattaaggcgctgaaagccgggatgattaccttaaccatcgccccgctcatcgccatctacccgattattttgcgcttcttcaccaaaggcaccatgtccggcgcggtgaagggttaa

SEQ ID NO: 85822 - DNA, 1413 bp, Citrobacter koseri
atgaacgtatttaacactctcgccagcgccctggcaggcggcctgctgctgtgccaggccgcctgggccgaaccggtcactatccggatcgtggaaaaagatctgctgaccaccaaccgcgaagatgtcgcgcatatacagcggatagagcaggcgctggcacgccaggggcacgatatcaaaattgagatcgtcaacctgtcgtcttccggctactccgacgtactgaacgtgatgttgctgtccggcaccatccctgacctgatctatttcaacggcagcgatcagaagatggtcgaacagggcattcttgaagactggcgtccgtggattgcgcaaactcgctatctgaaagaggcgctgtggccgcacaaccggcttcgcctgcaaaaccatccgaccctgctgtatgtctttccgctacgcgctcgacagccggtgatccgcgaggactggctacagaagagcggatttaacgcctcgccgaaaacgctggaggagtacgtcacgctgttcagtgcgatccattccggtgactacaacggtgacggtaaagcggatagctgggggatcacctccgagaaagatctgcgcgatctcgacggttttatgaacccggcattcggcattcacgccacctggcttaaggacgatcagggacacctgatcaacgcgcagataagcccgcaggagcggagcaagctcgaattctaccattcgctgtatcagaaaggattgctctcctcccagtacgtcaccaccaactgggagctaaaagaggatgagttttataccggcaaggttggcgtcgtttccgtttcttcgccgggcaacgtcggcgtgtatcaagaaaaaatacgccagatccatcctgacgccacgctcaccctgctcgacccacctgaaggcccggcaggaaagggtctggcggcggtggatgtttccatggaaacgcgtggttttgcgatgtcctcgctctcgaaacataaaaaggaagtgatgatcctgctcgactttctggccagccctgaagggcaaatgatggagcagatgggatttgaaaacacgcactatgtccgcgcgggcgacacgataaacgtgacgcccaaaattaacgcctggtatccccggtttatccaggccgccaactggaagccgccggtagagtggcgcacgcccgcgatgctgcgctatatcgacaattcgcaacgttattttacggcggataacgcctttatcttcccggcgacgtttgccgccgccatcgactcaaccagcagtatttataaccagtgggcgtaccagtttgtctctggcaaagcgtcgtttgaccagtgggatgattacgtcagcgcctggaaagccgcaggtggaaacgccatgaccgaatatgcagaggaaaaactaaaatga

SEQ ID NO: 85823 - DNA, 1212 bp, Citrobacter koseri
atgactgagactcaagccgctgatttaacgttcgtttcccgcatcatgggcatgctatatggcgttgcgttcggcgatgccttaggcggaccggttgagaaactctccgcccggcaaatcgtggagaaatatggccgcgtcacctccatcaaccagcgctggcaccggatggacgagccgtccgcacggcgcaacaaccgcgtgcgcggcaacggtattatcaccgacgatacgctgatgacgctttgtctgatggaggtttacaacgagctgggccgccatgtcgatgcgtgggatatgggggagtcttttgtgcgtaagattgcctgggaaccgcgctgggtgccggaactggaccgggaagcgctggttattgagcgcctgttttatccggaaaaatggatcttccatcgtctgcaactggccgcctgcgacccgcgccagggcggcgtcggcaatatggtgaactgtggcgcggcgatgtatgccgcccccatcggagccattaatgcctgcaaccctgaggcggcgtaccaggaagccattaacttcacccaggggcatcagcagagctatggtctggaggctgcgggcgtcttcgccgcctgcgtggctgcggcatttattccgggcatcaccatagaggccatcaccagcatcgcattgaaactggcaaaagacggcacccgtcaggccatcgcggcaacgcttgacgtcgcgcgtcactatcgtggagccgcatgggattatcaacaggtcgttgacgccctgcacgctgcgcttttgcccttctcgccgatgggggatgacctgatgcacggcccggaaaaagcgggcgttccgaccatggcctatcagccctcacgtctgatgtcgattgaggaactgccgatggcgctggccttctgcctactgcgcgaaggcgagtttcgcggcgcggtggaagattccatcaattcaggccgtgataccgattctatcggggtaatgagcggcgcgattttaggtgcgctgcacggcgaatccattatcgaacctgaggtgttaacgggtattgatagcgccaaccgcctggatctgcgcacggccgcgctgcgcttcagcgaatcagcacaacacatcattcagcaggatctcgctgcggcggcgctttaccgccagaacgtgatgccattattgcagccaggtcacgccgccgggcgaggagagtaa

SEQ ID NO: 85824 - DNA, 1056 bp, Citrobacter koseri
atgagccaaatcgttttaaataatctcggcaaatcctacggtaatgtcagcatcattaaagggatctcgctgagtattcatgaaggcgaatttattgtgctggtcggcccatccggctgcgggaaatccacgctgctgcgcatgattgcgggtctggaagacatcacctccggcgaactgctgatgcacggcgatgtggtcaacacgctgcctgccaaaaaacgcgatatcgcgatggtgttccagagctatgcgctctacccgcacatgaaggtgcgggacaacatgagctttgccctgaagcttgccagcgtctcaaaaacggagcggatggcgcgcgtggaggaggccgcggaaatcctcggcctgacgcatttgctcgatcgcctcccgcgggatctctccggcggccagcggcagcgcgtagcgatgggacgagccctggtgcgtgacccgaaagcctttttatttgatgaacccctctctaacctggacgccaaactgcgccataaaatgcgcggcgaaatccgtaagatccaccagcggatggggcgcaccaccatctacgtgacgcacgatcagacggaagcaatgaccatggcggacaggattgtggtgctgaatgccggtcatattgagcaggtcggcaccccggaagaactataccgtgacccggataatctgtttgtcgcaggctttatcggcacgccggaaattaacactctcaaaggcgtgattcagaacggcgagattgtgctgcacaacggctatcgtttcccctgccccctcagttctcatatcgaagggatggaaatcatctgcgctacccggccgcactatatccggatcagcgattcaggaatgcctgcggaaatcgtgctgatagagatgaccggggaaggacaggagatccgggtgcgtatcgacgaccaggagctgatcgtggtgtcccatgaaaagcaggatattaacgtgggtcagaaggtctttctcaccgtagatgcagcaaaaatattcttgtttgatggccagaccggtaagcgcctgcgctcatag

SEQ ID NO: 85825 - DNA, 324 bp, Citrobacter koseri
atgacgcaggtgattaatcgggaagcggttcgtcaggccgtgaaagaggcgcttgagattgccggggagcgtgacgggcatcttatcgataaaccagatctgaaatccgcaatggactactggcacaaccatctgcgcgatgccgggttgacgggcgaatactctccccactcccttcgctacgcctgggcgcaggacgcgatccgctattacgaggagcagggactgagccacaaagaggcgctggcggtgacatcaacggatctggggcatggtgatgggcggggaagatatattgagcaggtatacgggcatggtaaataa

SEQ ID NO: 85826 - DNA, 312 bp, Citrobacter koseri
atgagttgcgatcggtgtctggatttatgtgtaaaatacgttatccgccaacctgaacaattacgtaaagcaatccgtattgcaaagcatgcgctcagcgaaggggttctggccgaaattgatgcaaatgatgactggaatcaatacaactttcaagagtgtgctgaaaaaatgatatggggcgatatcgttgattaccattttgtttgtaggcactgtggaactcagtttgtactaggtgctgaaacttaccatggcagcggtgggtattggtcgccggagaatgaaaaaccatcggaaataattgactaa

SEQ ID NO: 85827 - DNA, 1491 bp, Citrobacter koseri
atgcttaacactaaaaaaaaaattaattattcaaaacaattggacttttatgatgaaaatctattcggcaatgaagccggtgaagacgaagatccaaaagtgctatcttcatactttataacaaaagaaaagttcaataaattcatgtcactccaacgaagttttggaattgttagagctcgaaaaggaatggggaagtcatcacttttatccaaactagcatacgatgtctcaaacaaggataaccgagcaattgtaatatcagtaactggcgcagatctactaagctatggtaattttgaacataaagatcatcttagccttcagaatgaatggaaaaaagcactctctacaagaataaattttgatttagggagccgaattggcttcgcttggaccgatcatcaaatggctttagtggaatctgccgagctagttggctataaggataaaaacttgcttgatgctttattgagtaggataaaaataaaaaaactaccaattgaattcattgatccccatccaaaagatccagctattcttcttgagcaatatatatctaaaaacaaagatgctgatatttggctctttgttgatgatatcgattcaacattttctgctgatgaaatacagaaagcgagagtgtcaagctttttctctgcttgtagagcattatcacgagacatcaaaggtattaaaatacgagtcagtgttcgaaccgatgtatggacatctataagatacaatgaagatctagataaatgtgaacaatatgctattgatataaattggagtagaactgaacttgaaaaaatcatttcgaataaaatcctttcctatataaagcgatatcatcctggcatgatagttaaggagtgtgatatcgaatcaaatagtgaccgagatgaattaatttcattgatattcatggataaaatacgttggtcaggcagccatgtttcaccatttacacctattcgtgtatttggtgcgaaaagacctcgttggatgagccaattatgtcgtttgtccgcagaggctgcggctgatcgaaatatggtaaaagtaggcattcaagatattaatcatattttgacaaattttggtcgcttgagagtaaatgatatttataaagagcattcacatcaatttaatgagttgcaaaaattaattgagactttttcaaaaggtccaaagaggttcagaacccatgatcttattaataaaatcaataagggttttgttgaccggattggtgctaaaggtataggaaagattgacggtgaagattaccagcgtcccttacaacttgcgcaacttttatttagagttggctttatacttttgagggaaataccgcaccccgatagtccgcctcaattcactgatttcgatgagcgaccagagttgcttactgatccttctttaaattatggagaatacatatgggaaattcatccttcatatcgagggattcttgggattacataa

SEQ ID NO: 85828 - DNA, 1953 bp, Citrobacter koseri
atgtctaaaaagaaggaagtaagagttaacaaaaaagattttaatagggttctggtaactgaaaccataccttatgaaacacctataatagtgtccaatgatggtttttataacaatgtagtaaaataccaaacggccaatgatatagctaagttattgactcaaagagttattctaggtgaaagaaagaaaggcaggtatacgattccatatgtctttaaagttaataaaaatgagacagagtttcggcggttagctttcccgcaccccatatctcagattgaaatgcgagatttttatctccactttaatcaagtgatgattaatttctgttctaagagtgatttttctattcggagaccagtaaaggttgcaagtacttattactataaaaatttgctggaagataagaatttatataagagagggcctgttgatactgacaaaaacgaactattgactcggcatgcttcatcatattttggctatcatggttatgatcgtttgtataaattttttatgtctaatgatttcattgaccttgagcgtaaatataatacgttatatacattagacgtttcaaaatgttttgatagtatctatactcattcaatttcatgggctacaaaaactaaaactttcactaaaggcatgttggctaataaatcattaaattttggtgatgcattcgataaattaatgcaacgttgcaattttaacgaaactcatggtgtgataattggtccggaaattagtcgtatattcgctgagattatatttcaaaaaatagatttgaatgttcaatttaagttaaggaatattggtacaccattaaataaaggtgtcgactatgatattcgtcgttatgttgatgatgtttttatattttccaggaatgaagttaacgccgaaataatatataaggtttatgctgataaattaaatgaatataatatgcatgtgaatttgggtaaggtaacaaaaaacagtcggccttttatcacagcaaaaacgcaaattattcatcatgtcaatcaaaggatgaatgtttttattgattcatttctttcatatgacgatgaaatgaaattaattgctaagcctatatacaataacaggaaattatcaaacaagtttatagatgaggttaaaattatatgttccgaaagaaaatcaggatatggtgaggtttcctcttatattgtgtctgctatttttgaaagaattaaaagattaactgcttcagttaatcaagcagaagataaagatatatataatgtaatgtatgttttgcttcatatttcattattttttttcagagttgcaccttctgttagttcgtcatataagctagcatcaatacttatagtaaccctaagatattttaaggctaaagtcccatcttatagtgatcttattgcatcatatatttattttgaaattgaagactttcttaaagccgctaaaaatggaaaaaaaaccattgataatttggtcagtcttgaagcatataatattatgtatgttattggagagttagatcaagatagatacctatcaaagcagttggttgaggatgtttttagtgaagttgattcctattttgacatagtgtcctgtctgtatattgtgaaagataaaaaggtttatgattcacttaagaataatattattgacgttataaattcaaagttaatgtcaagtgataatattttagattatagtgaaaaggcaatgctttttttggatgttatgtcctgcccgtatattgatttaaaatggaaaaaaatatggttgaagtcaattctaaaagaattgcaagaagctactcctaacaataatgaaatagatagttttataagttattctgtagcaaatccttggtttgtggactggagtaatgtcgatcttttgaatttcttagaaaaaaaacaattgaaaaaaacctattga

SEQ ID NO: 85829 - DNA, 762 bp, Citrobacter koseri
atgtatgatcagtctttcaatccgcggacactatcacgatgctttaagcctgaggatttccagaaaaatagagcattaagtctagacagtgttagagaaaaaaacattcgagctgcaatcgagagatttaataatgggtttttggggtataatttacgatcatcagttttaagagggaaaaaagtatattgggccgacgagttagctgatactttggtcttgaggaaagttgaaagtaatttatctaatttgtatcaattgaaattgccctctcgaacaatgattgttgatacattaaatgtatttttatcggaatgctcacagtataaagtatatagattggatatacattcattttatgagtcttttaataaagactatatttttaaaaaaattgacgagttagaacgattggaaatgaaaacgaagcaactcttaaaggagtttctttattcattctatttgactggtggcgaaggaataccaagaggattatcaataagtgcatacttagcagagttactaatgcatgatttcgataatcatctgaaagatgataagtctgtattttattatgctaggtatgtagatgatatcgttattgttactagtggttttgaggatagtaatgcttttatagagaatgtaaaatctatccttccaccgggactgagctttaatgaaggggaaaaatattacattagcgatttgattccaaaatctgctaagaaaaaaataccgaatcacccacgaaattgttaa

SEQ ID NO: 85830 - DNA, 414 bp, Citrobacter koseri
atgaaacttttggatcaagcaggacctgaccacctcagtgaacgtcttgaagacgattcatcattccagccgattccctccaacggaatctgcacgcgactcggtgataaatggaccgtacaggttatctggcgtctgaccatcgcagatgatcgtcgcctgcggttttccgagatcaaacgtgaggtggaaggcatcacacagcgcatgctgacgcttaccctgagaaacttggaacgagatggcttggtagagcgccactattttcccgaagtacctccgcgtgtggaatatgagatcacggagatggggaaaagcatgttccatgcgctggaaggcatcaacttgtggatcagagaaaaccttccgcgtgtaaagaaattgcgtcaaacctacgacaacaacaagcgctga

SEQ ID NO: 85831 - DNA, 888 bp, Citrobacter koseri
atgaacgaagtacatcgccctatcttggttttcggagccactggccgacaaggcggatcagtggccaaggcgctgctgaaggtccactggcctgttcgcgcttttgtgcaagacccgttcgaacctgcctcagttgcgctgcgtgaggcaggcgccgaactcgtgcaaggatcattggaagatgccgacgtcatcgcggcagccatgaaggatgcgcacggcgttttcagtgtgatgccagccaacctgtcggcagaagatgaagtccgttatggaatgcgcgtcgctgaccttgcagcaaagagccacgtcgatcatttcatctactcttcgggcgcaagcgctggcgacgaaccgacaggcgtcccgcgcttcgacgccaagccgcgtatcgaagcatacatccgcgaactgccgctgacggccaccatcatccgtcccatgatcttcatggagatgcttgttcgacctggcttcggcctcgatgaagggcggttggtttccctgatccaccgcaatcattcgatccagctcactgccgtgcaagacatcgggaaaatcgttacagcgatgttcgttgacaaggcgcggtttgccggcaagacgctgaagatcgccagtgatcgtgtgacgggccgtgaactggaggctgtgttctcggaagcggcaggtctccccatcaactatttccgtttcccagatgaggttctgtcctccaacgccgatctggcccatatggcatcaagcctgcaagatggtcctctctcggagcgagtagacctcgatctgatgcgagagatcaatcctgaacttgtctcgttgcgtacatggttgatgggagtgggacgggagaagcttgaagaagcgttgcgcaagaaacaagcatag

SEQ ID NO: 85832 - DNA, 1677 bp, Citrobacter koseri
atgtcaaccatacgtattttactgagcatgctaagcaaaaaaagtaaattaaaactggcacttatcttaagccttactgtaatagcctccgtcctttccgtcctcactccagttatcattgcaaagttgacggggcttcttcaggaagataaatattcacagttcagcctagcatactacttaggtgtcgcatatgtgattataatatcatcacaaaaactttttggttttttttctgcatatcttcagaacatactgcgtgttgaatgcatatcctccatttcattaaagtatctaagctctctttatgaaaatccttccgtgataaaaagagatgaaaattcaggggatgttacccagagactcaatcaggcttcaaatgatgtatatatcatatttagttgcctttccagcgctatacttccggcattcattcaattatcagtctcgcttggtattatttttagcacaaaagactgggttgttggtactttgtttctggtttattcaattctttttgtgttagttagttttatttacacgcgtagactaataaatgcaagaagcttacttatagatagttccagaaaaacatacagcttaatcactgacagtgtgcgtaatttatccgttgtcagaataaataactcttttgattacttttacaatcggttcgaaaaacatctcaaaaaggatatttcctcacaaaaaacatactggaaaaccgattttataagtgttgctctactgggagggttacagctagcattcttccttgttacctttctttatactctccaaagggcacttaataatgaaattcctttgagtcactttattttaatttcatcttatatccttctgctcacttcacctctggaggggttggggcaaactatcgtcagctttatacaatccagtaatgccttcaaagacttcatcagctattcatcaattaaccgaagcaattcaatggtgaaaaaggaatctgatatccggtcttacgacctgactgttaatggcttaatctatcatgcaactaactctggctttaaattaggccccataaatattaattttccgaaagggagtttcacaaccataacgggaaaaagtgggtcaggtaagagtacacttctgaaactacttttcagggatctcctgcctgatgaaggtcagatactcctgggtggtaccgaacttaactcagttgggaacgataaattttatgattccatttcctatataacacaagatgattatgtgtttatggactcactacgttttaatctcaaaattgcaaatccagaagcgtctgacgagcagcttctgcaagcactgcgcaaggttgagctcgataattatcttaccagtgaagaggtcaatgcgttagatatgaaactggacgattttgggagtaacgtttcaggtggtcagcggcaaagactgtcactggctaggctgttccttcgaaacccggaaataatattactcgatgaagtgacatcttccgttgatttggaaacagaagagcatatccttgacacgatcagaaccttcttccctgagtcgacagtcatttatgttacgcaccgaactttgtcaacgtcatattcggatcaggtactggtaatgaaagctggaaaaatatgcttggaaagctctacgcttatttga

SEQ ID NO: 85833 - DNA, 618 bp, Citrobacter koseri
atgataaaattattactgcaccccaaatcaatttttttaatttgtatagggggagtaatacttttctttattatccttgctagttataactcattagctggtaaaggtgatggtttggatctttttctcaatcgcttggtgctacagtctcagatgtggtgggctgtagataatattagtaaccagcatattcatttggcagatgttttaacgcatatgctaggtttttcggcttattcagatgaagatactggaatatattatttgatgagtaggattgcggaccctataaccttttattggttttacgataaagggatcacttttactatggcatctccagttaattttatatactatttcggcccgtactggtgctatgctgcaatattgccattagctgcaattttaggatttgcaattcatgttcttgtgaaaagtatagaattaaatgatttgatattaatgtttttcacattgaagttgttctatatactcattcgggtagtaaccatgggagaagttcatttaatatttgattataagtttcttattataatgatgatgcttgttttctatatgttacaagtgcgtagaaggaactatcttaatgcctaa

SEQ ID NO: 85834 - DNA, 729 bp, Citrobacter koseri
atgaaacatctgccagccggtgcgctggtggtcgttgtagacgacgggtcaaaacctgctgccgtagttcctgctggtgtgcaactggttcgccaggaaacatcactcggtattgttgcttcgaagaacgccagtcttacggcgctgatggatgccgggtgcgagcatctcttcttgtgggacgatgacgcatggccgatcgctgatggctggcatcttccgtatatcgaatcgcctgagccacatcttgcgtatcagttcctggatcttgccgggccgcgcaagcttaatgatctcgctgtgctttatagcgacgataagcatgtggcgtacaccgggcagcgcggcgtgatgctgtattaccaccgcagcgctatcgagcgtgtcggtggctttgactggatttacgggcgcggcatgtacgaacacagcgaccttgccctgcgcatccataacgccgggctgacgacgtgggcttatgccgatgtcaccggctcagataagttgattcattcgctcgatgagcatgaagccgtagaccgttcagtaccaacggcagaccggaaagcgctggtggaacgtaacgtgaaaatccacaacgaacggcgtgataccgggtttaccggttacgttgagtaccggcagcagcgcgacgtggtaatcacaacattgctcaccagccagcctgacccgcagcgcggcacgaaaatgacggccctcaactggtga

SEQ ID NO: 85835 - DNA, 492 bp, Citrobacter koseri
atgggtcaaccccgctaccggcccgcgcaccagctgggtaaaaatttcaccgtcacgcagcgcagagcgcagggccagccgctcggcttccggtcgcgtgaacatgcctgtcacctccgggcgcaccgaccattcggaccagagcgcggatatcctggctgcaaaatcttcatgcagcttgccatccagccccagcggctgcggctccacctgaatcccctgcgcgccgattacccgctcttccagtttgtccagcaggccaatgacgatgtcgtgatcttcatccagcgcccttgcctgctcgcgcaacgacacgccagcggcaaagacagccgtatccgcagaacggctttcccgctttcctttatgaaggcgcgacggctgcgcggcttcatacgcctgcagcagcattctgtttcgtgcacgcgcaaccgcccaccctggcgcaatggcgccaagtgctctgtcaaaaatgcccatgtgaagccttaa

SEQ ID NO: 85836 - DNA, 390 bp, Citrobacter koseri
atgatgctggagaacgtggaagagttcaaaacgtggggaccgctgctggccgatgaaatgcgtccggatcctgcccgcactggcgaaacattcaatgcatttgtcggcatgctgtccactggcattcctgctgaccacccggcactgtcagaagtttgtgagtttctgtctattgaaagaggtagcgagcaggcgcaactgctggtggatgggcttggatatgatgttgattatcgcgaactacgcgcgtgtgattacggcgcgccgacgatccgcaaacgcttcttcatggttatgcgctgcgatggctgcccaatccagtggcctgctgttacccatggggatcctaagtctctggaggtgcagagcctgtctcttatacacatctga

SEQ ID NO: 85837 - DNA, 606 bp, Citrobacter koseri
atgcttattcgtaacatgctcatcaaatattacgcaccggctggtgaagaagataactctggcggtggtggcgatgacgcaccagaaattacgccggaaattcagaagctgattgatgagcaggtatcggctcaggtgtcaggggtgaaaaacaaaaatactgaactgctcggaaagctcagagagtcaaacgagtccctcaaacgttttgatggtatcgacccggacgctgttcgcagcattctgcaacgtttttccgacgcggcggctgcaaccgtcggcgcacttcctgaagcgtctgacgacctgatccttcgtgccaaaggcacattccagctcaacgacgaaggcgaggccgtagctgttgatgcaaacggtgatgttctgttcggcaaagacggcaagaccccgttaagccctgctgagtgggcggaatccctgaaagagtccgcgccgcacctgtttccccgcgctgaaggcacggatgcaggtggtcataagcagcaggggagcggcgctctgaaacgctctgaaatgacatcggccgataaaacagcctacatccgtaaacacggacaacaggccttcctcaggttaccaaagtag

SEQ ID NO: 85838 - DNA, 510 bp, Citrobacter koseri
  misc_feature (481)..(490): n is a, c, g, or t
atgggctcgcagaccaaatctataaattacaccgatcccgttaccggtagcacggtaacgatgaaagtttatgataacaatgatatgcagaccgaagcggccaaagatttccgggttgtcgtttctcaacccgtcggaaaagatggtcagtatgtcgatcgtaatttgtatcaggttggggcgggcgcttctcttgatgtcgatgtcggtcagaaaacggggaattgggtcggtgctgcggataaccagttcaacgttatcatgaaaagttcggtaaatacgcaaaacttatcgtctgcttatcatgtcactaatggcggcagccttaactaccagtctaaaacagtcgttcaactggggaatagtgataacaatataaaagacgccagcaatgcactggcatggatgacggcggctgattttgttggtgagtttgacagcgttattggtaagcagaatattaccaacattgatgagttcnnnnnnnnnngccatcagagcctttgttaa

SEQ ID NO: 85839 - DNA, 897 bp, Citrobacter koseri
  misc_feature (9)..(18): n is a, c, g, or t
  misc_feature (798)..(807): n is a, c, g, or t
atgagttcnnnnnnnnnngccatcagagcctttgttaacagggatgcggtatcctatattcatggcgtgggcagcggcaccaatgtggttatcgataaggatgccaacattcaattagtgggatcggatgccacggttgttaacctggaaaatggcgccagactgacaaacaacggcacccttggtaccgcaggtaatacttatcgcggcgcttatatcattgctgcgagaaatacgtcttttgttgataacaacggcgttattgatgcgggcacgaatcccgaaatggcggattttttctcaagtggggcggcgggcgtagcgcaaggtgcgcatactgccattctggctaatggttcctctgtaattaataacaacagcagcggcgtgataaatgttgcggccagaggtaactattatggtaataccggcgtgttgatgagcggtaatgccacgcttaataatgatggtgctattaatattgcagcgagtaatgaggcgaacagtatattaggtaatggtgccaatatcggcgtcgttacccaacaaaacaccacctttaataaccggggcacattgtatattggtcgcctggcgcagcgtgcacctgatgatgcaaacacggatatcgcgatcaagcagcagtcaattggggttcatctgtacggtaatggtacttataacggttccgatacttcacagattattattggcagtaaagtccagaatgcgacagcgattgatgttggcgggaatgcaactctcgatcaaaaagggagcattaatatcaatggtgcnnnnnnnnnnccggggagtccgtttcttcgaatattggtattattgcacgcgcaggaacccaggccgctaaagtcgttcatgatggcatcattaatctga

SEQ ID NO: 85840 - DNA, 525 bp, Citrobacter koseri; identical to SEQ ID NO: 75098

SEQ ID NO: 85841 - DNA, 213 bp, Citrobacter koseri
ttgaatgcgctgggtgggaaagaaaatatcgattctctggataactgtattacccgtttacgcctggtggtgaaagatatgtccaaagtggatcaacaaacattaaaaaacgccggggcgctctccgtcgttgtactggatgcgcatagcgttcaggtcattattgggccacaggtgcaaagcgtgaaaacaggcattgaagccttaatctaa

SEQ ID NO: 85842 - DNA, 351 bp, Citrobacter koseri
atgcgtagcgaaaacgacatcaatctgcttctctttcaccagtcgcagaaattgcgcgtcgaagtcgtcagcatgaatattgggcatatcaccggcataatcgggaaaacgaaactccccgtgatcgcttacgctcgatgcccccagcagcagaccaatatggacggaatagcgcagcgcgctataaatctcacccgcattctctgcaccgcaagggaaaataaggacattaatttttttcatcagaaccttccccggtatatgagagatacgcaatcacaaaatctgcaagagattgcatttcatccagcccataacgatggtccacaggcaacggtaggatgtgtctga

SEQ ID NO: 85843 - DNA, 564 bp, Citrobacter koseri
atggtgtatccggttcccgcgccatcaagttcgtcgtcacccagccccagtgcaacgttgtcgagggtaaaaacagaattattcgccagcgcaatatgctccatgccgttaatggcatcagcacgggttaaagtgtatgacgaattctcaagctgtaatgtgtcgtcgccgctgccgccatttaatgatgtgaacaatgaaccgctttcattctcgctgatattcttcagaatgaagttatctttgccgctaccactgttcatttccagcgcagtgtggctggcatccagcgccaggatatcgcctttattgataaagctctcaagtacgccgttattcaaatcgaccaccgccgccttgtcagacaccgaggtcagtttgccggattgctctacattcttcgtcgtcccctggacaaccagcgctgatttcccgtcactgtccaagacgttaacgctggcgccggttttcaggtcggtggatgctcgggtaataatcccgttcccctgggcaccgttcacattgatcaccagatctctggagtcagacatatccagcgtctga

SEQ ID NO: 85844 - DNA, 831 bp, Citrobacter koseri
  misc_feature (375)..(384): n is a, c, g, or t
atggctgccggttttattgccgatacggccagcctgccgcttatcgtgtcgaacctggtgaatatagtctcggcggacttctttggactgggcttcactgagtatgcgtcggtaatggtgccagtggatattgccgctattatcgccacactggtgatgctgcatctgttcttccgcaaagatattccaacgacttacgacctggttctcctgaaagcaccggcaaaggcgattaaagatctggcaaccttcagaaccggctggatagttttaattcttctgctggttgggttttttgtccttgagccgctcggtattcccgttagcgcgattgcggctgttggagctgtgatcctgtttgcagtagctaaacgnnnnnnnnnnatcgtcatcttctcattggggatgtacctggtggtctacggtctgcgcaacgccgggctaaccgaatacctttctggtgtgctgaatgtactggcggataaaggactctgggccgcgacgctcggtactggcttcctgacggctttcctgtcttccatcatgaacaacatgcctaccgtcctggttggcgctctctctattgatggcagcaccgcaacaggcgttatcaaagaagcgatgatttatgccaatgtgattggctgcgatctggggccgaaaattacacctattggtagcctggcaacgctactctggctgcatgtcctttcacagaagaacatgaccatcacctggggatactatttccgcaccgggatcatcatgactctgcctgtgctgtttgtaacgctggccgcgctggcgctacgtctctctttcactttgtaa

SEQ ID NO: 85845 - DNA, 852 bp, Citrobacter koseri
  misc_feature (604)..(613): n is a, c, g, or t
atggccaatagtggaaacttcgtgcccgaacattaccgtgggaaaccagatgcatgcatggctgtggtaatgcaggctgcgcgctggggtatggacccgttcgcggtcgcccagaaaaccttcatcgtgaataattccggcgtgcttggttatgaagcgcaactggttaatgcggtggtcaacaatatggcgccgacaaaagaccgcattcactttgaatggtttggcgagtgggaaaaaatcgttggccggttcgtggagaagacaagcagccagaacaaaaagtacattgcaccgggctggaatttgcaagatgaagctggagtgggcgtccgcgcctgggcaacgctcaaaggagaatcagaacctcgtgagcttgtgctgatgctttcgcaggcacaagtccgcaactctacactgtgggcgagcgacccccgccagcaactggcctatcttgccgttaagcgttgggcacgactgtactgcccggatgtgatcctcggggtctataccgccgatgaaattgacgaacgtgaagaaagagttatcaacccggcgcagacagaaaaagtcacgctgaatgagataacacactccgttggcnnnnnnnnnngtactgctttgtataccgaactgaagagtaaggcggtgaaacgctactaccttgttgatgccaagaacaaagttgaggccgccataaattcactccctaatccgggggatccggaagcagaagcattattcgcgaaggcagaaagcaccttgacctcatcgcgccgccacctcggtgatgaactgtatgaccagttccgcatcaccctggacgacatgaaaccggaatacgtgggctaa

SEQ ID NO: 85846 - DNA, 237 bp, Citrobacter koseri
gtgaaggtcatgtccaaacgtggttttatcaaagcgaaagccgttgtaaccaaacgcctgcaaacgctgacaattgacggcaggcaggtggatacaattgggatcccatgccactggggatttgaaggggctacacgcaaagggttcctcgctaacacgctgacgccatccgtcggcgacgccaactcacaaacaccagaatacaaagcattcctggttaacattgagcgagcgtaa

SEQ ID NO: 85847 - DNA, 810 bp, Citrobacter koseri
  misc_feature (795)..(804): n is a, c, g, or t
atggatagcgctggtagcggcaacgcaattgaaaacaaagccgcgattagcggtattcagttgaaaaataccacgattaatgtcggtaatggcgtgggtgttcacaccggcgcatcgatggcgcaaaccaactccggcacgatcaatattaatggcagcggtacagggatactgtttgagaacgtggctgatggctctgacaccgatcagacgctggatatgtctgactccagagatctggtgatcaatgtgaacggtgcccaggggaacgggattattacccgagcatccaccgacctgaaaaccggcgccagcgttaacgtcttggacagtgacgggaaatcagcgctggttgtccaggggacgacgaagaatgtagagcaatccggcaaactgacctcggtgtctgacaaggcggcggtggtcgatttgaataacggcgtacttgagagctttatcaataaaggcgatatcctggcgctggatgccagccacactgcgctggaaatgaacagtggcagcggcaaagataacttcattctgaagaatatcagcgagaatgaaagcggttcattgttcacatcattaaatggcggcagcggcgacgacacattacagcttgagaattcgtcatacactttaacccgtgctgatgccattaacggcatggagcatattgcgctggcgaataattctgtttttaccctcgacaacgttgcactggggctgggtgacgacgaacttgatggcgcgggaaccggatacaccattgacggttccagccagcttagtatnnnnnnnnnntattaa

SEQ ID NO: 85848 - DNA, 240 bp, Citrobacter koseri
  misc_feature (224)..(233): n is a, c, g, or t
atgggtaatgctgccatttccagcttgcagcgtagcgttgctaagcgcctgagtattcagaccgtcaagttcaaaacggctgttagtaagcgccagcgtaccggcaaaaccatctgcggcattattagcatcaaagttgaagtggttattcgccgtatcaacggcaacaactcccgtcccggcaagatggcttttaaaagtcacatccgccgtattcttaatannnnnnnnnnatactaa

SEQ ID NO: 85849 - DNA, 297 bp, Citrobacter koseri
atgtcaatatttttgtttctgcttgttcctatgctgatcggtgatgccgcttattttgtgctaaaaaagaccatcaactatgaatggcgtgatgaagcaaaatgtggtgagctaaaaattaagaataaaaacgaaaagtattttggttttaatactaataaatatactgtcttttattcagataaaaatgaaaaatgggggttctatgagcttacctgcaaaaaagggagtgacaggagagattcttatattgtagaacctttgccggaatataatataccctcgtggttaaggtag

SEQ ID NO: 85850 - DNA, 129 bp, Citrobacter koseri
atggcaagcagctatgacgtgatcaacctgtccgaactggccgtaccggatgccattgtggtgccggatgcctcggagattttttcacgctggtggagtctgacccggcatacaaacagggagaggtga

SEQ ID NO: 85851 - DNA, 237 bp, Citrobacter koseri
atgttaccgccgaaggtaataacggccttaaggttctggcttagtccggccacgatttaccgcctccacttcatcggtgagaaagtccgaaaacacgctgaacggcatatccaggtattccgtcatgggaaaatgcaggcgccgcccgagaaaacgtatcgcccggatcaggcctctttcggacgctccccgggcgggagcataaaaacattaaacgcgtccagcagctgcgcataa

SEQ ID NO: 85852 - DNA, 330 bp, Citrobacter koseri
atgctcatccaccgccagcgcccgatcatcggccttgatcagccacagcaccaggtcgagccggggaagctgatcacggtacagcccggcatactcgctatcgcgtgcactactttcccctacgccgggcaggtccaccaacgtcataacgcgctcgccaacctgaaggcgaaagcgcagaggttcccgggtacaggccaccacatcgctgacaggcgatacctcaccagcaaacagggcattgcaaaggctacttttgcctgctcccgttttacccataatacctatgaccggttcatactcagttatctgtcttatttgttgcaataa

SEQ ID NO: 85853 - DNA, 555 bp, Citrobacter koseri
atggcatttgttgtcgcgggggttggcacgatgctcgtcggtttactggcatggtggtatatccgtacttatccgtcagaacacccacgtattaaccaggcggaactggaccatatcaccgcggcaaacggcccagccaccaacagtaaaaaataccgtctcgctgatatcaaaccttacctcaagcagcgcaatgtgcttgcgttgatcggcggatgggtatgctacagctttgtgttctatggcctgatgacctggctgccactctatttccaggccacttatggctttgatattaagtcgatgggtggcgcgatggcgctgatcttcctgctgtgctttattggtcagctcacaggcggttacatcatggataaatggcgcagtaaaggcgcaaaaaccagccgcgttatgcataccatgttggcaatttccgccactaccgcaggggtagggatttttctgtgcgcccaaagttcaacaccagccattgcgattacgttgctgacaatcggtagcagggactatctgtggcaccatgaactttaccagtaa

SEQ ID NO: 85854 - DNA, 177 bp, Citrobacter koseri
atgaactttaccagtaacctgttcgctgccattttgcctatttttatcggcttcctggtgcaatctaccggtaattactatgccgcgatgatgttctttgcgctggccgcagtgggttacctcatctgctcgctgctcattaacttcgataaaaaaatggatattgctgaaaagtaa

SEQ ID NO: 85855 - DNA, 453 bp, Citrobacter koseri
gtgcttaaacccggcccgacggattatggtggagacgttctgcatattaagcaggttggcgtcgcagttttcatcgccgagaatgaactcgtcgatctgctccacgccgaggatattgttgatgtcctggttggacttactccaccaccagcccttctcaaagtcgatgcgggcacgcagccccgccgcgaaggcagaatacggtcggtagaccagctggccgtcggcgttactgacctgcacgcgcgggcgcagcagctcggtgcgcaggccgtaggactgacggcgctgcaccacctcctgcagcgtggcacccgcagcgcagtcaacatacgccaccgcccgcagcttgcccgcaacggtctccagcgccttgcccacggcatcatcttcactgaaacccggtgctatcacgatacggggttgatacgtcgtcaccgatttagcagatga

SEQ ID NO: 85856 - DNA, 564 bp, Citrobacter koseri; identical to SEQ ID NO: 85843

SEQ ID NO: 85857 - DNA, 294 bp, Citrobacter koseri
  misc_feature (114)..(123): n is a, c, g, or t
atgagtggaactaatcctgtatttttagtccgcaaagcaaagaaatcatcaggccagaaagatgcagttctctggtgcagcgatgattttgaagcggcaaatgccacgctggannnnnnnnnncccgtcagcgtatcgttgacggtgttgataccgaaacaggcgaagtgctggaagatcacacggaagattttggcaatgaagaagttgtcgacaccgaaactggcgaaattacccagcacgaacagccgtcaactgaagacaatggtgatcgacctgaacaccctcagttaa

SEQ ID NO: 85858 - DNA, 387 bp, Citrobacter koseri
atgaccagtccgactttgaaacgactgtatgcctcttccggtgaagaggtcattatcaaaactttgcagatcaacatcggtgatgatgtcctttatctctgtgatggctacgacaacataacagcgacgacggaaactggtgaagaggtcacattcatcgccagcgccatcgatgttgcactaccggcgccggtgacctaccgacaatatacatctgacgatttagccgcgcccgcagaccgcccttataccctgatggttaaaaacgggtactggactgcaacgcaggcgcagattatcgcgggatacatgaatgtgctggatactgcctggccccgctatcgctacacactcccgttctatcctggccttcgttacatgagctaa

SEQ ID NO: 85859 - DNA, 231 bp, Citrobacter koseri
atgaacttaacagaggggcagttacttttccgtcttcaagattttcacggggcggaacaagaggcattagggataggcgactatgagtttgcacaggaaagcgctgatattgcaaacgcgttacgtgagcttttgaaagctcgtcgaacaattaaggagcttactgcggttatcgaacaacggaacggcgagtccaaaatacttctcgactcacaggagtccgcccaatga

SEQ ID NO: 85860 - DNA, 246 bp, Citrobacter koseri
atgattcccgcatcagaatgcgacgctgcgagactgattaatttctacattaacgacgcctctcgggagtgtatcgaagggcgaagagcctatctgtgccaatgtcttttgcctcgcctgaaagacgggctttcttcaatgcgtgcatggaaagagaaaactgaggacgacatagagctaatcagcatttatcagaaaggagttgattttctgacagaagctttaaatcagaaggtggaaaaatga

SEQ ID NO: 85861 - DNA, 201 bp, Citrobacter koseri
gtgggtacggccgtgatgtttttcccggtgtggcgtgaaagccagggggcgatgatatcgccgataaacgcggaagtgcctgcgccggtcagtatgatccgcagatcgtttttgcacagcaatggcgtcaggaaacgatcaatggccgatcgaatactgctgatgttattgagtgagcggatccaactggccggttgttga

SEQ ID NO: 85862 - DNA, 459 bp, Citrobacter koseri
atgcactatcccggcgggctggtattttccgcccgggcccgtaaaaccaccggcagcaaaaccaacatccgcaacagctgcgatattagaaacgatgctcgccgtggccgctgcaacagatgccatcgcagcgatgttgtacgggaacgggttggcagccgccatcgcaatcccctgctggatcgaaaccagagactgtgcaatagcgaatgccttgctggcagcgaatgccgctttataaatcccggactgctccccgaaaccagtcgccagaatctgcaaaccgctgtcaatcatggtttgcgtcgcactggtgatgatttcgtttttctgggattcaataacctggttggcttgcgccgcctgctggcggattgctgtcatgcgcgcttcgccttccgtggtgatttgcgcagcctgggcatatgctgcttcctgcgcctgcaaccacgcctgtaa

SEQ ID NO: 85863 - DNA, 267 bp, Citrobacter koseri
atgttgtttctgggggacgatgccattgatttagagcgtggagtcagcacgcacaatgaagatgaagccagacttaaccgccggatgtgtgaagtggccgagcgcatcattgtcgtcacggattccacgaagtttaaccgttccagtctgcataagatcattgatacgcagcgtattcataccatcattgtggatgaaggtattcctgtcgacagtctggaaggtttacgcaagagcggtattgaagtgattctggtgaacgcgtaa

SEQ ID NO: 85864 - DNA, 267 bp, Citrobacter koseri
  misc_feature (239)..(248): n is a, c, g, or t
gtggaagataaaagttcactcaataccgctgtaaagcgcagtatcgcccaggcagcggtttcgctgattaaacccggacatcgggtgatccttgactcaggcaccacgacatatgaaatcgcgcgcatgatgcgccagcatacggatatcatcgccatgaccaatggcatgaatgtcgccaatgcattgctggaagctgagggagtggaactgctgatgacaggtgggcatctgcgccnnnnnnnnnncgcagtcattttatggtga

SEQ ID NO: 85865 - DNA, 354 bp, Citrobacter koseri
atgcgcaagtatcaccgctgctgcattgaaatacagtgcccgcttgaccacctcgcgaggatgtacctcggtactgttaatggtgccggtgaacagggtctcattggcaatcaactggttctgctgattgagataaagcaccataaactcctctcgctcaagcccggccattttcaaccgcagccagtcacgggcggcctgtgtggaggtgagcgccacgccagtttcgcgcaggtggcggtcaagcagagccagagcatgttgtacagtgcgttgagcattcagtgggagtacccgcacctcaccaaacgactcaccgcagacaagcccgttctgacacaccgcacgaaataa

SEQ ID NO: 85866 - DNA, 261 bp, Citrobacter koseri
gtggtgcccagcgttttcagtcaggacaaacacaaatcccgcagcgaacgttatacctatattccaaccatatccctgctggacagcctgcagcgcgaaggctttcagccattctttgcctgtcagacccgcgtgcgtgacccggggcgtcgggaacacaccaagcacatgcttcgcctgcgtcgggattatttcgtgcggtgtgtcagaacgggcttgtctgcggtgagtcgtttggtgaggtgcgggtactcccactga

SEQ ID NO: 85867 - DNA, 225 bp, Citrobacter koseri
atgtatcaccctgtcggttcctgcctgggttttcggcagggtgaactctttagcctgagtgtagtttctcctgacaaccaaagtgcccgctttgatatcgatgtcttcccacgccagcgcgcacaattctccatgtcgcatgccagtgtaaacagccagggaccagagatttttgatctgctggtggtggcaggcgtcaatgagtcgcgtaaattcgtcctgtga

SEQ ID NO: 85868 - DNA, 384 bp, Citrobacter koseri
  misc_feature (258)..(267): n is a, c, g, or t
atgtctctggtggggttagcgattccattactctggacctacgtcgcgatgggtattgccggtatcgggcatatcattcagagcaccagcgtatttggcccattcttatacggtataggcgtgctgctgctcaagcctttcggccttcatcatatcctgttagctatggtgcgtttcaccccggctggcggaacggagttcgttaacggccatgaagtcgccggggcgctcaatattttttatgccgagctgaaagcnnnnnnnnnngccacatgtaacggccttcttatctcagggctttatgccgacatttatttttggtttgcctgccgtagcatatgctatctacagaacggccaaacccgaaaaccgcccggtgattaa

SEQ ID NO: 85869 - DNA, 255 bp, Citrobacter koseri
  misc_feature (216)..(225): n is a, c, g, or t
atgccactggcggtgatcgaagccaaagccaataaacatgaaatcggcaaaggcatgcagcaggcactgggttatgcccacctgctggacgttccctttgcgtttgcttctaacggcgatggctttatcttccacgataaaacggcaatcggcgcgattgagcgagaaattaccctcgacgaattcccaacgcctgacgaattgtggcaaaaatannnnnnnnnntccggttattacccaggactactacgatga

SEQ ID NO: 85870 - DNA, 126 bp, Citrobacter koseri
atgacttttggaatgttcattctgattttgaacggaataaatattataaatccgttcgaggcaatggtgattactggagtagcgtatctaatgcactccatgctttttttgataatatctatgtag

SEQ ID NO: 85871 - DNA, 207 bp, Citrobacter koseri
atgtgcttcagttcgtttgcgtccaccgtgaactcctttgaaattttaagtgttagcgaatcatccggttcttcatatgccaccgacggctacttcgtgggcgtcctgcctgttcgctatggagtagacaataaaattaaattgcgaataacgcaagtaaataattgcgaattgcgcaatattaggtgcataaaaaaaccgccataa

SEQ ID NO: 85872 - DNA, 174 bp, Citrobacter koseri
atgcttcagtatccgatcctgattaatcgcccgattgtggcgacaccattgggaacgcgtctgtgccgtccttccgaagtggtactggatattcttccggatgcgcaaaaaggcgcatttgctaaggaagacggcgagaaagtcgttgatgatgcaggtaaacgactgaaataa

SEQ ID NO: 85873 - DNA, 258 bp, Citrobacter koseri
atgtactgcgaaaccgcagcgctggaccagtttttctggatattcgtcaacaaagacgagaactaccactggatcgccatcatcgaggcatccgaagaactgctggaactcggcatgctggaataccgcaaagcaatgcgcgccatagcgaacgggttcgacactggcgaatggccggcgccgattaccgaagattacgccgaagaactcaacgattttgatgtgcgccgccttgaagcgctgcgcgtacaggcataa

SEQ ID NO: 85874 - DNA, 162 bp, Citrobacter koseri; identical to SEQ ID NO: 75892

SEQ ID NO: 85875 - DNA, 336 bp, Citrobacter koseri
atgcaacttgaaaatcttacaaatatcatccacgaagaagctaaaaagcttgctaaaacaaacaataaagccgagatatcgcactatgatatgttattgagagacattattgctttgtcacttagccttcgtcatcaaggctctgaaaacttgcgtattgcaggcaacaaaatgctcagaaaccttcagtggattcttgatgagcgttctgatttacatagtattatttcagagctacaccatgaatcaggcgggagtgtttctaaagataacgaggttattaaaaacacttctgcacatattgaatttcttggtttatgtaacaaatccaagtga

SEQ ID NO: 85876 - DNA, 546 bp, Citrobacter koseri
atgatgatgctcactctgcttaagaaacactggaaaatattgctgctggcgggggccgtaatagttatcactacgctgtgcgtcatgctgtcaaatagccgcgcagaccttgccacggtacagagcgacaataatgtcctacgcaatgataacctgctacagggacaggttatcgcaacgcaggctttcaacttcaaccgctttaacctggtggcagagaattccagccgacttaactcgctgatagatgctggcaccgagaagacagtcatcgaataccgggagattattcgtcgtgaaaaaaactgtgatctgcctgttcctactgatgtcgctggtgggctgctcagctacgcgaacagtttacgtgccagcgcaatgcacaccgattccgggaacgctaacgcagccagtgatagcgccactaccaccagcacgttgacgtattgccaggctgttctgtggattaccccgctgctggccgctatcgaaaaagcgaataaccagctggcggggatacgccaaatcgagcaggagcgacaataa

SEQ ID NO: 85877 - DNA, 447 bp, Citrobacter koseri
atgagtaattactcagaccttttccaaatcatcaagatcagagtttgccagaacaatgatttccctgcttcttcactgacaggaacaaacaactatcgcgccaaccaggtatggtatcggatcggccagatattcacccttgaatgcgtcctctctgaatacagaaaatgcaattcatcaggctattacctgctggacaacgaaaaggcgcttcatcatcttatttttcaaatcacaaagtggaaactggaagatatcagaaggctgtctcttaatgacagtctgtttattatttcaggcagactaaaacctgattacatgtcagaagaagcagcagaatttctccgctcactgaatcttccagtcagtcactatcctgttgatgatttctcagaagcggactgggatcccaaagaaaactcagttttccttcaaaaccaccagtag

SEQ ID NO: 85878 - DNA, 210 bp, Citrobacter koseri
atgattaagttgacgaaggaagatgggcacaccataagcgaacaccttcgcgctgcgcatggcggatattccgggccggtaatcatcgatatcaacaggctgtctcaattgcacatgtcccgtagccgattgattgttgcagagtgtatttaccgccagagtggcagctggacttttttgggtaatgcggattccgagggagaagcctga

SEQ ID NO: 85879 - DNA, 255 bp, Citrobacter koseri
atgaccactttacgtgattacattagaaatcaatcaggtagctttacagcgaaagaggtcatggagggctaccagaaatttaaaccgactataaaacttgactcggttaattgccaactcaacagactggttgaaaaaggtgagcttaaaaaagagaaagttggtcgtcttgtcacattcaccagccgcgctcctgggatgagttcgatatttaacagcctgctaaagcaatgccgtatgaggactaacccatga

SEQ ID NO: 85880 - DNA, 354 bp, Citrobacter koseri
atgactgagcgcggaatgatttttaatggtgagatggtgcgcgccattctcgacggccggaagacgcagacgcggcgaatcatcaagccgcagccagaggcaacattaagcggaagtttatccggtaagtggttaagcagacctcttaacggactgttgttgccgaaaattgaagatatcgcaatccattgtccgttcggcgccgtcggcgatcgcatctgggtgcgtgagacgtgggcgcgctacaacatcgaccaggatagccacgatatggcttaccgggctacgcccccctacagactggccggaagaaggaagatggcgtccatcaattcacatgccgcgctgggctag

SEQ ID NO: 85881 - DNA, 342 bp, Citrobacter koseri
atgagaattgttccccttgaaggtatttacgtcaatgcgaattttaaagaaaaccaacttaaaaatgttagggttggacaaaaagttgaactaatttcggacctttatggaagcagtattatctatcatgggaaaattgtaggttttgatggcggtactggctcagcgctgtccttgattccagctcaaaatgcgacagggaattggataaaagttatacagagattaccggttcgtattcacttaacgaagaaagagttacttaataatccactgcgtgtgggattatcgatggttgcgactgtagacctcacttcagatgatgtcaacaaaggagaataa

SEQ ID NO: 85882 - DNA, 222 bp, Citrobacter koseri
atgtctaacatcagatatatcgaagggttaaagctatcaaccacatgcgacactctcgaagacgtagcaaccgaggtaacagcgctaaaattagcccttggtttattattcgcgagactgcctgatgcagaaaaaaacaatcttttaattgaattaactcagtatgactacccggcatttcaaaaaatatccactgaattgaagcaatttatgccgaagtaa

SEQ ID NO: 85883 - DNA, 1458 bp, Citrobacter koseri
atgcaggtcattattgatgatgtcccgtatgcgcctgtctgtaattcttctgcccgtatcggaatagcaatctcaacgcacaatcgcgctgacgttctgagccgcgccctgactcagcatatgaagtttttacctgctggcgcgctggtggtcgttgtagacgacgggtcaaagcctgcggccgtagttcctgctggtgtgcaactggttcgccaggaaacatcactcggcattgttgcttcgaagaatgccagtctgaccgcgctgattgatgccgggtgcgagcatctgtttttatgggacgatgacgcatggccgattgccgatggctggcaccttccgtatatcgaatcacctgagccgcatcttgcgtatcagttcctcgaccttgccgggccgcgaaaacttaacgatctcgctgtgctttatagcgacgataagcatgtggcgtactcggggcagcgcggcgtgatgctgtattaccaccgcagcgctatcgagcatgtcggtggcttcgactggatttacgggcgcggcatgtacgaacacagcgaccttgccctgcgcatccataacgctggactgactacctgggcttatgccgacgtcaccggctcagataagttgattcattcgctcgatgagcatgaagccgtagaccgttcagtaccaacggcagatcggaaagcgctggtggaacgcaacgtgaaaatccacaacgagcggcgcgatacggggtataccggttatgtcgaataccggcgccagcgcgacgttgtgatcacaacattactgacgagccagccggacccgcagcgcggtagcagaatgcagcctgacccggcggcgctgaccacctgggccaaatcaatccgggttgccgatgccgtagtgctggccgatcagctaaactccgcgcctgatggcgctcaactggtgacagttccagatgttgcaatgaacgcctacttccggcgctggctgcatatctggcagcacctgcgcgatcatcctgaataccggttcgtctggtgtaccgatggtactgatgtcgaaatgctttgcgcgccgtgggatgagatggaacccggcaaggtttatgtcggctccgaaccaaaaacttatgctgatacatgggcgaaacagaatcacccggaacgcatctatcaggagtttatcgaacagcaccgcaacgatgtgatgcttaacgccgggctgctgggcggcacgcgcgctgatgtaatggcgttcgctcacggcatcatccgcctttactaccggatcgagagttatcgtttctggaagaaagaacaggatggcgccgcagtgggggacatgattgcatttggcgttgtcgcgcagtcatttgctgacaggctggtcaccggccctctggtgcataccgtctttaaaactgacggcgtcggcaaagagtcagcttggtggaaacataaataa

SEQ ID NO: 85884 - DNA, 1077 bp, Citrobacter koseri
atggatactaaattgattgcaatagatttcttttgtggatgtgggggggctagcgaagggctacgtcaggccggttttgacgttgttcttggcattgatgtagatcagcaggcctcagaaacatacaaagctaacttccctgatgctgatttcatcttcgatgatatcagaaatgtaactgttgaaagggttgcgaactctatagcattcaaaagtgcagatggtttgcttttaagtgcctgcgccccttgccaacctttttcacagcaaaacaaatataaaaacaaagatgatgaaaggatttgtctactagacgaaactcatcgctttgtttcaagacttttaccagaatatattttattagaaaatgttccaggtatacagaaaattgatgacagtaaagaaagccctttcacaagatttatttctttgcttgataatctaaactatcactatgtgtattttgtggcaaatgctgaaaaatatggcgtaccgcaaagaagaaagcggtttgttcttctggccagtttgctaggaccaatatcaataccagagccaactcacgatattgaaaattcacctgtaaaaacagttagagaatttattggtgaatatccaaaacttgcatcgggagaagtcgataaaaatgatgaattacatcgttcggcgatcctaactgaattgaatttagagagaataaaaaataccccagaaggaggggatcgcagggactggccgaccaatttaatcaacacctgtcacaaagattatactggccatacagatacctatggcagaatgtcatgggataaacctgcaccgaccttgacaacaaaatgcaatagttattcgaatggacgttttggtcacccagatataacacaaaatcgagctataagtattagagaagcttctcgactacaaacatttccaaaaaaatatatatttaaaggttcttttaattcgatggcgaaacaaattggaaatgctgtcccttgtgagctagctcgacaatttggtctgcacttcattgagcataatgaagcttcaaagagagataatcatggcaaattttaa

SEQ ID NO: 85885 - DNA, 183 bp, Citrobacter koseri
atgttcaaagtttttatcatgataaattcttatgttacctttaaattgcccgtattcgtcaaaaaatccatgaaaatgatgatctgcttgttcaaaatcttcacttgtgaaaaagtgctctttgtcaataatatcaatataagtatcatcattacttctataatctctgaatacgatatctaa

SEQ ID NO: 85886 - DNA, 618 bp, Citrobacter koseri
gtgaagaaaccgtccaggccaaaagtaaaagaatacaagccgaagaagtgcgcccagtgcggtgagaccttcacaccggatcgtaaccttcagaaggtatgtggtccacgctgtgcgattgactataaccgtgcgctgaaggctaaaaaggctgaggcagagagaaaggtcagccttaagattcgtaagaaggcgctgctgacgcgcggtgactatatcaagaaagctcagaccgccttcaatgcttttatccgcgaacgtgatgagggtaaaccttgcccgtcctgcggaacctatcacccgcctatggtctttggtggtcagtgggattgtggtcatttcatgggggttggtgcccgtcctgaactgcgctttgaagagaagaacgcctaccggcagtgcaaggcctgtaacggtggttcaggccgattcgctgcgaagaatgccactgtacacgcccgctacagggaaacgctgatcgagtggtatggattgtcgctggtggaatggctggaaggcccccacgaagcaaagcattactcaaaagaagacctggaagaaattgcggccaagtaccgccgtaaaacccgcgaactgaaaaagcagagggcagcatga

SEQ ID NO: 85887 - DNA, 201 bp, Citrobacter koseri
atgactaaagaagaaaaagtaatgtttttaatgcgtcttgctgttgaaactcacaatgcctatcgttcaggccaattggcggcgggtaaatcagggagctttgtgcaggaccggattaacgccgtcgtcacgctgcctgaacaggcatctaattacggtctatccgctttagtgcttcattggaattcctcctcttggtga

SEQ ID NO: 85888 - DNA, 375 bp, Citrobacter koseri
atgtattccacgttcctggacaatcccgagtttataaaaactgaaacggctgcaaccgacaaaatggttggcgaacttaccagcatggaactccctggcgaccaggttgatgtggagaacagcagcggttactacgcccgaatcggtagcagcggttactacgcccgaatcacagcgtcaggcaaaaactcagtcgttgcctgcgctggcagcgttaagcgaattgtacttggtgaaggtggttgtgttgccgttccgtggcacgacggtgagcgcactcgtttcattgtggcttatgtcggcgagaacggcattgaagccaacaccccttattgcctgaacgatgaaggccggttcgtgaagattgaagagtga

SEQ ID NO: 85889 - DNA, 399 bp, Citrobacter koseri
atgagcaagccaacctatgaagaacttgaagcgaaggtaaagcaactggaggcagacaacgaaaaggctatgtctgtcctgaaagaagcaaatgacgcggtactgctggctaaatcaaaatttgaggcgctggctgcggagaatgcggcgatgaagtcagcaattgactcaaccatcggatggcaacagtcaactgacgcggaaaacgttgaaagtgttcgaatgctgatcgaccttaaaacccccgccacatccgctttcctggctgaagtgcgggcgcagggtgtggaaatgctaaacactcaattcaaaaagtgtactggagtgctgtgcgcagatagcgtcgtatcaactgccgaacacttcgccacccagcttcgcaaaggagtgcagtcatga

SEQ ID NO: 85890 - DNA, 240 bp, Citrobacter koseri
atgagcaacatcgacaaacagatttatggatttaaaaacgtcagtcttgatgtgtttttcgcgtatgtcggacctcgcgacatcatcgtctgcaatcgtggtaactggaaagacaacagcaattaccagtcatttcagaccagaagcgggattgaggttggtcgattttatgacgttcccggcaataacagcgaaggtcagtatttgttggctgaaaatttaacggtaggtgcagcatga

SEQ ID NO: 85891 - DNA, 663 bp, Citrobacter koseri
atgacagacaaacaggcgctgcgtaagcgctactccgcaaaaccgacaccaaaatgcgatatctgcggcaccgaaatgacggtgcagcgtatttctgccagccgaattacttacggttgtactggagcaacttatgacgatgctgggtgccattacgcagaaggtcggagcatagcggacgaccactacgaacagtcactagtcaccgtcgtcgatatgagcgatcctgaagtgctggcgctgctggatgagctggaagccgcagagaagcgcattgaagcggaaactgaccgcgccaaccgtgagcatcatcgcgggttcatgatggcatgtaaacacctggaagagcatgccaatgttcattacgccgatgcagccgagatggaaattgcagcactgcgccagcgcatagcagaactggaggcgagggcagtcaccttagaaccgttccgctcatttgttaccgatgccgacattacagcgttacaccgcttcgcagaatgttgcgatgaccctgaatctggcggtcacgatttggaaaaagagcaggtacggcggcttgaggcaatcggagcattgcagcgttcggggcgaattagctacatcacaggcttcggtgatgtcctgatttcccttaccgctggcatcggtgagggggagtga

SEQ ID NO: 85892 - DNA, 603 bp, Citrobacter koseri
atgattgataaatatcggttggaggatctacgacgggaaagtggtgaaaagggggagcttgcccggtgggttatccaactgcaagttgaattggatagagaacgtagaaaaggggttaattcggcagagttacaggaacgcagcaaggctgatagtaacagccacccggcgcacggtcctgtatcactcgatcgcctgcaccagatacgcgaaacactcagcaaagcagcagcgcaaagtgacggcggcaatctcggttacgcaatgtctgatgctgtgaaagcgattgatgaattgctggaagtgcgaaaggcggagcctgccggataccacgttatcaaagaatgcggaaaagtcggctgtagtgttgcaacacttgaggaagccgagaaaacacgagaattctggaataaaaagtggactattaagccgtatttttacaccgcccagccagcgccggtagtgccggatgcgttacctgagaacgatggtgaagacggtaatgacattgactatcttgagccatcacaggtctatgagcttggaagagttactggctggaacgcctgccgcgccgccatgctcaacggaggtaaatcgtga

SEQ ID NO: 85893 - DNA, 690 bp, Citrobacter koseri
atgtcggataaagtcaaaaaggaaattgaagcagcaagatcctttgaagaacataatttaaagcgtgatgagagagataaaaaagtaggcttttttatcggtggtacagggttgtttattgcaatattgagtattgttgctcttattgttatgttaccactgaaacataccatcgttgatctgtatgttctggataaaacggcaggtattatttacaaagtaagccaattcacagaagaagctatatcaacagaacaggcaactgataaggtacttgttgcctcttatcttgaattacgcgagcgttataattatttctctcttcaggatgattatactcgtgttcaggcttataactcagatgatgttaaccgtgaataccttgcattgtggaacagcaaacaggctccagatgttgtctggagaaaagcagagcatacagtacgaataaaaattcttactcagtttattacagcggctacagacccggataaactttcaacgattcgctatcaacgcattatccgtaatgtaaagacaggcaatgaaagaactgaggtatggaatgcccgtatcacttatcgctatgttccaaccgaaacactggataaagaacagcgcgaaattaacggtatgggattgattatcaccagttttgaaaatgcagaagagagcggagatgtgaaatga

SEQ ID NO: 85894 - DNA, 909 bp, Citrobacter koseri
atgaatagagtagctattatcggcggcttacttctgttttctgctcaggtaaatagcgccgtgaccccgcaaggaagccgctacgacagcagaatgcaaactgtttcttataatgcagcgaataccacagtcataaccgctggcgtgggctatttgtccacgcttctgtttgatgatgaggaaaccgtactcgatgccagaccgggtatggaaaaggggtggaatattcagaaggacgcaaacagggtttatattcgtgccgttccggtcactcagcctgtaatggatgaggaaggtaaacaggtcagtcaggtttttgaacctaatgctaaggactggcctaccaacctgtttgttgtcacgacaaaacgctattacagcattgatttacgtgtggtggatgcttcagcaccacaggataaggtttcatatgttgtcagctatcgctatccacaggatgaaagagaaaaatcctccaggatggagcttgcccgtctacaggaacttaaacagcagcaggagaacaagcgtattgctaaagcacttgatgatgctcaggcacctcgtaactggcttttctcgatgagcatagggaaagacagcaatatgattaaacctgattttgcttatgacgacggtcgctttacctatattggtttttctccgatcaaaaaaataccagcggtgatgctgtactccaatggtaaggagattgctacatcaccgggtattaaacagattggtaattttaaaacgcttgtcgtggataaaacaaatccggcatttgttcttcgatatggtaatgcagttataggtcttgttaatcaggggtatggaaaagtgacggtaaaagatggctctactgtttcccctgatgtagaacgtgttgaggtcaatgatggaaaataa

SEQ ID NO: 85895 - DNA, 1284 bp, Citrobacter koseri
atggaaaataaaacgccagatgaaattgaaaaagaaatgatggagcatgaacaattacatgatgatgaaataaacgaaaatattaataaggaatcaacaaggaaaattaaaactgttgctgaaatagaacaggagattcgtgaaaaagaagcagcaaaacttgccgaagaatctcatgatgttaccgagaagcatcaacctgaagtgacaaagttaaagaaatctgcaaaagataacttcctgaagaagattctctttgttgctgtcgctgtcattatcgttgctatagctggcctgaaaatttaccagaaatataaggctccccctaaagaagaaacagacaagacaatcaaaacaaaagaagccacgatgaacaagcggaacaatctgggccaggaggtagatccgtttcggacagaagaaccggaacaacctccagtggaggacagaggcaatgataacccctttgcatcgtctggtactggaacagcgccacagacgccccctgtggcgttctcacgcgcccttgcagtgacggctgaaggtggacaggccggaagcaataccagaaccaggaaggaagagaaagcgtttggtactgtcagttctgagtcatcaccgacacagacaaaggatgaagcgggaaatgattctgagtcagaggtgacggcagttaaacgcattccctataaccctgacctgtacataccagaaaacacgccaatatcctgtgcccttacccggcgttttgtctcagacgtggcaggtaaactccagtgtgtattgactgatgatgtatacagcgccagtaagaaaacccgcttactggataaagggagtacggcttcactggtctataaaacgggtaggttaaatcacggacaggctcgtgtgtttgtgatggccacaaaaattcgtacacagcagccgccttttatggatatcccccttgttgatactgatgcagccggagaactgggagaggccggggttgatggatggattgatactcactttaaagatcgctttttaggtgctgcaatgcttgggatgatccccgatatagccaatgctgctacggacaatgttgcaagtacagacagaaataccgactacacccaaaacagccgggaagcatttgcagaactggcaaaaacagcctttgaaaacagtgtaaatattccaccaactatctacaaaaatcagggcgagattatcactttgattacaggcagagatattgatttttcaaagatctatacgcttaaatacagagggaagtaa

SEQ ID NO: 85896 - DNA, 1035 bp, Citrobacter koseri
atgacagataataatattagtcttaattatatccgtgatacttactttggagcgtttttaaaaactgaagggctaactgaagttgcagtgaatcgtccaaatgaagtatttactaaaatttatggaaaatgggaacgtcatgaagttgatttttctctcgatgttgcacagaagttcgctaggcagctagcaacttatcataaggataacatcagtgatgtaaaacctattttatcagccacattacctacaggagaacgtgggcaggtggttttacctcctgcctgtgaaagtaacaccgtatcaattacattgcgcaaaccttcgtctgtccagataccgcatcaaacgtatattgataatggtttttatgatcgtattgctggtaaggagaagggaaacagcagaaatgatgaattattacgattatataaaaataagcttttccccgagtttatggaaaagtgtatagaatacggaaaaacaatggtctttgttggtgaaacaggatcaggaaaaacaacttaccttaaaactcttattgattatattcctttgcacttaaggatagtgaccatagaggataacccagaggttaagttttatcgtcatcagaattatgtgcatttattttatcctagtgaggccggaaacagtgataaggcgataatcacaccagcatcacttatcagagcgaactaccgtatgaacccggacagaatactgataacagaagtcagggggggtgaggcatgggattttctgaagattgtctcatccgggcatgagggggcgataacgagtctccatgctggttcaccttatgaagcaataatggggctggtagaacgctgttatcagaatacagagtgttcacggctgccttacagcgttttactcagcaaggttctcagcagcattgatgtaatcgcaagtattaaacttgagggtgacgttcgtcgaatcggcgaaatttattataaggatgctgatttagagtcgtacagaaagaggttccgcgatgaaaacttttaa

SEQ ID NO: 85897 - DNA, 1833 bp, Citrobacter koseri
atgaaaacttttaattcgggacagttgattttcttgctcatcgtgacaatcccactggcatgggtgattgctaccgtagttgtttatccgatgaatggacttggcctgaaagcgacctggaaaatgtatcagttcggtatgctttggcaggtcttgtttgcagataacatacgtagtgatatcagattcagtggtattaaggctattggcgctggtttttgtggcgcagttatgattttagtgatgatgtttcttgcagctaaacaaagtaagacatcaatttatggtgatgcaaaatttgccagtgatgccgatatacgaaaatccagacaagtaacgtggggagataaaagtaaaggcggtataattattggtagttataaaggtaagttactacgttacacacagcctgattttatctctatgggggcgggaacgcgtgcgggtaaaggtgccggaattgttataccaaatcttcttgattatgaaggttctatgatggtgctcgatcctaaacaggagtgttatacgataacaagtaaatacaggcagaagatattagggagtgaggtttatctctttgaccccttttccagaaaaacacatggttttaatgctctggcctatgttgatttgagcacagaacagggggtaacagaccttttaagtcttggggaaacaatttataccactgacggtaaaagtggagccgaaaagcattttaacggcgaatctcagcttatgtttgtcgggtgtgcagaattactctggtttcttatgacttatcgtgcagccgacttgagaagctttggcattaaacattgtttttctattggtactattcttgagctattcaaccgaattccaatggaggatgttcttgcaaacagagaagtatatcttgaaacaacagatgatcctcatgtccttttcattatcaaagatgcacttgataagttcagacattacgttgagcttggcgacgagcctaaatcttctgtcagtgggacgtttacggaaaaactgaaactctttacgttaccgcttttccgggctgcaactgacagaaatgattttgatatacgcgatatgcggcgtaaaaaaatgtcggtttatcttggcataatggctactgaggtcgacattgcaaataatcttcttaacctgttttttaactttgcgataaaagtcagtatgcgggaaaaccctgattttgttcgtgacctgaaatatgacgtccttttcttattagatgagtttccggctattggttatatgccatatatcaaaaaggcagcaggttttattgctggctacaagctaaaattgctaacgatttatcagaatatctcacagcttaatgaaatttacgggattcagggggcattgtcattacttgctaaccatccatgtaagatcatctatgcaaccagtgaaaaagaagatgctgataaattttctgcacaattaggttatacaactattaagactaaggggaaaagcaggaacacaagtaaaggtggtacatcgaggggggaatcagagagcgatacgcagcgtgcgcttgttttgcctcaggagctttcaacactgaaatttgatgaggagtttattctgcttaaaggtgaaaatccgattaaatgtaagaaagctttttattttaatgatcactactttatggacaagctggtttctgtttctccaaaactggaggcggcagttaaagagcttaataagggggtggctatgggtaaacccggactcaggtatccaccaaaggaaatcatgttgtcttatggcgaacttgaagcagatttagatctggcagcataa

SEQ ID NO: 85898 - DNA, 537 bp, Citrobacter koseri
atgaagaaaaagattttagctgacgctgtttcagaggctatcggacgaggtaagggatttgaatgggataatttgattactaatcagccgttaaaaaaagagagtaaaaagacttcagccaaacagtcattttctccaggctggctggcaggaggcatttttatagtggcgttgatgatattgctttctggatgttcatccccgccccctccaacaccgattgaatgggataaaacacagtctctgaatacgggtattcctgaatggcgtgaaaacaaccttgtcattccatccgatactgtttctggtcgctggatgaagatactgaataactttaaaggtgatgaaggaaattatgatatttcagtttattacgcaatagcacattcccctgttatcgtggtgcatacttctggcggtgcattttttaaagctaaagattggctcaggaaacacggtgcaaaaggagtaatccagtatcatcctgtcactgattgtatgctatgcacgaatacaagtatttatttttcacgataa

SEQ ID NO: 85899 - DNA, 249 bp, Citrobacter koseri
atgtcgaaactcccgtcgccaaagattaatatcagaaatctgaatcctgatatctattctgttcttaaaaaagaagctgaaaaaaactgtcgctcgcttgagggtgaagtaaggtttgctcttggtctgtatgcagagtttattataaaaaataaaagtcaggaggacagatattcgaagatattatctgatctttctgatatcaaaagtgcaatgggtatatctgaaattattaaggagaaaatatga

SEQ ID NO: 85900 - DNA, 306 bp, Citrobacter koseri
atgaagaagttatcaggtgcgtgtttgttgtcactgtttattctatttaccttcagccctgcagcttcagcggctgatgcatgcaaaaccgtattatgtctttatggtaaagctgtaggtagtggtggaggaagcgagtgcagaagtgctgaaaaagacttttttaatattctgaaaaagaaaaaagggagtattcgctggagtaaaacatttgatgcccgcaaggcatttttgaatcagtgctcaacggctgatccggctgctatctcaaaaattatgagtaagttcggtaagattaaggggtag

SEQ ID NO: 85901 - DNA, 588 bp, Citrobacter koseri
atgtatatacatattgttcctaaactttatcatctcatggctaataaatgtagccttaaatctatttccatacctgagcttgattttataattgatagtgaatcattgtctgtaggcagaccgtggcctaataaatgtttatgggttggaatgcgaaaaggaaggaagtcagttaatggcctcgttttgcaaacagataaaaaattaagatggtttactactatatacacctgggatattgaagatatggggttaatttaccatcaagtcaatacctatatagaagatgatgattttgatatggtttcacaggaaattcttttaaatggttcttttgataagtggagtaacagggttcattcagcttatgaaaataagcctccagccagaatccagcccaaaatggagtccttattaaataagcctggtgaaaacagtcatgatgtgtggaaagagttcgaatggggtgatttccttctgtccagagaagaaagccttttacttcatactattcagtctgaacgattgaatacagattgttctttattcaaaagacaaccgtctattaaaagtgaattagttatataa

SEQ ID NO: 85902 - DNA, 207 bp, Citrobacter koseri
atggtgaatggtttgttgcttttctctgttagtgtattagtttttttagtgataatcctgatgttacatttgaaaacagccagtcttctttctgaatgctctgaatatcgcacgaaatgtgataatctctatcatctatgccagatgcaagagaaagagttagaacatctacgtgcactcattgatgcgcataacatagattattag

SEQ ID NO: 85903 - DNA, 285 bp, Citrobacter koseri; identical to SEQ ID NO: 12402

SEQ ID NO: 85904 - DNA, 282 bp, Citrobacter koseri; identical to SEQ ID NO: 12403

SEQ ID NO: 85905 - DNA, 378 bp, Citrobacter koseri
atggataccaggctacgccagttaatgagtgatgaagagttagagttttttagccatctgacaagattatgtcctgaaggtatgattccgcttgccagagttaaattaactgagtttgtttttccgcttgcggaatatggtactgatttattttaccatgattttaaagagttgaataagttaactgttccttttttaatttattcttttagtaaaaagaaaccagtatgcgttatttattatttgcaagctactgataccggttcttatgatgctctcgaaagttggctaaagaattgtcagattgaactattcaaattttactcggtgaaagatctttatctgaacgatgattttatggatgcaataaaacgatga

SEQ ID NO: 85906 - DNA, 453 bp, Citrobacter koseri
atgaaggataacatttatcaatttcccgtaggtgagcaaaagaatgcatttaaaaatgctgttagcgccaaaagacggaaagaacaacgcaacaaggccatttctaaaacaggggcactattacgacggtttcttgattggtcattcttcctggttcgcttaggcctggctaccggactgcacattgtggcctgcctgccgttcgcagcgttaattgctctcaggaagccgattttctggattggtggcctaatttgtgtgattacatactatcaccttgatcatcatttttattccgacaaaaattacacgatcccattcctcgtttcagcctggatattgagttttgtcagcttgcctgtgcttgcatttttgaacaacagaatgccctttcatcacctgctagggctggagtccacgcaagaaaagagccatactgagaccgagtgctaa

SEQ ID NO: 85907 - DNA, 840 bp, Citrobacter koseri
atgaatttacttaaagtaacacccaagacgaaaatcaggcacaggaatgaaataaacaacacattttctgctttgcctttgtcagcaagaagaattctgtttatggcaatggcacagatagattcacgtcaggagctttctaagggagaggtttttagaataacagcaaaagaatatgcttttattgctgatatagatacttctgttgcatataaacaattaaaagagggggctgaagaactacaggttagtgttattcgtattcctaaaaataagcttattacatctgttcaggacaacgaatcagaaacggtttcgaagaaacgaaaaattccaacagatgcggtgcgtgttatgaaccttacctctttttgtgactatgtggaaagtgagggatatgttgagattggtttctcaaatgtcattgagccttatatcacgatgcttaaagattcttacactacgcaggtgttgttatcctctgtcagacttacagaccaaaatgcaaatattttatatcaatatataaggaagcagatcagcaacgggaaaaataaatcttttgatgtctatatattagatttaaaggatgagttagaactgtataaaatcgaagatggtgaaaaagtttatttgtatcaaaactacaaagatttcaataaagcatttttaaataaaaacattgaaaaaataaatcaattcacagaaattaaaaaactttctgtgacaataattgaacgagttgctagaaaggctacaaaactacgtttttcttatcaggtagacaaagaaagtgaagggcaggattatcgaatcccaaaagggttcaggggggcataa

SEQ ID NO: 85908 - DNA, 330 bp, Citrobacter koseri
atgtttagcgttgtttatcacccggaagccagggaagaagccacagcattacccttaaaaatcagggtgaagtttgaccgtctcattagcaaactggagtatgatgcccgattactgcgggaaccggacacaaagcctctcggcgatggactttttgagatccgcacaatggggacagacattgccaggggcatctgggtataccacaaaggcaacactatcattatgctccgggttttcatcaaaaagtcacagaaaacgccagcgaaagaaatcgatctcgccagaaagcggttagcggaggtacttaatgaaactggtaagccataa

SEQ ID NO: 85909 - DNA, 282 bp, Citrobacter koseri
atgaaactggtaagccataaagaactgcataacgagtggatgaaggacgatgaatatcgtgctgcgtggcaggaggaagaacgcaaggagaaactcagagagcttctcgcggaatggcgtaagcatgacaacctgacaaaagcacaggttgctgaacggatgggggttacacctccggtcatttcccgtctggaaaataacatcactaaagccagcatcgacacactgacgcgctacgctcacgcctgcggtattaaaaaaccagtcattgccctgtactga

SEQ ID NO: 85910 - DNA, 543 bp, Citrobacter koseri
atgaagtatgtaagttttagaataagtaatgatgattatgaaaaattatttaccgttattaaagacgtttcaaataaaacgcctgcgaaattttttgctgatttagctaaaaaaattatatcaaaaaatacaggttttgataagagtagggttgatgatgatgggggtgatttaaatcatgtaaaacaagttcgtttatcaacagcaatgatgaattttattaaggatcaagccttgaaaaatggatggtctgaatctaaagaaattcgttttcgcttaaatcaaacaatttcaaatgaacctgttttacttgatcgtgagattgcagaattgcgaggagctagaaacgctgtagacagaataggacaaaatgttttttatattatcgcaaaacggcaattgcttgaagttaatgatcctgcgttttgggatgatattaaaaaattgaatcagagtatagatgatgttaaaaagttagttaacaaaatcactctggcacgacaaaatgttatcaatgttaaatctgccagaaaacaggggtaa

SEQ ID NO: 85911 - DNA, 1155 bp, Citrobacter koseri
atggcaagaaataatgataaagactatcggatcaggaaagctaaagggcagaatgaaaaaagtgctaaactacctcttgcacataagttgcgtaatggtggaaaagattacgttaagaaggtgcaatccagaattaatacaagaggtgcaagccgtgaagtaatggttaaaattactggtagctcaaagactaaacgagggattaaaaactctatcaactatattacgcgtgaaggtgagattaccttacgtgataatgatggtaaagagtaccagttagattgtgatagggagcgttcagatgcttataagtatctgtcagatcctgaagacagattgatgtacaaagatgagaaagcacctaatcttgtacataacattgttttttcttctcctaagattgcaggcgttagcgagaaagatgctcttgattctgtggaaaaactcctgaaagaaaagtacccggataacagattcttccttgcatatcatacagacaaggaacatcatccacatgttcacgctttactccgtattcctgataatagtgggaaaaggatcaatatacgtaaaaacgatttgcgggatatgcgtgatggtttttgtaagaatctccagctaaagggttatgatgtgaaagccacacatcgctatcaacaaggactcaagcagaagcttagaaaagagcctgacagattgcgtaacctgtatgaagtcgtcgagtttggcagaacaaactatcaatttgatcccataaaaaaacagcaaaacttcttaagagtgaaaactcttaagaacaatactgaaatggttgtctggggggctaatcttgcagatgaactctcaagggaaggagtaaaaccaggtagcattatcaggctgaagaaagaaggccagacaatggtcaaagtaccaaaactggatcgtgatggtaagcctgtgggctggatggagactcatcgtaacaactggcgtgttgagaaccaggggatgttaggtatcaagaaggagccttttggcaaagagataatcaaagattcagtcgagcagattaagttgaatcagaaaggttttagcctttttcgtgaaaatcgaactgccttgcagactgatacgaattctaaaacaatcaaattcggattttttaaattctga

SEQ ID NO: 85912 - DNA, 519 bp, Citrobacter koseri
atgcactggtatcttatgtctttctctgccaccagattcaatcatgtacttaagtttcttactgataaagatatcaactactgttgtcctatggtcgtttatcactatcagcgccctgataaagtcaattctgtcaggaagcgtttgtctcccgcctttcctggctatgtatttgttgaactcgatcttactgataataaattactgaccttttcacaatgcaggtacatccagaggcttatcgctttcggcggtgagcctgtaactgttcaccagaaagttattgatgaactcagtaatcgtactttcgaagaatgtaaatatgagagggagcctccgccagttacaggttttagtaccctcgataatgatgcgtgggcagatattcttgccactcgtgatccagatgccaggattagcaaactactaagttatctcgaacagaggagggattatgacgggaaaatccgtcggtacgacaaaaggtacaacaatcagtgtgagaagaaagctgtatga

SEQ ID NO: 85913 - DNA, 1317 bp, Citrobacter koseri
atgactgacagagctttcccggacgaaccggaaaaaaccaccgcagagcgggaagcggaagcccgtgaacgcgcccgtgcggcaatggcgacgcagacgccggagcaaaaaacacctcccggccagccagaagtgacccgtttccgtaaggcgtccggtcaccgcacgctgatcgtcagcctgctgagtctggcgctggtgatcgccctcgcatccggcggcgatcgtcttctcagcgccctgaaaaggggcgatgagaaggaagccgacaccgcgccgccgccctccaccggggcggcgcagcatgagcgtaaaaatctgggcatggacagtaacccgtttggcctgttcggacagcgcaaacagcaaggcgcagacccggccagtcagaccgtcaccagcgcacccgccctgccagcagagccgcccgccctgaacaaagcggcagcactggcagacgggctgaacagcggcagtacaacggctggcggcagtgcccgcacgtcccgtagcgaaccgcgcaaccgcgcgggaatgtcggagagcccgccagtctccacggcgtacacgtcctgtcggtcggtactggtcagaggggcggatggccgcctgcgctgcccggatcccgccgcaccggaaaccgcgccggatacggctgacagcgacaatccgggcgtcgcccgtatcaccggcgtcagacggctgggcctcgatcctgatctctatatcccggtggatcgttatattccctgttcgatgatgcggcgctttgtgtccgatgtcggcggccatatctcctgcctgattggggaggatgtctggagcgccagcaaccatgtgaagctgatcccggcgggaacggtcgcccgtggcgtctaccgcaccggcgcactgcaacacgggcgcagccggatgtttgtgctgtggacggagctgcgcacgccagagcccggcagtctgcaaatcccgctcaccgatacgcaggccaccggcccgctcggcgaggcggggattgcgggctggatcgacagccatttctgggagcgtttcggcaatgccctgatgctgagtaccgtgcaggatgtggcggcggcggcatcagatgccgcgccggggaaagaccgcaataccgactacaccgaaaacacccgcgccgccacggcggaaatggtgaaaacaacgctggaaaacagcatcagtatcccgcccacgatgtacctgaaccagggtgatgtgatcggcatcatgaccggcacggatattgatttttcctctgtttatcaactgcgactgaaaaagaaatggtatgaacactga

SEQ ID NO: 85914 - DNA, 804 bp, Citrobacter koseri
atggcacatattttcacgagtttacgtcatcctgttgaaaagcttatggaagcggaatatttctttaagcgttcaataaacttagatggtttagaattccagtttgtactaaatgcttttctttctgctagccgtagtgtgacgtttgtcctccaaaaggctatgtcaggggtagacggtttttcaacatggtatggacttcaacaatcagaaatgaaatctgattcgagtatgcgtttttttgtggaattaagaaatttaacgcaaaaagagggacctgtatcttatattggcggatttctgccgaatggtttatgtacatatcgttttgttggttactcacaaaaagttccccctgaactgaaagaaagggatattcgtgaatgctgttcagagcaattgatgaaattagcaactttattattgaaatgccaacaagccttcccattcgcgtcttgcccagcccaagcgtttacaatcgaagggaaaaattccttaggatataattgggacgatgtaaccacggcacttggattacctgatggatacattgatgttgtagatatacctgatgcagataaattaaggattttaagtaaagaaatcgaagcggtcgatatggctaccattaagcgtatagctgctgggaaatttttccaagatggcgacatttttccattcaaaaatcctactcatgatggattgattgatcgtatggctgatttaatgtcttcagaattaaatatgcaaccgcacaccgcatttatcagtgcaatcatgcgaaagattgaagataaagattga

SEQ ID NO: 85915 - DNA, 1650 bp, Citrobacter koseri
atgaaaacattcaatgaattttcaacagcagttacagatcattttattcagaatattatcttcattgatgataaagcatataataataatggcccaaaagatcagcatgaatttgatgcacaagaagtcacaaaaatattttctaagaaaggcaaaatttgtgctgtctataagcctcagttagttagtgatctagaatacttaacttcaattgcgaacaagtctgatgtaacaatacttgattggcaaatagtgcttgatgaggaatcagttgaaggtgaatcacaaaatgatgaggaagatgctgaggaggatgatgtaagaggtgtgtacacgaagaaaattatcacatctcttcttggtgatattgataatcgacactgtataaaattgatcttaatttatactggtgaggtcgatctccctaaaattgcatcagaaattaatgcggcattgactgaaaaaaacatttctggtttcagtattaatcaagatgatccatgcactgttatgtctaacaattgtaaaattatggtcatatcaaaagcgaatggaggagtcggccgagcccaacatttaccacaattggctaataaaacaaaaagttatgaagaattacctgatttcatatcattacaatttacggaaatgacgagtgggttattgtctaatttcgcaatggaatctcttgctgaaattagaaagaactttcatcatattctgactcttttctctaaggagttagatgcagcttatttagcacatcaaactttgttacctaacacttttgatgcaaatgaactgttagtccagttgttaagcgataccttttcatcaattattagatacaagaatctaaatcaatttttgaatgaggataaagttaagttatggcttgatcataatattgaagatggattaaaaccattctataaagacgatggtactcaagacaatgttttttaccaaagtaatgcagatatattattgaggttattacgttctgattccgatgttaataacaaattttctagttctttaatcagcagtgatgggcaacaactatcaacaaaaaaaatcggtatcctaataaaaaaatatgccacaacattatttgcagaatttgataagacagaagagattaataaaaattttgcaaagttatgctaccaccggagtgcaattttttcgcctcatcatctcccatttttatcactaggtacggttgttaaaagtacactcgataacggggggtactatatttgcattcaacaaagatgtgattctgtcagaattcaagagggagagatgcgtcgttttctttttatttcattagaagaggttaatgatggtggttttaactttttaacccctaatggtattaaacttaaaattgataagtctacatattctctacgaacagttaagttctcgggaactaatggtttcgctcttgcaacaaaatgtgaaatagataacaaaaaatattttgaaccatcttattactccaagggaaaagaacattccgagaggtttgagtttattattgagttgaaagaactctacgctcagcgcatagttgaggaatatagctcgagtctatctcgtgtaggtttagatgaacctgaatgggttagacgattgaactag

SEQ ID NO: 85916 - DNA, 216 bp, Citrobacter koseri
atggcaaagaaacacagcagcaagacgcgtcagggattatgcggtttaacgctggcgcaaggtcaccgacttacacgggatcctgttcatgaaaatgctcagtgtgagcggtttgtagctcagttcagtaccggtgacggcaacgtgaagatgccactgaatcgcagtatgcgccgttatgcaaaacacatcgggatcgaattaaaaaaggggtaa

SEQ ID NO: 85917 - DNA, 828 bp, Citrobacter koseri
atgaaaaccaaaaccaccaccagcacgacagcagacctgaagatcatcaacggtgttccgatgatgagcagccgtaatattgcagaagttacaggtaagaaaccagcgcacgttgttcgtgatattgagtccatgctggagtctcttggtaagcattatccagaactggatgattatgattctactgagttttttatcaaaaggaaaacgtataacggtcgccttgtaattgatgaaatctggctcaacgaaaccctgtctatgacgctggttactggttacgacgcatgtcgccgcctggctcttgtcgagcaatggcaggagatgaaacaggaactttcccagccacgcattgcagcccaaccagcacaacaggaactcagtatgaaccacgatatcctttcgctggcccgcgttgtggccgaagcgacggcatcagcgacgatgaaagcggtcatggaagtgagcggcgcgagcctgattactgctgcgcccgcaccccttgctacgccacaacagcacatcagcacaactgaattcattaacaccgatgctgaattcgttccggtacacaaggtgtcatgggaaacagggctgtccgatccatcctgccgccgccttgtccagttcgcaaacctgccatccaggcagttaccgggcgttcgcggtctgtgtgtacatcgtgaatcattcctgcatgtctttcaggtgctgctggaagaatcgacccgtccgggtggtaagcgcaagcgctggcagcaccctgagtttggcggcttcattctgcgtaaagatccgaaagagatcaccggggaggtggacacatga

SEQ ID NO: 85918 - DNA, 567 bp, Citrobacter koseri
atgatcatccagtcgaagctcattcgcgcagcactggtgtgtgctgctaaaaacgatgttcgttactacctgaatggggtgcatatcaccccgaagtatatcgaggcaactaacgggcatgttgcgttgcgcatggaacacggtatccggacgaagaaaaatatcatcgttcagtttgaagggccgattccggcgaaggcagaaactaccgaactggtattcaacaaagaagcattcgctattcatcgtgacgcattcgagcgccgaatttcgatcaccggcatcaagctggttgatggtcggttacccgacatggagcgcgttattccgaaaaagctggacttaagtatcaacccgataatccaggctgaatacctcagctatccggagaagatgtttgcccgcgaacgcaagtttgttcctgtgcaactacggccatcaggtgagtatggtgcggtacgcattcagttcgatccggttattaacagcacatacggtaaccctgaattcgttgtgatgccctgtcgtgatgatgtgttcaaagtggttgaggagcgtatgggatga

SEQ ID NO: 85919 - DNA, 417 bp, Citrobacter koseri
atgagcatcacacttgaaaatgggcgtatcaacctggattcgctggtcaccattgaagatcacctgcgcgggctggcgctggcaaacaggacgctggacagcattaaagaacaactgtctcatcattccgataaaaggtcggactggtaccgccgggctacggtcgcgcacaaatcatggttctggatccgttcccggatctgcgagcaactggctattctgcgccgccaggaaaaggaagttaatcgccttcgctggcagtacgaaaatgaagcactgctgacgcaactaaaaagtcaggtaagcaaagaggttttcagcgaatgcatgcgccgggcaaaaattaaagctgatcaacgactggaacaggattttagcgctgcaatgattgaggtgaaaaatgagcaaaattcttaa

SEQ ID NO: 85920 - DNA, 672 bp, Citrobacter koseri
atgagcaaaattcttaaccctgtagtgcttatccataagcgcgaagacagtgacacctacgccgttgcaatcaccggcggcagccaggactatcacgacgccgtcctgatggcgacgatggaaccagatatgaccggcgataacgtcgatacctggagcaaaaccggctactacatggcggcggagatcgaaagcttacgtgcaaaactggaacaggtggaagaaagacatcttcacttactgagtgttgttgatgattacgactggcagcgccagcggctttatgcagcagcagaaaaaattattggctggtgccggcaggaagccaaagatcggaacggcaatcctgataacgcagaaagctacgcatgtgttcgcgaactgcgtgccgcaatggaattctgtgaaaaaagcggctttacccacgcagcagagcctgcacaaagcggtgatggagtggcagtagcgtcggttgtcgacatcaatcctggtaagccgttgcccgctggcgccagtgtgtcattcaccatagacgaactctccgcaatgtttagctggatgataccgccgtacgttgtcgccaatacgcacacagacgagttcaacgaactcagaaataaaatcttttctgctctgcgtgacacccggcacaggggggcagttgatgaataa

SEQ ID NO: 85921 - DNA, 195 bp, Citrobacter koseri
atgagtgacttaatgacaacaaaacaggttgctgactattgcggagtttccgtatcgaccgtgcttcgctggaatagcgtcaaccgcaaaacggggcagaagtaccgccccgagtttcctgatccggatatcaaatcctgcccgaacaaatgggcgacgcacaaaattcaccggttcgcaggggttacgtcttaa

SEQ ID NO: 85922 - DNA, 1206 bp, Citrobacter koseri
atggcgctatcggatacatggttgcgctcggtaacgggcaaggagcgcgataaggttatggttaagtcagatcgagatggcttgtccgttagagtatcaccgaaaggacgagtggttttccagtaccggtatcagtgggcgggaaagggcgagcgtatggatattggtacttatccggccaccagtttaaaagaggcccgcgatgaagttgtaaggctacgcggggaacttgaggcaaacagaaaccctaagctggttcgcctggcagagaagcgaaaagtcaccggcgcgctgacagtagaggcggtgatcagagcttggtatgacgcctattgcctgaaaaataaaaaaggcgcagatcaaatcatccgttccttcgagatccatcttttccccaagattggtagtattccacacgatgctgccagcctccatgactggctggaggtgctggagcctttaagcgtaaagctaccgggtattactgacagattgttggtgaactctaagcaggcccatgtctgggcgtacaagagaaaattggtagagaatcgtccattgtccgacataaccagtaaggatatggatatcagaaagggacagggtgagcggttccttagccatgaagaaatccggatcctgtatgctgcaatcgaaggttctcgcatggttcctaaataccgtgcctttatcaagttgctactgcatttcggctgccgttccgctgagttgataagcgccagagtcgaggattttgattttgtagataaagtctggacggtgccggccgagcggcacaagacgggagctataacaggtaagccgctaaaacggcctattatcaggcctaccgaggacctgattcaatacgttatttctatgaacaatggttcaagtatgctctttactaaagagggaagccgcgaacctgttggaagatcatcactgcaatctctaccgtataatttaatgcagtattcctggcgtcgcttgggataccagttccctcactggtcacttcacgatttgcgaagaacagcgagaacgaatttttccgatctgacggaaccgcatatagctgaaataatgctcggccataaactgcccggtatctggcaagtttatgacaagagcgattatcttgaagagcaacgtaaagcatatcaggcctggtgggaaagggttgaatctatcgttaagacgtaa

SEQ ID NO: 85923 - DNA, 1059 bp, Citrobacter koseri
atggcgggaggcgtttttcaagggcttgcacaagcccttaattctagccttgatagtatggcttcgggtcagatagctcaatattcttcaatgataagtgtaattgtaacgagttcagttacactttatttaattgtctgtggctacatgcaaatggcgggaaaattaagaacagaagattttggctataatatcgttaaaatgtctataatattaaccttcgtaaataacagtggagggtatttagattcagcaattgatgccataaatggattgaaagagggtatctctggaagtgatagtgtgtgggctatactggatagtttatggtataaaacacaggttcttgctgatacaatttacaaacttggtgatgaagactgggtaaatataaggggggctgttgggttatgttttgtatgggcaggggcagttataacaatgatatgctctgcttttacttttcttagtgcggaaatcactataaaactcatgacatgggtttcacctatattcattttttgcttaatgtatggttttttacgaccaatgtttaataattggttgatgactataatctcctcagtgttaacattaatgtttgcttcactagttctaaaaattggaactaattaccttgataaaactattcaaaaggcaactacgcttgttgaatccgtaaacatcataacgttagccgttcaggtttttataatatatatagctgccgcatttttagtttggttatctgcaaagattgctactcaattagcgggggtgggcgttgatggtgctatacaaggtgcagcggctatgggggttattggtggaggatttgctgctgccagagccacttcaggtgctggaggaatcgttaagaatatgggggttggtgcatatgaaggtgcaaaaggaaaaagttggcaggataaaagtgcagaaggtataagtggcgcagttgcatatggcagtggtttagttggacgagcggcaatacagaaagtaatttctaaaaacatttcatcttcaaataacatacctactgcaaaagtcagataa

SEQ ID NO: 85924 - DNA, 225 bp, Citrobacter koseri
atgaaactaatcattgcctcagcaacgtttatatctgctttatgcctggtgggttgtgatgagcagccaaagagtaagcaatggtatatggataaccctgaagaagcaaaagttatggtagaaaaatgtaaagctagcggtgatgactctgttaattgtcgaaatgctaaaggcgcattgttccagattaaacaggagagtgcgccagtagcagatttaaattaa

SEQ ID NO: 85925 - DNA, 708 bp, Citrobacter koseri
atgaaactaaataaatatgttttagcaatagcaattgcctattcatcttcagttttttctgccgggattcctgtagttgatactgttggtaatgcgcaggaactggcgcactggacggaaaagctgaaacagtggacagagaccgtacagcattacaagagtcagttacaggcttacaaagaccagttagccaccgctactggtatcagagatattcaggggcttgttgcacaaggtaagagtctgaagaatgacataacgaatcttcaaaagcagggtatcagccttgatgatcttcttacatcgggtaatgcgccaacggggacactcgattcgctttataaccggttcaaagattttgatgtgtgtgatgcgcgccaggctgcctcttacattaacctttgtaagcaggagacagtgaataaagcgtgggcgctggagcaaaccacggaagtacaggaaaaaatcagtgatgccctgaatgatatctcaaaccttactgaccgtatggcgaatgctaaggacattaaggaaagccaggatcttgctaatgctgttcaggcaaagagtatccagctaaatgttctctcgcaacagtgggaaatgaacatgcgagcgtccgaacagcgtgataagctactaaaggaaaagaggaaacaagcaaagcaacaaagccagatagaggcttcagttgctgatttaaactaa

SEQ ID NO: 85926 - DNA, 423 bp, Citrobacter koseri
atgcttaaggttatccgaaaactaaatggtgtggtggggatagctactcagtctcttgacgaagcactcaagaataaagtagcaaaagctattattgaacttaccgcgacagatttctatcttgctaatcctaatgcagattataaagactatgttgaaggtgccaaagtatcccccgaacacttcgaaataatcaggaatattgaccctgaatcacgacaattacttgttgttaaaaatccggtcagaaagggtgatgttaagaaatttgcttctctgatttctctggatttatcaggtcttggtgattatacgaaggtaatgagtggtagcgaagataatctggaaatatttgattcaatatataaaccaggaatgaagccgcaagactggatcaatacatatctttcccaggctctttaa

SEQ ID NO: 85927 - DNA, 129 bp, Citrobacter koseri
atgctgaagcatcgactcaactgttccacgaagttcattcatacgcagaatagcatccctctgggttttatcgataaacgcagcaccctttgtttttctttcagccttttcttccttggtatatggtaa

SEQ ID NO: 85928 - DNA, 288 bp, Citrobacter koseri
atgaaatatatcagtaaaaatctggctcacttttacacagccctatgtttattctttgttctttctgcaacagcaaacgccgatggcttcgttaaggtgaatgcaatgctgaacaatgtcattacaggtctgcataccgtggcgattgcaacagcaacgcttgcgggcttatgggtgggatttaaagttctcttccggggcgaggccttaatggagatgaagaatgttatcatcggagcggcaatcattatcggtattgctgaatttgtcgctatggttattacctga

SEQ ID NO: 85929 - DNA, 603 bp, Citrobacter koseri
atgttaagcacttcggctttattatcacttgctgtgcagtgtgcggtatctgtacatcctgataccgtatcagccatagcacaaacagaatctggatttagaccattagcaataggcgttgttgggcaatctaaggggatctatcctgcaaatatcaatgatgcactggcacatgttgcacgattaaaagcggaggggaaaaactattcaataggcttgatgcaaattaataaaagtaacttttccagatttaacgtcaccgaagaacaactctttaatccatgcgaaaacctgaaagttttcgaaaaaatattttctaattgttttataggaggagggactcttatcagagcattgagttgttattactcaggggattatgaaagcggcaggagaaaggaaagtaagtttgataataccagttatatagaacgaataggttatcactcgaaagtaaaatacctggttccgagtattaaggaggacatatcgaagactgattcagggagtaatatcaatcctagacacaaagttgtaatcatttatccatctcgcctgattcgaggcgatttacaagataatttaatacaggaatctcaatga

SEQ ID NO: 85930 - DNA, 1854 bp, Citrobacter koseri
  misc_feature (1830)..(1839): n is a, c, g, or t
ttggaatatctaaatgtcgctatcgatgaggggcataccgcatggaaaaaattattacatccagatgattataaatcaattgatgaaaaatggcgaagatgtttgatatccggtgaagattttaatgttgaattccgttttcgtagggcaaatggagtttatgtctgggctagaacatctgctcgtgcggtgagaaatcatgtaggtaatatcgtaggatggtatggtattgctttagacaatgacgtctataagaaaacggtcttagcattacgagaacaggggaaaaacctacaacaattaatagatacaatccctgcacttgtttggacaacgtcatcaaagggaacgccaacgtatgttaataagaggttcaccgaagttacaggagctagcctcgaagatattatatcacctgataaaactcccaatttaagtgttattcatcctgaagatgttgaaaaagctcgggaagctatatttcactcacttttaactctgactccatatgttcagcgatatcgtcaactacgcgcaaatggtgagtatagatggacagaaacaagagccgaacctctaattgatgactctggtaacgttattcaatggtatggcgtatgtgtcgatattgatgagttagttaccacccagaaatcgttatcagatcgagagcgtgaactctctatgctagtcgatacagtaccaagtttcctttggagactaaatcctaacggtgaacctaattttttcaataagcgactaattgattttttaggcatcgatgagatgttacagagaagagaaagtcccaccggactatctgaaatattacaaaaagcagttcaccctaacgatgttaatagggtctcacgagagctgaataatagcatagtttctggaagaagattttctatgcgatatcgatggcgccgctctgatggcatttatcgctgggtttcctctcaagcggatccattaagagatgagaccggaaatataatccagtggttcggtgtctcaacagatattgatgatcaagttaaagccgaggatgctttaaaacatagcgagcgtcgttatagagatttatttcaatatatgcctatcggtctaactcaagtagatgccagtaaattagttaatttattcaacaagctgagagaccaaggtgttcaagatattcggggttatattgacgaacatcaagattttttaaaccaagctctagaagcattagaggttgaagaagcaaaccagtacattcttgatatgtttggggctaaaaatttaggtgaaatgagaggttctataaaaaaatattggcaaccgggtatggaaaccattcgccgctctatcgaagcgcggtatcgaggagaagaagtatttcaagaagaaacaaaagtcttacgtttggatggacgagtcattgatgtactttttaccactgcaaggccagatgccgttgctgacaaaagtttagttggtttcattgatataactcaacggaaaaaggcggaagaggcgcttagagaaagagaacgtagactttggaaacttgttgaagccctgccagtgatgatagattgtgccgattcaaaaggagaaccaatttaccgtagtgaacgtctcagtcattttttgggctatgacttaagcaaactcggagaaaatggtagactcgatgccacattagatgctggggttcatcccgacgacttgcctggtgttaaggagcagtatgcctactcgctttccacgggaaaaccctatgcgcgaaggcatcgtttgcgccgagcggacggagaatttcgttgggtcgagactagggcnnnnnnnnnngggcggaagctatga

SEQ ID NO: 85931 - DNA, 804 bp, Citrobacter koseri
atgagtgatgaacacggcaatatcattcaatggaacgtcatttgccttgatattgatcgcgaggttcgcgctcaagaagagcttcgttttactcatgagagacttgcaagagctagccaagcttctagtatggctgaactttcagcatcaattgcacatgaagtaaatcaacctttggctgcgattgttgctaattctcatgcctgtaggcgctggcttgttgctgaccccccgaataccagccgtgcacttaaaacggtagaacgtattactcgcgatgcgacgtcagctgctgatgtagtaagccgaataagagctctttttagacactcttctgaagagaaaatattaattgacctaaatagtgtaatatcagaggttctggggctaatgacagaagaactcgtcagatggaatgtattaacagaactaatgctagaacctaaactgccttatataatggcagaccgcattcaaattcaacaagttcttctaaatttaatacggaatgcggttgaagcaatggaaaacgtcacacatcagcgtattttaagtatcaatacaacacacaaaaacaatgttattgaaacaaatatcagtgatctcggtggtggaatggcatctctggaacaaatgtttgaaccatttattacaactaagaaacaaggaatggggatggggttagctatatctcgttcaattatcgagtcacacggaggacggctttgggctgaggatcatttgccatatgggacttcactaatttttactatcccagtggaggtggcggtcaacaatgaataa

SEQ ID NO: 85932 - DNA, 645 bp, Citrobacter koseri
atgaataaaacacaaatagtctatattgtcgatgatgataagagagttagggacgctatcgatgaattacttacatcatatggaatatatagtatatcatttgcctccgctgtagaatatattgaagcggagaaacttgatattccgtcttgtctcgttctggatatagagttgccggacataaatggattggaactacaagaacaaatctacaatagccaacacccttctattgtttttatcactgggcatggtgacatttctcgttctgtaaaagccatgaaatatggagctattgattttctcaccaaaccgtttagcgaagataaatttatgtcagctattgacactgcacttaccaaagatcgccatcgtcgccagaaacaagcagaacttaatgaattacaacgacgctattgcaacctaacattacgagagcagcaagtgttaccattagtggtcagtggtttattaaacaaacaggctgcagcggagttgggtatacgtgaagttactttgcagctccatagacgaaacattatgaggaaaatgtcagcaacaacattcgcagatttggttcgtatctccgaaaaattaaatataccaatcaaacacattcgatcgatatctgggaagcgatcatga

SEQ ID NO: 85933 - DNA, 378 bp, Citrobacter koseri
atgattaaaaaccattttataattgcgattgtagatgacgatattcgacttttggagtccatggaggatttgttggaatcgactgggtataatgtttgttgttatcactcagctgtttctttattaagaaagggcatgtcagatattgatcttataattacagatattagtatgcctgaaatggatggtttcgaattgatgaaaatagtgagaaaaatttcaccaaaaactcctgtttttctgattactggacgtcatgaaattgcggatcaacgacgagcccaagaagtatcctatcttttccgaaagcctttcgatgaaaaagaattgcttactgctattggaaaagttttacatgaacatttggaggaggattga

SEQ ID NO: 85934 - DNA, 696 bp, Citrobacter koseri
atgaacacaaatgaatcgttaaggaatttgatgtctgattcccatgctaagggcgaagtgtatattgaacagcctatagtagcaattgttgatgatgacgtatctattcgtgaagcgctttatgaactgattctatcgtcaggcatgaggccgatggtcttttcttctacacatgaattactaaactcagacatactagatacaccaggttgtcttattcttgatgttcgtatgcctggtgttaacgggttagagttacagcgccagcttgctcaacgtggaaatgttaagccgattatatttctaacaggatatggcgatattccgatgactgtcgaggcaatgaaagcgggggctgttgattttttaaccaaaccagtccgtgagcaaactctactcgatgcgatatcggaagcaatcaagttagacgaacaaagacgtcacagagaaaaaatcgttaatcataatattgaatgctattctgcgttaactcctcgagaaagagatgttttccgtgaagttgtccgagggagattaaacaagcagattgcatatgacttgggtatcagcgaggttacggttaaactacatagagggaatgttatgcggaaaatggaagcatctactattggcgaactaattagaagctgggagactttacgttctcgtcttaacatattaaaatcaatggattaa

SEQ ID NO: 85935 - DNA, 543 bp, Citrobacter koseri
  misc_feature (518)..(527): n is a, c, g, or t
atgaaaaaacgtattatagtagctggggccggctttgctggcatgtgggcggcaatttctgccgcaagactagtaaaacaagaaaatgctgaagataaaattgatgtgttccttgtttcacctgagccaaaattggtcattagaccaaggctttatgaaccagttcttgaagatgttgcaccatcaattgtcaatgtcttaagcgcggcaaatgttaagtatatagcggggactgttaatcatatcgatgaaaaaaacaaaaaaattactgtcgaaaagaaagacggtgaaactattgttaactttgacagttttgttttagctacgggaagtcaagtttttcatcccgaattaaaaggcttaaaagaatatagttttaacgttaattcattagaaagtgcgagaaaattggaaaagcatttatatgatttggcattgaaaccaaattcacatgagcgtaatactgttgttgttgcaggaggtggactcacagggctagaaactgtaacagaaatgcnnnnnnnnnnatgccctcgcgtctaa

SEQ ID NO: 85936 - DNA, 606 bp, Citrobacter koseri
atgggggaggaagcatgtgaggtaattaaccaagcattacaaagtaatggtattaaagttagaacaaatgttagagtgacttcaattgaagaacatggcgtcacgttatcaagtggagagtttataccatctgatacgatcgtctggacagcagggatgagggcaagtccattaactagtttcattagtggtgaacatgatcaactagggcgtgtaataagtaattcatatttacaatcaccgaatgttaatgagatatttgttacaggtgatacagtaaaagttcataccgataatgatggaaactataatgtaatgtcatgtcaacatgcaatgagcctaggacgtgtagctgggcataatgcagcagcaatagttcttgatattccgctgcattcatatagtcagccaaaatatgttacttgtttagatcttggagaaggtaacgccgtatataccgagggatgggaacatacacttatgtataaaggcaccgatgctaaaaagattaagcaggagataaatactcaatggatctatccgcctgagccggaacaagaaaaaatgtttgcaatcgctaaccctgactttattattgtaccatga

SEQ ID NO: 85937 - DNA, 618 bp, Citrobacter koseri
atggatcattacgcagctgatattgctgaagtgattacacaccttgggttagaagatgtaattcatattggtcactcaactggtggtggagaagctgtccgttatacggctctatatggacaagagatagtttctaagctcgtattgattggcgcagttcccccacttatgttaagaacatcatctaaccctgatggcctgccgatcgatatttttgatgggttcaggagtgcgttagcttctaatcgcgcacaattttatcgagacgtagctagtggcccgttttatggttttaatcgacaaggtgttgatttttctgaggtccttgttcagaactggtggcgacaaggtatgagtggagccgcaaatgcacactatttagggataaaggcattttcggaaaccgacttcaccgaagacttaaaaatcattactgtacccacacttgtgctacatggtgatgatgatcaagttgttccttataaaaactcggcgcttctttccgctaaactacttaaaaatgctgagttgaaaatatatcatgacctttctcatggcatggcaactactcatgcaaatataatcaataaagatattttggattttattaaaaaataa

SEQ ID NO: 85938 - DNA, 348 bp, Citrobacter koseri
atgaggcctagcgagttagcgaggattacaggagtcagtacgcgtgtactgcggcactatgagaagaaggggctgatctcttcagaacgttcagacaatggttatcgtgactatagtgctaaggagattgagagagtgaaatggattgtatctttaataagatgcggtttcagtaccagacagatttcagagctggacaaattttcacaagttagcgactcaaacgatgatcgatttatacaatgtctcgcacaacataaggaaaaattacgagctttagatacatttattgctttgctcaatgagcgaaggaacgcactggcagagcgaattcaatcctttgaataa

SEQ ID NO: 85939 - DNA, 201 bp, Citrobacter koseri
atgcgcatgaggattattaccgttaaaatcatgaaaagcgatatcagcaatcatgcccttatcaacgaaatttttttggcagtattcaacaaccagttttatcttgtcttcattgttcagttcacagggaatagctacatcaaaatagcgggctgtttgaccatctttctgacgttcaacactttctacttcattccatag

SEQ ID NO: 85940 - DNA, 174 bp, Citrobacter koseri
atgttcagctcaattcgcgcccgtattattgcggcgacaacgggatgtctggttgtcgccctcctccttaacacgctgattaaccttcaggtaacgcgtctcgataaccgacaagcgcagcaggatacgctcaccagcaccagcgccagccacagtctggcgattaccgactag

SEQ ID NO: 85941 - DNA, 582 bp, Citrobacter koseri
ttgactactaacacattagaaaacaataacatgtacttcaatatctacatggcaatgccgctggtgtttccgattgcatactttttcactagggacgatataatcgctacagtagttttttacatagctgcaatcgcatgtatgatttttgaccaaaaggaaatggtgaaatcagggtatgaatccaaaccgcagtttgtcggctcggctttagggatcataattttcccggctatttatgtttatggtcgagccaaggccgctggtttgaatgtgagcaagagatgggtatggttcttcgcttatatcgtcatcgggttggggtgtacttttattactgttgttatgagtgatgacaaagcgctgaagacgagtgcatgcgagattacgacttcgatatttgaagataaaggcagtaatgtgaagtgccttgtggttgaggatgtgaagaagatttcagacaaaaactaccgggcaaaagcggtattgtcgaatggggtggatatgccgatcacaattgaagagcaggccgacgattacatttacgtgacgttggtacctctgagtaatctgctcgattga

SEQ ID NO: 85942 - DNA, 258 bp, Citrobacter koseri
atgccctacattgctaaaatcattttcgggtactggatggaagataaaatgaggcgctatttcactatgttttgcggcctgctgctggccttcaatgccactgccgggcgcgtgaccatgagcaacccaaaacagccaaccacagaaaacggtcgtaccttgtgcgtctactctaacagcatctacacctttacctatgtcactagctcgaagcactgcccctacagcaggaccttcgataccgctgacagtgagtaa

SEQ ID NO: 85943 - DNA, 726 bp, Citrobacter koseri
atgcactcaaccccaactaacctcatgaccaccgccagcctgcctgtagatcgccctttctttgcttaccagcatgaatggaacagtggcgcacgcagcagaaaccgcgtgcttacaaaaatgcgtcaggctggcgcggatttctttttcgcctacgaagccctgaatgatgcactgcataccggacgcaaccagatttttctgggatgcggtgacggtcagtcgcaggttaacaggacctacctcaatgcgctgctgtcagaagccaggccacaactgcaaatccacgtattgcgtttgacagaccactacctggaactgagcaacggcgcattcatctactttatcgacccggacagctgctgcgctgcgctccatggaaacgtctacgtgtcagagtatgcctgggccgactcgccaaaaaatgttattgcgcttgccaaaggcctgtccatgcacgcgcgctatcacgctacctactacaccaccccaagccccagcccggaagcatggcgggaatacaagaagctgatttccctcaacagcacaaccagcatgacctttaccgctgatgacgctgcagcatccggggcaacgctcgcaaccggagccgcgctctttgatgatgaatggctgaatgacatgaaaaaagaattatcagcagaggactggaaaatgctgtttatgtgcgaatggccccaggctgacaaggagcaggcggcatga

SEQ ID NO: 85944 - DNA, 246 bp, Citrobacter koseri; identical to SEQ ID NO: 72370

SEQ ID NO: 85945 - DNA, 684 bp, Citrobacter koseri
atgaatgcttctatccaatctatctgctacaacatttcccaacatcctgaagtcagtaataccacgttgaaacgttctcacattcacgaggtgattgctgctcttttagggtatgccagtcatgcggcactcatccaggaaggaaaagaaacctcacaagaatatgaattctctgatgctgaatttgtggtgctgaatctaccgatgggtacagaaagagcgagtaagtttcttctcaccaatgaaattttccgcatttgtgtcttggaactaaagtcagggatgcctgtacccgtatttgagtccgtagaggatttttatgatgataaggttcgggaactgctcgaagaagcaatatatcaagaagcaggagaatcaggggcgatggatgagagtaacgcttacttcgaatatcttcctgacatggattataagcttgaaaccagtggcaatctctggacttcagttgatgaatggtcaattgcagatactggtacgctctcaggcgaatacgatcctgagggggatcggatgtataacggacataccttaaatgttaaaggtaagttcatttttgctaaggcgggtcgtgctggcctagttttgttagatgatagcactgaatgctttatatggcctgatgagtcttggcgcgattatgaaccgttagaggctgaaggttaa

SEQ ID NO: 85946 - DNA, 210 bp, Citrobacter koseri
atgaagaaaattttactatgtgttgtggcactgttgccgctggcggctcatgcaggaaaaatcaccatgagcaaccccgacgaacaagagttacagggcgggaaacggctttgtacttacgaaaacagcatttacttgttcacgctggtgacgcattcgcagtcctgcccgtattcgaagacgttctcaacctgggacaacgaaaagtag

SEQ ID NO: 85947 - DNA, 447 bp, Citrobacter koseri
atgaataaaccgaaatcccaacgtctcgacctgaccactatgacaggcgagcagatcgctgatctcatcctgaacggcaaatacaccaaatcagccttgtgggccttcatcagtagaaacggcggcgcagacgctgtacatgctcgattcccgcagattgccgtctgcctgcatatcctgaagcaggagcgcaaaaaggcgaaacatgcacgggcagtgaagacggtgctgaagcctttgagcaataaatatgctgagggcaattccttaacgcaaatcctgaatcctgtgttacaaggctaccgcgagctatatagagaaaaactgaatctggatctgacaccggaacaggtgatcttgctcttgatcgccactgatggtgtggaacgtctggaatcctacggttacacctgtgtgggtgacttcccgacagcaaccgcagcttaa

SEQ ID NO: 85948 - DNA, 201 bp, Citrobacter koseri
atgaacatcaaattccagcagcacatttatcaagctctactggctgaagctaacaggcaggataagccactggcacggctctgtaatgaaatcttggagactgccgcgcacattttcgacaacacaccagacatcaaaccagcattagccagcaaggcgaaacctaacggagatcaaaatgacagaagcagtaaaatctaa

SEQ ID NO: 85949 - DNA, 1086 bp, Citrobacter koseri
atgacagaagcagtaaaatctaacgttatcaaagaaccatcacgcattattcctaagcgcttggacgctcgtacaattgctgtaaaaagtacaggagaagtgatcagggtaacgaacgaccacagaataatttatgcccatctggaagatcagttccgtggtttgactaatccaaaaaacatcgcggctggcaagtcaactggtcactattacgattcagatgaaaaccttgctatcaagtgtgacgtttctaaatcgaccttcaagaaggtgaagaaggatctcaaggcgctgggccttattgactgggaaccgcccaaggcgaagaagtcaggtcacgcctgcgagtacttcgttaaacagcttaccgatatcgatcacaacctggaattcatctatcaggaattgtcgaatggtcagccgtcttacgatcatgttcgggtcagtggtctgaaaaccaagaagacgaaaaaaatagcacagccaataatcgaggagagcgagaatggcgcacaatccgttactgtggcctctgcatctgccgaggatgatcctgaacagcgatctggcttttcacagcctgctagtgatagcagcgatgatgtttccgctcatgatgcggtgaacagttcggaaacgccacagcgtgccgacatttttgatcttaagctctggcgcgaaaatggtcccgatgatttcggatttatggagtacggtgctgaacacggtgaaaccgatgttgaccgggtcgtagctctgatcgatcagcattattttgaagcactgaagcagataacgatcttcgatgaagatggtgtggttactgaagagtttatcaatgctctgagcggtgacgctgcccctaatcgtaatgctgacgattcgttgcagagtatcaagtacgtttattgggttgctcgacattcacaagatgaacgtgacggcatacctgtacggacatgcgaggaatacatggcagaagccaggccggaacacatcccagcgcacctgttgccaaaagagcaccgagccgagccgaaacctgaacctgtggatgatttatccaatgaacctataccattctga

SEQ ID NO: 85950 - DNA, 522 bp, Citrobacter koseri
ttgtgtgatgttgccaacagcctgacggctgaaacccttacggtgcgaagcactttaccagaggtaaacacttccggtgctgacgcccctgatttgtcccgtttttacaaggcccgctctcgtgatacctcgttgatcgagactgctaaaaaaatgctcgttcatggttacaccccaggcaaaacggcgctgctcctacgcttgccgtatgacctggtaaaaggcctttacgataactcgtggaatcctcgctgtcgcaagataagcaatacaagtcagtacgctactaagcgaatggcccgaatgtactacgaatccggcgcaatgctggcaaaaatctgtgctgaccttcaactgcctctattcactgtggtaacgctgcttaagcgtgaaggaatcactgaaaaagaaatggcatctcgaatgccggatcagcatgatccgttgtttgtggcctatcgggaaacggtcgccagaaaacagaagaacccacagcgacgttcacctcgcctgcactactaa

SEQ ID NO: 85951 - DNA, 336 bp, Citrobacter koseri
atgacactaagcatccgagatcggatttttgccgctatgcatggcatgtcagcagaacagtatgcattggaaaaggcgcgggataatctaaagagcgtcaccgcccagcacttagaaaagcatcctgaatacctcaaatcatccccggtggatacgtccaccaaggttaaacggatctctaaatcgttgggggctgatagtcgtccggtggtaagtcataccgctgaccatattgatcctgaaatgctggcgaaagctaaagcagcggctgctgctctcgcaaaatctgatcctgatcgttacggcaatatcatcaagcagcagggggggcaatga

SEQ ID NO: 85952 - DNA, 2169 bp, Citrobacter koseri
atgagtagtggagcaaccaacaagatagtgacgagcaccgtcaatatcgtaagctgggaaatttcccgctctagttacgaagcagcgaagaagaaaattctgtcacttcagcaattaactaccaaatccgctaaagcgcttgagaaggcacagaagcgtaccgctcagagtgagggtaaatcggctcttgaagcagcccgtgctcaaacacagcgccttaaaatggctcaaaagctttcgctagagcaacaacgccaggcccaagcccaggcaaagatcgcaaaacaggaagaggctcacgcccggaaaatgcaggctcttaacgccagagggcaggctcaacaattggcagatagtgaacagatccggagacaaaacgcccgtttagccaatatatccgcaaaagtgcaggccgcagccagatcacgagcgatgacctacaaccctaacatgggcggtcaacattacgatcctggtcttgtttcccgtcagactgacgcaatgaaccgtggtcacggcgctgttgctgctgacatcgcagccaccaaaaaggcgatggccctggaagagaagcgacagcgtgagaaagaggcggcttttaaacgacaaatcaccgctcatgaaacactccgaaaggcaagcttgacgatcagccatatcgaaggcgctagcctggctgacaagatgaaagctgtgcaggcaatcaaagaggctaccaagggatactccgagcagcgttataccatcgcagaaatgcgccatgaacttgctaaagcgactctggaaaccagacgtcaggcgcgtattaaccgccagattgttaaagataaagcgaaagcagagcgagcagggcgcattaatgctcaacgtttgagacgtgaacgtagcgaacgtggttatggtggccttgctgctacgggtgtaattgcagggggttccctgattggctcaatgggggttgctcgtgttggtcagacccttcagggaagccttgagcgctccagagaggcgcagcaattaaggcagtatgacattagccaacttgaatttaatgctatccatgacgttgtacagaagcgtacagggtacgacctgactgtagataagtatgcgtccatgaataaggattacttcgagaaagcaggtgagctaataaataccggttcctttaaaactaacaagcaaggggtaacaacattcagcggaggtggtgaacttgccgatctggtgaatgcagttcttagcaaaaccaaccagcgaacagcccagaaggtgatcggtgaactccagaaattagacatgggaacctttgttacctacgtccggcagttgggaaaacaatttgcttggtctgaaaactccatgcgccattttttggaggccatagacgatggatcggtcctcctcggcgggcttacaggggagggtgatgaggttattgcccgtatgcatcaactcgcttctgaaggatggaccctatctgatgcacagcaggccaaccttgataaactggcggcgttaggtgctgaatacaaccgagtacaaaccagccttgcagatcatttctcagcctcgtttgttgaaggcctggggcagtacgctgccaatactgacactctacgtcagaatatgaccggactgatcccaatttccgatgccctcggcgttgcccttggtgagctaaccaccaacattctctccatcgctggtcgagttggtgaagaactcaagaaaggcgcaacactgccggatgcagtctacaacaccgttgtggatgactctgcgaatagcaccgccgattggattaaggaaaagacaggcttcgatcctcgtagcatcggtcagacgcttaagcagatttacccgtggttggatagttcagcaccaagcaatattggctcaggcacggcgtataacgatccagcgctagcgttgaatgttcctggtttcaactcaatacaaccccagcaaccaacgttcacggttccgacaattgacagcatgacgcagcgacagccgattcctgttgcggtcactggcgaagctgagattaaactctcaccgcttgatattaacgtgaatgacggcgctattaacggtttgattgatacaaaactgagggactacgaacaggcgcagaacaacctcattctgggcgttgctcaataa

SEQ ID NO: 85953 - DNA, 666 bp, Citrobacter koseri
gtggcacatactttttattatggcaagcgcccagagaggatgatcgatttatacaaccaaaaagtcactgacccaatcaatgatatggaatctggcatgacggctttttggtatcatggatttgttcggcttcgttatcctaagggagattggatcagcttatatctgagtagtaatttcggtaggcgtgatggtttttggtgtgtgctgcaatcctccaatgagcgttggtactcttcaaatttccttgaatcagcattgatgggaaatatccatcttcaagcgataaatgaagattcagctagggacgtttgctgcggaaaattaatacctgaagtattagaaatatttgaaatgccagcctcagagaagacaaaaaaggcaatggcgaagcaacgtattcagcagtcaaaatgggccactgccgtcaaagcccttgcgggttacaagtgccaggcgactgggacgcaatatgctcttgaagcatgtcacattaagcctttctcaaaatgtaatgatctggaagcgtgggatgttacaaacggcatttgtcttaccgctagtgttcatactgtatatgatgccggattacatgaagctttatctccagaagatccattaaccgcactaatcagcgtcgaaaagctacaaaaaagccgggattaa

SEQ ID NO: 85954 - DNA, 1200 bp, Citrobacter koseri
atgtctatcaagaacaatcagtatctttttcaaagtcattcgggcgtatggatctttcaggtctttgtacctgcgtacatgcgtcacctgttcgacaacaaacgagcctggcgaaaatccacagggacaaaggacatactcaaggctcgtcacttcagaaatcacatgctgattgagttcaacaatctgaaagccctactgaaccctgaccgcgaagacattcgcattcagaatgcgatcagcactctccataccacaatcaaacaggccaagagtgcgcctgtagcaatctcccctatcccaacactggcagtcatacgtgatgaatacatgacggtttatagcgaacgtcgggcattctccacactcagcaaatcagcccgagcggtggaagtgtttctccagagtatcggtaaagttgatattggtctgaacaagatcggacgcagggccgttactgaattcattgaaggccaacagaaaaaggcagcaccgcagaccgtgcaaaactggttaacctctttggggagtctgtacgagttcgccaaacggcgctacgacgcgataccagacagcaacccttttcacggtcataacctcgaagcacgtcgcacgatagagagttatcagccgtttaaacctgaacagttgcaagcccttgtcagagaagccgatgacgttatacgtgatgtcattttgatcgggctgtactcgggaatgcgacttgatgagatcgccagcatcaagcgggatgagattgtggtgatggagggtgtaaggtgtttcttcgtcagcaagtccaagactgtagccggggtgcggtatgttccgatccactcgctactgatggggattgttgataagcatctggcaaataacagcggtgaatatcttctggctcagtctaataacatcatacggaaggatggcaagcggggtccatggtatagccaaaagttcacccggctgcgtgatagcgttttgccaacagctacagatcggcaatgtttccacagcctacggggaatgttcatcacctgcttagaccgtgcgggggtgccagaacaacggatcggtgctatcaccggacacaccgaacagaaagcaaaaactgaagcattcagaacatacagcgctggcgctgggatgagggagctatcaggatatgtcgaattggtcggttacgaaggtataatatag

SEQ ID NO: 85955 - DNA, 354 bp, Citrobacter koseri
atgttgacgtgtgacatggatcacatctatgatttacctacctatcgatcgttaagtaaatatttcgacaccgttcatctgctaaaggtcactatcatgaaaaacgtaaaaaccctcattgctgccgctgtactgagttcactctctttcgcaagtttcgctgctgttgaagttcaggcgacgcctgtagatcaacagaaagtaggcaccatttccgcaaccgccgggactaacctgggatctctggaagatcaactggcgcaaaaagcggatgaaatgggcgcgaaatctttccgcattacttcggtaaccggtcctaacaccctccacgggactgcggttatctacaaataa

SEQ ID NO: 85956 - DNA, 477 bp, Citrobacter koseri
atgagcgtgagagtgagggatttagatatttctataaaagacaaggaacaacaaattaaagctcaaaatgtttcctatacccaagcgtctgactccttgttattgataaggggagagttggacttaaaagggaaggagttggttgaactaaattctaaaattatctctaatcaaaagaaacttgatggtataaaaaacgagatatcaaagaacactctgccttttacaactttaggtaatatcgctaattttgttgatgggaataatataagtagtttaagtggtttagacttaagtggtttggattccctgaatgttaataatacaaatagcctaagtaatgatgcagttaaacttactttagctgctaaagctttgaatgtcacagattcgaaaccagcccacactaaaatcgagcctaacaaacaagctaaattagctgctaaaaatcctggcaagaatgacaaaaataattaa

SEQ ID NO: 85957 - DNA, 270 bp, Citrobacter koseri
atgcgggtactaaaagtaaaatgtccggagtgcggggcaaaggcgatcatcaaaaagacgaatcccaagcacccgcatatttcagatatctactgcgcgtgttcagatgtggaatgcggtcataccttcgtgcttaacctgacgttctcccacacgttaagccccagcgccaagaccggggacttgatggtacagacgatcctcaattccttctcgtctgaacagaagcaaatgaccctagatttattaaaggccggtctggccgcttag

SEQ ID NO: 85958 - DNA, 1728 bp, Citrobacter koseri
atgactgtccacgacagaacccggcttatcggtcagcttcaacttcttctaaaacaatacgttggtgtgtctcaggccttaacaggtgaaaatgtgacacagactgtgatacaaacgaggcacaccaacggctgttccatcccaaatattcttaagcgtggcaaccgctattgcctccatttcagactacctttaggtggattctttcgcgtgtctctgggctgcgattcagctagcagagcaaggtttatatcttcccgtctctctgtgttcatttctcttgtaaaatcgtccaagatggagccagccctcctattggacatagtgcataaaatgaagaaattagaacaaaaagacattgatgattatttgctcagtattcaggcagccttttattccgcagcaaaaaagattccagaaactgtgcgtaggggtctgcgtagctcgacttcatcgattagtcaaaaaagtaacatcacactcttaggggacgtgcttggtgatactttcacaactgatggtccacctttgtcggaagacattgttatcgaacatcttagcaggcagtatgacattacaggcatggtggatgagattgattgtatagcagcagaatatgacctcatgtggaaacattgccttgatgcacatgtagcctttctcgactcccgacattccgaatatcgacagatcctcagttctttgcgacctgaaagcggctatgtaattggtcaagctggtaagtcagaagaatcacaagcctctgcgttgtcactatccgaggcatggaagggatttgtaaaatttaaatcggattggactccaaagatacgccaggaaaatgaaaagtattacgaagtcattgaggctgttctgggggctgatactatcgtcaatagtattacccgccgtgatatcaaaaatttactcgagatggctgagggacttcctcaacagaacaaaaaaccgtacaacaggatgactactcaagaatgtctagatgcggatgatatccctgaaaatgatctggtatcctcaagaacagtgaacggttatttaaagctatgccaaggattgtttgcctaccttgtcaaagaagaagacgttcttgagtcatcaccaactagtaatgtcaaatatgaagctaaaagccgcagctatggtaactatagccttactgagatgcgaaagttggtggcgtattttacgacgcttgaggactggaaaaaatgggtgtttttgctgctcgcttataccggcgctcgccgctccgaaatcgcagcattgaaagtttcggatatccgtctggatgacgatagccagcggtactacattatgattcaagacagtaagactgatgccggaatacgacaaattcctctttcgctttgcttggtagatatgggtttcttaagttacctcaaaaacaaaaatccagatgcaagacttttccctgaagttactaataagactcagctcacacgcatttttcacggaatgcgagaaacgctgaatatacattacctcgatgactttaagcgtcgccgcatcattcacagtttacggcatactttcatcactgaagctgcgaaaactaacaatctgccacttgtgcaacggacggtcggacacgagctaactcgcattggtcagactcaagtatatatacatgaatttaacgtttctgctttgcttccggttatcgactgcattgactggcttaagtga

SEQ ID NO: 85959 - DNA, 702 bp, Citrobacter koseri
atgcagcagtctgttttatctttaccccaatccatcaatttaatgacatctcaccgtgacaacggtcattacactctgatccattctacaacgtatatccataatggtttggcttacaagcttaaccatgatccgttaagtaaacatagtagcccaatacgaaaagaaattatcgacaggttcatcgatcagctacatgctatgctgtcacactacgacgaacttttcgcttttcgttttgacttatctgtaccagaagggatgtccgttgctgatagcaacaaattggttagtaagttatttaccaagctacgtggtgagtttacagcaaaggcatggaatggtcagcgaataacaaactgtggatatggttggggtggggaaactgaaacggctaaacagcttcattatcattgctggattgctctaccatactttcaagttagaacggcaggttttgcggatacaggtatagtgggccggatcaatcgtatctggtctgagctaaccaatggagcttctcgtgtccatgtacctgacggtagatacagaatcaaaagaggtgatcacggttcgctggtggacacggtcgaaagaatctcatatattgccaaaaaccgtgggaagtattctactggcaaagggcagcaaacattttcagcttcaagggtaaaatttaagacggttaatacgctgcattaa

SEQ ID NO: 85960 - DNA, 354 bp, Citrobacter koseri
atgccggtattacgctggctgatgccgttaattttctggtggaaaaatacgaactggttcgtatcgacaggaatggatttagctggcaggaacaatcaccatatcttcgggccgtcgatatcttgcgggcacgacaggccaccggcttgttgcaacgaaaccgaaaacacgctgcattgtgattttgcgacaaacctcttacattacatcatcggtcgttctcccttgaacataatgcgcctgctattcccggtaggcacgtttagtgttacggatgaaatatcatgcaaaaagaagctgaagatgagaagtggatgccgctttgctacaatgcaaaaagacgctcacaaatag

SEQ ID NO: 85961 - DNA, 762 bp, Citrobacter koseri
ttgtcgaatgtctcagggcgtgaagcggtctttgtaccgggtctggccattctgtgcggcgtttttgatgcgctggcaatccgcgaactccgcctttccgacggggcgctgcgcgaaggcgtgctgtacgaaatggaaggccgcttccgtcatcaggatgtgcgcagccgtacggccaaaagcctggcgaatcagtataacatcgacagcgatcaggcccggcgcgtgctggaaacaaccatgcagatgtatgaacagtggcagacgcaacagccaaagctggcgcatccacagctggaagcgttactgaagtgggctgcaatgctgcatgaggtggggctgaacatcaaccacagcggcctgcaccgccactctgcctatattctgcaaaacagcgatttgccgggttttaaccaggaacagcaactgatgatggcgacattagtccgttatcatcgtaaagccgttaagctggatgacttgccccgctttacgctgttcaagaaaaaacaattcctgccgttgattcagctattgcgcctgggcgttctgctgaataatcagcgccaggccaccacaacgccgccaacgctacggcttaaaactgacgacaatcactggacgttgcgcttcccgcatgactggtttagccaaaacgcgctcgtcctgctcgatctggaaaaagagcagcaatactgggaagcggtcacgggctggcgtctcaaaatcgaagaagagagttcgcccactatcgcggcgtaa

SEQ ID NO: 85962 - DNA, 1320 bp, Citrobacter koseri
atgagttttgaatggattaatactacgttaggggattttctaaaccttaaacgtggctacgatttgccaaaaacaaaacgtaaagatggtgatgttcctattatttcatcctctggctactctggtgttcatgacaaatcaatggccaaaggacccggggttgtgactggtcgatatggtacgattggtgaggttttttatatccctgaggacttttggccgttaaacacaacactttatgttgaggactttaaagggaactcaccacttttttcttattatttactacagacaattgattttcacgcttacagtgataaagctgctgttcctggtattaatagaaaccatgttcatatggcaagtgtcagagtgcctaattctattattgcgcaggaaaaaattgcatcaatcttaaaaaaacttgaagataaaataacttccaataaaaaaatcaaccataccctcgaacaaatggcgcaagccctgttcaaaagttggtttgttgaatttgaaccggtaaaagccaaaattgcgatactggaagctggtggttcacaggaagatgcgacgctcgctgccatgacagcaatttctggaaaagatgctggttctttggctgtttttgagcaggtttatcctgaaaaatatgctgaactaaggtctatagcagagttgttcccctctgcaatgcaggtcattgaatccgttaaaatacctgaaagttggaatttagttccattaagtagtatagccttattcgcttcaggtaagatcgatgtatctgaattaactaaagatacatatatctctactgaaaatatgcttgttaacaaaatgggaatagagtgcgctacatcactaccttcagctagtacaacaccatcttttaatcctggacatattttaatttcaaacatacgcccttattttaaaaaaatctggcttgcccgatttttagggggacgttctgcggatgttttagcgttcgagcataaaaaaaatatcacagccgaatatttatacaatgttctttatcaagactcattttttgacttcatgatgcaaacctcaaaaggtgtgaaaatgcccaggggggacaaaaaggccataatggaatggtcatgcatcgaaccaacggttgagttagttagtcttttttcaaacaaagtgaaagagttttattcttatattgaaagccataataaagagaatactcagctttcacagttacgcgataccctactacccaaacttctgtccggcgaaatcacgttaccggaagccgaggaaatagccaaggaagctgactatgtttaa

SEQ ID NO: 85963 - DNA, 468 bp, Citrobacter koseri
atgacaatactttcactaagccggtttgtactggcatgttcactgtttaccagctttacagcctctgcggttcccgggttctggcaacagggctatggccagggcaatacggaatacagcgtgaccgataccagcgggaagatgtttaccatcaactgtactggaaatcctgaccagaatggtttctaccagcattcagtttttctgacccagacggataacagaatggtcagttcgcacgatgatggcaccacagtcgccgtggtgatggaccataagcaatatgccattccctcaacccttggctggcgtaacggcgataacgcctggtatgacttcatcatggatatccgtaagaccgggcagtttgacgtttacgtcaatgaccgtaaagcggggactttcactgtggacctgaagaacgcagagaaagttctgcccactcccggagactgcggtaacgactga

SEQ ID NO: 85964 - DNA, 483 bp, Citrobacter koseri
atgatggagcgatcacttaccccactggctccggtactcccactgagcgcacaacgcactgtgcaacatgctctggccctgcttgaccgccacctgcgcgaaactggcgtggcgttcacctccacacaagccgcccgcgactggctgcggttgaaaatggccgggcttgagcgagaggagtttatggtgctttatcttaatcagcagaatcagttaattgcccatgaaaccctgtttgccggttctattagcagtaccgaggtacatccccgtgaggtggtcaaacgcgccctgtacttcaatgcggcagctgtgatactggcgcataaccatccctccggtgacatcacacccagccaggcagataagaccatcacgcagcgtctggtgcaggcacttcagctcgttgatatccgtgtgcctgaccatctcattgtcggcggcacgcaaatattgtcgttcgctgaacacggtttgctttga

SEQ ID NO: 85965 - DNA, 762 bp, Citrobacter koseri
gtgcgtaaactcgcggagcatccggaaaacgcttcccttgctgatgtaacaggcttttctcccgagggggttcgttcgacattgctggatttgaataatcttgagaacaaactgactcacgtagattgggaaccgaccagcttgtttggtgacaaggcgcaatcggtcttgcctagcttgatgggcatcatgatgcgtgtgccgcagttgcaggacggattgagggatataagtaaaggggaaggcaatagtcataggaaactggcagatatcactcatgcatgggtaagcgggagctccattgaatccatcgctaaagcctattttaaaggcgaaactcttacggatcagatctctaaagcttgtagggctgtttatagagatcttgccaataatggcgcatggggcctttcggctttaagcaaaatgcccacgtcaggactcgattttgagaatatgacggatgaagaaaaacgtagattaaataatctaccagcgatgttatatcatggtgtaaaaacggaagaagcagtcttgatgcgcatgaatagcgtacctagaagtattgccgaacgtgcaggcgaagatttcaaggcaagaaacgtggaaggtggcgtagatttgaaactctcgccccgtaaagcaaatgagtacctacaatctctcaaatcagaagattgggctcgcttgagacctaagaattcagttttatctggcgaggattatctgaaagtctggaaacgactttctggtgaatcgtag

SEQ ID NO: 85966 - DNA, 624 bp, Citrobacter koseri
atggcgttaaaacatagagaattgaacgagcttgatgggtttgagcttttgatagctaaggcggttgaggaagcagcagaggttgacgaatcagaagtgtttgacgaatcagaagagattgatgattctgaaggtcttgatgaagacctaaaagcgcgacgtaaggccaatattcagtatcagaatgcacgcaaagaaaaattgaaaaaattaggtgagcaccagattcaaattaggctcgatgatgaaaattttcaaagattgtgtgacttgtgcgaagtgctggggtacaggaaaccgaagaaaggaatgtacaatcttgtagaaacatattcagcaatttttaaatatctcttaagaacaagtgaggaaaattttgaatacattccgagcacccaacgatcaatcaatatattgagtatatataagtatgttgatcatctcagaaatgaacaacaattgactaaagatatcatcatttcagaacttcggaaaaagaatgctaaaattccagttagaaaatctggtaatggaaccataatatttgggaaaggggaattccttgaacggtattttgacaaagttgaagttattagagcgcttaaaatagctgataaaaagtaa

SEQ ID NO: 85967 - DNA, 267 bp, Citrobacter koseri
atgagttttattatactcttgagaattaagatctcttttaattttatctattgcttcagagtatttgacgtattcaatttttccatgaatatgatcgaagcattcattccaaagataatccatctgcttagaatacattttctcaatacattgaacatcagtacaagtatttctcttgttaagccaatctatttgcgattctctaatcttagacttggatccttcaggcatatctggactcatagctattttatagttttgagatag

SEQ ID NO: 85968 - DNA, 1239 bp, Citrobacter koseri; identical to SEQ ID NO: 26659

SEQ ID NO: 85969 - DNA, 255 bp, Citrobacter koseri; identical to SEQ ID NO: 78625

SEQ ID NO: 85970 - DNA, 255 bp, Citrobacter koseri; identical to SEQ ID NO: 78625

SEQ ID NO: 85971 - DNA, 255 bp, Citrobacter koseri; identical to SEQ ID NO: 78625

SEQ ID NO: 85972 - DNA, 255 bp, Citrobacter koseri; identical to SEQ ID NO: 78625

SEQ ID NO: 85973 - DNA, 255 bp, Citrobacter koseri; identical to SEQ ID NO: 78625

SEQ ID NO: 85974 - DNA, 462 bp, Citrobacter koseri
atgtcccactcatgccccatcacatcaccggacaatcataaaacgcaccagttcatgcatcgttgtaaactcgccagcggctggcaaccattctatattcgcactatcgaacgatcgccagctggccgcagttgtgttcttgcatacgacacaactgcggcaattcaaaccgctgaagaatgttcatcagcagggatcacaggccagtacacattttcaggaaaaccgtcctgttcaggaagatcacgcaagccctgtcgatatgcactccaggcggttttatcccccggcgcatcgggtagcattctccagtccgagtcggccagaaggatgtttctttttgccctcacctcttctgccttaacgcttttttcactgacccagttaacctttcccatcagtacacctcgacccgttctgttttttccagcacaccagcatcttctccgtaaaaaccaatga

SEQ ID NO: 85975 - DNA, 474 bp, Citrobacter koseri
atgagaggcaggtcatgttatcggaggggaaaagcggaagatatcatcacgccggatggcggcgtaaacgccttatccggcctacgggatacgcattgcattgcaggcccggtaagcgatgcgccaccgggcaaaacgccggatggcggcgtaaacgccttatccggcctacggatatacattgcaggcccggtaagcgacgcgccaccgggcaaaacgccggatggcggcgtaaacgccttatccggcctacgggatatgcattgtaggcccggtaagcgacgcgccaccgggcagaatcttagtagtaagagtgctcgccgcgctggtgttcggtcagatcgcgaacgcctttcagctcagggaattcattcagcagctgcttctcgatcccttctttcagggtcacatcgaccatcgagcaaccgttacagccgccgccaaactgcaaaatggcgtagccttcgtcggtga

SEQ ID NO: 85976 - DNA, 489 bp, Citrobacter koseri
atgcacattttttgccaatggcgaaatcgccgtaggccggataaggcgcctgcgccgccatccggcgttgccgaaaatgagcaaccgagcccgcctgatggcgcttcgcttatcaggcctacaatgctgagccgtaggccggataaggcgcctgcgccgccatccggcgttgccgaaaatgagcaaccgagcccgcctgatggcgcttcgcttatcaggcctacaatgctgagccgtaggccggataaggcgcctgcgccgccatccggcgttgccgaaaatgagcgaccgatcctgcctgatggcgcttcgcttatcaggcctacaatgctgagccgtaggccggataaggcgcttgcgccgccatccggcgttaccgaaagtgggcgaccgatcctgcctgatggcgctgcgcttatcaggcctacaatgctcatcctcgttaaattccagatagcaaaaagccagcccgtgggctggcttttctga

SEQ ID NO: 85977 - DNA, 474 bp, Citrobacter koseri
atgccgacatgctttcagaaagatgatgagaaagccatcactcgggctatggaatcccttaaaagccagttaagggaagaacacaagcgttctggcagggctggtgagtgtgcgccactcggctatatctgggccagagagcgtgttaccggggaacatcctcactaccatctggttctgctgtttgacagagaggtctatgcctatctggggaattacactaaagcggatactgataatatgggcgtccggatacagaaagcctggtgcagcgccattgggcttgattatcctgaatatgcttatctcccgcattttccgaagaacaacagcatttggttcacacgacacgacgcgttaacgttaagtgatgattattatgactttttgctacgggtggcctatctgagcaaagactacagcaaagacttctatgacggttatcgcaactttggcacaagccagcttatatga

SEQ ID NO: 85978 - DNA, 1527 bp, Citrobacter koseri
atgaaacttacccataaaaaaactgaaaatcatcatgttaatctgaacaccagagcaattttgactttttttcaacaaatcatttctttcatttatggcaaaaccagcgcggcggttgagcttatctttgcaaccctccaggggagcatggctctggcctgccaggatatgtatgatgttgaaattgatgatgatattatcgttcctgtatcgcattttcacataatactggcaaggtccggaagcaaaaaaacgacggtatacaggctcatcatggcgcaaattcatcaaactgaacgtgagttggctgaggtgttttcagtcatgctgaaggagtatgaacggcaatacgtgctatgggatgaagaatgtaagagccttaagaaatcgcttcagaaagcagtgcgccagaaagagggagtggagacggccagaaatgaactggatgaatgtctcagaaatgaaccggttaagcctgtaagggtgcatctgacggtaacggatcccacgccggaagcccttctgaaagagctggggcaatactccagcttgggtatcacctctgacgagggaagtgctctgcatgaaagcatcatgcggcgtaagatcgcaattcctaatacattgtggtgtggtgatgattatcgggtcagtcgtgcgtcaacgggtatcacagatattaaagatccccggcttggtatgctgttgatgacacagccggagccacatgacagcacactgaaatcactgggtaacacaatacgatctacgggaatttatgcgcgtacgttaaccatggatcttacgttgctcaccaaactaattgatattgatgagctggtttctggcgatgagtccgacctggaaaagttttatgccattcagaaaaaatatttacttgccgggattgaacgcagaaaaaaaaatcaaccccgtatctgtatgacttttgcacctgatgcaatgaagcggttacgtgatgttggcagggacgttaagtatctgatgcagccggggggaaagctgtaccattataacgactgggctgcacggtactgcgaacataccgccaggagtgctgctgtgatgcagttgtttatcactcctgactcaaccgttattacgctggaaacactggaagctgcattgttaatatcggaatggcaccttaatcattttattgtaaaaatggatgctgtccgagggccttcccattctgaaagagttatcaagtggcttgaaaataatcttgtcaaaaatgggtcttatgattttttaaggcgagacatgatgcaagacatacatcgttcactcagaaaaaaagctgatcttgagcctgttctggaacagcttgctgatgaagggaaagtccagttgtgggaagacgcaagtggaaggcattatgtcaaatatcttgcttccgaaatgacaccttcagaactggatgaaaaacatagagtaatgaaaggtataccgcattatcacgggggaggtagcgctatcagtcgcgtccctttgagagaataa

SEQ ID NO: 85979 - DNA, 225 bp, Citrobacter koseri
atgtcatctgtttacaccaggcaaccagagccacagcagcgcattctgcgcatgagagaactgacgaagatagttggtctgtcccggtcaactatctatgaaaagctaaatcccgaatccaggtattacgacgaaacgtttccaaaacccgtgagacttggtgctgcttccgttggatggcgttccacttccgttgatgagtggatcgcttccagaagcgtttaa

SEQ ID NO: 85980 - DNA, 1845 bp, Citrobacter koseri
gtgcatacttttgcaaacctgatgtacgacgtttacgagtccttcggcctgttccagaaaggggctcgccaagcagacatacgtggatccgctaacttttcaggtcaccagcgttttttcgataacaatgatgacgaagagctaatgcaagaaaaacgctatgatgaaatcatcagacaccttgatgaggagggggtgttcagtacggagcaaagaaggaagattttttataaatatgagcaactttataatgctctgatgactcggcctgtttttactgaattaagtcgtaaacaaatacaaatccgctacgcccagtatatactccccaggctcatcgcacttgatatctataaaacttacaatgctgaaaacaaaaatagcttttatcaccatatacacattttcttgcagaaagagtactgcccatgctgggaggagaaaaaaaaaggtgctttttctgccgttcggcagtatctgaagaattcagtaagagaactagaattctctcatacagaaaatctgacacctctttttaaagtcattgaaaacatccgccctggtaacacacagaaaaaaggtgcgctggatacatcaattatagaatgccttgaggcgtattctggtattgtcgacgataagacactgaacagcatcagagtcaaccttgataatataaaaaaggcccattactccctgaccgtactcctgaatactgagcgaaaactccctgtcattaatatcatctcacggtactacagaaactatgtagataatggaataaaacccggaaatatatcagcaatgttatgcagactactgtatgaaccagaaccccaagattttatccatcatgataccatgattaactcaattgcgaattattatcataagagagcaataaaaccgatttctctgaatataaacgaggaatgtttacagagtatcagcgcattaaaaaacatcgttttcaacttcaataataaaaccattatctccgaagcacagttaactgacatcgctgtaaaattaaaaaaagacccccatgaacaagttattcaaccgtattttgaactctggaaacttatagatttaatcagtaaaggggaaacagaggaagcctatgagaaagtcaaaattttttctctggatgatttacctgtaggatacctggcatccgcttttttagttatccatattgcattacgcataaagttcgagaggaaaaccgttaaaaaaggtgttttctcatcatctgtaacaactattcttgaaaatcagggaatttatactgactatatccccgtcagttgggcttatatagaaacccaaagtgacggctctgttatgaaaagcccccttctttctgaatccattttatcagatgccaacaatctgaccatcatgcgttcggtaaggatgtataataacatggtcaggagaataagtgactggaatgaccttgagctggaaggtatttatccagagtctgtttacgggcttcttgataaatttgacactatcctaggtaagatactcaacattatctttgttgaaaaaatcacttccagccatgatttagctttcattctgaaaaataaaaaagttttggctcgaggtgaactgaatgatagccttatcggcatactgattaactgccctcttttgacgtgcgtacgggacctgaagagcttaataaaatatcttcgctgtccgggagaggaaataaaaaatataattctttcagttgacaaaaaaacctggaatttgacacatggagccctgaagattctggaggaagaaagaaagatacaggcgggaaaaacacagggaggtagaaaataa

SEQ ID NO: 85981 - DNA, 3123 bp, Citrobacter koseri
atgaggcctgaacggaaatctttacagttacttggtattgcacgttcaaaaggaaaaatgtacgaatatggcatttctgaagaacatcatattcaaattcctcaagatccagctaaattgtttacaatatctataggaatattaggtgatcttgccgcagcaataaatagggaccaaacagaatctggtttattatcagagctaagaagaaatttgctattttctgcccattttttcgactcatacatccaatctagattaggtgaggaactggattcatatttattacttcttggtgcatcctcttattatctgtgtgacctaccgggaagctcttccgtattagcaaataaaatagatgctgattttcctgacttaaatgctgatgggcttgaaaatattattctatggatgcttcgaggtgatgcgtcagtgtattttggtggtgctgagggacagattggaaactatattgattccgtatttgatttgttggttttatttataaataatggtgataatgaaaaagaacttataaataaagctatcgagcttagagaggctgcttacaaattcggaactccccgtcagctgttacttggcgatatagctgtagccttagttagaaagaaaattgaaaactcctgttggaatgctctgcctatttactctggactttcaaaaaatagttggagtaagtccattaaaaaagaatcattcataaaagaattatggccagcacaacatcttttaggaaaggctgatgttttcaaaggcaaatcagccattgttcaaatgcctactagtgcaggaaaaactaaggctatagaaatcgtactaagaagcgcctttatttcagagcgcgtgttactagctataatcatcgctccatttagagccctatgccatgagattaaaaatagtcttgtggaagcattctacgatgaaccaattctggtggatgagctgtccgatgcgttacaaactgactttgaaatcgtgtctatccttgctcaacaacagatcttagttgttactcctgaaaagctactttatgttctacgccatgcaccagaacttgcttcgcatcttggattactaattttcgatgaaggtcatcaatttgatagcggcaaacgtggcatcacatacgaattacttttaacttcactccgttctatgatacgtgaagatacacaaaaagtacttatttcagcagttattagcaatgcagaagctgttggtgaatggcttaacggcgaatctaatgttgttgaaggtacaagccttatccccacattccgttctgttggattcgcaagttggatggaccaattaggaagaattgagtacgtagatagtcgtgatgctgaacaaaacgaattttttgtccctagggtgatagagagtattaatcttggcaaaaaaaatcgagaaagaacggaccgcgtctttcctgaaaagactgatgggcagggaattgcactttaccttggtttgaaattggttccgaatggcagcatcgctattttctgcggacgtaagtcgacagcggctaacatctgtgaaaaggctgttgatattatagaacgaggtgcccccctatcctttccggctgatttttcagactcccaagaagttgagcgattgtcacatctgcacgtcgcaaatctaggcattgatgcccctgcttcccgaagtgcggcatacggtattttttcccatcatggcaacacacctcatggtattaggttggcggtggaacatgccatgcgcgatgatcttgtccgattcgttgtttgcacttccactttggcgcaaggtgtaaaccttccgattcgatacctcatcgtaaccagtgtttaccaagggatggagcgcatcaaggtccgcgatttccacaacctcattggacgagcgggtcgcgctgggatgcatactgaaggcagtatcttatttgctgacccggtgatctatgacaagcgaaaggtacgtaatgataaatggcgctggaagcaagtaaaggaacttctggagccgagcaattctgagccgtgcatcagcaatcttctatcgattttcgcccccatcaagagcgatgacgagaaatacaccttaaccatgaaagctttagattttgccaaggcttatatcgatcatcctgatgaagttaccaagttggctgctgggatagcagcacaacatggagacaaaaatttctcacaagacggtgtcgagcgccaagttacctggagaatcaaccttatctgtgccatcgagagcttcctgctatcccactgggatgagtctgaagatggtctttcggaaattgatgtgaccgacttggccgaagggacgctggctttccatttagctgatgagcagaagaaggagaacatcagagagttgtttaagcttctcgctgagaatatctccgcaaatatcaccgatcctgttcgccgcaaaatctatggcaggacgctttacggaattcaggatgctcaggctattgagggttgggttcagtccaacactgaaagcctgctttcaatggttgatgaaacagaaacactcgccatcgtctggccattgcttacccgatatatcaacagtggtgtattcaccaagttcgataacccggaagtgcttgaggaaatatcgcatggatggatcagtggaaagccattctgtgatcttcttaaaatcatccgtaagcgaaaagctaagatgatttggggtaaccgcctgagagagttcaagatcgaccacgtcgtcgaagtttgcgaaggggctctcgcatatgatggcgctcttattgtaggcgctgtatctgaactcatcgaaatcgtcacacaagttgataccgtacagctgagaaattatctgcaactttttcaaaaacgcatgaaatatggtctacctacagcaactactatctccctttacgagattgggttttcggacagaattatttctcaagatcttgccgtatctttgaacttggcttcgactcaaaagagggatcttgtacaagagctgaaacgcaacagggaaggagctcgaatggtaatggaaaaatatccagattattttcaaaagagaatgaacgaactcttgcagtag

SEQ ID NO: 85982 - DNA, 849 bp, Citrobacter koseri
atgccatggagttctgaacatctaaaatggttttctgataatggagaaagactaacgacctctgatggcaaggagatcgaagtgtgggagtttaatcatgctcaggatgatgttgtgctcagcgcatgggcgagacattttagaaaccattattgtttagatacagacatagactttctacgaggaaaactagctaggaaagattatctcaacaatattaaatttccctctgagacctcaaagcttggaccaggtatcagagccggagactttggtgaaatactagtttgtgactatttacaatggttacttgattgctgggtgcctagagttcgttggtcttcaaaagtagttcgagacgaatcaccaaagggtagtgatgttgttggttttcgttttcaccataaaaatggtgaatattctattgaagatgtaatgtttgtttttgaatcgaagacgaagttctctgcctctactgttaaccgactacaaaacgctatcaatgattcagctaaagaccatattagaattgatgaatcactcaattttataaaacaaaagttatatgaatatcgagaaataaaccaagcaaaaaaaatagaaagattccagaatccagttgatataccatttaaagaaaattatggtgccgcagcgataatttcttcagatttttttgatgttgaagagttaacttcttctgattgcaacaaaatacctacaacagccaagtcgaaagaatacaccccccatccaaattacggaaatcttaaacttttggtcattagaggggctaatatgatgcagctggtacatgaactctataggagggctgctgatgaggcctga

SEQ ID NO: 85983 - DNA, 1845 bp, Citrobacter koseri
atgcaaattagaaaaataatccttagaggcggctcagaggtagaggatgcaaccattgattttgctgctggtgcgaatattttagcaggtcaatcagatacagggaaaagttatttatttcattgtatagactatattcttggggcagatgagttcaaaaaaaatattcctattgcagaaccatattctcagttgtatgtagaatttgaaaactcggaaaaaaatagtattacactcgagcggaacctgtctggcggcggagtggttgtttattattgcaaattcgaagaaattacagaagttggcgagaaaattgcaactcgtcgttcaggtaaaggtcaatcgaaagatattacttcagtgttgctacctttcagcggcatgaaagatgaggctaaacttcgtaaaaatgataatggtgatgttcagcgtctaacagtacgtactcttctacctgtattcatggtcaatgaagttgccatgattgacgaaaaatcacctgttgttggcgatggtacatttgatgctacagcgcgtaagcgtatgttttcctatttgatttctggtaaagatgatactggtattattgcaactgaacatcgtgatattgttattacacgaaatagagcacgacttagtcttatcgaagatatgctggagcctctcgagaacaaggttcaagacttcaatgatgatccggaagaaacaattgaaaaaattgaaagtgcgattcagaatgtttattctgagctaaccaaaactacaagcgaacgtgagggggttttagagtcattaaaaaaagaaacagcggagttgcaacgtgcagaaacacagcttattgcaattgaagaagtattgttgagatataacctgttagataaacgctacgagtctgatctaagtcgcttggattttatcgccgaaggcgttcattattttaccagtcttcaggaagtaaattgtccgctttgtgaacagaaaatggatgaagaacatgttcatggggttgggcaaaacagcgcagatatttatgaaggagccagagcagaagcatctaagattaaggctttgaagatcgatctcattgatgcaattcacactctcgaagaacgtttgcttggatggaaaaaaaaagtaaaatctaatcgtgataatattaaagaatacgaaagctacttgaatgaaatattatcatctaatttaagcgaactgaataatcgactcaagaaattaattcagagacgtataacattagagggtataagaaatgatagagaacaactgaatagtcttaagttgatgaaggaagatattgaaaaatcgacaactaacaagacatctaaggtctctaaatgggaacccttaccgacagtggcgttacgtactctatgcaaatctatcgaggacgtgctgaaaagttggtgctggggggaagacccaagagttgagtttgatcataaattgtatgacatagtggtagatggacaatctcgacagtcacatggcaaaggagttcgctcaattctttattctgcatttgtcattggtcttttactatatagtgttaaacaaggtaaaccacaccccggctttgtgattcttgactcaccactaacgagttatcgaaaatcaccatcaattgggcagcaggacactgcagtatctgccagtattgagactggtttttgggcgtcgttaaaagaactaagtgctgaagttcaagttatagtaattgagaacaaagaacccttaagtgatgtcgctaaagccgttcattatgaatggttcgctggagatacagcacaggcaggccaaagagtcgggttcattcccttacggcaataa

SEQ ID NO: 85984 - DNA, 507 bp, Citrobacter koseri
atgattacccccataaattcgcatataccaaggccatttaactctccgtttgagtgtggattgcgtatgcttttcattcttgccgcgacgtccaagcaaagtgctgatttacagcgccttgtctcctacgattacttgctggttcattcaggtgacgttgacggtggtcctccgagcctccatcctgatgttcctttcagaggtaatgagttactagtcaaacgagacttgatagaagcgggtcttaatcaaatgttcgctcgggagcttctgaagaaagccttcacaaatgatggcataatttacgcttctaacgaacttactacagccttcattagtcttcttacaaccgattactctaatgcaataagagagcgttctttttgggttatcaataaattcgaacattttagcaatgctgaattgagtaattacatgagcataaacgttggtcggtgggggacggaattcccacgctttaccgctgcgcgagaattggagctctaa

SEQ ID NO: 85985 - DNA, 1131 bp, Citrobacter koseri
ttggtaaaatcacttagaccaataaagggtatgctggatagtgagccgttaactgtgcctacatcgtggccaaatgctaacgcgcgattacttggtcttggagctggtttacccgtggaccctctagatcgcttagcacaatttagtgcttcagattttgagagatttacacttgagtgggcatccgactatctagcgcaattagaagaagtcaatgaggtccaacaaagaggtggtgcgggcgacaaagggcgagacgttatcgtctggttggaccctagtgaggtaatccctcggcgatggcgcttatatcaatgtaaacactatggaacaagattggggacagctgccggtatcgccgagattggaaaggttatctactacacacttcgaggcgactataccattcctgaagagtattggtttgtaactcatcaaggtgttgtaggtccgctgcaagacttactagatgaccctgacaagatgcggcagtatgtgttggataactgggatgagcaatgtgcaaaccaaataatgaaagcctccgttccacttaccccagaactaagatttcacattttgtcattcccatttagtatttttcggtcaaagcaacctattgaaattattaacgagcatgcaaaaactcgttttcatcttacagtttttggattgccattaattaatcgcccgaaacctcctgcgcccccttcaacagtttcagctagtgaaattggttacatcacacaactatatgctgttatcggagaaagcttgggaatgcaggtgactcaagttgcagattttgtagctcatgcaccactcaagaacctttttgaacgttcgcgtattacattttattgtgcggaaaatctaaaagagcttgcacgtgatcaaatggcagataccgcatttttcgatagcctggttgatgagttttgcgatggcctttatcacgtatgtaatgaaatggcagatacaggtcttaaaaaaatgcgatcaacaattttagcagcacaaagtttacaattaggtgggcatgcattggctccgcatgtcgttgccaatgatcgtgaagggatctgtcatcacatggccaacgaaaaccgtgtcatatggtgtgacttatga

SEQ ID NO: 85986 - DNA, 159 bp, Citrobacter koseri
atgttcctgataatattaataaaatcgctcatcattggtggcctggtcggcgtcggtgtgggcgccggggctgcacgcatgtttcatgcgccgactacacagggtatgggcacagggtatgggcgcgtttcgtacattgggggaactgaactcctgtga

SEQ ID NO: 85987 - DNA, 216 bp, Citrobacter koseri
atgatggctgaatcaattgtatgtgccttgttctggtatggtctcgtggggtggtgtactgctgaactgcaccgccgttcagggttttactcacgttacagcggtaccggacactggatcagttgggccgttatgttcctgtgctggcctgtcgcgcttcctttatatgtcgactatatcggtggcgcaggtaaaaggagtggcaatgatgactaa

SEQ ID NO: 85988 - DNA, 273 bp, Citrobacter koseri; identical to SEQ ID NO: 40307

SEQ ID NO: 85989 - DNA, 909 bp, Citrobacter koseri
atgggacgcacaaaatcacaaccagttgaactaatggaagatgctccgctgagtgatggcctcaacgttagtcttaatgccatgaccgaacatcgcctcgaaatcatgcagcagttcggtgatggtctgccgtatgaacgtgatcgtattgttcacgaaacacggttttatatggcacagagtgctgaggcgatgctggaagcaggtaagcgccttgtaattcttaaagaaaatgagccgcacggggaatttattaacattcttgaaaatgagttgggcttaccataccgaacttctgtgcggatgatgcaagcatcgactaaatacttatcccccgcactgaaatcaaatgtgccaacgttggcacatttgggtaaatccaaactttttgaattgatgactgaagatgatgaatctctcgctgaactggctgatggtggcactgtagcgggtctgaaactagatgatgtcgaccgcatgagctgtagagaattgcgtcaagccctacgtgaagcccgcgaaaccaacgcagcacaacagcgcgtgcttgccgacaaaaacgaaaaaatcgactcgctctccacaaaactggagaagaaatcccgtatccagccgcccaagcctgacgaagaggtgaagaagctgcgtgcggaagttacagcgttagcggttgaggcggaatctgccatcgccgttcgactgtccagcgcctttgagaccctgtgcgcatactgtgctgaaaatatgattgatacccccagagactttatggccggtctggtctgccagttggaaagcaccgcgcgtagcctacgctccacatttgacctgccggacgagccgacaggcaacgccgccccttcatggctgactgacccgacgccagagattaacgggcaggaggcataa

SEQ ID NO: 85990 - DNA, 534 bp, Citrobacter koseri
atgactatgcgcaaattatttttaccgttgatatttgttttatctgggtgtggagataataccgatcctgctgatacgtccaccacagctaaggagcacgcggtttttagcgttgaaacagataatccggttgtaaatcgcgaattaccgtttattcgccaacaactccccggcctggataagtacgcggacagttttgaaaaagtcgaagtatccgaggatagcgaacgtccggtgacaacggtgcagtttcatattaaagacgaaaataatattccaagtgactacatagcctctggtcataattgttatttgttcatatcaaataatgcccacgaagtgaaaatatctaaatcagcatgtcaggctgtttttttcgataaaacggatgttcctggtggagacctgaccgtgaaacttgataaggaaaaagttcctatgacagatgatggtaagaccccgcgagcaggttgtttgaaagcttattcaccagagccagataatgattattggacttgtccaaggcaggattaa

SEQ ID NO: 85991 - DNA, 738 bp, Citrobacter koseri
atgatgaccctctatatgtactggcctcaggttgtctgggccgtgctggtactgctggggctgggcatcgaactggcccgctacgggcaggcccgaacgggtaagcacagtttctggtggcagctctttggttcagtaacggtagcctggctgctctggtgtggcggcttcttcagtcaggcccgcgctgcccagccaccgcagaccgcgctgcagtatcgcgacgatgtgatccgtaatgcccggcttgaatggggaatgtctgcgccggtggccgacttcgccgcgcagctgcatcaggaaagcggctggcgacctgatgcggtctcgccggttggcgctcagggactggcgcagtttatgcccaccaccgctgactggataagtcagctgatgccggggcttaacagccgtgaaccgtttaatccgtcttgggccatccgggcgctggtcagctatgaccgctggctgtggcaacgagtcagcgccgtcaatgactgcgagcgtatggccatgacgctgtcaggctataacggtggtctgggctgggtacagcgggacaaacggctggcctcgcagcaggggctggacagcacccgctggtttggtcatgtcgccacggtgaatgccggacgcagcactgccaactggcgggagaaccgtcattatccgcagcgcatcctgcacgaactggccccgcgttatctcacctggggaggcggcagctgtgtggactaa

SEQ ID NO: 85992 - DNA, 213 bp, Citrobacter koseri
atgcagaacagccgcgaggggcggctgttaagtgatgagtcgttactgattgtcgccgaactcgcttttgatttgctcttcagcctgctccagccacatctccagatcgtcagtatcgagggcatcaatctcccccggctgaaatctaaaccacctcgccagcagcccctgcgcctgcatcagcgttttcgtcgctcttgcccagcccagtga

SEQ ID NO: 85993 - DNA, 306 bp, Citrobacter koseri
atgagcaatttgacctctttcgactggtggctggcaacctacctcgtggcggccggcgtcggatatgccttttacattggtcagttaatcgtaaagctactgctgatcagatttgccagccataaacgcatagacgacggtctgtggcgcctgggttctctgctggagactcactacggcgaactgaaggagaacgaaactatcactatccaagcgaagcgttttacggccatcatcacgagaacgccggaacagaaggtgagtttgatcaaaaagatagcaactgaacgagtaacagaaaaataa

SEQ ID NO: 85994 - DNA, 291 bp, Citrobacter koseri; identical to SEQ ID NO: 16838

SEQ ID NO: 85995 - DNA, 402 bp, Citrobacter koseri; identical to SEQ ID NO: 16839

SEQ ID NO: 85996 - DNA, 357 bp, Citrobacter koseri
atgactgttgaatcgagaatattttctgtagccgagtatgttcagccgtccgaaggcgagcctattcgttccgttgtgcttgaaacccgagactcaattatcgtggtttggcatgtccatcccgggcaggaaattgcggctcacattcatcctcacggccaagacacgtggactgttttgtcgggaatggctgattactttcagggcaatgggattgttcgtgccctcagggaaggtgagatagccgtggcaagaccgggccaagtgcacggggcgcgaaatacaggtaccgagccatttgtgttcgtctcggttgtggcatcagccaatgccggtttcgtattggctgagcgatag

SEQ ID NO: 85997 - DNA, 126 bp, Citrobacter koseri
atgagccgcagccgccgcaaaacacccatcgtcgggcacacgacctgcggcagcgagcgcgaggacaagaagctctggcatcagcgctggcgcacccgtgagagcacggcgctggcgcacccgtga

SEQ ID NO: 85998 - DNA, 501 bp, Citrobacter koseri
atgaagctctccttccatcagcacattgcgctgttctggatgatcggtgctccgggcgtcttcgcgcccgtgatcgagaacgccaagcggcccgatgccggcgccgtcatggcgtggggtgtcgcgatcgtggcggtgatgatcctcttcacccctttgctgctgcgctgtccaccattccggcgctggtatggccggacggatgcgctgtcggagcggcagcgccaggcgcttgccgagcgcggcctgcgccgctactaccagaccgctttcgatgacggctacgtgccccgcgtgatgccctacgtgtggcgcatcatctggacggtcggcgggttgatggctgtgaccgccgtactgcctaccaacaccggacggccagccttcgatgccttggtggtcttctcgacctggtatccgataggcgtgatgctgctggttttcgcgtcgaggccccttggccggttgattcgccaaagagcacaggagcggcggaaatga

SEQ ID NO: 85999 - DNA, 372 bp, Citrobacter koseri
atgagcacgtcaaccatcgaggcgctggccagcgcctgggcaaggattgccgaggaagcggaattccccgctgactacgaggggactgccacaccacaagcgcatcgggctagcgaagctattcaggagcagattcgggagcgcatcgtcgccaccaacgacatgcggctgttcagcctgctgcacctgctgggtcaggcgtcgctgcgcatggagcaagcgctgtggccggaggattacgagcggatgacgcgcgaggttgaggaagccctgcggcaagccaccgacgccaacgccagatcgtacacccacgaagaagtgatgcaggcgatgcaggaacgcatcgaccgggcgcgagacaagccatgttga

SEQ ID NO: 86000 - DNA, 558 bp, Citrobacter koseri
atgttgattggctatgcgcgcgtctcgacgcaggatcagaacctggagctgcaacgcgaagccttgagcaaggccggatgtaaaaaggtcttcgaggacaaggtgagtggcacgcgggcagaccggcctggcttggccaagacgctcgaaatgctgcgcgaaggcgatactttggtcgtctggaagctcgaccggctgggccggtcggtcaagcaactggtcgatctggtcggcgatctgcacaagcacggtgtccagttcaggagcctcaccgactccatcgacaccggcacaccatccgggcggttcttcttccacgtcatggcgagccttgccgaaatggagcgcgagctgaccgtcgagcgcacccgcgccgggctggaagtcgccaagcagctcggccgcaaaggcggccgcaagccgaagatgaccgacagcaagatcgagtcggccaagaagctgctggccagcggggtgccgcccaaggacgtggccaagaacctcggcgtgtccattccgacgctgtaccgctgggtgccagcctccacgcacgcttag

SEQ ID NO: 86001 - DNA, 213 bp, Citrobacter koseri
atgatcatgttaagtaaacgggagaaggaaactctgcgtgaaatcagccaatggaaagagttctacgccaactggaagccaaagacccgcgccaaactggaacgtatgaatcttgtcgctaacgtttcgccaaagggatgtgtggagaactatcaactcactgaaaaaggacactcactgttgcagcaattgactgaggcggtggcgttctga

SEQ ID NO: 86002 - DNA, 177 bp, Citrobacter koseri
atgctcggctggatgattgtatttttggtcgtcggcattgttatcggcagtctggttatgtccagctgcatcaacgattacgtaaaagccggtgtcatgcagaggcgcggccgcatttaccgcattgtagatatcacgtacacactgaaggagattaaggatgatcatgttaagtaa

SEQ ID NO: 86003 - DNA, 1323 bp, Citrobacter koseri
atggaaaaactgatcgccctaaagcacaagctggatgccataaaaacgatgggaaccaacgccaagaaagaggcgctggccaaccttgatgaatttgagcagagcatggtctcgctaatgctcaacccattcattcgattcggtgtgaagaagtacaaagtggccgagccactcgatacttccgtacccagcgaccagaaggtagtcgagctgctggagaagctggcggcgcgcgaactgaccgggaacgcggccattactgctgtcgaatcacttgttgcctcaatgtgcgctgacgggcaggacgtgtttcgtcgcttcctgctgaaagatccgaaagccggcgtcggcattagcctgtgcaacaaggtgttcgaaaacccaattccgaagtttgaggtacagctggcgtctccgtacaaggagaaaggcgacaaatacccatttaaaccaaacccaaaggccaagtggccaatgatcggcagcctcaaactcgatggtctccgggttatctgcgaagtcatcgttgacgaggaagaggtgaacttcctgacgcgtaccggcaatccgattacgtcactcgatcaccttaaaccggccatgctggagcgtggccggctctccggtttcaagcacatcttcttcgatggtgagggtactgcaggtgcgttcaaccagtccgtgtcggcgcttcgcaagaagaacgtgacagccattggtgccgtttaccatatcttcgatttcttcttaccggagtggcgtgctcaggcaaaaagcaaagagtacctgaagaccggcatgaagctgaaagatcgcctggctatgctggtggcgttattccgcaacacttgcggggaagattacgcgcaagatatccacctgcatccgttctacatcatccatagccatgaagactttatcgaacgcttcatgaagcgcctggatgagaatgaagagggggagatgggcaaagatccggattctgtttacgagttcaagcgtacccgcagctggtggaagctgaaagacgaggattccgaagacggtgaaatcatcgacttcgagccaggcgacccggactctggctttgcgcatacgctaggcaagatagtgattcgtctggagaacggcgtcatcgtgcgtgccagcggtatcaaacataagtacctggatgagatctggaacaatcaggagaaatatcgtggacgcatcgtcgaggttcactgccatgagaaaacgccagacggtagcttacgccacccacgtctgaagtggccgaaatgtctgcgagataccgaagaccgtattggagataaagactga

SEQ ID NO: 86004 - DNA, 477 bp, Citrobacter koseri
atgtccacaagaacagatttgtcgaaaatcccgtctatctccggaaacaacggttattcgctgcgctgtccggaagtgaagatcaacggccatgaggcccattgcagctatacagtctgccagcacaccatcctcgcctacaaagagaagcgtctcccggcgacatcgttccagtcctgcgctgcggccattgctgctggcaaatgccaggcgctgaagatgatggtcgaagagatccgcaaaggcgaacagctctacttcatcgatatggctgcgcttatcaaagaagtggaagagcaaaacgaccgcgccagaacgcttacccggaagcgcaacaccatgacgattaacagtctggttaaacgcacgaagaaaacagaaccagccaaacccgaaaccacgtccaccgattcactggcgcccgtcactgacgtgtacgcggcactcattgaagaagcaaccaaagaaaacacatga

SEQ ID NO: 86005 - DNA, 795 bp, Citrobacter koseri
atgaaagcagatattcagaagtccgttaccgaaattatcgacaaatcaggcgtagaaattgatacagaagagcgccagaagattatcgatgaggcgatccaaactgcgctggagcacatcgccacgtctgtgagcaccgcacctcttggggaaggctcgaaatacatgcgggtatgggttcgttttggagagtccccagagctgcctggtgttaaacagaaacgcgcggcattcgtggcgttcactcgcaaaatgaaggacgcaacggtcgaagtacgtgccggtgcatggtacgacggccgcgttgtctacaccaatcaggcggtgtgtgatgaaggtgaacgatttgaggaaattgtcgacgcaactcttcgcgcgatcaaaggcagggctggtgtagaggatgatccgtctattgcggcgttcctgagcattgtcgaactgcctgaagttactgaacgcgttaccgatctgacaacaccacctggtttgctggaattggtggtcagtggcgataccaaaaaagccgttgagcgcattcgtgaggtggaatacggcatcatctgcgatatgtgccgcagcgacttagacctggtgcgcatcattgtcgacgcgggtcaggcatgtgacggtgtgctcgccagttttgcagggcaggtggcacgcctggccaacgagctgccgatgattaaacaggaggcaaaatcctacgccgtccaccatgccaacgatttactggagccataccggttcgaagccgctcaggacaaaatgactggctgggcgacctggtaa

SEQ ID NO: 86006 - DNA, 1116 bp, Citrobacter koseri
gtgagcgacttgaaagaattactgaccgagctggattttgaacaatggctcgatatggaaggaatcatctaccgtcgtggtggcgtcagtactcgtggacgtgaggtgaatatcaaggagtgtccggtatgcggcagctcaaactggaaggtttatttcaacctgaccaatggcgtcggcaaatgctttgctggtgatcatcccgaagagattcagttcaacaagctggtcttcctcaagcactacagcggcaaatcccgtcgcgattttgaagagtacgtccagaacgcgctgatctcacaaggatgggcgccgaagacggaagaggtcgtgctggccagcaaggttgaactcgaagggccagtagctctcccgcgccattacgaactccccattgacggtcgtcttcctgattatctggtggagcgccatatctccccggagctggccaaatactttgatctgcgttactgcgtcgaaggcaagcacgcatacgtcgatccgtacacagaccaggtcaaagggcaggtgtttgatatgcgcatcctgataccggtttacgatctggatggcgtgatgaagaccttccaggggcgtgacattaccggtgcagcagaacgccgttatctcttccccatgcagctgccggcgtcgggtaagtttctctacaacggccacaatgcagtcggaaaacaaacggtcgttgtgtgtgaaggggcatttgacgtaatgggcgtgaagcgagccatcttcgacgaagagacgctgcgggattatgtagagccaattggcacgttcgggatgcacttgtccggaaatatgaatgaggacgctgaagatcagttaggcgcgttcctgacgctcaaggcgcgtggattacgcaacgtcatcatgatgtgggacagcgaaaagcaagcgatccgcaacaccatgtcagcggccaaacgtctcaccagcatcggactgaatgtcaaagtggcctgtctgggcgaagaaggcctcgaccccggcgacgcgacgccagagcagatactaaaagcctattatcgtgccaagccgtactccagacagttggagctacaaagcaaggtactcggcattaaagctcttgtataa

SEQ ID NO: 86007 - DNA, 1341 bp, Citrobacter koseri
atgaccgaactttgccacacaggacgagggttgtctgaagagttcgatgacgacttccagaatcgactcgcagcctacttctgtcgcgaccatgagtttctgactcgcgccggtgatctggttgcgccaaaccagttctccaatgcggccaacgccattctggtgaacatggtgtcgggctactacagaatgtataagagcgcaccatcatcgtcggccatactcgacatgctcaaacgcgccaaacgcgataagacgatccgcgaagagctgttccccgacgtcgttgaggcgtttaagcggattctcgctgagaagctgtcagacacggcgtacatggtcgaccaggtcgccacgttcgccaaaagcgtagcattcgacgacgcgctgattaaagcggctgagatgaaagagaagggcgatttccagggcgcgatggcaatcatggctaaagtccagcaaatcggctctaacgaagcgaccggcatttacgattacttctctgaatcagcagagcgttacaaggcgcgtgagtatgaagcgtccgacgattacgtgccaaacagcatcacaacgggtctaccgctgctcgacaagctgctttaccagaaaggctgggcaaagcgtgaaatggtgctgttcatgggcttcgcgaagtctggtaaatcgacggcgatgggtgagttctccatcaacgccacgcttgccggttacaacgtcctgtatctgtcgctggaagttcacacctccattctgtcagatcgctttgacgcccgtctgtctgagaccgaaatgtccaagctggtggagcgccgcgacgacgtccatcgcaaactggcagagctgggcgcgacgaaaggcgtggggagcttgtggattgttgaacgaccgtccggaagcatgtcgcctgcagatctggatcgtatgttgggcagcatgaaagccaatggcatgatccccgacatggtcgtggtcgactacgctgacctgatgcgtgccagctacgacctccgcgacgaccgcgccaacattcgcagcatctacactgacctgcgtgcgctgtacgacaaacacaacgttgccggcatcactgcatcgcagactaacagggaaggtggtgcttcagaggtggctacaatgatgcacgcagcggacaacatcgagaaggtgcgtatcgctgacctcgttatcacgatcaacaaaacggaagaggaagaagcgaaaggcgaagcgcgtctgtacttcgctggttcacgtaaccagaaaggcggcgtaagcatccgcgttaagcagaacctcgaacaaatgcgattcatcgaacgcattatggacgtcctctaa

SEQ ID NO: 86008 - DNA, 726 bp, Citrobacter koseri
atgagccagatcttctttaacactattaacaacgatcagtacgacttcatgaccgagtgggacaccacagtcatggacaagtgggtggccgagaatattgggctgtcacgctgcaaggatgaggcggagttgttcgagacaaagtggtttgattaccgcgacatgcacccgcttatggccacatgcctcttcactgaggcatacaagcgccagtactcatacatcatgctgtcgcatggccgcgaacactatgagacggcccaattcactaccggtttgaaacgtgtgccgtatcaggagctgtcgacggccaacaaaacatctctctggaaagcacgccagtttgccgaccagtactgctgctcttatgactacttcatttctaccgttctttccgcagctgcacgccgtctgtgggacaaattacctcgcccccagcatctctggcagcccgagctgattgagatattcgaagagaagttagccaaacgcgctgtaacccgtctggatgactctctggtgagttttaagcatctgggagacatgcagcacgacccgattcaagaacgctattttgagtgggttctggagcgtctgcgtggcattacccgagacaaacgtgtccgcatcatcttctccgctgtctggttgatggaaatcgtgcctgagcgtgtgatttacgcgcacttcccggaagaactggaagaagcacggcgattctgttga

SEQ ID NO: 86009 - DNA, 795 bp, Citrobacter koseri
atgatattgtacaaatacgtcccagaagaaactttaaaactgttttttgatcatgacgcaaccagcttcaaatttactccagttggtcagttcaatgatcctttcgaaacctacggtgtatcgtttgcctctgaagatgaagactcgctagcgcatttgacgtttcgctcaaagatcaattcagacctagccagtctatgcttatcaagatcacctttagaagtgctaatgtggtctcactatgctcaacaccacagaggttatgttgttggcattgataccgaattagcagggtttcacgatgagaatctttgtttaatcactgcgaatgaagggggtattgattatctcgatgaacgagacaaatccagagtcatcatctccgataaaaactttaaaaacaatgatatagttaaaaaggtcttatttagaaaaagccaacattggaaatatgagaaagaagttcgaattgttattgaaagtgacaaattgatacctatcggtgatgatgaagaagataggttttatatatacaaggcgccaggcacaaatattattaaagagatattcataggaatcaacaatgaggattttgaacttacagcactcgaaaatgataatttaagaaatggcattttggataacaatattaaaatccaaaaatgttgtttcaagaggggaacttgggacttagataaaacggattatgatatgagtctgcttactgattggcctagcgctgatttcggtattcttgccggtgtgatatcagcattcgaaaaaaacgaaatttga

SEQ ID NO: 86010 - DNA, 360 bp, Citrobacter koseri
atgtccatgagaatgggagaccttgcaaagcgcaaagatccggaagaaccggtaaaaagcagcaccccaatgcgccagccagtcagaccgcaggggcgtccgactcgtgggaaagagaagattaagagccgcacaatgtcgctggaagacgagtacttcgatctgctggagatgatgaagttcatccctcgtttcgagaaattcacccgttctgacgtgattcgtgcagccattttccatctggcagagaagtcgccgcaggaaatcgaagacatcgtgaaactgaacgaggcgatcaccgctgccgacgtcacgatgcgcaccgatgaaatcaagcgtgagctgatgaagaaaggctag

SEQ ID NO: 86011 - DNA, 270 bp, Citrobacter koseri
atgtcagcactgaaaaaacagcgcatcgatctcagattaaccgacgacgacaagagcatgatcgaagaagctgcggcaatgaccaaccagacaattactcagtttatggttgccagtgcctctgaacgtgctgcggaagtgatagagcaacatcgtcgcctgattcttagcgaagagtcatggaatatagtgatggatgccatcagtaacccgcctgcaccgaatgataggctgaaacgagctgccgagcgtctacaaagcatggagtaa

SEQ ID NO: 86012 - DNA, 525 bp, Citrobacter koseri
gtggccaacctgaccattgagatgttttcagaagaggctgtatatgatttctcatgcttcgactgcggagaaacgtctctcaatgattttcttaacaatcgcctcgcccagcaacacagcgggcgtatattacgcggatatctgcttctgacgagagatccgataccgaaagtgatggggttttacacgttgtccgggagctgctttgcaagaaacacgcttccttccaacactcaacagcgtaaagtcccctattccgacgccccaagcgttacgctcggtcgtctggcaatagacaaaagtatccagcgacaagggtatggggaaacgctggtggcacatgcgatgaaagtggtataccgggcttccctggccgttgggatctacgctttgtttgttgacgccaaaaatgagaatgcgatgcggttttataagcagttaggctttacccctcttacgggtgataacgccaattcgctgttctatcccacaaaaggcattgagaagttgtttggtggaaaataa

SEQ ID NO: 86013 - DNA, 207 bp, Citrobacter koseri
atgcttctgctgttcatcgcgagctgcatgataagtggctgcgtgattaagacacagacttccggcgtgctgttctgcgatgcagcaaaccctatttatgtcagtaacgacgactttatgaccgaagagacggaacgcgagatcctcttccataacacgatgggagagcgattgtgcaactggcaggacagacaagccttgaattaa

SEQ ID NO: 86014 - DNA, 252 bp, Citrobacter koseri
atgaccggcagcctattttcaaagctgaagtttgctctgatgactctggctgccgttcttttcgtgcttgtcggtgcttatacgatgggaggtcgtgcggcccggcaagcaatcgaagagaaggccagacaggaggacaggaaaaggcttcaaagcacagtggacgtcaaaaatgagacacttaatgaagtgcggcggaaagatgcttctgctgttcatcgcgagctgcatgataagtggctgcgtgattaa

SEQ ID NO: 86015 - DNA, 693 bp, Citrobacter koseri
atgaaaactccgagaggcattcgtaataacaaccctggcaacctcgacaaaggttcgccgtggcaggggttaattgacaaccctgccgaaccgcgtttctgcacgttcaaagatcccgtatgggggattcgggcgctggcagtaacgctcattacctaccacgacaagcgccgcgcgaaggatggctccagcatcgatacgatccgcgaagtcatcgaacgctgggcgcctccgcatgaaaacaacaccgtagcttacgtgaacgaggtatctaaagccgttggcgtgaccccggacatgattatcgatctgcacgactacgacactctgcgtccgctggtggaggcgattatccgtcatgaaaatggccgtggcccgctcaaaacgccgaacacctggtatgcggcagaagttattgaggaaggtctgcgtcgcgctggtgtcgttaagccggtgaaaaccgtgaaggctgttcctgtaaccaaagaaactgccggtgcgaccgttacggcgggaattggtctggcacagctggccgacgtcatgccacaggtctctgcggcaatggacaaggcgcagggacacatcaccagtggtgatacggttcggatcatcttcggtatcgcgaccattgtggtggctggctttatcgcctggtcacaggtgcgaaaacaccagaacgggatggtctga

SEQ ID NO: 86016 - DNA, 324 bp, Citrobacter koseri
atgtcgaacgagatggcaggcgtaacgccagagcaggtagagcgcattgccgctatcgttgcgcgtgaagttgtcggcaaattaggtaaggagttacgtgaggaaattggccaggaggtcaacgaccagctcaaaacctactttggcgatatgacgccttcgcaacacagcattcagcactccaacctggacaaactacttaatcggctagacgccatctccagcgggttctttggcggcattatctcaaagataacgtcgttcctgattaccgcgctgctgctgggtctggccgcttatggcgtgaagaatggactgcaataa

SEQ ID NO: 86017 - DNA, 789 bp, Citrobacter koseri
gtgccaattgtcggtgttcccggttggattgggtcttcggctgtcagtgtgacaggccagagatggatgagtgcagctcgaacggcggtgcaattgtctgctgctgggaatatgtctcagttagcaggtcgttctaaggaaattcattacagcatcggtgcgaatcataactacaacaaagacacactgatcaactatttaaaatcccagggggcgacgccagtcgttgttaccattacaggggatctggtgtcgtccagcagcggcgtgccatgtttagatttcccgagttcgcttaccaactcttatatcagcctggtaatcaacgcaggtgtaactgtctatggtcgtgggggtaatggtggcgttaaaggtggcggtgctgccggtggcactgctattaacaacgggattgggactcgtttaagaataaccaataacggcgctattgccggtggcggtggtggtggcggcggtaactcagccgatggtggtatgggtggtggcggtcgcccgtttggtgttgcaaacactacaaggccgccagcttcaacttcgcgtgcggcaacttctggcactctaaccgctcccgggattggtgctcaatatttgatcggctctaccgctgttcaatacacatgcggcagtggaggtaatgtgggggctgctggtgcggctgctactggacgattggggacaatgtacggagggggcgcggcgggtaaggctgtcacggggaacgcgcctacatggactaaagtcggtgcaatttatggtgctcgtgtgtaa

SEQ ID NO: 86018 - DNA, 4182 bp, Citrobacter koseri
atgtggtacagggaaggtactatcacatttacacagggaagtgacgcactttctggcactggcacgtactggaatgtgaccgccaacggcgttctgccgggcatgatcgtcatcggccctgacaacaaattgtacgaaattaagcgcgtaatcagcgacacaagcctgattctcgcggagccgtacacgggcgagacccagacggacgttccgtgccgcatcatcacaacctatgaaggcgacttaacgcagttcagcgcacgctttaccgcgctcatgacccgaatgtcagccgactcgaagacgatgcgcagctggttgacggcagttgatgaggtaacgcttgagcgtgaagacggtacggaagtgaccgtgaagtcgctgacgcagatcgtcaatgagcataacgcaaaccagaaatggtatacggataacgccgacgttatcaatgccgctggcgacaaggccagggaagctgctgccagtgccgcggccgctgcggaaagcgccaatacagcgtctaccaaagccaccgaagcaagccagagtgctgccgcagctgctgcatcagaaaacgctgccggtgcaagcgcttccgccgcaaaaacgtctgaaaccaatgctgagagcttcaaggtagatgctgctgcgtctgccgcgacagcgtctaccaaagcgactgaagcgggagaatcagccacgagtgccgcggcatccaaagatgcggcgaaagcatctgaaactcaggctgcgaccagcgcgtccgaagcctctgcttcggcgtctgcctcgtctgactctgctgctgctgccaaaacctctgaaaccaatgcctctgcctcagagcaggccgccgctggcagtgcagctgatgcgctggcctcaaaaaatgcggctaaggaatcagaaacccatgctgcttcgagcgccggtgagtcggcggcaagtgctgcggctgccaaaacgtcagaaaccaacgccgacgcatcacagaaggctgctgctgccagcgagtcagctgccgcatccagcgcgaacgccgcttccgaaagcgccaccgctgcaggtgagtctgctgacgccgctttagcgagtcaaaacgcggctgcgtccagcgaagagaaggcaaaaacttcggagaccaatgcaaaggcgtccgagacagctgcatcggagagcgcaacggctgccgaagcatcaaaagcggctgcccagaactcagaagcccacgcaggggaaagtgccgctgccgcagctggcagtgctgatgctgcgagcaaatcagctactgcggctgccgattcggccacaactgcaacagagaaggccaacgttgccagtgaacaggcgacagcttctgaggcatctgccgcagccgccaaaacctctgaaaccaacgcgaagtctgctgagaccgccgctgaaggatctgcaacagctgctgccaaatccgcaggtgaggctgctgcttccgcaacgactgcgaccgaagcgatggcagtggctgaagctaaagccaaagaagcctctgattctgctgctctggcatccacgaaagcaactgaggcgaccgatgcggctgccggggcgaaaacttctgaactgaatgccaaagaatcagaaacgaaggcttatgagtacgcccagaacgcccaggccagtgttgccagtgtgaaatggaaagggacttcggctgaaatggacatggctaccgacgcgccgaagtgggtgaaagtgtccacggcacgtatgccacagtcgaccagcaccgtatacatcgaagtgatcggcggggcagggtacgaagccgggcagccagcgcttgctgcaatggccgatatcgtgctgcgaactgctgcaggcgatccgaaatcggtgaatgcggtcgcttatcgcactatggattcggctgtgctgtctgtagctaccgtgaacacggctgatgataactacgacatttacatcaaagctggcgctggctctcagaagctggtcgtcaacctgcaatctgccggtgctgtggtcgaaactctggaagtactggaggttgtggatacgctgcctgaagacgctgtagaggggactgtctaccatcgcgtcatttctgatcaggatggctccattaccggttcgctggtgggtaacgcaagtaccgctaccgtgcttcaaaccgctcgttatatcggtggggtgagatttgacggttcgactgatatcaacctgccaggtgtgaatattcagggtgatcagaacaccactggtaatgccgctactgcaaccaaactgcaaacaccgcggacaatcaacagcgtaatgttcgatggctctgccaacattactatcccgacgttggtttcccgcgggcgagttaatgcgctggcttcgaacactcaaggggccatgcctggcattcagatgtatgaagcctataacaatagctatccaacggcttacggcaacgttattcacttgaaaggtgcttatgcgtctggtgagggtgaacttttagttggttggagtggaacaagcggtgctcatgccccggtatatgtgcgatctcgacgtgatgccggtgacgcaaactggtctggttgggcacaggtttacaccacagcacacaaacccacagcgaaagacgttggggccgcgcaagcatttagcgcgtcgtacagcacaggggctggtaattggactaccgctgaatttatcgcatggctgaaggcgcgtggtgctttcgaagtgccgtactggatgatgaagggttcctggtcatatgccgacaataaaattatcactgatacaggtgtcggcaatatctgccttgctggtgcggttatcgaggttttaggtaccgaaggcgcaatgaccatccgagttactacgcctacaacgactaccggtggtgggattgcctgtgctcagttcacctatattaatcacggtagcgcgtatgcccctgcctggcgcagagattacaacactgctctcaaacccactgcggctgatgtcggtgcgttaccgatttctggcggaacaatgactggtgtgctgacgctgcaaaatgtgagtcagcccctcaagacgcaaggtggaggcattctggcaaatgatggaaatttatacattaataagtcgggatttgcaggctggattgatgcgctatttatgaaaaacagcggcggtacgatgtccggacagcttaagatccgctctacggatgggttacgcatttacgatgcggcatacgggatgatttttcgccgttccgaaaataatttttaccttatcccgacagcaaaagaccagggagaaaatggtgatataggttcgcttcgtccattttatgtagatctcactaatggcagagtaacaatgggcaatggtgctgttgttaacggtggtcttgggctgggtgtggtcaatggtcttggcggtaattccattgttctgggtgacaatgacaccggctttaaacagaacggagatggcattctggatgtttacgccaatagcgcccatgtttttaggttcgttaatagcacgctgcaaagccttaagccgttgagtgtaacgggtgacatcacgtcaagtgcgtgggtttacgccaaccgtttttccatcaacagcggctctggcgcgtggatagatatgcgtaaccagaacgtcatcttcgggaggaacgctgtaagtacaagctctgcacaagcgttgttgagacaagaccacgcggatcgcaaattcttcttgggtggcttgggaaacagtcagtttggtttttacatgatcaacaactcacgtaccgcaaacggcacggatgcgaacgcatacctccagaatgatggtacttgggtttgtggcggtaatggcagctttaatgacgtttatatccgctctgaccgtcgtagcaaacgcaatattcgcaagattgaacgagcgctcgacaagctggatcggatcgaaggtgttctgtacgagattcaggtctgtgaccggtatgagcagtctggcggcctcatcgctcaggacgtccagaatgttcagcctgaactggtaacggttgaccataacgatcagtcaggagagcctcgtctgcgtcttaactacaacggcgttatcggcatgttggtcgaggctgtcaaagagctgcgcgaggaagtgcgcgaactgaaggcaaaaatgtaa

SEQ ID NO: 86019 - DNA, 618 bp, Citrobacter koseri
atggaagaaacccccgtcatctctgctgtaaggaatgcagtgcgcaatcttagtggcgggatctcctgtgagattcagtttgatgggcttgttatggaggatggtgtaacgcctctgtttttgccatacacattggcagagactgacacgtcacctttggcaaagaagatacttgaggcgctggggtctgaagccagtggcggtatcgcaccgtaccctgatcaggacgagtacattgaacggttgaaagtcgagaagctggcagaaattaacgactggcgtattcgtcaggaaagtttcaccgtctatttcgaatggaacggccaccgctgggacgcgaatgacatttccaaagagcggctggatatctcgctaaaagctgcggcaggcggtcttccggacaatttcttctggacagatgcggacaataacgatgttccggtaacgctggagcaactgaaggagctagagatgcgaatgacgcagacgctattcgaccgcaagttcagcattcacgaacaccagagggtgatgaaaaaagacattctggagatgagcgaccctgagctaatcaaaaattatcaggtcggatgggaggatggttctgctcgacggtag

SEQ ID NO: 86020 - DNA, 4632 bp, Citrobacter koseri
atggaacagttcaagaagaagagactgcctctcctgattgcaggtgctggcggtaagaaaagcagtggctccagccgcacgccggttgaagccgacgataccgtaaactcgcgtgctatggcgtccatcctcgacctgctcggggagggtgtcattggcgggctggtggatggcgcaaagtcgatcttcgttgatgacctgccaatcctgaacgaagacggatctccaaactttagcggtatcacctgggacttccgcgatggctcacaagaccagacgccgatgtccgggttcgatttcgttgaaacgccgaagtcagtcaacatccagctgaaaagaatgcacgacgttacgattgccatcgataacgatgaggcagaccgtgtccgcgtcattctgaagttcccgtctctgcgtagcattgacaaaaagaccggtgataccaacggtacgaccgtgaagtacaaattccagattgccaatggcgataatgccttcaaggacgccattgcagaaggggagagcacttccgaaattacgctgacggcaaaaaagacgggcgtctactaccgcagctatgaactaaaactgcccaagccaggccgtgcctacaaggttcgcgtgcttcgtctgaccgatgacagcaacactcagtacatctttaacgatacgtgggtggactctgtcggtgagatcgtcgatacgccgatgaactacccgaactccgcgctggtcggcctcaaggtcaactcagagcagttcggcagctcgatgccgtctcgttcgtatctggtgcgtggtctgaagatccgcgtcccgtccaactacgacgaacacacaaacacctatatcggcgtatgggatggcacattcaagctgttgtcatcttccaaccctgcctggattctcttcgacctgcttaccaacgctcgttatggcctggggcagtacgtttctgagtccatgattgacctcgggcagatttaccagattggccgctactgcgatgaagaaattgacaatggcttcgggggtaaagagaagcgcttcgctatcaacacccagatcaccagccgtcaggatgcgtaccgactgattcaggatatcgctggcgccttccgcggtatggtcttctgggctggcggcatggttaacgtcatgcaggatagcccgtcagatccggtcatgatgttcaccaacgcgaacgtcaaagacggcatgttcagctacaagggatctgcgcgtaaagaccgtccgtcagttgctcttgtgacctacaacaacaaggaagacggctacaagcagaacatcgagtacgtcgaagaccaggaggcgatgcgtcgttatggcgagcgcaaaaccgaagtggttgcgttcggctgtaccagccgtggccaggcgcatcgtgtcggtctgtggctgctgtataccgcacgcatggagtccgacgttatcagctttacggcagggctggatgcttccttcctgatgccgggcgaaacggtgctgattcagaacaaataccgtgctggtaaacgcaactctggccgcattgtggcgttcacaaagaacagcatcactctcgacgcaccggttacgctgaataaggctggtagctacatccggatcttgaatcaggaaggcgaaatcgttgagcgcgatattcttgagaccggggaagacattaccaaagtaaccttctccaaagcgctcaattccggtgatatgccggttatgaatggcgtctggacgattaccgagccagatctggagccaatgcgcgtgcgtgttatcaacgttgcccagggcgaggctcaggggacgtttgacgttaccgttgtccaaaataacgcatcgaagtacgaagccatcgacaacggcgcgacgctgatccccgagaacaacaccgttctcgacccgacttattcgaagccgaccaacctgcaggtgacggaagggacgtatatctccagtccgggcaacctctcaatcaagctcgttgccacctgggaaggtaagtctgcggaatattggatcagctggcgtcgttccgatgagaacaacgtctctaactggcagtccgcacgcgttaccgaagagcagttcgagatactcaatattgccgagaatggccaatacgacattcagctctatgcggtttcgttcagcggcaagaagacggacatcatcagtaccgtttaccaggtgaaaggtacgatgacgccgccaggctctcctacctctctgacggccgttggtgactaccgcaacgtgattctgaattgggtcaacccggactcaatcgacctcgatcacatcaacgtgtacgcctcccagaccaacgatctggaaacggcaaagttgattgcagaggctgccagcaccacgttcacccatgccggtcttggggatagcgagacctggtactattgggttcgcgcggtgaacaagcgtggcatgttaagcccgccgaactccaatctgggtacggaagcgatgacgcgagacgtcctctcattccttaccgggaagatcacctcttccgagctgggacaggagctgctggaggaaatcgactctaaagcctctcaggatgcggtcgacgccatcaacaaacagatggaagaaagcctgaaagagcttgatcagtccgttgccgatctggacagcaaactggaagacaccagcggtcggcttgaacaggcccagaacgacctcaaaaatgaagtctctggcacgctggacaaggtcaacgacgcgctgcaacaggttgaggactctaatgcggctctggttgagttgcaggagaccgtttccgagcagggcaaagccgttgcaggtgctgtggaagcggcacacgctgcgctcgacaatgcctccgcgctgattgctgaagagcgtgaagcccgtgtcgaaggcgataaggcaaatgccaaacagattgaggcaatgaaatcctccgtcgatgacagcgttgccgccgtcgaagagatgaaaaagaccgttgccgaagtcgaacgcgccagcgcggaagtatcgaccaatatcgaggctctggccaaaaccaatattgacctcgctctgcgtcaggatgaagaccagcacaagcaaatggtcaataacgcgaagatcgccaccactcagaagacgtttgccgacgatatgtctgcaatggcctcaaaagtggaagagatccgcgcagaaattggtgaggatatccgggcatcgattctggaagagacaacggctcgcgtagaggcagataaggctattgcgacgcatatctccaagctggaagcccagctcaacgacgatatttcagcggccatcgttgctgaacaagaggcgcgtgcgactgcggatgaagcgctttctcgtcagatcaccacgttgcaggcgaaagttgaaggggatatcagcgcggcactcactgaagaacagattgcccgagccacagcggatgaggcgctatcgaagcaaatcacccaactgaaggcccagactggtgaggatatcaaagccgccgttgcggaagagacccaggctagaaccgatgcagatggtgctctggcttcgcagatcagctcgctgaaggctcagacggcagaggacatcaaggccgctgtcgacacggagacgaaagcgcgtacagatgccgactctgctctggccgggcagatcaccaatcttcaggctcagaccggcaaagatatcaacgctgctatcacatccgaagccaccgcgcgtgcaaatgctgacggtgctctcggtaagagaattgatacagttaaggctgaagttgatggtaactcggctctcatccaggagcaggcgaaggcaattgctgataccgataagaaggtttctgctgcctggacgctgaagatggaaacgtctaccagtggcggccagaagtacgttgcaggtatcgcgctgggtatcgacagcaccggtctatcgcagtttttggttcaggcagaccgttttggtctggtcaactccgtaaacgggaagatcaccacgccttttgtcatcgaaaacagcgtggcgtatatgaacggcgcttatatcaaagacggcacaatcactaacgccaaaattggtaacgtcattcagtcgaacgattacgccgctggcagtaaaggctggattatccccaaaaatggtagtcctgagtttaataacggtacgttccggggaagcatcactgcgaactccggctcgctgaataacgttaccatcgcacagaactgccagattctggggaaactgcacgccaaccagattgatggcgatatcgttaaagcctacatggttaatggcagcagtatctatcttgcgcctcagacgttcgctcgtgtgatctacgtttccggtgggtactactattacgctccatcggagaataccaacacctattcatggtcaaggattactgaatatacggtaaatggtgtcaagcagcagatgtatggcaaacgagacaactcagaaaaccagtccggcatgttcggctattacaacttgcctgctggccagtctgcaactgtcgatgtttatacctggcacgagcagcgtaaatacaatcaccgtgttaacgagccttatctcgttctggtgtttaaggcttaa

SEQ ID NO: 86021 - DNA, 588 bp, Citrobacter koseri
gtgactgagttagttcatgtgcaacttggtggcccgatggccagacatttcggccgccactggcatttaaaagtgcgcaacaccaaacaggcgttggatttggtcgaagccaaccgtccgggcttaaaagcctggatgaaacgcaacatgaagacctacgacagttaccacatccagatcaccaataagcaggggcataagtggtcggttgatgagagcgagtttcaaatgatggggcagtccgacaacatcgcgaagatccgcatcacgccagttcctcgcggtagtggcggtaaggcttttggttggttccagacagtcgtaggggcactcgtcatggttgcctcattctggttcccagcgctggccccgctcggcttgtcgctaatgatgggcggtatttcgcagctaatttcgccccaggcgaccaatgacagcgtaaggcaggcagataactcgaactcgttttatttcgacgggccacaaaacaccactaaccagggcaacccggttcagctcatttatggcgaggaaattctggtcggctcacaggttgtgagttcttcgatcaccatcgaccagctttag

SEQ ID NO: 86022 - DNA, 789 bp, Citrobacter koseri
atgggtaatagagctttcccggagcttggttcggacgttatgcaggaaatctatctgacagccatcaaacgctacccgaacgaagcgtgtggctttctggtgcgtaccactggcgagaaatatcgcttcatggaagcccggaacgtgtctgaaaacccggaaaacacgtttgttatgcacgctgacgacattatcgcagcggaagatgcgggagacgtggttgccatctggcactcccacactgacgaatcagctgaagcgtcagacgccgaccgcgccggatgcgaggcaacggaagttccgtggctgattctggctgttaggaagaatgtcgagggcgatgcgccatttcacttcagtgagatgaatgtgatcaccccagacggctttgagatgccttatctggggcggccctatgtgtttggtgtcttcgactgctggatgctgtgccgcgactacctgaagcgtgagttcaacgtcgagttgaatccaaacccgcacctgcatattccatcgtggtacacgggtgataccgacattctcgatcagaactaccgcaatgaagggcttgttcgtctggcgccggggacggaaccccagcgtggtgacgtcttcttcattcagtacggaaagatgcctgaccactgcgcggtgtacatcggagacggaatgatcctgcaccaccagatcgaccgtctgagctgtcgcgcttattacggtggcatgtaccagaaacacacgacgcaccacctgcgtcacagagacttactcaagggagatgaagcgtga

SEQ ID NO: 86023 - DNA, 699 bp, Citrobacter koseri
atgggtattaaagctgatattcagagcttgtcgccctccgcgctcattgagctgttcgaacttgatatgtcgaacaccacctctgggggcaagctgtttttccacgccggtacaaacgaactgatggagccagtcgtttggcaaggcgtgtcctacgaaccgtggccaatcaaggcgtcaggctttgataagactggtcagggtactttgccgcgtccaaaaatccaggtctccaactttgccggaactgtctccgctgaagttcaggcaaacgacgatctggtgggctgccgcatcatccgcaagatgacgctggcgcgttttctcgacgcggccaacttcaaagacgggaatccaaccgcagatccaaaccagcacttcccggatgagatgtggttcatcgaacagaagactctcgaaacccatgaggttgtcgagtttgagctgtcgagtgtgttcgatctgatgggtgtgcagctgccgtaccgccagatcatcaaaaacacctgcccgtggaaataccgcggtccagagtgcggctacaccggcccctatttcgacaaaaacaaccagcaaaccaccatgtcaggcgcggattactgcacgaaacgctacgactcatgcaacgcacgccgtaactactttgccaatggcgtaatccactttggcgggttcattggagcaacgcgttatgggtaa

SEQ ID NO: 86024 - DNA, 336 bp, Citrobacter koseri
atggaaagactgacttttaactggtatcccgactacgagtcggaaaagaccgtgaagcctaacgtgacggtgctgaatttcggtgacgattacgaacagcgccaggccaaaggtctcaatcgcattaaagaagagtggagcctaacatttacgcgctcttacgacgttattaatgccgtcgatgactttctgacggcacgcgcggccgttgagtcgttctactggacgaaccctcgtggcaaaaagatggttgtggtgtgcgacagccatactgtgaagcgttaccagggctatctcgttctcactgcgaccttccgacaaatttatgaaggataa

SEQ ID NO: 86025 - DNA, 4572 bp, Citrobacter koseri
atgtcacaaaacgtagagtttatcctgtcgctggaagacaagcagtttacagcgtcaatcgaccgggcgggtaagctacttaccagattcggggagcaggccacaaagcccgctcagaaaattaacaatctggaacgctcgttgggttcggtctcccgcatcatcggcgttctggagtccaagctcgatgccacggcagacaaactacaggatgtagctgccggcttcgagcttgtgtctgatgtttcgcgcaagacgcgaggcaacattaccagcctcaactcaggtctcaaaaccctgattgagcgcgtcgacacaaccacctcatccgttaataaactcaccacatcgctgcgcaaggttcagtctgaactcaacgagttttccgattgggcaacgttcgctggcaagagcgccagccgcttcggtacggaggtaaaagaagcctcttcctccgtgagtggcatgaatacgcgccttaacaccacgaagaagcgtctcagtaattggggtgtcacagcgagccaggctgccgaggggctgaagaaagtccgcgatcagatggatgccgtgattggccgccagcaactgatcagcaagccggtacgtgtgcgcaccagcggctacggtgagggcggtggcggtcgacgtggcggcacaaatggccacggctggcgcggtgctgaaaatggcgttttctctggtctgcgcggcaatattttcctgctgggcgagattggtgatgcagcaagaacggtaactgacatcctgtttggctggcagaagccaatcgtcgaagccgcctccgaaatggagcgtatgcgcgtcatgttgcgcgggctgaacaaggacaaggccaaccctggcaaagcagccgcagaggatatgcagtacatcgtggatatggcgcaaaacgccccgtttgcgatgcaggcgctgaccgattccttcgttaaattccgctcggcaggtctcgatcctactgacggatcgctgaaagcactggtggactccgttgcacgcttcggcggcgatagcgagctgcttaaacgtgctgccgtggctgtccagcagatgtccggtaagggcgtcgtgtcgatggaagaactgcgtcagcaattaggtgaagccgttcctaacgcgatgaaggcgatggcagacgctgccggtatcactatgggggaactgaccaaagcagtctccaccggtactgtggaagcgaaacaggcgctatcgctgatgttcgttggtctgcgtgcggagaacgaaaacgccgccaaagacatgatgcaaacctacactggtgcgctggcgcaattgcaaacctcctttacgctgtttgccgatcgtgtcggtcaggcgggctatctggattctctctcaaaggggatgaaagagctggcctccatcatgaatagcgcagagggcatttcgttcgctaactcgctgggttccggactctccacggcgatcgacggcttacgcgagctggcgcagtggctggctaaaaaccaggaactggttatcagcctgggcaaagtcgttgctgcaatggtggcgttcaagctgatgcgtgccgggattgcaggcgtgattggcactgccgggcaaatggttaacacatttaccaagatgtcgaccgttctccaggctccgttcaatctgggcgcgacagctgtcacccgctttaatcgtgcggctcgtatggggctggctccaatcccatcgctgatcttcgctatccgtggcgcgattacggggcttcagggcgcgtttgctgggctaactgcgttcattgcagcaaaccccattggtgcagcgttcaccgtagctaccgtggctgtagccggtcttatcacgtatatgaccatgctccgcagcgaaacgtccaaagtcgtggatgagatccgcaaaatcccggaggcgatgacggcggccaagcgtgcgcagatggcagcgcgtgcagccgagcttgaaaagcagatccagcgagaccagcaggcgcttaaaaccggcgaaagcgtgaactactactccacagcggctggccctgtcgccgtgaaggagtccaaagaggttgttgaggctcgcctgaagaaaaatcaggaagagtacgaaagaaccacaggcacgatggcgctgggtgatggcgcggtggccaaacggctggcaaaagaggctgctgaatcccagattgagaaaatccgggcagataaccaggtcttctctgcgacgtttgtgaaagcccgtcaggaggctctggataagatccagaaaatcaacgacgacaaatcgctttcggacgacgagaagaacaagctgctcgcaccgcttcgcgagaaggtgaacaagtcctatctggaaccggcgcagaagctggtcgacgacctgtcttctcgcaaaaacgcaaccgagaagcaaattgcccacttcagcgacatgctggagaaagcgaagaaagaggggaacaccgagcaggttcagaagctacaaggcagcatccgtgggtatcaggagcatcttgaagctgttgctcaggagctgactcaggcggagttcgagcgtgatagcgcggcgaaaaccggtaagggcgtaatgtccaaccagggaaccgttctggggctgggaacgaccgataaagcggctcagaaagcactggcgcagtatatgcggaaccagatggactccgcgacctaccagcgcacactgccagacggtacggcgatgctggacttcgaaggcaagccgatcatcgggccgaaacagctcaaaacccagttgaacctgcagaaagcctccagcgccagctctctggagaaaatgagcgacgaggaacgtgcagccgcgatcgccgcactgaccaaagcgcgtgagcaggacgccgcagcagcggaaaaagccgggcagcgtactgccaatgcttctcagcgtgccgcgaggaaggaagaaaatgcgcagcgtaagctggcggccggctaccagaaagccctggataaagccgatcagcttatggggcagatgggtgaaagctcaaaagcgaccgtgtcgtttgatcagtctctccgcgataccaccaaatcgctgaccgaactggccaacgccgtaccgaatgagttcatcactcaggagatgatcgacaaagccaagtcacgcctggctgacctggcgaacgcgagcgacgactatcgcgagatgttcaaccgccgcaacgtcgagcagatgatctccacctgggcgccggaatccgattctatcatcagcgcgggttacaagccgtctcgtgaagagaaggtggtcgatttcaacgacacctacaaccgtaacctgaaagcgttgatggatctgcgtgaccaggcttctgatccgaaaatcgtggcgctttacaccaagcagattaaccagctggtggcggcaggcaacaccgctctcatcaaagagacgggtacggcgacacagaagctggcgcttgagtacgagaatctggccgatcagctggaaaatagctggagcaacctgttcagcaacatgacggatacgctgaccgacttcgtcatgaaggggaaaatggacttctccagcctggcagaatccatcctccgtgacatcaccaacatggttgtgaagacgcagatcaccatgcctctcatgaacatgctggggatgggaacgacggcagcgggcagctctcagagcggcaatctgctttctggtgtcgcgtcagcggttgccaaccagggcgtccggatgaatgcggtcaacggcgataagagcgtgggtgaggcgacgaaagagacctccagctcggtctccggtctggggcagaccactcagcagacgaccagcgcgattggatctgcaaccaacgcgatcggcagctgggtaaatggactgttcaccagtactgaagccaaagacgcggaaaccaaagcggtgaagacatccatcttctccatgcagaaccttagctctgtcactggggcgctttctgccgcgtttgccatgctgggcgcaaacatgtccggctctggcaataagtggttgagcttcggcgctaccattgcctccgggctggtgtcggcctgggctggtggtggcttcgacaacatcggatctggttcctccggctctaactccggattcaacaatctcaccggatcggcatctgatggtactggcggcatcccggcaattccgaagttcgccaaaggcggcattttcgggaaagacggcgtggttccgctgcgtgcgtatcagaaaggtggcatcgctgattctccacagctggcgctgtttggtgaaggggatatgaacgaagcctacgttccgcttccggatgggcgttccatcccggtcacgctcaacgcagagggtgttaaaggcggcggtggcggcgttttctcacctgtcagcattgagatcaacgtcaacagcgacggcagtgtctcggagaacagcaattccgaaggcgcatggagtcaggcagcgcagcgcatgaaggcgatcgcgcttgaaaccatcgctcaggagaagcggccaggcggttcgctcaaccctaactctcaacgtaactaa

SEQ ID NO: 86026 - DNA, 270 bp, Citrobacter koseri
gtgtcgccattagagctgctgggcgtccctctaacgatgttctggatgctcagtcgcaacatcgaccgtctgcgcgcggaagaggatgtccgcaacctgcaagtcgctcgcgctgcccaggcagatggcgagggcgtgaaggcgttcatggagggtttgcaactcaggattggaagaccagtcgtaaccgataaagtctacgatccacgcaaggataaggcagaccctgacgccaaagagcaactgatgcaaatttttggcagaggatga

SEQ ID NO: 86027 - DNA, 318 bp, Citrobacter koseri
atgaccaaattactcgatctcgactccattctgcctccgaagaaaagcatcaagttcggcggtcaggaataccccatcgttgaaatgactgttggcctgttcgtctccatcaagcagatggaaggcaaagaccttcagaacatgtcgcctgttgagcaggtaactgcttacgccgacctggttcgcaaggtcatcccatccgtgccggacgctgtactggaaaaactgactgttccgcagctccagcagatcttcaccttcgctatggaagtgattgatgaagagaacgaaaaagcggctggtgaaggggcaaagtaa

SEQ ID NO: 86028 - DNA, 747 bp, Citrobacter koseri
atgtccaatacccatgtaaaaaacatcaaacttggcgcctgcaaagtgtcgtttggtggcgttgatctgggttacaccaaaggcggtgttcaggttgaagttgcgaccgaaactctgaaagtcaccgtagaccagctggggcagaccaccatctccgagctggtgcagggtcgtaacatcactatcactgcgccgctggccgagtctgtgttgcagaatatggtcgatctgatgccgggatctaccctgagcgaagaagataacgctgtgaccatcacctccgcacagggcgtcaacctgatcgacgtagccaaagagctggttctgaccccgcaggataccaccgactacgttctgaccatcccgaaagctgcgaccgcaggtaacttcaccatgacctaccagtctgatgatgttcgtgtgttctccgttcagttcaccgcttacccggatgacgacggcgtgctggggaaaatgagcggcccaaagccggttaaaaccgtctctatctctccggaatctccggaagttaaagccggtgagaccgtgcagctgactgcccagatcacccctgcagatgccggcgataaaaccggtgtgtgggaatccgacaatcaggagaaagcaaccgttgaccagactggtctggttcgcggagtagctgaaggttcggcaaatatctcctttaccagcaatagcggcggcaagaaagcgaccaaagcagtaacggttaattctgccgaataa

SEQ ID NO: 86029 - DNA, 384 bp, Citrobacter koseri
gtgtttattgaagcatttgcgagcctgatgcagaaggcgaagatcggtacagtcggcactgacattttctgtcactacatgccagccaatgtgaagtccggtgttctgttggttactcccaatacggggatcaccattgaccatgagttaaaaggcttctatcacgactctttcaccgtcatcgtgcgtaatgcgacgatcacaaaggcggtggcgaaagccaataagatcatggacatgttcccggtcgaagaaaccgtgtcggagggcgtttacttccggttggttcggccaatgtcgatgccgattacttatcccaaaaacgaaggttcgttgattgaagcgggtatcccgattgaatttgcgggctatttgttgaattaa

SEQ ID NO: 86030 - DNA, 474 bp, Citrobacter koseri
atgggtctgaagtacgacgcacatcagtttaagcgtgctggcgacaggctcaataacagccagaaagcctttaagcgttatctcatccgtgacatggagaagctggcgcgtctggttgagcgtctggcgcgggcaatggccccgctggagaccggctcactcgaaagcgcgatcttcgcgagagtggtcaaagaaggctataccgggctgcgtattgagttatcggtatctggagccaaaccacgcgaagggcatcagggcgttgaggttggcgattatgcggagtacatggagttgggcaagtatcgtctaggctatctctcccgcatgaagagcgtcaccaacccgccagtcgctggtgtgaagccacgagttgggcctttgttccttgagagagccgtgcagatcagtgagaagcagttcactcagacgatagcagaagcggcaaggaaagcaggttttacgagaggttga

SEQ ID NO: 86031 - DNA, 345 bp, Citrobacter koseri
atgaacatttcatggcaagcagagatagcgatttaccgtctgggttcgaagaacgtctacggtgaagcgcaattgcagttcgtcaggaagacgaacgtcggcgtcgttaagtttgagcaaagtaacgagaagtcatcggtacgtgcggacagctccggcagtcgcggtaaagcgaatctggaattgttcgatgctgttctggtgatcccacttgaggccgcagtgcagcttgatgacgttctcattctggaggggcaaaagctgaaggtatccagcgtgcatcgtcgctggggactgcgtgggcgccctgggcatctggaagtaggggcaaacatatgggtctga

SEQ ID NO: 86032 - DNA, 834 bp, Citrobacter koseri
atggcgcagatcgacacgtaccgtagcggggaagcagtttccctgtcgtttgcatttaacgttctggatattgagtcggccacgtataccgtcagagatggcgcaggtgcgatcatcgtcgataacgaacctctcgatattactgaggggcagatgtccattccggttgtcgtgtcggccgaacacaacctgctttcagataaagagcgcgatctgcgacacgtcattgtcaaagcggtggcatccgggctgacgcatgaagagcgcaagatgtacgttctgctgaatagcttcgagctgtcaattccaggccagtcattcgcaacggtcgcagacgcccagatgcaagctatcgatatgctgaacggcgacaccctgttagctgatggcgaagggctgatgcgcaaacgtctcattgaggccaccagacgcgtcaaaacgctgccgttctcaatccgcaaagtcctgcgtatcgacttcgaccgttacgaccgcccgcaaaacatgctgaacgtctatgacattccgtggggtgctgacggggcatatcgtcacgatctgatcgattgggagcagatgacgccggagaaattcgacgagttcccggactacttcaaacaggcattaatgctggccgtggttaatgaagcctgcgaaatcgctaacggtaatgacgtagcggcagcccgcgaggacggcattctgtctgagtccattggtgaaacgaccaatatgtaccgcaccggcaaagcggcaaatgtgcatgtggctcgcagtacctggcgactgctggtcagttacatcaataaccgcatgattgttcgccgtgcgtaa

SEQ ID NO: 86033 - DNA, 396 bp, Citrobacter koseri
ttggggtacacgggcattctctgcggtatccagtttgtcgacggcatctcggttgccgaactgccattcatcgatcagcagcggatttgtgcctccatgcgtgccactaccgttgaaggcaaaaatgtatctccttctgccgcgtacagcagccgcaatgatttgactgcggacgacattgtcgagacggcggccccggatattgtgccaatcaaacgtggtacggctgaagtggaagccaaaccggtacagcgctttactcgtgaagagctggagtcgattgcggactgtgaaggtattgcgggtctgcgtcagatcggcaaccagattggcgtgaaagccaaaggtatcgttgaaatgatcgaaggcatcctgaaagcacagggcggtgagtaa

SEQ ID NO: 86034 - DNA, 924 bp, Citrobacter koseri
atgccagaacaaaagatgaagatcacggaagaggcgtttgcggatttcacggggcatatgtgccgtgccggattcaccaattccatctccaacgagcctctgagcgagcgccagcagaaccatcttgcggcttgcttccgggcaattccgttcactcagtctgtcaccattacaccggctgcgccgtccgtattggtgggtaaaaccgttcaacttagtgcaggtatcaccatgagcaaaagcgcagattcattcacctggacgtcggccaatgaccaggtcgccacagtcagcggtacgggtctggttactggcgtgactccgggaaaagtgaagatcaccgccaccgataagcagactcagctttctgcgtcagtcgaagtgaccgttaagcctgtcagcgtggagtccgttacggtaacgccagactctacctctgttgagaaggggaaatcggtcaagttgcgcgttgatgtacaaccgtcaaacgcaacaaataaaagagtcacctggacttccaaaaataacgacaaagcgaccgttgaccagaacggtaacgtagctggcgtagccgttggtacggcaaccattgaagtggtttcgcaggatggcagccataaagctactgctacggttgaagtcactgagcctgtcgttgctgttactggcgtctctgtcgatccgagcaccaccagcgttgaagccaacaaaacggtacagctgaccgcgaacatcgaaccggctggcgcaaccaataagcgcgtaacctgggcgtcaaaaaatgccgagttcgcgacggttgatagcgcaactggacttgtgaccggtgtggctgcaggtactgccactatcgaagtcaccacggaagacggtagccacaaagccactgcgaccgttgaagtgaccgcagcaccggctgcgtaa

SEQ ID NO: 86035 - DNA, 876 bp, Citrobacter koseri
atgccattactgcgtgatgaagctgaaaagctgtctaacaacgaacttgagcagggtgtgatcgagaccatcatcgatcgcgatgacctgttcgctgttctgcctttcatgaagattaattctaaggcatacctctacaaccgcgaagctaccctgagcgaagcaaccttcatcgatgtgaacgacaccatcaccgaaggcgctgcaaccttcaccgaacacgttgcgaagctgcgtatcctggcaggcgacgtagacgtcgacaaattcctggcgaccactatgtccgacaccaacaaccagctggcaatccaggttcgtcagaaggtgaaaggtctggctcgcgcattccgccgcaacctgattctgggcgactccagcaccaacaacaaagcgttcgacggtattccgaagctgatgcacgacgatcagaagatcgacatcgaaggcgcttccatgaccttctccatgttcgacgagctggtcgacgcggtgaaagatctgggcgcagactgcattatgatgcgttccgagcacctgcgtgcttatcgcgctctgctgcgtaccgttagcctcggcccgtccgaaatcatgatggaaaacttcggtcgtccgatgctgtgccacaacggtgtaccgttcattgtgaacgacttcatcccgactgattctggcaaagcaagcatctactgcctgcacctgtccgaagagaacggtgtgactggtctgtatggcggtgaaaacgccggtatcgttgttgagaacatcggtactgttcagaacaaagacgcaacccgtacccgcgttaagtggtactgctctctggcgaacaagcacgacaaggctatcgccgcgctgaccaacgtaaaaatttga

SEQ ID NO: 86036 - DNA, 897 bp, Citrobacter koseri
atgaatctgtggcaaatgcttatggcccgtcgtggcctgatggatgtagctgaagcgcatgagcgcggaggcgctggtggcggtgctcctgctggagacaatgagcagggcaatcaagacccaggcaaacagggcgagcaaaaagagcaaccgaagggtgacgacgacgagtatgccggtatgactcaggaagagttgctggcagaactgcgtaagtccaagaaagccggtgctgacctgctgaaagagaacatgaagcgcaaggagaaagagcgcacattggccgatcagctggctcagtacggtgatattgacccggcacgtgctcgccagcttctcgaagctgaacaagccgcagaaaccgcacgtcgggaggcggagcaggctgaactggaacgccgtggtgagttcgatgctgtgaaaaagcagatgatcgaagcgcaccaggctgaactggcacagcgcgacgaacgctactccactctggagagcgagaacgccgcactgaaggctcaactggtcgaaatgactgttggcgcttccttcagcggctctgccttcctgcgtgacaaagttctgatgactccggctaaggctcgcgttatctacggctctcatttcgaagtgggtgaagacggtagtgttgtgggctttgataagccagccggtcagaaagaacgtgcagttctggttgacggtgaaggcaaaccgttaccgttcgaatccgcgattgagcgcattctgcgtgcagatccggaagctgacgcactgttgcgcagcgaagccaagcagggtgctggttccaatagcaaaccgacccacaaagtaaaccagccgaagagcaagtcgactatggataagttgacctccggcctggggaaaatcggactcaagtaa

SEQ ID NO: 86037 - DNA, 1581 bp, Citrobacter koseri
atggaattgactgacaagcaaatcaaagaccttgtggcacgacgccaccctgaatatgagaagaaaaaagaacattgggacttcctcgccagcacctacgctggcgggcgtgcctggttcaacgacaatatcttccgttacttcaaagagggcgatcaggagttcaaagagcgcctggaacgcgcttatcgcttcaaccacactcgtgaagtggtaaacctcatcaacaaatacctcttcaaagaggtcattcaccgcaacactgatgaagcgccggagcagatccgcaatttctggaagcgagccacgcgccagaacacctccatcgatgcgtttatggcggctatcgatctgcaatcatccatttatggccgtatctgggttgtcgtggacagcaccatgaacgtcgatgttgagtctgttgcagacgagaagaaaaatgatgcgcgtgcctacgcttactggatttcgccgcagcagctgcttgatgttgcctgggacgaagacggcaatatgttgtgggcgctgattgttgaaatcgcgcgcgacgacgaagatccgttcacgtcaaccgggcaggaataccagcgttaccgtctgtggacgcaaaacgagtggtatctgttccgtgaagaagtgaagaaaggttccggaaatagcggtcgtcgtcaggccaaagtcgttctggaggatagcggccagcacaatctgggcgtggtgccggtgtttccggtggactgcattggcgaaagcgagtctccgtatttcagcccgtcgttgattgacgatatcgcctatcttgaccgcgccgtggccaactacctgtcgaaccttgacgcgattattcaggatcagacattcagccagctggcgatcccggttcagtcactgctgccgggcgatgaaaaccacaccaaagtgctcgaaatggggacaaaacgcgtcttcaccttcgactctgagagcggtaatcagccattctacctgtctccagacccgaaacaggctcagatgatcatcaccacgattaagacggtgattaacgagatctaccattccgttggtgtggcaggtgagcgaaccaagcaggataacgcgcagggcatcgataactcttcgggcgcagcgaagatgtacgacttccagcgcgttaacagtctgctggtgacaaaagcagagcgcctcgaaagggcagagcgccagatgatgcagctggcagcgaaatggatgggtgtcgaactggatgaagaccactctctgatcgcatacccggaaagtttcgacattcgcggtctgactgacgagtttgccgttgccgagaaactgtcgctgcttcaggcgcctgattctgttcgtcgtcatcagatggaaatgctcatcgagaaggtcttcccgaacatttccgaggcgatgcaaaaggaatttcaaaaagatctcttgaaatttcctccaaaaaatgatcttaacacccttgaaaataagtcagtacttacttatgatcaagatgcagcccaagaaagcgggcaagatcaaccccgaggaatggggactcatctactcaagagaccgagtgataagtaa

SEQ ID NO: 86038 - DNA, 1257 bp, Citrobacter koseri
atggccatcccgtcgtctctgagtctcgtacagctgcattctgggcagatgcaagtcttccagtcgccacatcgtttcaaagtggtgtgtgcgggtcgacgctggggtaaatcccggttgtcgatctccaccatcatccgcgcggcagccaaagagaaaaagcaacgtgtctggtacgtcgcaccgacttaccagatggctcgccagatcttgtgggatgacctgcaggaagttctgcctcgtaaatgggttcgtaagaaaaacgacaccacgatgaccatcgtgctgaagaacggctctgaaatcgcgctgaaaggtgcggataagcccgatacgcttcgtggtgtggcactgcacttcgtggtgctcgatgaatttcaggatatgaagcctgacacctggtacaaggtactgcgtccgacactgtcctctacccgtggcggtgcgctgatcatcggtacgccaaaaggcttctccgagttccacaagctgtggactatcggtcagaacaaagatttgcaacgcaaagggcagtggaagagctggcagttcgttacggccgattctccgttcgtaccgagcgcggaaatcgaagcggcgaagaacgatatggaccctaaatcgttcgcgcaggaatacctggccagcttcgaaaacatgtccggacgcgtttactacccgttcgaccgcaatgtgcatgtgaagccactccagttcaatccgaaactgccgatctgggttggtcaggacttcaacatcgaccctatgtcatcggtcatcctgcagccgcagccaaatggtgagctgtgggccgtggacgaggttgtgctgttctcatccaacacggctgaagtgtgtgatgagctggagcgtcgtttctggcgctggaagtctcaggtcactatcttccctgacccggcaggtgcgtatcgccagcacgcacgcggtgaatcggacgtcgatatcttcaaggaaaaaggtttccttcgagtcgattatccgaagaagcacccgccgatcgcagaccgtgttaacgcagtgaatcgcatgttgatgagtgcctcgggcgaaacccggttgtacatcgatccgaagtgcaaacacctcatcgactcgctggagaaggtgatctacaagccaggctcacgcgatatggataagactggcggcatcgaacacagtgcggatgcgttgggttatccggttcatcgtaggtatccggtgaaaaatcgtgttattcttggtggatctagatag

SEQ ID NO: 86039 - DNA, 642 bp, Citrobacter koseri
atgactgtagaaaaagacgagagcaaaactcgcctgacgccagctgagtgggcagaagccgaagcaaagtggacttccggcgaatacacactctccaagctggaggaagagtacggcattcgtcgtgaaacgctctccagacatttcaaaaagcgtggattagagaaaggcgcggactccgttgggaagatggtgcgcgagtcgctcaaatccgacgcagagctgcgtgcgaaggcgcgtgcagagaaaatcgaagagcgccggactcgttacgacgattgggcattcgcactcggtcggatggtgatgcatgaggtggccacagccaagaaggacggcaagccactcgcaaccatcgaagatgacctgaagagtctccagcgtgccagcggcacactcgctaagtgcttcgaaatatcctcgaaagcgctcggtatggatcgcgctgagaacgaagaagacgaaatcccgaacctggtatttggcgaacttacgccttcccaggtggcgcagctgcgtaaggaagatgatgagccggatctgattgatgacgatctgcttgagtcactcgaagaggaagcactgagcgaagcagagggcgattctgacgcgtctggtgatgaaagtgatgggagcgtctaa

SEQ ID NO: 86040 - DNA, 267 bp, Citrobacter koseri
atgacgttgaccgacaaacaaaaagacatcatcaaaaccatcaatttaggccatgagcgtgggtatctgctcgatctggacgagctgcttgaagtgctgccgtacaaaacgaccaaacagagtatgcagttctctatccgcgcactggtgaaaaaggggctggtggagaaaggaatgtgccgccagcgcggtgattccggctaccaccgtcgcacgctgggactgaccactttaggtcgtgccagagccaaattactggtgatgtaa

SEQ ID NO: 86041 - DNA, 891 bp, Citrobacter koseri
atgacagacatcatcatcaaacgctaccgcccggaagagttcccgcgtcatctggactttctggagcgtatgaccgttaccaaaggcacggttgaagactggcacgcgctgaagtcgctgcactacaagacggatggtaagccgttcgcgccaacgtattatcgctgcgaactggacgaccggctggtgggcgtcgtggttatggcttacccgaaactgctgctggcgcctcgccatcgcatgtttcctaagctgaagccaaccaccaataccaccgtggccaaccagtattgggggcggtacgtgaacaacaactttgcggtgatcagccgttccgttgtggacactcagtaccgcggcgtcggcgtctcctatcgaatgattaacctggttagcaggatgcacgaccggccaatcatcgagatccagtcgtcgatgagcaaatacaacccgttcgccatgaaagcagggttccagttcatccgtccggagcgtccgaagagctatgagagtgcgttgcgcgtcttccagcgtcatttccgttccgaccctggcgacaacgaagcgatcatcaaagagctgttcgccatgagcgagtctcgccgtcgtcgtgcgctgcgtgatctggtcgctgactaccacaagaacagttccctggccaaagccgggcgtaatcgtggcacgacgattcaggacattgccgacagtctggtggacgaggccagcatcgtgaagctgctcaaggacattcacaacctgagcttcacgtctccgctgtatggcgtgtaccgaaacccggactttggtcgtcagctgccggacacgctgccactgctggcattcgacaaacagcctttgaataaacctcttgaaattgcattaccggcataa

SEQ ID NO: 86042 - DNA, 255 bp, Citrobacter koseri
atgcctgatttgaagatcgtagagctgaagccatcgaaagaggctgacaacaacaacgttgaagtcatccgcctgctggaagaagcactccagtacgccagagaaggcaaaagccagagcctggcgctgctgatgatcaacaacgacggcagtgttctggattgctggcataacggtgggcgtccatacgtcatggttggggcgatggaatcgcttcgcctggacttcatcaatgccaatatcgagcgcaggtga

SEQ ID NO: 86043 - DNA, 639 bp, Citrobacter koseri
atgagcaaatacaccatcaacgtatcgtttcagacccgcgtgaacaaaaccacgcgcacgctggagattgccgaatcgttcggtcttggcctggacgaaaaagagtggacgctttacgacaatctggagctggaagtgaagcagggcgatgtggtgtacatcaccggccaatccggttccggtaaatccgttgtgctgcgcgagctgcaacgccagatgaaggatgaagggctttctgtagcctccatcgatgactttaccttcgacaatgaggttaacgtcatcgaccagctgggcaaaaccaccagcgaagcgctggggctgctgtctatggccggattgaatgacgcctatctctttgtgcgcaagccatccgagatgtctgacggccagaaataccgtctcaagatcgccaagctgatcgagtccggcgcgaaagtctgggcggccgacgaatttggcgctgttctcgaccgtgtaaccgctcaggttgtggcgtcgaacctccagcgtgccgcccgtaaggttggtgcgacggtaatggtggcgacgacccacgaagacctgaagaacgcgctgcgcccggatatgcagatcaccaagcactacaaagaacgcgtgaaggtggaatatgcctga

SEQ ID NO: 86044 - DNA, 669 bp, Citrobacter koseri
atgaccaaaaactttgaaatcgtctatcgaaacccggcagaactcatcccgtatgagatgaacgccaaaaaacatgacgaacagcagatccgcgacctggcggccgccatcaaaaagcgcggttttgaccagccgatcacggtcgacaagcacgacgtcatcattactggccacggtcgtcgcgaggcggctcttctggctggtctggagcgtgtgccggtcatcgttcgcgacgatctgagcgaagaagaagtgaaggcgaagcgtctggaagacaaccgcctggccagtattgactacgacgccatcaaattgcagcaggaactggaatccctggtgctgggagaggtcgaggtcttcggttttgaagagcgcgagctgaacgtgcttgtcggtagcatgaccgaagagatggaaaccggctctctggtgctcgatctgggcgaagagacggaacgtcagaaagaagagcacaccgagatcagtcgcgaagtggccgctgaagaagtccgcgtcatcgacgtattgggctttaaaacgctcccggcaggctctgccattgtggttggggatttgcttgcccacatggaagaaatcacgggagagagcggggtagacgctttcgtggcgtatgcggagaaagtttcttctggggagctggctgcatga

SEQ ID NO: 86045 - DNA, 681 bp, Citrobacter koseri
atggatgtgaaaattacgattctgcaggtggaagtcgcgaacctgcgtccgaatccctggaataccaactccgttggggcgcaaaacttcgaaaaactgaaaggctctatcgaaaaattgggcttttttaagccaattctggcgcgggagctggacgggggcgtttttgagatcctcggtggcgaacaccgctggcgtgccgcgatggagcagggcatttcaacggttcccgtcatctccgtgggcaaaattaacgacctggtggccaaacagatgtccctcgtcgataacgagcgctacggcgaagacgatcaggtcgctttgcagcgcttaatcgaagaaatccagtctgaaatcgactaccggttgtccgatatcgccccatatgacgacgaaatggcggcaacactcgccaaagcgtccgttatcgatcttgaagcgctggaagcgctctcccgtggcgatgacgagccggtcgatgaggacaaacgcgataaaaccgagcgagtcggcgctgaacaccagacgatgcgcttcaaagtgacgtttgatgcgtcagatcgcgtcgccgacaccatcaaaaccatcatcaaagagcagggaatcaataccggtaacgaaatggagaacgccggggaagccctggtgtggctggtcgactactacaaggagcgtatgtaa

SEQ ID NO: 86046 - DNA, 1560 bp, Citrobacter koseri
atgacagttcggattgtatcgaatgcagtcaatgcgctgatttctggcgctgatgacaacgtgaaacggctcgttcaggagatgttgagctatgaagtggaggctggtgactggaaaggaaccagcacgatgttcaactggagcaaaaacgcattcccggctgggtttgcgaagccagtagcagccaaccttctgaaagctggcataaaatgcgtgcatgtgcgtaaggaaaaagcccccgcgctgggcaagccgaacccggtagttaacccattcccgtataacccggactatgcgtatcaggatcagactgtggaaacactggtgcgcgaagggatgatgattgcccagattgcgacgggtggcggtaaatcgaacgtagcgtgtaaggcagctgctcgcattggtcgtatgacgctgtttttaaccacgcgctcggttctgatgttccagatggcagagaacttccagaaatccatcgattaccgcgcggagaatggcgagccgtggctgaaaggccagaaagttggggtgattggatctggtgagttccaggtctcgcgccatatcaacgttgccacggtgcagaccctggccagttttctcgaagagccaccgcgcgacgcatcaccggagaaaaaacagtaccacctgaagcgccgggaactggttaagcgctttctgtccagcgtttctctgctgattctggaagaggcacacgaatcatctggttcaaacttctacgatatcgcccggttgtgcatcaatgccgattaccgtctggcgctgacagctacgccgttcatgaaggactcgaccgaggcaaatatgcgtctcatggccgttgccggccgcattgagataaaggtaacggagaaatatttgatcgatcgaggtattttagcgaaaccatactttctatatcataaaatcgcgtacactccagacgaggtgcggattagggctgaacttgcttcgaaacacctgaactttcgggttggaatgagtacggcttaccagaaagcctatcagttaggcatcgtttacaatctgggccgcaacgaggctattgtgcgcgaagcgttaatgtacaaaagtcacggtctgaactgtatgacgctggttcgtttgaagcgtcatggtcagattttgatggaaatgatgaaggaaagcggcctgaaggtcgatttcatctacggagaatcaaaccagactacccgacaagcaaagctcaacagtctggcggcaggcaagatagatgttctgattggttcaaccattctggatgttggtgtcgacgttccaagcgtaggggcggtgattctgggtggtggcggcaaagccgaagttgagatgcgccaacgtgttggtcgcggtcttcgagccaaaaagaatcaggctaacgtgtgctttattaccgactttatcgacgtgagcaacaaatatctcatgtcgcattcatatgagcggaagcacattatcgacacgacgcctgggtttgccgagggcgttttgccggtgggtagcacattcgatttcactgttttgaatagagagtaa

SEQ ID NO: 86047 - DNA, 279 bp, Citrobacter koseri
atgagcgagaaacgcgctatacactgccaggttcagttaaccgaaaaagcaaacgacaagctggaaacctttcagaatcgactgcgtgaacgcaatattaagctgtcaaaggcagacatcatcaatctggtgctgtccaacatgacgatggctgattttgataaggcagctacgtcattagaggcttctgcaaaggcccgtgaaaaggtcatgaagatttacgaatcctctggcatgaccaaagaagatctggccgatattctcaaacgtctcgattaa

SEQ ID NO: 86048 - DNA, 258 bp, Citrobacter koseri
atgataggtgcgggctgtgacgcgtccatcttcatcaatggtgagacggttgcaaagctggagaccggtgaaaaagcgacgttccatctggatgccgggcaatggattgttggcgcttcactggaaggcgccggactgtgcgcactgaaccctgctcgtcaggaacgcgagaccatcaccaaagctggcgagacgaaagtcttccgggtgttcaccagcaacgcaggtgacatcgatatcctaccaacgacactgtga

SEQ ID NO: 86049 - DNA, 528 bp, Citrobacter koseri
atgacgaatattactgacatcacctacgggattcctgcagaagtctggccgcgcgattacaccaacgtggagaaggcgctgatgttctggcgtaagtctctcattcctgtaagggtcacgatggaagatggtcaggtgttctgcatgtacgttcagggtctcatgtcgtcgcgcaacaaagtcgatctttgccctgccccgttcgacaaagaaaatcgtataaggctcccacttgagcgaatcagtacgattgaatcaggtgtgacagaaggcattgcgcacgatttcacgggtcggacaacggtacacccagactatgtggacaatcggccatctcgccgtgatttcttcaaaatttgtcgccaggctcatgagatgcagaagtctataagggtctacatggcggatggccgtgaaattgagggtgtgtcttcaggcgttgacgcttgccaggtcacgctcaacatgggggacggacggaagacagtcgtcatgttcgattgggtcgaacggattttaccgttttaa

SEQ ID NO: 86050 - DNA, 651 bp, Citrobacter koseri
atgtctaacgttgctatctctaaaaaatccatcatcgacgctgctgtagttatcgctaatgaattacaagttgcagccaataacgctactcagacttataacaatcattatcagaatggtacgcacacaaaagcagataaagctaacatgcttgcagcgactaccaaacttgcatacttcaccaacaacgttttaaacgctgttaatgatgagaaattagctggtgtcttttactacgcgattaaagcaagcaaacaagcgccagaagtgtttttccgcgaagctatgaccaatagctattcactcgaaaaattggtttatctggttaagtctatcaagtctggtaaatgcgtttattccgtcgctgatatgtccggatctcgcgtattcgcattaatcgaaatgattaatgatgaattagaaacattcacaaatggcgctgtattcgatttaatgaatgaagctaaaaaagcatgtgagattaaattagacgctggctacactcaagccaatcagcttatcaatttgtgtgaacgtctcggactggtcgagaaaataaaaggaatgggcgctgctaaaaacggatcgcaacaatatcgctttatcaagaatgatttttataactatctggctgatgctttcaaagcgtaa

SEQ ID NO: 86051 - DNA, 204 bp, Citrobacter koseri
atgattagttatgaccagatccgcgcggaatatcgcgcaaaatatcgcgcttataaacttgaattaatcggcgacttaaaagcgcaacgtgacaaattaaattttacgttttctgatttgcttaacagcaaaagagactgtaaacgcaaacgtgaatatttgcgcttgtctgaaatgatcggaaaactgcaaaacagcatttaa

SEQ ID NO: 86052 - DNA, 483 bp, Citrobacter koseri
atgaactttatcgctactgttaacacccctgcgcatggccatatttctgtgacgttctctgataacgagaaaagcgtgctgggcgcctggcgtgacaatgtaaccatcgagctgtccgggaaagagaaacagcagatcaccaatgacattatctgcaaccgtcgccataaacgcgtatttgaaaaagcgtatgtctccacttcgggatttggcgtattcatcttcccggtacgcagcggtcgcttctgccagtcaaaactcatcgagttcgccacgcagatcgcgctatgggttaaaacagaatccgggttcgacttcagcgaacaggaagcagtgggggaggggatgcgtatcgccaacaatgccatcaagtgcaaaaacgtcacctacgaagcaggaatcgactcgtggagtgtctcgtgcggggaatacgtgaaagaggtgtacggaaagaaccgcattcacatcctgactggcaagtaa

SEQ ID NO: 86053 - DNA, 282 bp, Citrobacter koseri
atgaccgatttcactatctcccctaaagctgaaaacgtatggctggaatcctggctcgacctgtcgccggaagaacagcaggaaatggatcacgttgaacaggacgaacaatgtgatgcccgcttcttccgctttgaggacagcgtttatgatattgccgacttcatgcgcgatgaccgcttcccggactggcacgcaggctacccattaaatgccttcgccatgctgatgatccgcgtggatggctccggcgataccatcgacgtcggtctgctccactaa

SEQ ID NO: 86054 - DNA, 396 bp, Citrobacter koseri
atgactgtaattcgtgaaaacctggttcttgatttgtactatgcgtcagaaacaacctcaggcggaaaagttgcaaaactgaccgctattctgcgtgacagcacgaacgggactgaagtgctcaccaccaccctgatccgcaccgggacagaagaggattgggtgtacaccgtaggcttccagagcatcagcgacgcatccgaaccaatgctgctgaaactggaaacgtatttccgcggcgtagacaaagagatgtttgagaagatgatggtgaaagcagacgagctgtacacctcctacttgaacccgagcaacacctggcttggacaatacggtctgcgcatcgtgtccaacgaaccggttgaaaactacatcccggaaagcgtattcgcttaa

SEQ ID NO: 86055 - DNA, 312 bp, Citrobacter koseri
atgaaaaacgcgatgatcaccaaactgagcgcgggccagccacgtaaagaaaaaccaaccgtaatgagccagctgaccctgctcgatatcatcgccaacggcactgccattcgcctgttcaaagagacgctggtctcgttcgacaatggttcccgcacgcgttacgtaatgagtgtgcgtcgccagagtgggagagggtggatggcaaaacagatcatctggccggaaggagagctggaacaggcgctactggaagcgaacaaagtagcccagcaagaaatccagcgtgcctctctcctggcgacagcctga

SEQ ID NO: 86056 - DNA, 219 bp, Citrobacter koseri
atgattaagatgcctgtgatggttgaggtgtggagcgtggattccctggctgagtgtctggatgctgtggggccggagttgtaccgcaagttgtggtctttcgtcccggctgaaggggaatcacccaaagggaaggatatctggcatctgctcagtgaagatgaacagcgggagctggtggacgcggtacacatcgagttcccggacgacgaagattaa

SEQ ID NO: 86057 - DNA, 222 bp, Citrobacter koseri
atgtacaagcatctgaatatcagcatcaccctctgtggcgaggaagagtcccccgagtgtgagatctccctcgatgacgttatccgttcccaggatgttgctggtcgcgtggcgacgctcatctctgaaggatatagaaaagggacgtttgatttccatatcgaggacaacccaatgtccgtcgcgtggaactgcacgacgtcagaaacgaagttagggtga

SEQ ID NO: 86058 - DNA, 243 bp, Citrobacter koseri
atgagcactaaagactacacagacgggtacttcagcatcgacgccgaaagaggcgagttgctacatggcggcatcgctgtcggacgcgtcgttttggttaacggtcagatttacacagagctggacgataccagttcaagcgcacctgtcgtctccggccccttcgggacaagagaagaggcgctcgatgatttgtgggacaacagggacgatgcgaatcagggcagtgagattttcgaataa

SEQ ID NO: 86059 - DNA, 1191 bp, Citrobacter koseri
atgacggatacagctttttcaaaatcgctacaaaaggaagtcgaccctgagcagtacttggcacttaaaaatttagatgacagctcaattcatgctgtcgctcgcgaagacatcatctgtccaatttgcaaagttggaggtggatcgttcgttagagcctccaggaatgatggttattacaagaaggctcatttcagatttaccggtgaatctggtcaaggccaccatccatcatgtgacttctacggagataggctaacatctgaggtaaggcagcaccttgtcacattcacgaaagatcgaacaaagtattcgcaggtaatacgaaaactggtatgcgccggcatacaggaagggatttttacgcaagaaaaaatgtggcagatgagggaatggttcttcaataagcgtaaggactccacatttgaaatatggctggaaaagggtcatttggactggcttgattatattagcgggttacgtgaatcatatttggcatggacaaacccggatattatgcctttctcacccattcaggctactgtgcctggtttttcttggtctcgtgcaattgacaaagaggtgctaagagttcacatcaagactctccagcaattgcgtaaaatttcagtatcccatagagacatttcggcaatcttagaacacatagataataatcgtggccgtacaattctcgacccatcgcttttggaagatgagataaataagacttacaagcttactgggtttgtgatgagcaattacattgagtttaaggcaaaaacggttagcgacagagcatatggagaggctaagtttctggcatttgccgcactgctgttattcgtgtctgattgggacctcaacattgctattggtaagttttccaagattgccagagtgaaggaggttgatgacatgctggctggtaatttcattggtcttaacccttacatccggtacgacgtggctaaagctgtgaagaaattgcaggataactggccgattgaataccaagagttggaacattgggatgtagaaaaatctatgcgtgaggcatatgaaaagtggtgttcgacagagccagaattcgctccacctcttttacccgacctgtatgttacccaacacgagaaagaagtcgcacgagacgaggaaatcaggcagtggattaagaacggagatgtttga

SEQ ID NO: 86060 - DNA, 837 bp, Citrobacter koseri
atggaactattccagtaccttcagtcgctatacccgcagctgaccccaaataacagcaaaattcatttagccagcaccaacgaatataaagaaaacccgatacaggagttcgtgaaagagacgttcgacgactggcaatgcctgcagaagctgaaaagcttcaatcgtacctacgttgtctctcttattcagactgaagataaggcgcgatttctctatgctggcacctatctcaacgttgggtgttctctgacagcatcacatgcagtacctggccggaacgaagactactatctctatcaactgacacctgttcctgaactggatgaatatcgtggacgtttgtatgtcagtgcggagcgtcctcgcagatctattttgaacggcgaaactcttgccggaaaactgcgagtcgttgagattgcgccatcctgtctatcatttggcgagtttcccggctacaaagacgtagttctggacagagccagtctcggaaccatcattcggcaggagttaaagtcgtggagaactgcactgagtattgtcaaaggcatctacctgctgactgatgttgatggcgagaagttgtatgttggccaggcaaacggcaaaggcggaatatggggaagatggaagacctactttaaaacgggtcacggcgggaatgctggcctgattgaagcgtttggaaccggcgatgaggaaaggctcaagaatgtcacgttctctattctggaaatcatggacattaacagtgacgcctgcgagataaaccgacgagaatcacactggaaacgcatactgctttctcgttcagtaggacacaataggaattga

SEQ ID NO: 86061 - DNA, 318 bp, Citrobacter koseri
atgttgaagctcacggaagtctacaaaacggcagtgatcagcaccgctcatgtaacggcagcggattcagaacggctacccattgcctgcttcgacccacttactgatcgcgggttgaattgggtacacggtacacagtacggctggattgttcgtgctggaatgcgagggaatgactggaaagaagagctgcgtgagtatggcatttccgaagagacgatctctaacatacagaccatagtggatgccggctttgacgcggttcacttcgattgcgacgccgagctggtggacggattacctggctgggactggtaa

SEQ ID NO: 86062 - DNA, 267 bp, Citrobacter koseri
atgggtagcaagaattccaaatatgtgatcgtctataggggcgaagcactcgagcacttaatacctggacagttcgttttcttccaacgtaaaaaagaatacggcgatggattctggcttggtaaaacgcatgaggacgggttcgagtttgtgctggaacaacccacttcacttagttacgggcttgcgtatctgatcagtctgtctagtgttgaagcgagacatatggagtttgtggacgacatagatgattttaaattgacctaa

SEQ ID NO: 86063 - DNA, 204 bp, Citrobacter koseri
atgaagacctatgatcgcaaccgtaacgctatcactaccggcagccgagtgatggtggcaacgaatggtgcaacgggagtcatcaaggaaatctgcggagaaggcaaatcagaagaacaattacgccgttctgactgcgtgtctatcgaaggtgtggagggtctgttctgcccaatggatttagttcgcctggggttccattaa

SEQ ID NO: 86064 - DNA, 699 bp, Citrobacter koseri
atgaaaaatatcctactggcatcattgttggtggcatcgccagctgcatttgcagccagcttcgactgccaaaaggcttcgacagaagtcgaacacaaaatctgcgataacgaacgcctgtcaaaattagatgaacaacttagctctacctattctattgctctcaaagcgaacccgggggatgcagacaccctaaagacggttcaacgtcagtggataaatatgcgtggaaaactcactgatgataaggctcttgagctggtttatcttatccaaattaatggactcaaggggttggatggttcggccagcacagcggtggtcaatgagacaccgaagccggtgcagaagcagcctgaagttcaggaaaagacaagcaaggcagacgcaaagcaggctaagagcggtgatgagctaactctggagtcattccgagctaagtatattgaagttgacggtgaatactacagcacgacatcccttcccagagggagttcgttcttattcacctgcgccagtcgcattgccgatgaccaagttaatgtctggaagaagtacgcagcaaaagagggcaagatcgaccttttctttgagcttgagactcgaatacacaccgcgatgctgaatgccaattttcagaagctgaatagtgatttaactaaaacaggcatttgcgatctgattaccgctgttccgtaa

SEQ ID NO: 86065 - DNA, 357 bp, Citrobacter koseri
atgtccagtatttccaaagcccatatgtttgccgctggcgctcatggcggcgttggccagaaaagaaaatataccggtgaagactacatcaaccacccggttgctgtccgcgagactgttgcctggcatggtggaaccgtggagatgcagatcgcggcgctgctgcatgatgtggtcgaagacacccatgtcaccatagagatggttcgtgagcacttcggtgagcacgtagccgaaatggttctggctctgaccaacattgccagaccagaagacggcaatcgaatacagcgcttcatcatcaacgtccgggagctggagcaaaccccaaataccaataccttgagcgtatcgtga

SEQ ID NO: 86066 - DNA, 372 bp, Citrobacter koseri
atgaagttgggtaatgccgtttcgctgttttttacagcattactggaaggtttcaattatcgcttttgtccggtctgggataaggcgctggatacgcttattgaggaaggaacgctgcttgaggtgcgaaatgggatcgctctgtttgagcgcgatgcccagctatatgaagtgttcgtcggggctggcttcaaccacttcgggcatcttattagcttgaataccaaagccatcgacgagagcgtcatgcgccgtccgtcgttccgtgtaatggataagctgcaacgtcatgtagatgccgaattactccgcgtagccaaagaaaaagaacgagagctacagacgatgattggatcgcatatcgctgagtaa

SEQ ID NO: 86067 - DNA, 282 bp, Citrobacter koseri
atgaatgatctgcttgtcgagcgagtctccgcttttgttaagtctccgctggataatcccctcacccgtggcgagcagatggagttggcaaggtggtttctgcatatccatgagcagatggaagtttttaaacagttgccggatctgcccattacagacggccatgttcagcaggtgattaacagccacgaaaaaggctgggcgatgattgtgccgtgcaaaattacctacgagctggctaaggaagtgcaggctaacagagcaaggagtaaggaagagtaa

SEQ ID NO: 86068 - DNA, 690 bp, Citrobacter koseri
atgagcggaaaatcgagaattacattcgccagcgttaatcaggcgaagctgccatttaatttagtgctacaggggaacgcaggaacgcctgccggaaccatcaaaattgacaaggagcttgtgacgttcgaaggtaactttgatgaatcggcgcaggtttttatcgaacatctggcacgccgttggagccagcagtggagagaccttgagaaacgcgccaatgagtttgaccggttcatgggcgcaatggacacagcaaaagaggctctggctgccggcactccgttagatctggagtcgcttttcaaaggagagatggcctctgcgatgttcgccaccatgttcgcaggtgagttcgtccgcagcggcgccagaaattacctggagctggggtacaacgttcctgaaatgggcgagtttaccgtcaccatccagcgtaaagaaggtaagacgccaggcgaacgcatcgctgaacttgaggccgttgtggatcagcgtaacggcgagtgcgtccgtttgatcaacgaacgtgatgcgctgcgcgaagaacagctgaataaaggctcgaacacacgcgcggccgcagacatctacttccagttggttgaggaatgccagatccctccaggtggctctttggtcgagtacgttcgcgaattgcaggagaaagcagagaggtgcgcggcatga

SEQ ID NO: 86069 - DNA, 1686 bp, Citrobacter koseri
atgaatacagccctttccatcattgacgctatcaccccaaacactgatatcgactaccggcaggaaatgaacgtcatccacgaaattgtggccgagtgcgagaaagagatcgcattcatgcatcaggttcacgacttcgtttatggcgacgaacgccacaacatgattaaccgcctgctgcgactcaaccaccggccggatgacgagcgcacacgctttaacagagcctggctggacaaagtcgacctggaatgggtgaaacagaatatctgggccgagtactggaagaaggtcacggatatgacaaacgttctgctgatcatgccagcttcccgccgcgacgagtggcgtgagcagtttatcgagggcaagcaggagaccatcaggactgacagaaccggctaccagatgaaggttaaggagttcgttggtgtgccggagttcaaagcagaaacggtcatcccaacgatgctcaatctgctgaatgacaggcacaaatatctatctgagcgcgtgtatggcttgtttaaggcgctgagtcctgcccacaagaccaataagacgaacggctttagcgagcgtctgatcatcgccaactgcatttccgagttctggcgggacagcgtcagcgtgaactaccggaaagaggactacatcgacgacctgcgcgtcatgcttcatttcttcgctcacaaagagttcatcaccatcaaccgcacaactgagatgctatcagctgcgtaccgggcaaacgactgccagaccggtgactggatgaatgtcgacggaaacctgatgcgtgtgaagatgttcaagaacggcaacgttcactttgaaatacatcctgacgtggcctggaagctgaatgaggtgctggcttacagcatgcctgcagcaatcccggcgccatgccgtactgcgcccaaaacacgggcaccaaaagagttcgggttaatccagaagacgatctccgagccggttcgtaccgcgctgcgcgacgggcgattcagcaaagacaaaggcgtctggtacttttctgattccaacctccagaagtcgcaggtggaagagcttgagcgcacactgaacttcattggcggcgtacaggagaaaaagcactggcagttcccgtatgagataggccatacgctcaatacgattgtggccaccggcttaataccggatacaaaatcacaccagttctaccctaccccacgtttgatagcggagtacgttgccagagccattgagctgaagccaggtgagaagctgctggagcctgaagccgggcgtggagatctgctggcctgcatcgacgccaatccggaagacgttacctgcatagaagtcgcacctctcttcgctgatatactgcttggcaaggggtacacaaatacggtctgctgcgacttcatgaagtggtctgaggacaacgcaggctatcagttcgacaaaatcgtcatgaacccgccctactctcttggccgtcacagagagcatacgctggccgcgctggagcatcttaaagtcggcgggcgactggtggcagtactgccgggtgatgcgccagttctgaactggatgacgctggataattacgtttatgccaaagggaagtcgtttactgacgagtttgaagacaccggaatcactgtcagcgtatacgttttcaaacgcgcaaaatga

SEQ ID NO: 86070 - DNA, 573 bp, Citrobacter koseri
atgtgcgaaaaatgcaaaaaaactaatgccaaagttgaaagcgtgattaaaaaagttggtgcggccgaactggttgagatcatgggtcttgtggttggtcacgaagacgacgcctcccctatcgaccgccttttcagcgttctcaagttctcaagcatgattgatgatccgattgaaattgtgatgctggcgcgtcatttcggcgaagcgtatctggaagagaaagaacgcgccgacaaacttcaggcaacgctggaaatggtaagcaagccgaagtgctcaccggattcagtcaaggcagatgaaaccaacgccagcaaagatcgtgaaatcgccgggctgaagtcttctctggcgatgttgctggccgccttcaaactgatgtcttcccaggctgggttcaaaatgcctgagctgaacagcgacgatccgatagccgttcgccatctgctgggggcaatggccgaccagcttgacgacaccaagagccgtcttgaagacatgatgcgcgagctgacccatcgccacgacctgaacaaacagccgcacaaaacgcagcacgtacaccactaa

SEQ ID NO: 86071 - DNA, 843 bp, Citrobacter koseri
atgtttgagatgactactttatcgattcccggtgtgctcccggacagaccattgatgtcctcaaaagaaatctcaaagctgaccggtaaacgacacagcgacattcttcgcgacatccgtagcgtgctgaatgagctgtatgccgacgattaccataacgcaaaattgcgttatgagaaaaatcagttacttacaattgttgaaggcattgttgtcaacatcgattaccggggaatggaaggcgagtacatgctcgaccgaaagcataccgatgttctcattaccggctactcgttgaagtaccgcgctgctgtcattgagcgctggcatgagctggaaatgagtgtttcaagcggggcgctttacggtgcctaccccagtatcccggaaaccttttcagaagcacttcgactggcagccgatcttgaagaacagcgtgctgatcttgagcgcaagctgtcggtggcaaggccaaaagccattctcatggacaccatttgcggcactgctgatgagctttatgggctgaatgaagctggtcgcattctcggaacgtccggggctgttctgggggcgctgatggactcgctgggtgatgtgtacgttaagcgcaaatacaccactgttaaccgccagttcctcaagatcttcattgaccgcggatatggcaaaaacgttgtcatcggaaacggacgcaaccaggccaagttcacctttaaaggactttgctttgctgccgtgaagctaattgctgccgggaaaattaccgccagcgccattgagtatgagccttgtcgtgagcatgtcgaacgcgaaatgaaggaatccaaacgtcttcattaa

SEQ ID NO: 86072 - DNA, 189 bp, Citrobacter koseri
atgaaatggagcttccagaaagtcaccgcgatgattgttggcctcgccatttttctgcttggtggctggatcatgaatctggtgaaactcgtgaacggtggcgatcttcagtttgatgcaggaatgacacttgcgcgtgtcgtgggaattttcgttgttccggtgggcagcattctcgggttcttttga

SEQ ID NO: 86073 - DNA, 495 bp, Citrobacter koseri
atggcacgtcaaacgcctttcacttctttcaataaacgtccccgttcaattcgcctggttctgaccgagctgtttagcggtcgtgtttctgcacgccttgcggaactggaagaacgagtgtttgagctggagaagcgcattgatgcgcaagctaccgccatagcaaatctgggtgcgacagtaggcatggagaaggtgcgtgattccgtcgcctctcgtgtgttgcgtgaatcccagacgcacaaggacagttctcatggaaaattttcaacgaaatcgactgaagccaatggcctacggagtaattttagcaaccctggcagcggtagccgtaccagccggtcagagtctgttgataccggacacaactacttccaccacaaccttgcagacgacacccctgccagaacgacctcctgtctctctggatgggatgctgttggacacgattccaactcgacctgcaattccggatcttccttctgctgtgactga

SEQ ID NO: 86074 - DNA, 609 bp, Citrobacter koseri
atgacgaccaagaccccagcccggcaacatactggctgccgcacgaagtccaaagccagataccaaacccaccagcaatcccgtaccaacttcaaaacccccgtagtcgagttcaatccccagctcaaaaccgtaaaagtattcagtgatggctcttgcctcaaaaatccgggcgggcctggcggttacggcatcgttctccagtatcgaggtgaagagcgcgagctttctgagggtttccacagcacgaccaacaatcggatggagatgatgggcgccctgattgcgctggagcgtctgaagtacccctgcaatgtgatcctgcattccgacagccagtatcttaaaaacggcatgacgctctggatgaaaggctggaagcgtaacggatggatcacgtctgagaagaagccagtcaaaaacgtcgatctctggaaacgtctcgatgcggccgccagccgtcacaatgtccgctggaagtgggttaaaggtcatgccggtcatcgcgagaacgaaatgtgtgaccgcctggcgaagatcgccgcctactccgcagctgatatgcctcacaagcgtgacattggatttttgtcacaaaatgataggtaa

SEQ ID NO: 86075 - DNA, 231 bp, Citrobacter koseri
atggtatacccgacgaacgtcgtagcgctcgttgagagcgattttctggccaaagtgcgcgacatgatgaaagatcgcgataaggctttcagtctctacgaatggtcgctcaaatgtcttcattcaggcgagcacaaagagctggtggagcagctgttaggggaactcatcaatgaggtgtttgccctgaacgtccagcttcatggtcgagaaaataatcaatcaaaataa

SEQ ID NO: 86076 - DNA, 594 bp, Citrobacter koseri
atgatcgcagccgaaaaaatcaaaaagcgagagcgtgatgcctctcttcgcgacctttggcgcacaccgcagtggttgtttgtcgccatccaacgttacataggcgtaaagttcgatgtggacgtcgcctgcaacaaagataacgctctcctgccgaactttatcggtgttgagcgtgatgcgctcaagtgcagctggggagaacctggcactgtggcgttccttaacccgccctactccaaaatcaccccctggatagacgcagccatccgcgagcaggcgcgtggagtgacgacggtcatgttgataccacaatccctcgatacgcagtggtacgagcgtgcggctgaatgcgccaacgaaaccgtcatcttgtctggcggccgcgtggcgttcgttgagccagatgttgaacttgggctggtggaggtgaacatcaaccctggtggcagcatgttgcttatcttccgtggctactgtcaggaagctgggcacaccatcagcaagataccgctggcggtgatgaaaaagctgggtggttatgatcctgccaatgttgtcaggaagaagagaccacgtaaaaaggcagcgtaa

SEQ ID NO: 86077 - DNA, 843 bp, Citrobacter koseri
atgagcgcagttacaaacactgttaaaaacgatgacctggacgaactgactgcaatgttgcaatctctcgacgaaccagtgcagaaagctgcgaaaatgagcggcgtcgacgagatcgacgatcttctctctggtctggatgatgcaatcgcaaaaccagtcgaggcggtggcggatgaagtcatgaatgccagctctaccggcgatctgagtagcgttctggaagagcttgagattgagcacgaatcggtgaaggtcgaggaaccagagcgtgaccttgttgcggagatagtgaacgagccagcgcctgaacttgacgctcgaagtactgagactaccggtacagatccaacccctttaccttcagtggcgtcagagcctaaacctgaagaagagcagccaaaacgccagaaggcaaaatcagagcgtacccctgccaaacctcgcttcacgctggaaggtaaggacgaatcgttctatgcgacagccggtctggaaagtgagagctttactgccgcattcgaaggggcgccagtcaaagcgaaagacaagatcttaaaccttttgaactggtttagtggtgggccggaaatcagcgtctacacggtaatcgcaatgcgccatatccttgacgcgaacacggcgaccagcaatagcattaaactggcgctaatgagcaacccggagaaaccatatccgctcaacaccgcttcgactcaggctggccagatgatggctgtgtttccagctactggcattgccaccagggaaggtggaaatctaagccttaataaagagtcgccgatcgtcaaaaaattcatagcggagtattccattggatga

SEQ ID NO: 86078 - DNA, 558 bp, Citrobacter koseri
atgaccacgattgtcggtggcgtcgatattgagtccacagggctggacttcacatccggccacaaaattatcgaaatcgcgataacccgttatgaactggaaacccagaagcacatcgacagccttgagatgcgcttcaacccgcgtcgcagtatcgatccgaaggcgcaggcagtgcatggcatttcactggaagatctggcgacggaaccgctactggctgaccacgcaggcaagattgctgcgtacatgggcgcatgtagcgcgttagtcgcccataacggagaggcttttgaccttccgttcattcgccacgagttcggtagctatggggtgaaattgccagatatccctctggttgactccatgctggatggcttgtgggctaccgaggatgggaagcgcccacgcctggaagagctggcgttctcacttgggttcacttacgaccgtgagaaggcccacagcgctctctacgatactgacctgatgatgcagtgtttcttcaaagcccgagagaaatacggcttcttcaaactcccattcgaaagcgcctga

SEQ ID NO: 86079 - DNA, 420 bp, Citrobacter koseri
atgatagacgaacttcccctctcggatgaattagatcgtaaagcgattgaagcactgatccgcattgctgacgaacaatcccgctctttgatgagtgaacgtgaagcacgtctggctatccgcgcagtgtttgagtccgttcaaggacttgttggggaagaggttggcgaagccatcaatgtggcgatgtcgcagttcaatggcggcaccaagcgccctctgtttcctatgcacctcaaactctcaggcggtacggttctgtacgtgtccgtttgcctggagaccaaccaaatccagatcctcaacacatcaacgggcgaatggcgcgagccggtcgtctgcgaaagtggcgaggacgcactgaaaaaggctgctcagtttgtgcgtggcgcactgctgaaaggcgcgaagaagctgtaa

SEQ ID NO: 86080 - DNA, 645 bp, Citrobacter koseri
atggattaccggattggaatcactggcgcacagggcagtggaaaaacaaccctggcaaggtacatcgatgcgcattatggcattccgtatgtggatgccggcgttggcaagctgatgagcagtctgggggtgaaggttggcgagcgtttgcccctttacgaacgtcttcaggttcagatggagattgccagacacatcgagatgatcacccgcggcgttgaaggttttgttatcgaccgcacgccagccgatgtcatggcttatacgcttgacctggtcggccagaccaacgaagaccgctgcatcgagctggctctcgacattgagcagttttgccacaaagcggccatttccaacttcaatgctatcgcgggtcttcgcccgggcgttgagctttccagcaaagatctcgcgcgtccccagcgaggatcgcttgaccgtctctatgttgctcgcatcgatgcacttatgtgcggtgagctgacgaaaatcaacacgcttccccaaaccggcgatctgcaggtgttcgttatttctgaaaagtgccgcacggttgaagcgcgagccagatcggtattgcgagtgctggacagagccgctgaaaacatcgagcgccgtataacaggacgagtgaccttccactga

SEQ ID NO: 86081 - DNA, 477 bp, Citrobacter koseri
atgaagatgattgcagctgtcggccgcaactatgaaatcggcattggcaacgaacttccctggcgttgcccgaccgatctgaaactgttcaaacaactcaccaaaaacgccactgtcgtgatgggacgcaagacgatggaaagtctcaagcgcccgctgccagagcgccataacctcgttttgacgcgctctcgtgggtatatccccaatgggttctaccccgctggcatcgatgacgttttgagactgccagatccggtctgggtgattggtggcgggcagatttactcgctctttatgccacacgtagaagagatctggctgtcgcatattggcgtggatgtgccgggcgcggatgcgttcttcccggcgccaatgatgcgttctttagggttcgtaccagtcgaaacggcttatacccaacgtgcaaatgaggatgagcctggctttttgcagatcgtatacagaaggtcgtaa

SEQ ID NO: 86082 - DNA, 414 bp, Citrobacter koseri
atggccagagggatgtatgtgttgtgtgaaattgagggtgtgctggcgagagccagccatcgcaaagcagtgtctgatgcggatgcaggcgctctcattgccggtgatgaactcatctttcccaccagccgcatgttgcgtggttttgctcgctccggtgctgaagtggtgcttatcagtagtcgtccggaagcgctcgaaggcccaaccaaacgctggctgaaggacttcggcattgattatgactggctccatctggttccgcgcggtgtcagttttgaaacccatatcaagcgcacgctggcagagcacaaaggcgacttacttatcgccgcactggttcatgatccgcgtctgcgttctgcgctggcagattctcaccagcgaccaaccatctatgaggtaagccaatga

SEQ ID NO: 86083 - DNA, 1104 bp, Citrobacter koseri
ttgtctatcctactgaatcgagactttacgaacggtcagtttgccagtggttcgtatgccaaagtggttgaaacggtgctcaacactggcgttcacgcgggtgatcgcaccggaaccggcacaaaaagcgtttcatatgtcccttcctactacatgctaacgggcggctctgttccacttatctccggaaaagccgtcaacctgaagccgttactggttgagctggagtggtatctcaaaggaacgggcaacatccagttcctgaaagacaatggcgtcaaaatctgggatgcctgggctgatgaaaatggcgatttaggcccggtctatggcaaacaatggcgtcggtgggaagatacccgcatcgtgagccatagcgagtatttgagcaaaatcgacacgttccgtgagcgcgggtacaaggtcgaggggtatctgggcgtaagtgaagatcgcgttgtgttgtcccgtgaaatcgaccagctacagcgtatcgttcacacgcttcgcaccaacccgacagatcgtcgcatcctgctgaatgcctggaatgttggcgaactggaagacatgaagttgccgccatgccatttcgtgttttcactgtggagtcgcgagctggactttgagacccgactgacgatggccaccgacattggcattcagcacaaccgccacggccacgagtccatttacacccagatgctgtgtcttctggaaagagatggcggcattactgagaacatgctggacgagctgggcatcccgaaacgcattctgaactcatgcctggtgcagcgcagcgtcgatacctttgttggtatgccgttcaacatcgccggttacggcattctcacccacttcctcgcgaagatcaccggccacatggctggcgcattcgtgcattttggctttgacgttcatctctacgacaaccacatggaaggcgttgaggagctgatgaagcgcgagccgcccaaagagtccgacccggttgtcatttttccgcatgaatgggccgaactggacgacttcaaatgggaaggtgtgcaggtgtgcggctacagacctcttccgtggatcaaggttccagtggcggtgtga

SEQ ID NO: 86084 - DNA, 870 bp, Citrobacter koseri
atgaaatttacgaaactgaccgatcatctgaaacttgccgcagacaaactcgtgggatttaagccagagccttacgagttgaatcccggttttggcaaggcaacggaaagcatctacctgatggttgaccagttccacacactgtttcagcacccacgccgtgccattccagatcctgcactactgcgtctgcgtgccaagctgatccacgaagaagctgttaccgagggcatcccggcagctaaaaacggggacatgacggcgctgctggatgcgatggctgacttcctttacgtgggcgtcggcacaatggtggccatcaaaggcggtatctctacaggcatgagctactacacccaagagcagagtgttgatcgcttcatccacaccatcatggttccaggcaacacggtctttgacgacatggctatcccgtttgaagaagcaaaagaagctgcattaatgctgaatgcgctggctgacaaactcgaagcgaagccgattagcgattccgaattggtgcaggagctgcgccgcgtgatgaataaaatctacgttgcctgcatgatgacctaccgcctggctgattttctcggtatcgatattgttgagctggtggcagaaatccatcgttccaacatgaccaagctgtggccggctgacgccgaagagcgtcgtgtggcggtagagaattgcaaatacgacaagggagatctgggcttccgccacgctgaagggactgacatgatgattggcttcagagtttctgatggcaagatcctcaaatccccaacctacagcgatgtggatctgactcgctttgttgagaaggcgaaaacctcatctctttacgagatggtaaaaaaataa

SEQ ID NO: 86085 - DNA, 1143 bp, Citrobacter koseri
atgacttattctactttccgtttgggcgctaacgacgcaacgaaggaacctatgttcctcggccagtctgtcaacgtagcacgctacgatcagcaaaagtaccgtgacttcgaaaagctgattgagaaacaactctcgttcttctggcgccctgaagaagtcgacattaccactgaccgcatcgacttcaataccaagctgcaagagcacgaacgccatatttttctgagcaacctgcgttaccagacgctgttggattccgttcagggtcgcagtccaaacgcaacactgctgccgctgatctccattcctgagctggagacatgggttgagacctggtcgttctctgagacgattcacagccgcagctatacccacattatccgcggtatggtggatgacccgagcatcgttttcgacggcatcgtcacggacgaagagatcatcagccgggctgtaagcatctcaagcgaatatgacaggctgtacgaaatgacctgcgctcgccagcatcttggcgaagacgaatttgaacggctgtatgtcagcgagtttgatggcaagccctaccctctccagcgccagctgttccgaacactggtgtcggtgaatgcactggaggcgattcgcttctacgtgagctttgcgtgtacgttcgcctttggtgagcggaagctgctggagggcaacacgaagatcatgcgctttatcgcgcgtgacgaggctttgcattgcgaaggtactgaacgcatgatccgctttatgcgtaccggtcgtgaaggtctgatgtggaagatgattgccgcagaagaagagagcttcatctatcagaccatgatggacgtggccgggcaggaaatgcgctgggctgactatctgtttaaagacggctcaatgattggcttgaatgccgacatcctcaaaagctatgtgaaataccgcaccaacctggcaatgcgtcgtcttgggctgcgaccgctgttcccggaaatcaaagacgatccactggtatggatgaataaatggctgctgtcagacaccctgcagatcgctccgcaggaagctgaacaaagcaactacctcgttggccagattgactccgctgtcgatcgctccggcctgagccagttcgcagacctttaa

SEQ ID NO: 86086 - DNA, 2316 bp, Citrobacter koseri
atgataagcatcgtaaaacgtaacggttccactgagccgttgtcagaggaaaaatacaaccgcgttgtgatgtggggagtcgaaaacattcgcaacgttagcgcgtctgctgtcgctatgggcgctgctgccagcattttcgacggaatgaccacctgccagctgcatgaggcgctggtgaagtccgctgccgatctgatctctccggaaaccccgaactactcgcaggttgccgcgcgactgagcctgttcaagatccgcaaggacgccttcggccagtatgactacccgaatttctacaatcacatcgtcagcaacgtcagtcgtggcgtttacgatgaagaccttctcaagtactactctcaggaagaaattgccgagctgggcgtgtacatcaagcctaagcgcgacgaatacttcggctatgccgccaccgtgcagctggcgagcaagtatctcgttcaaaaccgtgtaactggcgctatctacgaagggccacagcaactctacatgctggtcggcatgtgcctgttccagaattgggaagatggctgcgccggtaagacgcgtctggagatggttaagggcttctacgatgtgaccagtacattcaagctgtctctgccaacgccaattatggccggcgtgcgcacccctactcgccagttctccagctgcgtgctgattgaagctgctgatagtctgaaaggtattagcgctgcgtcttccgcaatcatcgactacgtgtcacgtcgcgcgggcattggtattggttttgggcgtctgcgtgcgctgggcagtgagatccgcaatggcgaggccacccacactggcgttattccattcctgaaacacttccagacagctgtgaaatcctgctctcagggcggtgttcgcggcggcgctgctacagcgttctatccgatctggcacttggaagttgaaagtctgctggtactgaaaaacaaccgtggcattgaagagaaccgcgttcgtcatctcgactatggcgtgatgattaaccgtctgatgtatcgccgcctggtgcgcaacgaaaatattacgctgttcagcccacacgatgtgccgggcctgtacgacgcgttctttgttgatcaggacaagttcgaagagctgtacctgaagtacgaagccgacgagagcattcgtaagaaatctatcccggccgtcgacctgttctctacgctgatgcaggagcgtgcctccactggtcgtgtttatattgccaacgtcgaccacatgaacgatcacggcgcattcgttccggaaattgcaccggtacaccagtccaatctctgcatggagatcacgctaccgaccaagccactggcgttcactgacgatccgaacggggaaatcgcgctttgcactctgtctgcgtttaacctgggtgcgatccgcacgttggactcactgaaagacgtggcgttctacgctgtggcggcactggactctctgctcgactatcaggactacccgatggctgctgcagaaatcccggctaaagctcgtcgtagtctgggtattggtgtgaccaactttgcctactatctggcgaagaacggctttaactactctgacgctgcgggcaaccagctggtgcatgagaccttcgaagccattcagtactacctgctcgatgcgagctgccgactggctgaagcgaaaggtgcatgtgactggttctcccacaccaaatatgcacagggccagctgccagtcgaccactatcgcaaaacgctggataccaacccggagacctctttcgagctgaaaatgccgtgggaagaactgcgtggccgtatccgtgagcatggtctgcgtaactccactcttacagcgcaaatgccgtgtgagacgtccagccagatcaccaactccaccaatggtattgagccgccacgcggcccggtgtccgtgaagtcttccaaagacggcatcgtgaagatggtcgttccggacttcgcgcaactgaaagaccagtacgagtacctgtgggatatgccggataaccgcggctatctgactaaggtggccattattcagaagttcttcgatcaggccatctctgcgaacaccaactacgacccgactcgcttccctggcgataaggttccaatgatgaagctgctggaagacctgctgtttgcgtatcagcaaggtgtgaagacgctttattaccacaacacgcgtgatggcgctggtaagcgtgatgacgacgatcaggtgtcagaaccttccgctgcggaggttgttgagccagaagatgagtgcgatggcgcgtgcaaaatctga

SEQ ID NO: 86087 - DNA, 570 bp, Citrobacter koseri
atgagtaaaaccattcgtgtggtcggcgtcgacccttcaatgagcaattttggcctggcgattggcacgctggatctggaaacggataagctggacattcatggcctgacattggtggaaaccaaagctggtggaaacaagaagacggttcgcgttaacagcgacgatctgcgccgcgctaacgaaatctggcgtaccgccaagcccataatcgagcaggctcatatggtgttttgcgagttgccggttggtagccagtccagtcgcgcacaaacctcatacggcatctgcattggtgtactggcgtgcgtggataagccactgatacaggtcacgccaaacgagattaagcactatgtcgggaataagctgaccacgtcgaaggaagagatcattcagtgggctacgcagaagcagccaaacgccccgtggttgcgccggaagcaatctggtaaggaagtgctggtgaataaaaacgagcaccttgcggacgctgtcgcgtcgatttacaccggtatgcaaacagatcaattccgtcaggttcgcgatgttcttgcaggaattttataa

SEQ ID NO: 86088 - DNA, 747 bp, Citrobacter koseri
atgtcgtttaacttgagccgcacgcagtttttgcagatgtttgccgtgatgcagtctataaagctgataaaccaccatacggcaaaagcagctgcgcctgcacttttgtggaaaaacgaaaacatcaatgacgaccagttctcggtattaaccagtctgttgtcatcgactccgttgatgccgagtttgtctatgctgccgtcaggaagcactgcgccgatccttattaatccatttacggaaggtggatatctcccacattctgggccggggttcgttgtgattcctgaaaccggaacgctgaacatccaagaaaatgcgctcttcaatgcgatggagacgcacatcagcaccgcattcactaatctgattcgacacgctaacgcacgcgcggatcacgttgcaatgcctggtgctgctttcgccagcttctctgttgactatgaccgacacgcgccaatttcaaagcgggcgaaactctgcttttacgaggagggatgtgaagtagcggttattgaagttcttctcccccatgtattcagcgcgaatgaaacggctgcacgccatctgatcgacatcatgcggcatttcatcggccagagcatgattgatgcagatattgctgcaggcgttctaaccaacgatagcattcatgttgttagcgacattccgaagccgccaactcgcgagccggagaagacacttgaacagaaactaatggaatgcccaacctgggctacgtggtaa

SEQ ID NO: 86089 - DNA, 1917 bp, Citrobacter koseri
atgaaatttctaaagctccaggttgagaacttcatggcgttagccagcgccgaagttgagttagaccaacgcggtctggtgctcattcagggggttaacagtggcgactcttccgctgccagcaatggcgcgggcaaatcgactttgatgaacagcctgatgtggtgtctgtatggcgaaactgcgcatggcgtcaaaggtgacgacgtgctctctacaggccacgagaaaaactgtcgcgtgatggtgactgttgaggatgaaggaaagcgttacgccatcattcgccaccgcaaacacaaagagttcaagaaccggctgatcgttcgtggcgaagacggtgatatgaccaaaggcaaagacacactgacgcaggagttcgttgaacgcctgattggtgcatcgaaagaggtgttcatggcgtccatctacgccagtcaggaagcaatgcctgatctgccgggtatgtccgacaagaacctcaaaaccatcgttgaagaagccgctggcgtcgaccggttaacgcgagcctatgccattgctcgcgagcgtgctaatgcagctgccgcacgcatggatgttaccaaatccaaaatggacgcctgtctcacgcttatcgagaccgcgcagtcagagattgaggcggccaaagcgtcctctgatagttgggagcgcgatcgcggcgaacgtctggacaaggcccgcgtcgatttggctggcgcggaggtaacgctgtctgaagtcgtgatggaaattcgctcgctgccggaacagatccgggatacggaaaacgcgattgctggcgaacgcagcaagctggcctccaaagaagagcatgacgccaaactgctgaaggtgcgcggtgcgattacggagatccgctcaagcatccgcacttcagaagcggcacagaacgagtccatgaaccgtgctcgctcgtttaaaaccaaagcagaagaggtcaacacaaaggtcggagcaccttgtgttacgtgcggaaagccctactgcgaagaagatttgtccaccgtgaaggagagtttcattgaacaagcgcgtaatgagatcggccaggcgcaggcatcagcagcggcagtggctcaacacaaagctcgtcttgagaaagcgctcggcatcgagtctgcactggtcgcagccacacccgacgtctcagaaatcatcgccagaatcgaacgcctgaccaatgagctaagtgcgctgcgtcatcgagaacgtgaagttgtggccgtcgaagcgatggtggcgcgggcgcgtactgacgtgaatcgcatcatggcagaggtaaacccatttctggctgtcattaagcgccatgaagacaacctggctgccaataaatctaatcatgcagtacttaaaaaagagttaaaaagcattcaggaacaggctctgttgctggagaaagctcgccaggtttactccccagcaggcgtgcgttcacacatcctgacgtctgttacgcctttcctgaacatcaggactgcggagtatctcaacacgctgtcggacggcaatatcgttgccgaatggtcgacaatggagacaacgaagaaaggcgagtatcgcgacaaattcaatatcagcgtaaccaaaacaggctccagcaaatccttccagacgttgtctggtggcgagaagcgtaaggtacgcattgcgtgctctcttgccttgcaggatctggttgccagtcgcgccagtaagaatatcgagctgtttatcggcgatgaaattgacgacgcgctcgacactgccggtctggagcgtctcatggggattctggaagccaaagcgcgtgaacgcggcacagtgatgatcatctcccacaaagagatgaaatcgtggttccgggaaaccatcacagtcgaagtcaaagagggtcgcagctatgtcgtttaa

SEQ ID NO: 86090 - DNA, 162 bp, Citrobacter koseri
atgttccacaagccctacccacccaacggaaaccctgtggcgttttatctgggaagactgagcaaacaaggcgtactgaaacgccgatctttcccagcccacacggagtttcaactgcgaaaaggccagcatttgaatcaaaaagttagaggcattgtatga

SEQ ID NO: 86091 - DNA, 1086 bp, Citrobacter koseri
atgacattgccatacggggtgatatcagatccccattatcatcgttgggatgcttttgcgacaacaaacgctgacgggctgaactctcgactggagatccaactggacgccacgaaagaagcagccaaagccatgaaagctgcgggctgtaagtacatgctggtggctggtgatactttccatgttcgtggtgctatatcaccttccgtcctgcatttcgtgactgaaacttacgagtggatcatcaaagagttgggcctcgaagtggtaatgctggccggcaaccacgacctcgaaaccaacgattccgtatacagcgccaatgcagcggcctctctgcgctcaatcggtgtggaaatcgtctgcggcaaacgtccccattccatcaaaatgggcgacgttaccgtccacttgattagctggcgtaacaaccacgcagagcttatcagcgacctcaaaacactgcgttccgggcttgatggcgacaaccacgatgttgttgtgcatacctcgatcaacaaagcgatccccaccatgcctgatgtcggcatcgacgcacaggaactgaaagatatcggcttccgtttgttgctgtccggacactaccacaaccacaaagaagtgctgcctggagtggttagcatcggggcgctgacgcaccagaattggggcgatgttggctctctggctggcttcatgatcgtcaaccctgacggcacattcacccaccacgaaacctccgcacccaagttcgtcaaccttgaggacgatgtggaagacgaccaaattcgcggtaactacgtgcgcttccgtgccgttgtggagagcgatgaagagggcatcaaaatccagaacgtcctgaaaacaatgggcgcgaagggtgtcgtctgcaacttcatccgcaaggcatcgatgatggaaggcactgccagtactgcggagaccagcaaaatagacagcctgggcgagtccgtcgcggcgtactgcaagatcgttcacgacactgacggcggcttcgacctgagcaagctggacatgctgtgtcaggagatcctgaccgaagcggagagtgcggaggcaatgtga

SEQ ID NO: 86092 - DNA, 495 bp, Citrobacter koseri
atgagtgaattttattcaagggcagcaactgtggcagacatgccatttatcatgggtgagttcgaagacggcgcacgcaagggtcacttctacgaagagatcctcacatcaaagggtggtaaaacctttgagaagcagaccaggctggccatccagacgaacgagcagggccaatactccgggcattatatctacatcctgctgcgccgttctgatgacaaaaaagcagggctaatctggttctgtgccgcactcgatccaaccggtgcgccacgacttgaactccgtgccgtcagtatcgtcaaagagctgcgcgggaaaggctatgggtcaatgctggtgtccgacatgatcgattcaaacccgagccagccgatgatggcgaagtgctacgtcaaatcctcgcaaatggccgacatgctaaaacgcagaggttttcaccttttcgacacgtcccccaaaggcacgcagatgctgtttcgcgatccgaagtaa

SEQ ID NO: 86093 - DNA, 645 bp, Citrobacter koseri
atggatctcaaacgcacgcgctgggttcgccgtcttgaagatggctcctacaccattgaatcgaacactagcctgaacaaacagaagttgctctgcgacctgtgcggcattgcgtcgaagtgcccgattaacgaaacccggctcaaactccacgacgccggggcgcacttccacctgaacagctgcatacgttacgtgccactgctggcatttcgtaaaccgatcatcggattagacgcaccctacttcaacacattccgctctggcgtaacatggcgagaccgggtcgaacctggcaagctcgtttgtctggttgaggctgatactggaaatatcatccggttcgggagagtcgataaggtctactccggcccggtggatgagatgctgcggaaacacagccggtttaaccatctctgcatgggtggagagaagatcgagaaggttggcgaagtgatccgcaaatcctacggacacttcctgaacgacgacagccttcttacggccatctacattcgccatgtcgatcgggagttcgatacggagtatcacagtgctgaagagttgaatcttgtcgaccctcgcccaaaagctggggtaatcgacatcagcgtagcgcgtcagaagccccctgagacgttttaa

SEQ ID NO: 86094 - DNA, 1056 bp, Citrobacter koseri
atgagcgaaaacggcaataaaaacatagcgatcgttgaagcattctcagaaacagacaaaaagaccggtgaagttgttacgttagttcctaacaccaacaacacagttcagcctgttgctctgatgcgtcttggtctcttcgttccgacgctgaaatcgaccgccaggggcagaaaggggcaaatggtctctatggacgcctctgctgaactcaaacagctgtctctggccaaagccgaagggtacgaggacataaggatctccggcgttcgtctggatatggataacgacttcaaaacgtgggtaggcatcatccacgcgttcgccaagcacaaggttgttggcgacaccgtcacgttaccgttcgtcgagttcgtcaggctctgtggcataccaacggccagatcgtccgcgaagttacgcaagcgcctggacagttctctaactcgtattgccacaaacactatctcattccgcagtaaaggctctgatgagtattacgtgacgcaccttgtgcagacagcaaagtacagcacaaagaacgacacggtctcgctgcaggctgatcctaagattttcgaactctaccagttcgacaaaaaggttcttctgcaactccgggcaattaacgaactctccagaaaagaatccgcgcaggcgctctacaccttcatcgaaagtttgccacctgacccggcaccaatctcgctggctcgcttacgcgccagacttaacttaaccagccgcaccattacccagaacgcgacagtcaggaaggcgatggagcagctgcgtgagatcggctatctcgattacaccgaagtgaagcgcggcagctcggtctacttcatcatccactataggcggccgaaattacgcccagcactgccaccaactaaagctgcgcctgaagaaccagaagacatcttgcctggtgatgatcaggaggacattatcgatgttgttcctgaagaaaaagagggtgagatggtcatgttgagcaaggaagaactggcgattctcgaagagctacgcaaggcaaaagctcgcaaataa

SEQ ID NO: 86095 - DNA, 213 bp, Citrobacter koseri
atggcggttacactggcaggtctggaaatcgaaaaaacaagtggctactggcgtgccaaagggtttaagcaacccggcgtgctggagcgtctggagcgtgaggacggtgtcattgtccaccagcgtcgcgaatggcgcatgtacgatccggaaacaggtaagctcacgacgaaggccgggacactctggggtctgctgaagaaaatccactga

SEQ ID NO: 86096 - DNA, 336 bp, Citrobacter koseri
atgaagaaactagccctggctctggcgctgctctccctccctgtctacgcggacacgcacgtctatgagtgtgagatgtcagtggccgaagtgaaaaacgacgtgatccgcaatgtcgtcaaagccagctacggcgcgatggttgtggacagcggcgaacagttttatgttgttcgcgatgatcgcgtcctgtcttccccctatctcaccaaacgtaacggcaaactgtctggcgtgggtgaagataagttcgtttacaacaaatcaggtgatgtctacggcgttcacgcgaagaacgccagctaccttttcgatgactgcaaggaggttggttga

SEQ ID NO: 86097 - DNA, 180 bp, Citrobacter koseri
atgaaaactgtattagacactttattacttattgtctcgatagcttttgtgctcgattgcatcttcaccggagcaatccgtaaagcgctggcacctgttaatggcgcgatggttaatgcgctggccgtagtgctggtattcgactcagcattcggcgttatcaaaggagtcgtggcatga

SEQ ID NO: 86098 - DNA, 276 bp, Citrobacter koseri
atgaagattttggttcgaatttcagccagcaccgactatgacgtttacccgctattcatggtcaagtgcgatgggctgaacgatgaagaaattcaagcggcaattgagcgcaatctcgttgagtacacaggcattgatgcagattctgtgtatgtcgatgatgacggtgtttgttggcacaacggtagttgctggtacgtcgacgacacgatgccggtaagcgatgaagacgcggctcatcttgagcgtatcttaggcatcagcacttttgagtga

SEQ ID NO: 86099 - DNA, 411 bp, Citrobacter koseri
gtgaagaaactgtatgacgcggccaacgctgcgctggatgtagtggataccgaaattgcccagggcttcccggagccagaatgggcgacgcagctgcgtgaggcgattgcagagatgaacgcaccggaaccttcagaagatgaagccgactggcagcgtttcatcagaatgtacgcggaagagattggcccgacgcccaccgctgaacaggccatgctgctcaagtacttcaaggaggctggagagaatctgccggttgatgatacaccgcactggtttcacgccgcctggcgtaagttcgacgtgatctacacccgcggtatgggaagtaaagatatggtcgtctggcatctgatgcacatcgataaagctgtcgaccgcacgctggagaagttcttttcaccagcctga

SEQ ID NO: 86100 - DNA, 372 bp, Citrobacter koseri
atgaaaaattacagcgagatgacggactttgagattaactgcctggtcgcggaagccaccggccatcgaccgcttatctcacaatatggctggaaaggctcacaggaaggcgattacacagcagtggtcgcaatcggcccgaacggagccggaaccttcgactggtgtaacgatccggaagatgcgtgggacattatttatcgacacagaatcggcgtaatccccgccagacagcctggcgagtggagagcggcccacagaaaggtggatagctcaacgccacaacatctgatccagaaccctaaccctttcagagcggcaatgaccgtgttccttttaatgcaggagaaaaagcgtgaagaaactgtatga

SEQ ID NO: 86101 - DNA, 831 bp, Citrobacter koseri
atgaagaaaggtttactggcggtggctttggctgctatttgcacaatgggtctgaccggctgcgatcgcgtggaaccgggatacgttggcattaaggtaaacaaattgggtgaagacaaaggtatcggtgaagttgtcggcgttggccgtcagtggactggtctgaataccgagctgtacaccttccccactttcaaacagatgaaaacctacgatgagccgttcacattccagatgagcgacggtacagccatcggccacaaaattggtgtggcatatctggttaatcgcgacaaagtaactaccgtattccagacctatcgcaaaggtgttgatgacattaccgacactgatctgcgccagaagattgcggactcactgaaccgtctggccagccgcatgactaccgacacgttcatcgacggtggcaaggcgtctctgctcgacaatgcgctgaaagacattcaggcagaaatgtcaccggtaggtattgaggttattagcctgtcatgggtgggcaaaccagactatccggacactgtcatcgaatctatcaatgccaaagtgaccgcgaaccagaaaacgctccagcgccagcaggaagttgagcagcgcaaggcagaagcgaacatgctgcgtgaacaagccgaaggtgaagccgacgctatccgcaagcgtgctcaagcagaagctgatgccatcaagttgcgcggtgaagcattacgtcagaacccgaacgtcatggagctggaagccatcaacaaatggaatggccagttgcctcagtacatgactgaaggggctaatactccgtttatcgcgttgaagtaa

SEQ ID NO: 86102 - DNA, 201 bp, Citrobacter koseri
atgatcaagggttatctcatggctgtttcagcggtgatatcagtctgctttatctacggtttactggttccatcgcttatctcagctaaaagcgatctggccttatttatcggacttgccatcgctgtagtcttcccggttgccttgttaaaagctggccgcaggtatatcaactcactcaacaaaactaaggagaagtaa

SEQ ID NO: 86103 - DNA, 1077 bp, Citrobacter koseri
atggcaaaaggcaaatccgcactggcactggcgctgaaaaagaaaatcggcagcaatgacgagatccagaaggtctcccactggattgactccggtttccctccactgaacaaagccatttccggacgttacgacggtggttttccgtgtgggcgtatcgttgaagtcttcgggccaccaagcgccggtaaaacctttttggcgacggctgcaatggtgtcagcacagaaacaggatggtctggccgtattccttgaccacgaaaacagtttcgacgttggtctggcggtagcgaacggactgaacgccgacgaagacgacggtcagtgggtctacaaacagccggataccttcgaagattccgtcgagctgatcggcacaatcctcaagctggtgcgcgacgaagagcttatcccggaaacagcccctatctgcatcgttgccgactctctggcgtcgatggttccgaactcgaaggctgagaagttcgacaagatggcagaaggcactgcgaaggacaaagatcagctgaacatgaacgacaacacggcgctggcgcgcgcgacgagtgcgaacttccctactctggcgctttgggcgcgtaagtacaacgcgtgcatcatcttcttgaaccaggtgcgtaccaaaattggcgtgatgtttggcgatccgacgacgtctccaggtggcgactctccgaagttctacgcgtcggtgcgcatccgtctgggcgcatccgttatgaaggatggcaaagagaagatcggacaggacgttggcgccgagtgcattaaaaacaaagtcgcgcctccgtttggcaaatgctcatggaaattctacttcgacccgactcgcgggctggacgtcatcgaatcgctggttgagtacatgctggaggaaggatacctgcccaagaacgccagcgggcgtgtggaaattggcgataagaaatacaccaaatcgcagatcgtcgagatgtaccgcgagaagccactcccggaaatcatcgcagcactccaggcgatagacgaacggcgagcgaaagagtcgtccccagcagagacagaagaagcgtaa

SEQ ID NO: 86104 - DNA, 267 bp, Citrobacter koseri
atgctgaaatccatcattaatggcggggcaactacgccaaccatgctggctaaagagattgtcttctgccacggcgagcacgctgtggtggcgctgccgaacattctgggcgctgctggcatttctgctactgagcgtgagttcgcgctggtcagcgagcaggtcgtgaagatcatcgctcgcgtcgccaaacacctgaaccacgacgcaatcaagtttgacgaagccgctgcttcgaagcgaatcaacgaatcaaaaggagcctaa

SEQ ID NO: 86105 - DNA, 945 bp, Citrobacter koseri
gtgaattatctctttgtggacggtaacagcctgggctattaccaccagcaatccgacaaattacacaacggcgagatggaagttcaggcggcttttggcttcgtgaagaacgttcgtcgttacgcctcaattctccatgcccgcccaatgatcttgtgggatggattcagcgacaaacgtcgcgacttctacccggagtacaaagcgaatcgcgatgacgacccggatatgaagaagatgaaagaaggctttgccatccagaagccgtacatcttgaaaatgatgaccgcgctgggcgttaaccaactcattgcaaaggacgcagaagcggacgacctggctggaatgctggtctctcgcctggctccgcagccgaccgtcgatcgcatctacctgctgactggcgatggcgactggctccagctggttcgcgagaatgtgagctgggtaagcctgcgtgaagatgccaagcacaagcaggtgaacttcgaacagttcgcagagctgaccggtctgccaacgccacgagcgtttctggaagcgaaagcgttgcagggcgataactcggacaacatcaaaggcgtcggcggcattggtgatggtggcgcgaaagagctgcttcatgaatggggaagcgtggccgcaatggtacgcggcattaacgacggctccattgtcatcaacaaaggtcgctataagacggcattcaacaagctggcaaagaacgccttcaacgagaagacgggctgccggatgctcgaagcctttaagcgcaacatgatgctgatgaaccttatcgacacaaaattcccacccagcgaaatcgagtcgattaaaggcgcacgcgacatgaatgccttcgaacagatgtgttacgagctgaatttccggtcgtttctggaagatctggaagtgtttgttctgccatttgagaggtactgctga

SEQ ID NO: 86106 - DNA, 1029 bp, Citrobacter koseri
atgtctaagtcattacttgatctgcttaacaagacccgtggcgatattgcttctaaacgtggcaataacgttgatttgacccgtctgaaagacggcaataactatctgcgcatttttccgaacaaggacgacccgaatggcgtgttcttccagacattcggtatgcactacgttaagcatcagaatgaggaaggcaaagatgtaacaaccgcctacatctgcgaacagcacacccacggccacgcttgccagctgtgtgagatggttatggaaggtcgtgctcgctttaagggcaacaaagcgatggaagagcgcattaacagtatgcgtgctacaccgcgttatctggtcaacggtgttctgtctgcgcgtgaagactttgcagacgcagagaaatgccagttgattgagctgccgtctacggtcttcgacgatatctgcaaagtgatgtccgaagatattgcggatgatatcggcaacccactgagcaaagaagaaggctatgcgttcctgattaagcgtaccggttccggtcgtgacaccaagtacgacgtatccccgaaacgtaaagtctacaaaggcgacattcctgagaagctctggactacccaacacgatctgatcgcatacgcgaaccaggctgacgaaactcgtctgctgtctacggctcgcactatgggtcgtctgattggtattgcggctccggcagcaacaatgtcctctccggccatttcttccgctgcaaaatcagctgctgctgaactgccaggctttggctctatcactggtcatacggaaggcgcagctgctgtcgctacagcacacactccggctccagagtccaccagcctggttgatgaagagatcctgcgtgccgctgaagctgagttcaaaccggaaactaaaccggaagaagttaaagctccggaagccgccgcagctgcaagtgcttcagcatctgctgccgctgcatctgcaccagctgacgaaggtctcgacgacctgctggctgaactggacgctctgtaa

SEQ ID NO: 86107 - DNA, 432 bp, Citrobacter koseri
atgagcaccgatatctacgaaaaaatcatgtccgatctggagttcgaccgcgacaatcttgaggaagtctggcgtcagcaaccgcgcctgttgatggagtacggctctaagctggcgcgggcagaacgcgaggtcgcagatgcaaaactctccctcgatgcgattgaggcgaaaatctacgacaatgagcgtaagaacctgagtatgaacggcattaagtttaatgagtccgtactggaggcaaaggttagaaccaacccgcaatacctcgcaaagcgccagaaactcgacgatgcccggcacattgcagatctgtacaagcacgctgtagccgccttctctcaccgccgcgacatgattgtccaggcgtccaaaatggctatcgtggagattgaacgtttgggcgccgaacgtttccactctccccgttaa

SEQ ID NO: 86108 - DNA, 564 bp, Citrobacter koseri
atggcgctttataacttcactctgacactctcaggcgtaacgtatgagaccgaaggactggaagacgcgctgtacgaaagcggctgtgacgatgcgctgatttgcgcatatggaaactccgtctatgttgagttcgaccgcgaagctgaatcgctggatgcagctattgcatcagcggtcgacaatatcgaatcagccggaatcggcgctattgttgaatctgtcgactctgcccttgtaggcttgagcgacattgcagaaataacagaaatgtctcgccaggcgattgcgatgctgaaagatggcactcgtggtagcggagacttcccttgccctatccaacgaatcaaaggccaatctccactttgggattgggctgatgtagccgaatggctactaaagaacggtcgattaaaagaagacagcaacttggtaaataacgctcgtgtgctgagtaaatggaatcttgccttacgtgcaagcgcttcaaaagattttcaagaagttgagtcgatcgcggtagctcttatcgcacgtcgacgtcatcacgccgaatgcgcatga

SEQ ID NO: 86109 - DNA, 444 bp, Citrobacter koseri
atgaataaagagaacaccatgaacgaggcacagaagattgcacaagcgctggcggctatcccagcggattttcaggataaagctgttgcggccaccatgcggtcgcagttctgggaaatcatcgactgcccggtcacgttagatctggcgctggcgttcgccgggctggatggtgccgataaagtcagtcgtctgcgtaaatgtgccagagcgctggcgcttaaaacgcaagatccgaaggcgtgccagtatctgctggagatctacgaatcggataatccagaggaacagttggaggcgttcaaagtgttccgcaatcggctggtgctgaaggtggccaaagagtttatggaagtgaacaagattggcgatgtgagacagtacaggctgaaacgccagaccagagtcacgctatccaacatttttggtaagaaagtcgcataa

SEQ ID NO: 86110 - DNA, 3519 bp, Citrobacter koseri
atgaaggctctgatggtcagaactgacttctccctgggagagtcggctctaaaagcagaaaacgcggtgaaaatcgcgagagacgctggctacaccgctgtcatttccgctgacagcatgaacattgccagtgtgatccccctgcagcgtgccgctggcgacgacatggcggttatttgtggtgttaagctgaatgttgtcgacgatccgacatacgagcaccgcgcccgccttgcgaaagagtcagggggatgtatggaatcattggtacgtgatcgcagctactgcttcacggcactgataaagaatgagcaaggttatcgcgacgtgtgcgaactgatgaccttagccaacaagcgcgagcaattctactttgtcccgcgtctggcgcttgaccagctggcggccgcatatgccaaaggcaacatcatcctgctgacgtctgacattggcagtgtattccagcgccaggacttcgcaaagattatcgggacgctggtcacagctggaggacgcgataacttctacagcgtggtttatccgcaccctaccccattctacgaccagattaacgtccgggcgatgaaagtggcgagcgcactgaaaatagagccagtggcgttctaccccgcttattacgaagcggtcgacgacgctgacattaaagacattgcgcacatggttacgaacaacatcaaaatcgatcagccgcatcgtctgcgtattccccaccagcgagataacgccgttaatggtcgccgccatctccttgaagcgctgaaagccttctccgttcgaatggatgtgccggtaacagctgcaatggcctcaacaacgcaggacaccattattgaagcctgcacatggcgctggcatgaattgccaccagcactgcccaagatggcagacgacgagcctgcaacgctgatgaagctggctgtcgcggggctgcgtaagcgtcttactaccaaagagtttggctacacaccaccggcttctgagcaccgtgtgtatgttgatcgcctgaagtacgaaatggacacactgacccgcctgggcttctgtggttacttcctgatggtgcgcgacctgatgaatcacagccgtgaaactggcattcctgtcgggccaggtcgtggttcctctgccggttctctggtggcgtggtgtataggcataaccaacgtcgatcctatccgtcacggtcttctgtttgagcgtttcatcaaccctgaacgtctcgacttaccggatgcggatctggacttcagccaggcacgtcgtcatgaggtgatcgagtatctgaatgaacgctatggcgaagattacgttgccggtattccgaacttcacctatctgggcgccgcttctgcgctgcgtgacactgcgcgtatttacggtgtcgacgctgcggatatggcggtatccaaagagttcaagaatctggaagacgatagcctgtctctggaagagctgcgcgagcaactggccagcctggacaaatacgccacgaaaaacccggaagcgttcaaagcggcgtgtaagctgcaaagcctgatgcgtggttttggtcgtcacgctgcggggatgatcgtcgctggcgttccactggtagagcgcacgcccgtcgagctgcgtggcaatgctcgctgtattgcgttcgataaacgttactgcgaggcgatggggctgattaagctggacgttctcggtctggccacactggatctgctggatagcgcgaaacgctacatcaaagagagtaccggggaagacatcaatctcgatgctatcccactggacgatcgcaaggttctggatgggttcgctgcagggtacacgcagggcgtattccagctggagtccggccccatgcgcaagctgcttaaagatctgggcggtggcattgaaccaatgagcttcaaaaccgttgtcgccacgaccgcactcttccgacctggcccgattcaatccggcatgttggacgactatgtctcggtggccaaaggcttcatggctccacagtcgctgcacccggtactggacgaacttaccgcggaaaccaacggcgtgattctgtatcaggaacagacgatgaacgcgacacgattgctggccggcttcacgatggccgaagcagatggtgtgcgtaaagcgatcggtaaaaaggatatggaaaagatgaagagcatgggcgagaagttcgtcgttcaggctcaagctggttggatcgacgttgagatggaagacggcacaacgcagcgcattcaccgcgcggaacacttcaaatgtgaggacggcgcactgcggacggtcgaagaagcgctggaggcaggtgtgaaattgcctatggctgctgtacgcgttacagggtcacaacccggcttgtctgagacgaaagctaaggagatctgggatgccttcgagaagaacggtgcgtatcagttcaacaaatcacactccgttgcctactcgctgatcagctatcagtctatgtggctaaaaacgcattaccccgctgagttcttcgcagctgcgctcaccattttgggcgaggataagcaccaggggctggttaaggatgcgctgacctatagcattcgcgtattgccaccagacgttaacgtgtcatctaaccgaattgagatccgcacgctggaagacggcagccaggtactgtatgcgcccttctctgctgtgaaaggctgctctgagaatggttgccaggccatcatgagagcgagagagaaagttggcggcaaattcgagtcacttgagcaatttgaggaagcggtcgagaagcgtgcgtgcaacagccgggtacgcgagtcactgcaaaaagtaggtgcgttcgcatcgattgagcctggcagtctgccagcgacagatccggaacgactgcgcgaccaggcagagttgatgggcaatctggtgatcgacgctgtaaaagcctctcgaccgttcgagatgaaccctaagcgctctgctgaagtgaatgtactgatgactcgcatggcggccgaaatgggtctgggagacgacctgatccgcccaagcattggcattaagccgaaaatcatggtcattctggacaacgcgaacggcaatgatgggcgtaccggttacttcatggagaacggctacgacgactttaaagcgaagttgcttactgcaggcgatctgcgcatgggcgatctctacgtcaccggcgtgtgcaaaaaggtgaaggacaaagagaaggactacaccaaagacgagatcggccagttcaccgactttatgcgtgaagagatcaatctggtgcgtccgacctatgtgctgacgtgtggcagccgggcgacgtcactcttcaacaacaagagcaaaccatccgacctggttggacgcaaagagtatctgccagagctggatgtgaccgttttctacggatttaacccaaacattttgtactttcgcccagaagaaggcgaaaagctggaagcaattctggcagaggtagcggagactattagcaaatga

SEQ ID NO: 86111 - DNA, 1236 bp, Citrobacter koseri
atgaccgctactgcactacagcaagaagaacatttgccagaagccatcgtctgcaagtggtgtggcaaatcctttcattacctgaaatcccatatctctatgggccgctgcgagaacattcctgagtccgcgaaaggtctggacgtggacgaggtggtgaaaatgtacactactgcgtttccggatgaaccaacgatctctcgcacggcactggccaaactcaatgagaagcgtgccgaaaagcattcaggtgaaggaaaagtggcggacattagcgcacatccgggctacgcaggaacggtcgaatacaagaccgaactggtggccgcgcacgagctgcttggcgtaacgatcaaagagctgggaacgccacgcggaaaaccactacaggtgacagtcaacgtcaacacgccatatccggagttcgtaccggaagcgaagaagaactatgtgtatggcgacttcgacctgattaaagacatcttcatgatgctggaaatcggaatcccaggctatctctggggtcatgcaggaaccggtaaatcttctcttcctacgcagctatgcgccctgctgaatcgaccactgatccgcgcccagcatacggcgtctatggaagaagcacacgttacaggccagatcctcgctcgcgatggctccacctacttcgagcctggtttgctggcgctggcgatgaaaaatggctgggtgtacctcgctgatgaatatgacttcgcgttcccgcagattctgggtgtgtaccagccagttcttgaaggagaaccgctgatcatcaaagaggcaactccggactggcgccgtatcactccgcataaacgctttgccttcattggcactggcaacactaacggctctggcgacgaaacgggtctctatcaaggaacgaacatccagaacgcggcgaacttctcgcgcttcggcattgtttcgaacgtgaagtacatgagcactaaggctgaagtcaacatgctggctgaggctggcgtcatccgcgaatacgccgagaagatggtgaaattcgcgaatcttgtccgtgaaggttatgaacagcatctgatcagccagccaatcggccctcgcgagctgctgctgtccgcaaaaatcggaatgatgcgcggtgatttctctgccggcatcgaaaagtcgtttatcaataaacttccatccacgtctgcacaggcagcgcgtgaagtggttcagaagatcttcggttaa

SEQ ID NO: 86112 - DNA, 2367 bp, Citrobacter koseri
atgtccaaagccatgaccagatctgtgctgaaagaggtacaggactttcgcgactgcgtaaaacgagttgtagcgatgctatcaggcaaacagatacctgttgcagagcgaggcaatgaagcatatgtccgctacaaccggcgcggcgaaccagtgctggtaaacatcccatctataccggacgacgcgtcaccaaccctcatgaacgcagtacgtggttttctcgaccatgaggtagcccatatcctctttactgatccgaaagtcgcaatgaagatgcgcgagagaggaaaggctccgtctaccgggctttggaacgcgctggaagacgtttttattgaacgcagaatgggacaggtattcaacggaactcgtctcaatttgctggccacacagaacctggtgatcgacaaatacttcaagggcaaagtgtcagaggcggtttcaatctgccacggcgaccagcgtgaattgttcctgaaattcttcctttgcccggtcgttcgcgcctgggatggccaaagccctttcatcgactttatggaagaacactggcacctcatcgataagcctgtagccttgctcaaagagcatggtatcgacgtggccgttcgcaatatgtcgaacacagaagactgcgtgaaggtcgcagctgctatcgcccaaatcatgcaggatatgaaagacaagccagagggcaaattaccagagcttaaatcgtctgctaggaagccgtcgaagagtgaggacgagtcagaggaaaccccagaagccggtgacgaaccgactcatagtgaatcagcaccaaagcgtaccaaaggcgaagacgacgacaaggaagagcaagaagatgatgcctcagaagaggaagagtctggggattctgatttgcctgaatcagtagataaggacttacctacagaggataaagaaattagtgatacagaaagtaaatatacagaagcaggcgaagaagaatcaggagacaccccagaatccgatgatgccggcatggaatcaggtgattctgatgacgaaggtggtagtgatgacactggctctccaacgcctggtgatggcattcgcgaagacgccgatgactccgatggttatggctctggcgccgctggcgatagtgatggtgatgacggcgaagactccgatgccagtcacggggagtcggaaggagaaggcgaagaggaagatgacgccgccgatcacacagacggcgaaggtaaagaaaatgaggatgccgcggaagcgcctgaagacagtgagtcaggctttgttcctgctccggatgaaatgactctggaggacgcactcaaggcgctcgacgagatggaagacggaacaggcgaaatgaccgaagacgcactgtcggccaccatcagcaaagagcttatgagcacctcactttctgagtatcgcccatacgatcgttcatacgactttatcgggttgattgatgaggctgaagagcatgtaaagcgcaccagaaagacgtttggcgcaatcccaatgcactcaccggtcgatcgctaccgcatggttccggaaggcagaaggctctttgaactgaaaatcgaaaaacatctgtcagcaggcgtttcttcgactctggccaaagacctggagcgagctatcgccagccgcaatcgagtccagtttatcccaggccagagacgtggacggatacatggcgcgaacctgtatcgtctggcaatgaacgacgaccgcgtgttccgcaagaaagaagaccacagagcggtgaacgcgtgcgtccagcaggtgatcgacttgtccggctcaatgggcggcaggaagattcaactggcactcgccagcgcctacaccattgcggatgctctggatcgtatcaatgtgcctaacatcatcaccggctttaccacgtttggtagcccagattatgaaaccatgtcgaagcgcgggtttactcgtttcgaggcgctaatgctgcccattatcaaaaactggaatgagaaagccaactctccagagatccgcgcccgcatgggctgcgtgtgtgagacgttccccctgctcaataacgtcgatggtgagagcgtcgcgcagctggcgactctgtttgcagggcgaatggaggacaagaagatcatgctggttatgagcgacggggcgccatgtgctgcaggcgatgggttccatcagcatttgcgaaccgtcaccaaagaaattgagacgttgagtgacatcgatttgatggctatcggcgttctgaccgacgcaccacggcgttactacaaaaattacgcactggtaaacagcgtagaagagttagggccgtcagtcgtcacagagctatctcgtatcattcttgggtaa

SEQ ID NO: 86113 - DNA, 213 bp, Citrobacter koseri
atgaaaaatataacttctaaattgaccgcccttgaggttggacacgcatatgcgattggactagatggcgtcgcgacgatcctgacagaactagaatctgaagagcttcccgtggagatggttgatacgacggttttcacttttgagctaaaaaataaacatttcactctcatcaatactggttgcggctcccttgccgtgagaaccatttaa

SEQ ID NO: 86114 - DNA, 387 bp, Citrobacter koseri
atggctaccaacgaaacagagatcaaacaaggtcgctacgcagcttacattgactcgttaatcacaatctcgcctaaaagtcaggctaccattgccaaagaggttgggtacaagaacgccaacaacctctctctcatcaaaagcggcaaaatcccacttccagtcgataaggttcgagctttagccgaagcactggaggcagatccggttcgactgatgctgatggttctggaagaacgtcatcctgagctgcttgagttttttcgcgaagagggcactgcacctctctccgctgatgaaaaactcgttctagaagcgttccgtaaccgttttgacggtcaacagggtgcgtcagaaaaggtggtagaggccatcaagtcactgtga

SEQ ID NO: 86115 - DNA, 1107 bp, Citrobacter koseri
atgaaaaacacctttgataaagcacgcgcagcagaaaacacctctcgggaagccatcgagtacctcgaacgcgcttccggtttgtcggcagtgtcgaccgccaaattcgacggagacatgtcgttttcttccgccttcatgttattcactcgcttatctttactgataacgaggcgtcgacctgaaatagccgttcattgtgttttgatacatgtaatgccgcatatctctgatgtaaaggtaagtgatataagtagggtcttggtcaaccagctggtgaacccactgatactggaaggcaagatcgtccagggcagacgcgtgttctccctgatgaaacagttcctgagctggtgcgcctttcaggggctgattgatacatcaccgttgaatgatatatcgctcaatagagttgccggtggcgcaaagccagtgccgcgcgaacgtaagctgacggacgccgaggtctgggtattctggaacgtctgggattacttcaatgtgtgcgaaggcacaaagtgggcggccaggctctgtcttgtcgctgccagacgacccgatgaagtgctccgggccagaaaggatgagttcaaccttcaacgtgatgtatggaatcaaggtacgcgaaacaaatcggccagacagcacgcgctgccgttaagcccattgatgcgtcaatgcgtggaagagttgttcgagtacgggaaagacagccagtggctcgttccttcgaataagaagaagggcgtagatacgccaatgtctaaggtggccattgcccaggcactgagaaggatactggaacgacctgagttgatggaggttgagtcattcaccccacgcgatctgagacgtacagcgcgtagttatttccctgctctggggattaatcaggaggtggcccgtaagattatgaaccacagtcttgaagggatagatcgcgtctatgatcgccacgattatatggatgagatgcgagacgccttgaataacttctcaacgtacatcgcatctatcgttaatcaaacagacttagacgagatagaccacaaattcaagggagatcgtctagccacggagcttattcgtgtaaatttctcacagtga

SEQ ID NO: 86116 - DNA, 417 bp, Citrobacter koseri
atggctctgattgtcgagatcaaccccgatacacgcgccgcatttttagaccccactttcaaaaagttccctggattggaacagcagctcatagaggaatttatttactgcaaggagcacaacgccacaacggataccttcggcagtgacgccgtcttcacttttccaccttatgccgtagacgctcaactcgctcgcatccacatcaagctacccgacgaacagccctggccacctcgcactccagatcggcagaagaagagtaatacttatttagtttatgcacagcatttgtggaatccggacagatactccattcttgcagttgttaccccagcacacgatctcatgagcgccgccaacacacagttaatctcccacttttcagcctgtgctgaagattttcacaaccgctaa

SEQ ID NO: 86117 - DNA, 525 bp, Citrobacter koseri
atgaaagactcaatcaccaaaatcgcaatggttgtggcactggcactaagcagcctgtcacacggttcttatgccaaagatcacacccatgaacgcagcgctattacttcaggggcgagcgcaccatccctcgcagaactgcgcgaaagtgtgggtaaaatccaggaagttaccgctgatggccgtgaaatttacgccagactggatgcgttggcagaacatgattttgagcaggcaaagtttgccgcagaaggcttacgtgctgatgtaattggctccctggcaattgccgagttcttattccaggcattaccagagatgtcgatcatccggtcttacgacaaaaactccactgaatacaagctatgcagggctgtcgctgagatgcgtcacggggccaaaaatctcgataatctggttaatcagatcctgacagttagccctcttcgcgaatcagaaattagccatgcggctcttgctgttctggcagccagtggcacagaggcttcgaccaaatggctctga

SEQ ID NO: 86118 - DNA, 246 bp, Citrobacter koseri
atgaaggtcgttatctacggacgggataattgctcatactgcaaacgtgcggtcgagctggcgaagcagctgcacggccacggctttggcgattatgaatacatcgatattgtgtctgccgggatcgacaaagagaagttgagcgacctggttggcaagccggtggagaccataccgcaggtgttcgtaaatggcgaacctatcgggggttatacggaatttgctgcttttgcgagcaccctgtaa

SEQ ID NO: 86119 - DNA, 366 bp, Citrobacter koseri
atgaccgatatggatatcgaaaaagagattgtggccaaaggcaaaacggccgcgcgtgttaccccggaacgcattgaagctgttatctcaggcgaattttactttaccggcgcggacggatatcgcagctcaccgttgtggctgaagcaggaagagcctgaaccggccccgcaatcactcgaactgctgacattctgcgttcttgtgctggagaacggctacaccgtaaccggcgagtctgcgtgcgccagcccggagaactttgatccggagatcggacgtaaaattgcacgccagaacgcgattgccaaaatctggcccctggaaggctatcttctcaagcagcagctgcacgaggtgaagtga

SEQ ID NO: 86120 - DNA, 204 bp, Citrobacter koseri
gtgaccaaagaatatctgcctcaccagcagcgtgtgatagaggaacaggaagatctgtcgcgccgtattttcaagctggagtgcttcacagccaccgagatttttagtcgtctccctcaagtcgaccgcaacatgctcattaagcagctggacgcgatgaaagcctatgagctaattcttcgtgcccgaatcgctcgtttttaa

SEQ ID NO: 86121 - DNA, 774 bp, Citrobacter koseri
atgggaaacaaacgtaaacaggcgcgtcgcgcagctcgtcaggcactgaagtcaaagccacgcatccacggctacgaaattgacacaatcatcgttgacgagctggctgccgcccctgctctgcctccgaaaccgaagcgcgacaactctcctctcgaagcgcgaaacgaggcccaggcccactatctcatctccctcgataccaaaacgctaacgttcgccactggcgaagctggctgcggtaaaacgtacctggccgcggccgttgcagcgcagcgtctacttaataaggaagtggacaagatcatcgtgactcgtccggtattgcaagcagacgaagatctgggcttccttccgggcgacatgagcgagaagttcgctccgttcttccggcccgtctatgacgtgctacagaagcgtctgggtggctcgtttctcgaatactgcttaaagccagaggtggccaaagtggagattgcccccttcgcttacatgcgtgggcgcactttcgaaaacgctgtggtaattctggatgaagctcaaaacgtgacagcgtcacaaatgaaaatgttcctgacccgtatgggagaaaacgtcacggttatcgttaacggggacatcacccaatgcgatcttcctggcagcgtcaaatccgggctggaagacgctatggagcgctttaagccgtctgaatatgttggacggatcgagttcgagagcgaggactgtgtacggtctgagttatgcaaaattgcgcttgaagcctaccaataa

SEQ ID NO: 86122 - DNA, 201 bp, Citrobacter koseri
atgagcatgatggatttcgcagaagctaaaaaggcggtcgacgccatcacaaccgactggtctatccgtggcccatatcacgaagacgacgggaaatattacgccttgcttcgtggagagtgggttggtggcgggtatatcggaaaacgtaaggctcttgatgccattctcgaaaagttaaccagcgaggccgcccaatga

SEQ ID NO: 86123 - DNA, 474 bp, Citrobacter koseri
atgagcaaaccaacctatgaatatcttgaggcgcaggtaaagcaactggaggcagacaacgaaaaggctatgtctgtcctgaaagaagcaaatgacgcggtactgctggctaaatcaaaatttgaggcgctggctgcggagaatgcaaagcttgctgactgcgcgaacttttatcgactcggatttaagccggtaaagggtgcttttggtatcgagtatcgaccaacagagcaattgcttgatgattgcggaaacacagcgcttgaggccattaaaaccccggcgaccgacgctttcctggctgaagtgcgggctcatgaccttaacgctttcatccagcatcacagcacagaactggatgcgcatattaaaaacggtggtgagcagttcgacgaaaaatcagtacgcatcagagacactatcgtctcagcccgcttgttcagggagcaacttcgcaaaggagtgcagtcatga

SEQ ID NO: 86124 - DNA, 819 bp, Citrobacter koseri
atgcaaaggctgcactctacacacagaaaacacttctccgcgcaggaacttaccgcgcaatgcataatgaaagtaatttggtcaatggtgttatcacatctcaatggtaagcgacagtcgcaagagagacgtgaacccatagaactttatcgaatttatttttacgattgccctccccttgatatccaaacgagataccctttacctgatccaggcaacaaaacaccgggtagaaaaaactttaagcttgaagattcatatcaactaagaactgaacttcacgaagagctaaggaaaacaaggaaaacagccctccgccttgggcatcttgttgacaataaacgctggcaacttaagacattttctcttgatgctctaatgaagggtgaaaaaagttgggatcaactgacaaatgatgatttttattatgatatcaagcaaaaacaagtagatataaaacttggaatggatatcacgactcttgcatatgagaaattagtagacgtaatagttcttgtggcaggtgactcagactttgttccggctgcaaaacacgccagaataaagggtattgattttattcttgatccattgcgccaaaatgtaaccccatcattatcagaacatatcgacggagtacagtcatatagcttaatttctggccttgcagatgcgcttcatgcagaacctaaccctgtacccgactggtgggataacagaaaaaaaggaaaaccaaaaagaacaactcgtgaagctaagcgtgaatacggaagaagccaacctgacactgcaaagggtcatcaaaagcaaagacactaa

SEQ ID NO: 86125 - DNA, 486 bp, Citrobacter koseri
atgcctgaaattgttgatccaacagactcactgaaaagttttcagcacgcattaactaatggcctaatcagactttcaccttgtgtagttcacccgaaaatgaaggtgcttatggacgatgccaatggcacgccaaggattacttacgctttcgttcagggagaaactgttaaaggtgttgccttatacgtcccgtccgaaccatttgaagggaagccatgttttggtgtgggttatgccgtagctgatgaatttaaaaggcaaggagttgctaccaagcttctcaaagccagcattgaggaaatgcaattcggattcagaaactcctgcaatgaattctacgtagaggccatcattggtgttgataatcagccatctaacaaactagcttcgaaagttttatctgctacgcctcagcccggaaaagactccctctctggtaagcctatcaaccagtacatgaaacttttcagcaccacaaagtaa

SEQ ID NO: 86126 - DNA, 174 bp, Citrobacter koseri
atgcaattaggcagaaaatcgaaaaacggcctcagagccttccttcgcagtgacgcaatcgttattgctgataaaaaaggcaaacccaaagtggttatcggtgtttttaacgaagacgataacgggttacgcagcggcaagccttcagcattcaacaaattaggtcgcgcttaa

SEQ ID NO: 86127 - DNA, 693 bp, Citrobacter koseri
atgagtcagaaaattattactttgtccggtgccgcgacagatgttctgtatgcgctgttctaccgtggcgcgttgcagagtggcgatctgccatctaaatctggtgcttctgagcttcgcgagcttggattcgctgaaactcgccacaccgcgacgcaatatcagaaggaaaactattttactttcctgacaaccgaaggacaggcgtttgctgttgagcacctggtaaatacgcgctttggcaaagaacgccaacaggaatattgctgcgctatgggtattgagattgatacatccaatttcaaaaatataatcgacgaaattgatgatagtttgcgcaattatgacgggttcaaaattgaccgcagcggtcaagtattcatcaataacgcattcattggcgatgtaattcacgctgcggaccccgaagatactcgctcggcgaccaatatctacaacatcagccttggtattcggcgtgatgatacggtgcattttgcgggcatcggtgttgataccaatctcgaagctctgatcgaaaatgctgtgaaaaataccgccaaagacgttgcaaagaaagttgctgatgatcagaaaacgatggatgacctaaccagttttatccgcaaagccattcgtaatgaatgccgtccaggtggtgcgatctggggcataagacgccgtggtatttaa

SEQ ID NO: 86128 - DNA, 156 bp, Citrobacter koseri
atgtctaacgaagaaaacgtggagaagctggtaaagaaaagcgtccctgacaaaaatgagacgcttgtgttagaccgattaaaagaatctattcttgactgggcggcttgtctaaagagcgcttcacagttgccagagcatccctggcggcattga

SEQ ID NO: 86129 - DNA, 258 bp, Citrobacter koseri
atggatagcaaagagctttttgacagaatttttactctcgagttacaggttggatttctcctccctaaaatgatcagcgccatggataaattgagtgtgaataatggcgtttccacttatctgatcgctgaaatggaaaatctcgtaaaagagcttcctaactccgcagcctctcatgatgagagatttatcaatgccgccagggatgctctggcaactgtgaagcgctctttagacaagccgcccagtcaagaatag

SEQ ID NO: 86130 - DNA, 339 bp, Citrobacter koseri
atgcttgcaggaagattacgtgaccggataactatccttaattttactacctcccgcgcaccatcaggacaacctgttgaaatatgggaggaaggtaaaacaatctgggctgaagtgaaggggataagcggacgtgaactggtagccgctggcgctgagagcgcacaggcaacgattcgcgtatggattcgtttcaggcacgacattaccgctgcgtcacgcttaaaggttaataccggtccatttaaaggcgcgattttgaatatcatcggccctcccattcctgatgcaaaaggggttcagatggagatactgtgcaaacagggggctgaaaagtga

SEQ ID NO: 86131 - DNA, 624 bp, Citrobacter koseri
ttgctcaatatcaacatgagacggcggcggcggtgcctgaatgctgaactcaaggtacgcttccggcgactccgcgcccatctggtttaccgctatgacgtgtgcggtgtaagtgtctttcggcagtccggtcagtcgtgtaaacgatcctggaacctgcacagagagcaccatctgaccattgcggcggatgatgactttgttataggagacctgtccgatgttctgccaggacagaatgccctgcaccacctggccaatttcttcaaccgtatatttcaggttctgcggctgcgccacgccaccgctggggagctgagtaaacggcggtcgcacgatgggcttgccaatcgcatcaccccacacatctgctgtttcctgcttcagtgtgacctgcgcaccgttctgcacgccaaacttccagtccgtaacgcgcatttcaacgtcaacgatccccagcgaagggaaattcaccttcacatacattccgggacgataacggtatccgctcaggttcagcggaacattcatcgttctggaaatgcgggttcgcttgagtttcacgtcagcaaggcgctgggcctggaactcagacgttacaaagcgaagcttcatatcctgtga

SEQ ID NO: 86132 - DNA, 231 bp, Citrobacter koseri
atgttttgtcaacgcaagagcgcactgaaaccttgccgtacttctgcaaaatacttgtttgcccgtgcatttttcaagaacgtcaggcctggaatattaatcggcacaatggcaggtaaagagcagctgcgatactacatggacggagcgtggtggaacaatgaccccatcattgcagcccggaacattcaccgtaactggggagggattcaaaaattaccttccgactga

SEQ ID NO: 86133 - DNA, 219 bp, Citrobacter koseri
atgccagaaatcatcgatcaggccaacgaactaacccagcagcgcatcgatatggcgatcgccgctcaccgtctcaatcgcaacgccgtatcagctgagctttgtgaagaatgcgacgaaccaattccagagccgcgacgtgccgccgttcccggctgccagacgtgtgcggagtgccaatctgttatcgagctgaagaaaaagcagaggggggtgtga

SEQ ID NO: 86134 - DNA, 258 bp, Citrobacter koseri
atgccgccggtgtttatatgtggcgaatggccagcagaaaagttaaaggtcttatggttattgcccgggctaagtttcgccttcgtggggctggttacgaagatgttctttcacctgaatttgaccgttgggacggatattcggtcattgtgccaggcgaacttcaatgggctgaagatgatggctcattacctgacatttctttcgaaaatctccctgacgcaacaaagtgtccattttgcaaacggcagccagtaa

SEQ ID NO: 86135 - DNA, 252 bp, Citrobacter koseri
atggaattggtgctgtttggggttgcagtgacggatggcgttgcaatgactgtcaggaacaaattaacaaaaagcgtcttgcagaagcagaggcgcggatcgttcctgatgatgaatatgatgagatggatttttggcacgaagatgaggctcgctgcccatggtgtaaggctgcaatttccaccgatgaatcatacgacgcctgccaggaagagcatcaatgccatgaatgcgagcgccatttcaaactga

SEQ ID NO: 86136 - DNA, 264 bp, Citrobacter koseri
atggagattaaagatttactcaaagagattgatgaactggaaacgaatatcagaagcactgaccaccttttagatcttaccgaaaagcacgggcttcatttaattgtcgctgcttctaacaactccacataccgaggagtagcagaccaagagtttttaatcgaggcactcaaatcgaaaagaaatgagatgcacgaaagactggtgaagcttgtcgatgcagtcggggtaattgaaaaggttattgatggattggtcgcttag

SEQ ID NO: 86137 - DNA, 210 bp, Citrobacter koseri
atggcatttaatgtgtttgccgctaacagaacggaggagtctgtcgcttatgatctggcgctggttatcgcttcaaaagacccggaagtaaaaacgcctgaagatttaatacaacgcatagctgatttactgccagcatgccgtgatgccgcgatagagaaatataaacttgaggctccgcagccgtttgggatggctataaaacgataa

SEQ ID NO: 86138 - DNA, 174 bp, Citrobacter koseri
atgagtgagaaagagaatccaacattcaagagcgacagtaaggtgattctggctgctgatgccgcacttgcggcggcgagccaggaatttgaagaagaggacgatctgtggtttcgccagaaattgataaaggcagcgctggaaactgcccttgcatcaattatcgttttatag

SEQ ID NO: 86139 - DNA, 369 bp, Citrobacter koseri
atgaaattcagtttatcaagtatgtgggtagatagttttagtttaacccctacaacagagcctaacgagaccggtgaagagttcactatgaatgttgattcagcagttgattttaactctgtgaacaaaactgagttcaggttctctatttcgataaaactacataaaaatgaaagatttatatttaaagcctgtcagatggcagtagtaaaatttggcaaagaaatgtcggaagaagaggccaaggaaacagtttcaaccgtcgatgcggcgcaatatttatacccatacttaagagcttttgtcatttctactttaagggttgctggatataataacatcaatcttcctgtagtaatctttcagtga

SEQ ID NO: 86140 - DNA, 522 bp, Citrobacter koseri
atgaaaaatttagctgtttgccctatctgcggtgaaggtcatctcactatgagaatggagatggatgagattacttataagggaaaaaccaagcagataactgacatttactacatctgtgatcattgccatgtggaacagtcaggtgcgaaagaattaaagaacaataagcgcaccatgaatgaatttaagaaggaagttgacggtcttttaacaggaaaagaggtgttcgaaatacgtagcaatcttggattgactcaggatcaggcgtctcttgtttttggaggtgggccaaaagctttttcaaagtatgagacagacgatgttatccagtctgagtctatggataaccttatccgcgtcgccgccgcgcaaccggctgcatttgaatttctttgcaaaaggtctgggataaaacgcaaagagatagtgtcagaacccaaggagctgatgttctcattcaataacaatcttgaggagttctcggttaaaacagcctatttcaacattacgcaacactaa

SEQ ID NO: 86141 - DNA, 660 bp, Citrobacter koseri
atgaactggtacgatattgcaaagcaacggattgatgcgcttggtttaagccaagagaagctggcagagcacattggtgttaccaagggtgctgttagtcattggctgaacgggagaagaaacccatccctgcaagagatcggagcagtttttcagtatctagggatcaacgatgtaaaatttaaccctgatggtacttttagtgttggtgatgcaacggaaagtaaaccagtcattccgcaatacgaatacccattattcacaacggttcaggcggggcaattttccgatgttggaacatacaccgaacgtgatgctcagaagtgggtatcgacaacgaagaaagccagtaaagattcattttggctagaagtatcaggtcactcaatgacagcacctcaaggggtaaaaccaagctttccagaaggcatgttgatactagtagatcccgctgaggatgtagagccaggagacttctgtgtagctagcgtctttggtgacacagaggtaactttcaagaaattcacatgggatgatgggcagccatggcttgaaccgcttaaccctaaccctaggtatcagagcatcccatgcaatgaaacttgtagagtcatagggagagttgttaagtcacagtggcctgatgagacgtttgggtag

SEQ ID NO: 86142 - DNA, 210 bp, Citrobacter koseri
atgaacaacatccgcatttttcgcgagaagtttgggttaacgcagggtgatcttgcgaaagttgttggctgcactcgtggagcaatttgtcactacgaaacaggtcgacggggaatggatatcaatctttgccggacgttcattaaagcatttgaacagtatgggcaccaattaacgattgatgatctattcccacccaaagccgcataa

SEQ ID NO: 86143 - DNA, 195 bp, Citrobacter koseri
atgaacaagaaatcaggatgggccagacccatcaacgccaataagcaccacttcttcttagagggtgaggcaaccagtatttgtggtcgctggatgtatttcggcactgaccgcgagccggatacgtttgaaagccctgatgactgtgccgcttgccgccgcaaggtgagtaagcgcaaggagcgtgccgcatga

SEQ ID NO: 86144 - DNA, 240 bp, Citrobacter koseri
gtgaaacatttacgttatgactgtatgggcgctgcttatgcaggtgaaagtaggcacccgcaagaagtaattcgcgaacttggcatcatgtatgaactcgctattcctcaaagcatgggtgaccagtggtggctgtttaactgcgaacatggcgagcttccgggcttcatcaccgaaatgaaatgtgatgaatggatggctaagcaatatcgccttcctgaggcatacaaaaatgcctaa

SEQ ID NO: 86145 - DNA, 249 bp, Citrobacter koseri
atggccctctgtgtaatggcagaaaacctgctggcaaaaagccgtcaccgcattgaaggcgatagcgtaactgcgaagctttcggtcctgatttgtgagaatgatgagggaaacgatgaatacatttactgggttgaattacttgatagcgaaggtgagatcattttgaaagaagtctgcactgatttcatctctgcgagcgagacctttgagcgattgaagtcaacgatcggtccagaggtcgcataa

SEQ ID NO: 86146 - DNA, 387 bp, Citrobacter koseri
atgaaaagacttattttagctggccttattggggtagcgtctttagtgacaactgcttgtgcgccaaaagttgatactattgattacaaccagcgctcactgaaactgtcactaggcatgtctaaatcagatgtcatgcaagtaatggggcagcctcgcagaactgacgtgaaccaggaaagagaacggtggatctactggaataaagctctttacggttacacaattgttgataatgaacaattagcaacagaccggcttacagtaactttcgtcgatgggaaggtaactaagtgggggcaacagactctaactgacgatattcttgagtcaacacagaaaaccgcacaagcgtacgctgatgcagctaaggaaacgaaaaaatga

SEQ ID NO: 86147 - DNA, 324 bp, Citrobacter koseri
atgaataaaaaaattagcgtaattagtttcttggctactgtaattgtcatttctggttgcgcgcaggaaaaaccaatttcatcttatgatgatgcgggtctctgcattttaaaggggcaagcgatggggtatggaaacactgagatcatgcctaagattcaggctgagtttgcccgtcgaggtgaattgagtattagcaatgctgactgcgatacttatatccagacaggaaagcaaagtgcacaagttgacatgcaaactacgcgagacatcatagatcgctctcagcgctcacaggctataaacgccatacaaggttactaa

SEQ ID NO: 86148 - DNA, 555 bp, Citrobacter koseri
atggctgaaatcagtttacacgatttatttgtttatgacgaaacatcacctagccatttgagatggaaaataactgccaacccctcaacagcaagggccgggagtgtggctgggaagattaaagcatatggttcaaacaaatattggtctataagatataaaaataagcagtataaagggcaccgagtcatctgggaacttgttaccgggaatattttaaaatccatagacgtaatagaccatattgacgggaatggcttaaataattccataactaatttgcgtgttgtagacaaggctttaaatagcagaaatagtcgaagaagaggagttcctggctccgttggacttcctgctggtttatgctttcacgctgacggtcttagcatcagagcgagggtgagtggtatagacggcaaaagaatatcaaagtcattttctataagaaaaaacggtctagagaatgccataaatcaagcggttctttggcgagataaaagtataaagtcgctaaataaactaggtgccggatacactgaaaggcatggaaaataa

SEQ ID NO: 86149 - DNA, 171 bp, Citrobacter koseri
atgaataacaaggcagtcacccacaacggcaagcagtacaccgtttcaagaatggccgacggtcatcactggcaactgacctccgtcgataaaccccgagagaaaatcacgatgaaccgctggcagatggatttagctgggttattgcagcaggtcgaggagaagccatga

SEQ ID NO: 86150 - DNA, 231 bp, Citrobacter koseri
atgatttcacactatggaacgacgcccatcattcgccagtgcgtcactcccggcatgatggcaatgcatgaaggccgcacctatcgcgtctcagcagtcatccaggagcgcaaatgggtgtacctgcacaccgatgcagaaattatccgcctcagtgactgcgtgattgacgtcctccttgatggcaaaggtcttccaattcagcgaggaggtgagcatgcaatgggttaa

SEQ ID NO: 86151 - DNA, 258 bp, Citrobacter koseri; identical to SEQ ID NO: 86134

SEQ ID NO: 86152 - DNA, 285 bp, Citrobacter koseri
atgaacgcattcctcacttacgaccgcatcgaagatcggcgctgggtagagcagcagctcaccgaagagaaagataagtggatcgacgaccgggcgcagcaaatcatcgacatgatgccaaaagagccgtccggcctcttccacttctccgtaccgattgactccagcccatacgaaggacttcgcagcgataaagctggcgaggcctacaacgatttcatttcggcagttgcttacgcccaggctgaatacgactgggaacaccgtaccggctgcccgttttaa

SEQ ID NO: 86153 - DNA, 504 bp, Citrobacter koseri
atgtcggaatctaaaactcactaccgaaaagcttttgactccccttacctgagcagcgccgacatcgttgagccaacggtgctgacgatcgcccggacaacgttagaaaacgacaaaacaaaaaaatccaaagacgtttttaacaccgcttattttgaagagcgcgagctgcgccctggcgaaaagcttaagccgatgattctgaatgccacgaacagcaagatgctgaaaagcatcaccggatcccccttccttgaggattgggttggcgtgaaggtcactgtttacgtcgataaaaatgtccggttcggaaaggaatcggttgaaggcctccgcttaagcccggcgcgcgtcacaaaaccggtgctttcgccggaaaaaacgcaggcatggaataacgctaaggccgccttcaagcgcgatggcaaccttgatgcggtgctggcgagaatggacatttctccggagcatcgccgccagcttgagcaggagtgttcatcatga

SEQ ID NO: 86154 - DNA, 624 bp, Citrobacter koseri
atgatctggcacgatgtcgagcaaaacggtgaagagtgggacgctcttcgcctgggtaaggccaccgcttcaaacttcggcctgatcatggctaacgatgggaaggcttttggtgaaccagccaagcgttacgcccttcagcttgcactagaacagattaagggatgcaaatccgagtttagttttaccaatgagcacatggagcgcggtcacgagcaggaacctatagcaaggatgctatacgaggaaatgaatttcgttgatgtagataatggcgggttcttcgatcatgagacctatggtgatagccctgacggcctgattggtgttgatggcgtcatcgagattaaatcagttatcgccgcaacacattactcaacgcttactcgtggttcattcgacccggcctacaagtggcagttaatcggtcatttggattgttcaggtcgccagtgggtggattttgtaagctattgctcagacttccctgatggcaagcaactcgctgtatatcgcctcacagccagtgaatgcgcagaagaaatagaaagacttcgctcgcgtcgtgctgacttcataaatctcgtagcggaaaccaaaaagaaaatcatggaggtttcatga

SEQ ID NO: 86155 - DNA, 498 bp, Citrobacter koseri
atgagcgaaccttggcaaccgtgggaaaacctcttcctgcatgaagttagtggaacaatgccggtatcggtcattgctgaaaagcttgagcgatcagaaaaggcagtccagcgaaaggctgatcgtcttgatgtgaagctcatcagtcgaatgaccggcagacgctggacaaaagccgagttatttcttctcagccgcttcacaccagaagaagtcgccacagcaaccgggcgctccatctactccatacgcagcaaattacagtctctgaccagagcggcaggaggaaaagtcatgcctgaatggacagtcgaagaagttacgctcctttggcgtcacacaaacgcagaagtcgcagagatgaccggtcggagtatcgaagaggtcggtgataagcggctgcaaacgaatattgagcgtaatggctgggatgcttgggggaatgaagttgatggcgatgtgaagcttgttccggggagatatgaaaatgccgagtag

SEQ ID NO: 86156 - DNA, 597 bp, Citrobacter koseri
atgccgagtagaaactgccctgaattaactgccgaaatggttagagagcttctggaatatgaccccacaacagggctgctgacctggaagacttgtcgcaaaaaagtccagaaaggtagtgttgctggctcggtttgtgggaacggtagaaagctttacgtcaaagttaggattggccgcctctatcgcgcgcatcgtctcatttggctgatagtgacaggtgaatggccaaagtatcacatcgatcatgttgataatgacggcacgaacaaccgatggtccaatttgcgtttggctacgctaaatcagaaccagcacaaccgagagttaagcagagcgaatttaacgggatataaaggcgtctctcgggctaataacttatcaaaaccataccgtgcaaatatcacaataggccgtgagcgccgccaccttggctactaccgttcggctgaagaggccgctcatgcttacgacgaatctgctcgcgagctattcggcgaatatgcgcgacttaactttccgcatgaaaacgagttagccgccagaaaattgctacccggctgcgccattgatgttgtgaaaacggaggccgcatga

SEQ ID NO: 86157 - DNA, 771 bp, Citrobacter koseri
atgagcaaaggtaccattatctgtctgtgcgatatcactggcgtcatggctgagccatgggttgaagccggttaccgtgcggtattggttgacccgcagcatccagatacttcgattaatggtccgattgaacgcatttcggcaaccataattgaggctatgccgcggctgtcccagatcattcttaccgagaacgtggttatggttatcggcttccctccttgcactgacgttacagtatcaggatcccgctggttcgaatcaaaacgagccaaagacccacattttcaggctaaagctgcgctggttgccgagcaatgccgcatggtaggaatggcggccggttgcccatgggcattcgaaaacccggtgagcgtgttcagtagcatcttcggttcggccgattacacgttccatccgtaccagttcactgggctgtgcgcggatgacaactacacgaaacagacctgcctctggacaggtaacggcttcaaggcgccggcagagaatgtgcaccccatggtagaagcggctattgacgccgttaagctggcctgcgggcgtatggtgccgaagaagaatgcaatcgaggccatgtcaggaacatctttgtccggattggtgactgactggtatccggacaaccgcattcacgaatgccctcccagtgacgagcgtgccaacattcgaagcgcaactcctctgggctttgcgaaagcagtttttctttcgaatgctcctcatctcaaaaacaaacgggaggccgcatga

SEQ ID NO: 86158 - DNA, 219 bp, Citrobacter koseri
atgacgccagaagaacggaaaaacgccctgagaaacatagccagaaaagttaatgatgaggtcaaggcgaagagaaaatccttccctgccgttagctgcgatgaaatatcaaggccaattctgaacgggtgtatgccactggttaaacagcttggtttaacgccaagccacctttacgtagaaatcggcattttgaacggaattattaaggagcgttga

SEQ ID NO: 86159 - DNA, 219 bp, Citrobacter koseri; identical to SEQ ID NO: 86133

SEQ ID NO: 86160 - DNA, 231 bp, Citrobacter koseri; identical to SEQ ID NO: 86132

SEQ ID NO: 86161 - DNA, 273 bp, Citrobacter koseri
atgcgtattgaagatttaccgaagctcccgaagctgttccgggtcattgaggttgatttggatgtgctgagaaatggcattggcggaggtggtggtgtgatttttgacatggacgccaccgtaaagcggaaggttcgccgtgttaagcatgaaggcggatggaagtggcaactggttcgtgaatggcgtgatcaagagttttgggattactgttttgagcaagaccgggaatgccttgagcacctcaactacgacctcggccttgtgcattga

SEQ ID NO: 86162 - DNA, 246 bp, Citrobacter koseri
atgagcgaaatgaccttaattgtacccaacgaatgggtaaccgaagaaaagctcgtcgagattactggccttcgcccgggcactatcgagcgggcccgcaaaaaatgctggatggtcggcagggaatatctgcatgtttcccctgacggcgtaccaaagaaaaacagtgaatgcatgtacaaccgcaaggctgtcgaccagtgggttgagagcatgtcaaagaaacagccgggtgcgcgccaatga

SEQ ID NO: 86163 - DNA, 1296 bp, Citrobacter koseri
atggctaagtcagcatacccaacaggcgttgagaaccacggcgggacgatccgcatatggttcatctataaaggcagccgggtgcgtgaaagcctcggcgtgccggatacaccaaaaaacagaaagatagctggcgagctgcgcgcgtcggtgtgcttttcgataaagaccggtaacttcaactatgctgcccagttcccggattctcctaacctgaaaaggtttggggttgagagtaaggaaatcaccgttctggaactggcgaacaaatggctggagcttaagcgcatggagatcagcaccaacgcgatgtcacgctattcatctatagcgcgcaacatggtgcccaggattggcggggacaggctgatttcttcagttacacaggaagacctgttatttatcaggaaggagttgctaaccggttatcacgtattgaagacaggacagaagacaccagtaaaaggccggtctgtcagaactgtcaacaattacatgagaaccatgtcaggcatgtttaacttcgcagcggacagtggttatgtgaaggcgaacccgtttaacggtatttccatgctcaaacgatcacgtactgaaccagatccacttacgcgtgaggaattcgtcagactgattaatgcgtgtacccaccagcaactgaaaaacatgtggtctctggctgtgtacaccggagtgcgccacggtgaactggtgtcgctggcatgggaagatatcgacctgaaagcgggaacgatgatgatccgtcgcaaccacacgttaacgaaggagttcacccttccgaaaactgaggccggaacggaccgcatcataaaccttattaagccagccattgatgtgctgaagaaccaggctgaaatgaccaggttaggcaagcagtatcaagttgaggtgaaactgcgtgaatacggacgtactgatgtgcatccatgcacgttcgtgttcaacccgcaaatcgtatcgcgtaatggccgtgccgggcatcattacgctgtggggtcgatcaaccagtcgtgggaggcggcaatgcgacgcgccggtattcgctatcgcagagcatatcagtcccggcacacgtatgcatgctggtcgttagctgctggcgccaacccgaacttcatcgcaaagcaaatgggccacaccgacgctcagatggtttatcgggtatacggatcatggatggctgaaaataaccaggaccaggtactcatcctcaaccagaaattgagtgaatttgccccatccatgccccacgcagtaggatcggatgggtattaa

SEQ ID NO: 86164 - DNA, 420 bp, Citrobacter koseri
atgccgcaggaaatctggcctgatatggcaatggaatttattccatatatggcgcaatcatttgacccggttaaatatccactcttagcggcgctgcatcctgataacaaattacctgctgatatgcgcggttatgcgccgcgtggatgggataacgggcgcggaattgatatcgatcgcgaactgatgagcgaacaggatgatgccatgcgtaattttaccggcactttcgttggctctgatgacaacggggcatcttcatgcacaggggtattttccgtaacaagaaattcaggtacgacaactggcggcccctcagctgaaaaactcatcacctttgaccctagcaccgttgttcctacagctgatgaaaaccgaatgaaaaacgtagcgtggaatatgattgtgagggcgaaataa

SEQ ID NO: 86165 - DNA, 588 bp, Citrobacter koseri
atggcagctttatttgataaaaacggtaatgcaactgaaactcatgtcgccaccgtcagtggtttccatccgattacaggcgagtttaaaacaacttatgacgtgcgaattttagcgggaactggcatccctgcttattctacgctgacactggtaccggtaattaaaacaggtgttgctgcgtgctggaatggtaccaagtgggtggaggtgactgatttacgtgggcatactgtgtacaaaaaatcagatggtactgcgcagattatcaaaagcctgggtgatctcgatgatacttttaccaccctcgaaccatcaaccctatatgaccagtggaatggttcggaatgggtaacagattcagaggctctgcatgtggcggaagtggctaatgcagaattgcagaaagctgccttgcgaacagttgccaatgcagaaattgaatggcgtcaggatgcagctgataagggcatagccagcgatgatgagatcgcttcattgagtgagtggacgtcgtatcgtgtcatgttgatgcgcattgatacctccagtgcgccaaatgtggaatggcctccgcgaccggcataa

SEQ ID NO: 86166 - DNA, 198 bp, Citrobacter koseri
atggctaaatattttacgccgggtactgtgccccctggtttttactctatccgcccggaaggaaaagaatatatagaaattacggatgagtattggagtaccctgatatcggaacagttcgctggaaagcaaattattgctgatagtaatgggatgcccaccgcaatagagataaaaccctcagataatgcggaatga

SEQ ID NO: 86167 - DNA, 810 bp, Citrobacter koseri
atgaaagaaatttggaaaccattccccgatgagcgacttatcggcgcttatgaggtgtcaaattttggaagaatcagatccttggacagaactattgttaattcaaatggagtatcacggctttataagggcgtcacactaaagcaagtgatagataaacacgggtattatcgagtcacaccaaaacttagagatcctcgccgctcgttaaacttcatcgtttcgcgtgttgtagcggaggcattttgtaaaaaacctgacggttgcgatgtggttaatcacattgatggaaacaaactaaataaccattctgataaccttgaatggacaaccgttaaaggtaatacgcagcattcttatgccaacggacttcaaaagggacgtaaaggcaccgaacaccatatgtgcaaacttaatgacaatgatgtgattgacattattcgacgtttgtccacttgccagaagcatggcgatatcgctaaagattacggcgtatcatcggctgaaattgctcagataaactcaggaaaacactggtcccatataaaaattgacggactgacaccaccatatagcccgggagctttcggcaaactatctcgccatgacgttgccaatataataagaaaactcgtcggcggacaaacgcaaacatctatcgccaaggagtatggcgtcaccagcccaacgataaacagcatcagtatcggcaaagcatggtctgacgttaaagtccctgtctgtgagcctccatatggcagaataagaaagctaaacgggaagctcacagcgccctacagagcgcggtaa

SEQ ID NO: 86168 - DNA, 798 bp, Citrobacter koseri
gtgacggacgattttgcagcagacggtcagttggctaaagcgataccgggatttaaaccgcgcgaaccacagcggcagatggccgttgccgtcacgcatgctattgaaaaatcacaaccgcttgttgtcgaagccgggacgggaacaggcaaaacctatgcctacctcgcgccggcgttacgcgccggaaaaaaagtgatcatctcgacgggatcgaaagcgttgcaggatcagctctacagtcgcgatcttcccaccgtctcaaacgccctcaaattcaccggtaaactggcgctgttgaaagggcgctctaactatctttgtctggaacgtctcgaacagcaagcgctggcgggcggcgatttgccggtacaaattttaagcgatgtgattttgctgcggtcgtggtcgaatcagaccgaagacggcgacatcagtacctgcgtcagcgtagcggaagactcgcaggcgtggccgctggtcaccagcaccaatgacaactgtctgggcagcgactgcccgctgtataaagactgttttgtggttaaagcgcgtaaaaaggcgatggacgctgatgtggttatcgtcaaccaccatcttttcctcgcggatatggtggtcaaagagagtgggtttggcgaactgatcccggaggcggaggtgatgatcttcgatgaggcccaccagcttcctgatatcgccagccagtatttcggccagtcgctctccagccgacagctcctcgacctggcgaaagattttaccatcgcctaccgcacggaattgaaagacacctag

SEQ ID NO: 86169 - DNA, 186 bp, Citrobacter koseri
atgcgtacaatgaactatagtgaggtacggcagaaccttgcctctgtgcttgattctgctgccacgggtacgccggtggcgctacgcttaccgggcctactcgatcctgtaggccggataaggcgaagccgccacccggctttttgttttttgtacgttttagttgtacaatttatgtgtacttaa

SEQ ID NO: 86170 - DNA, 1089 bp, Citrobacter koseri
atgtccaatttagtagccacaactgacaaccagactcaaaggatcgacaacatatccatcctgacgaacggtgaacttttcgaccgcctgcgcacgctctccgaggtaatggccaatagtggaaacttcgtgcccgaacattaccgtgggaaaccagatgcatgcatggctgtggtaatgcaggctgcgcgctggggtatggacccgttcgcggtcgcccagaaaaccttcatcgtgaataattccggcgtgcttggttatgaagcgcaactggttaatgcggtggtcaacaatatggcgccgacaaaagaccgcattcactttgaatggtttggcgagtgggaaaaaatcgttggccggttcgtggagaagacaagcagccagaacaaaaagtacattgcaccgggctggaatttgcaagatgaagctggagtgggcgtccgcgcctgggcaacgctcaaaggagaatcagaacctcgtgagcttgtgctgatgctttcgcaggcacaagtccgcaactctacactgtgggcgagcgacccccgccagcaactggcctatcttgccgttaagcgttgggcacgactgtactgcccggatgtgatcctcggggtctataccgccgatgaaattgacgaacgtgaagaaagagttatcaacccggcgcagacagaaaaagtcacgctgaatgagataacacactccgttggcgcttccaccaacacgcaagagtctgcatctaacgttgactctgttgcggataaactccgtggccgaattgatacagctgactctgtgggtcaggcccaagccattcgtgcagacatcgaatcacagaaagctctgctgggtactgctttgtataccgaactgaagagtaaggcggtgaaacgctactaccttgttgatgccaagaacaaagttgaggccgccataaattcactccctaatccgggggatccggaagcagaagcattattcgcgaaggcagaaagcaccttgacctcatcgcgccgccacctcggtgatgaactgtatgaccagttccgcatcaccctggacgacatgaaaccggaatacgtgggctaa

SEQ ID NO: 86171 - DNA, 270 bp, Citrobacter koseri
atgaacttaacagaggggcagttacttttccgtcttcaagattttcacggggcggaacaagaggcattagggataggcgactatgagtttgcacaggaaagcgctgatattgcaaacgcgttacgtgagcttttgaaagctcgtcgaacaattaaggagcttactgcggttatcgaacaacggaacggcgagtgcgtccgacttcatgcccaactggagtctctcacagctaccaaaatacttctcgactcacaggagtccgcccaatga

SEQ ID NO: 86172 - DNA, 834 bp, Citrobacter koseri
atggctgatccagcttgggtaggagtaggtggccttgttgctagtacactatccgcctttgcggcttatttagcggtacgacaaagcattatccaaagaagaatatcaaataaggttcaaatcacattaaaaggagtcaaagtaaacctaacaagaagaaaaataataaaagcaattgacttaaccaatgatcatgttgaatttaccatgaagccatcactcattaatattgggttaggaccagctctaaaattcgaatactcttgggattttgattacttcaaacatttcaagaatagcgatataaaaaacataagcagagaaacaaacattagctcaaaagattacctaggctatattcactcgaataattacgcattccaatattcaaaggatagtaattcagaatttatacatttactaggcaacggtaaaactgcttggttcaaccactcaaataaatataaagatgtagattacattttaccatggtcagttagcaatcatgagacatatttaacattaccaaacataataccaatgttattggcatattatcttttggaacattcaaaatctgcgactggaatgttctcacctataccaggtccaattttaaccttaagttatgaagatattacaggtgtaaaaagaaaggaagtatttacctctagtttcgtatgtaccaataccagcatacgaaatgatactattgaagcaggattcagcttaactttttcaccaagtctcagtaggacagaacagagaattcaaaagatacgtaaaagctacgctgattttatggatgaacatgatttcaataaaaacagatag

SEQ ID NO: 86173 - DNA, 570 bp, Citrobacter koseri
gtgaacaatttaatgatcgaccttgaatctatgggcaaaaaaccgaatgcccctatcgtctccattggtgccgtgttcttcgatccgcaaagcggtgaactgggtcaagagttttacaccgcggttaatcttgaaagtgcaatggaacagggagcagtgccggatggtgatactattttgtggtggttaagacaaagccaagaagcacgatcagcaatctgtgttgatgatgctctgccgatatcgtctgccctatctgaactgagtcatttcattaaccgacattctgataacccgaaatatttaaaagtttggggcaatggagctactttcgacaacgttatattgcgcggagcatatgagcgtgccggccaggtttgcccgtggcaattttggaatgatcacgacgtcagaaccatcgtcacattaggcagagttgtaggtttcgatcctaagcgtgatatgccatttgatgggatagcacataacgcactggctgatgcccgccaccaggcgaaatatgtttcagcgatttggcagaaactaatcccaaccaccagcaacagctaa

SEQ ID NO: 86174 - DNA, 504 bp, Citrobacter koseri
atggataacgaactgaaaaacttccggctgaacatcaatcagctggcagccatcaccgatctgcatcgccagacggtcgcgggcaagcttgcaaatgtccaacccgcacccggcagcaatccaaaactcaagctttatgccgtcaccgatattcttcgggaactactcacgcgctccacagcaccggacctggtggatgttgacaaaatgcttcctcccgatcgtaaggcctggtttcagtcagagcgtgaacgcctcaagtttcagcaggaaacgggggagctgatcccggcatctgaggtcaccagggagttttcctcgatggcgaaagccgtcgttcaggtactggaaacgctacccgatattcttgagcgcgattgcgcgatgaccccagcagcggttgtcagggtgcagcaggttattgacgatctgcgcgatcaggtcgccctcaaagttgagcaggccgactcaccggaacaggaggatatgccagaagaggagtaa

SEQ ID NO: 86175 - DNA, 633 bp, Citrobacter koseri
atgagcgacattgagaaagacaatatgctactaaataaagtcacctcgagttctaaaggtgataaagcctattggtcgtttaaggggcgagcaaaaagacaatattgtcatgctttgattcaatatccagcaatgatggttccagctatgcaaggggaacttatagatgctgtactagaaatagattcaaacattacaagtataatcgatccctttgtcggttctggtactactcttggtgaagctatgtgccgaggccttgattttgttgggattgatatcaatcccctttcaatattggcatgtgaggttaagagtggtccattatatatcgaagcatttaaggaaaaatgccatattttacttgagaaagtgcgttctgatattcgagttgatgtggctgttcaaataacaaatattgataaatggtttactaaagaggttcagttggctctaagtaagatatatagagctattcaaagtgaaaattctaagtgggctaggaaaatattttggctctgcatgagtaatactgttcgtacagtatgtaattctagaggctcaacgtttaaacttcatattaaatcaattgagcaaataggaaatacccctaataccttggactatttctaa

SEQ ID NO: 86176 - DNA, 174 bp, Citrobacter koseri
atgttccatctgtttcgattttatacaatgatacaagtccaatcaatggattacctgtgtttttacagttatggggaaaaaatatttgacttttctatgagttttacccattctactcagaccttggttagttcatttgctatccgcaacttattaggggcgcaaacgctctaa

SEQ ID NO: 86177 - DNA, 1509 bp, Citrobacter koseri
atggatttgatgaagattgagataaataatattaaaaacattaaaagtgcggatattgaacttcctattgaaggcggtttatatagccttgttggtggtaatggatgtggtaaaagtacattaatgttaatcatgtccgttctattaagctctaagcgattcaatatgcttcaagatgaagattttgacgagacatcaacaattgacgtaacaatttctactgaagaacaaactgaagcaaatcattggttcgtaaaaaaaagacctcgtaataatgaaaatatgtggtggtgttcaagtaaacctctcttatacaaaggggtatatgaaggaagcctattctatggagcaagattcagagattctacaattgtcgataaactattaagaaacaatcaaattaaagatgatcaaattgtcgatgcgtttgattatgtaaaagacaatttaagttatatcttacatggtgattacgatcattataaggatatgaaaaaaattaaaaacaaaaaaatatctgagaattttgagttatccaacctcccatactttatgacaaccaaaaagggcgacctgcttagtcagtatcgaatgagttctggagaatgtctactgatttctttgctgaattatatctatcacacattgataaatcagggaaaaaatagaaatgttaccgataggacgttttttatcctaattgatgaaattgagttggcgcttcaccctatcgctatatcacgtctgattggataccttaactctctgcttgaatcctatccaaagctttgcgtttatcttacatctcattcaccagaagttattagagcattgaaaccacagaatatgtatctaattaataacaacgagggcacacttgaacttgtaaacccatgtttcccaagttatgcaattagagaggtttaccgtcatgatggttttgattatcttattttagctgaagatagtttagcgtctctagttatagatggagtcctatctgatactggattaaaaaacagccgcctcattcatatctctccagtaggaggatggcagaatgtcttaaatcttcacatggacttactacgcaataatgtcattggggtgaataaaaaaattattagcatccttgatggagatgtcttacaagatgttgctaaaaaaccagactataaaaatcttacaaaacttttcttgccaatacaaagcattgaaaaattcatttttaatattgtattcaataaaggaaaagataagttaagaaagattatcaatgataaatacttccctataaactctcttgacgacctcgcctcagaacataacaaacaatatcctggaacgccaaaaaacccagataaattattctattttagagttaaaaaagacttagaaaataggaacattgacgaatcatattttattcataacttgagtgaagatattaaaaaagaagttgattttgctccatttagctctcaacttgaaagacttttatcgatgtaa

SEQ ID NO: 86178 - DNA, 819 bp, Citrobacter koseri
ttggatgaatatatttatgcaataaaagatagtaatgggaatgatattgataaaaataatgtaataataagtgttgatgacgttgagtctactagcagaatattggaagctattgaagaaccatgtgatttacgtgtagtgtttcgatatgaagatagtattactggccttgtttcagcggatgtttttctatcgtttgaaaagaaaatatctaatatatcaggaagtaaagaggataaatcattatttacaatacagtccgcgtctggatatacagttagaactggaacagtgtcatcaattatatatgctatagataagctatattcgttaaaagaaaaagaggggtttcttccgcttattgcatgttcaattcgttcgatttttgaaatatcgcaagataagctttttagaactcatggttttctattccctaagtttaaaactcagctttatacaccagaagctaaaagggagatgcaggaccaattacttggtaatattatacatgtaatgctattattgaaaaataatccaaagctacttacaaaagtggccgaaagattagatataagttacaaaacatttgttaattcactgaatattgacgactttaaagctgctgtaaaatattctcatgttggagctcatcaatccactcgtttcttatcaaagccaaaaatagaatcttgtgcagacacttgtggtctatttgctgtaatttgtgatgtgttgattcatatgaaaaaaaatgacattaatagtctgggtataaataaggttgatgtggcagatctaaataaccactttagagtttag

SEQ ID NO: 86179 - DNA, 327 bp, Citrobacter koseri
atgaataaacaaggaagaaagatcgcctgtataagtcaggaagacaatttacaatattcacaatgcagagttattacggtttcgccgcaacaaaccagtggcctgtcgtgcccgcagaatatctacagcccgaagatatggggactgctcttgccagctaaatcctttgcgatcgatacgaaccaattcatatttctccaccaaaaagttaacggcattagccagagtaataccggcatcgatatgttcctgaattaccgtttcatcactgaatggtgtgtcgttgagtgtcaggccataatgttgttccagcagccgtgtaagtag

SEQ ID NO: 86180 - DNA, 834 bp, Citrobacter koseri
atgtcatcttccatcaaacaacagattagagatcgcaacgagtacattggttttatcgaaaaatgttttgcaaatgcgcatcaatgctacgttgtccattattcatgtgaatctttttatgatgctgtgggcggtaaatccacaaggatcacctctattgctgtcagaaatttaggcagtgggcaaacagatcattgggctcttaatcgatccgcagaattattaggtcttgatgtttcagatgaaaaaaatctcgatacccttgagcatcatctattagataactacttcacattcctgaaaagatacgcacaatgcacatttctgcattggaacatgcgagataacaattacggatttcaggccttacagcatagattttcagtcctaggtggcgagccctttatacttactgatgacagaaaactcgatttagcgagagctgccgtttctatatatggacgaagctatattgggcataccgccaaaagtggtcgtgcaggtagaatgttagctcttgttgaaaaaaatggtatcgctgataaagatgtcttagccggcgctgaggaagccgaggcatatgtcaaaggtaagtatagagagctagaaatgtctacattacgaaaggtcgacatactctgtaatattgctgagcggattcatgatcgtactctcaaaactaacaataaatggttttggccaagaagctggcatccatattggttaacgatgaggctcaaagaacacccattagtgactggattaatagttttagggattttcttaggtgtaattaccaaaggtctagatctatatgcttggtggcagcagtga

SEQ ID NO: 86181 - DNA, 249 bp, Citrobacter koseri
atgaaagcggtaagcgtttcgcgcaccggcggtgttaagctgcgcccaggaaagctggatacgctcacgaaaggcattgtcatcctccagaaccgggtccacgggaggaacggcattcggatcgcctggttcaataacaagccgtttaacattgaatgccgccccaagttgatcaagatcgtcatttctggcgctggccaggaatactgcccggactgcgtcattgacacgctgaaaagccagcgttaa

SEQ ID NO: 86182 - DNA, 513 bp, Citrobacter koseri
gtgggtatccggcccgtaggcatccgcgtccagcacatcgttatcggccgatttggcatgaaagcggtacgcgttgcgcgcgccggcagtgttcagctgcgcccacgaaagctggatacgctcgcgaaaagcgtcatcactttcatagacaggttcgacaggcggtaccgcatccggatcgccggggtcaatcaccaggcgggaaacgttgaaggccgcccccagctggtcgagatcggcccctctggagctggcaaggaaaacagcccttaccgcgtcgttgacacgctgaaacgccagcgtcagctggtaggcattgatttccccctgtttatacgccgggtcagattcgaccagtgcgtcgaattccggatccagttcacgcaggcgcgccagccagcgggtaaaaatatcggcggcatccggtaccacaatcgcatccggtaccgccagcgcggacaggttaattacgtcgtaactgcttgccataaatctgtatgcctccggtgctga

SEQ ID NO: 86183 - DNA, 351 bp, Citrobacter koseri
atgttggatctcgaaaacgtagcgggtacgccgtcagaggctgaagaactcgaagaagtggtgatggggcttatcatcaactccggtcaggcgcgcagcctggcttatgcggcgctgaaacaggccaagcagggtgattttgctgtggcaaaaacgatgatggagcagtcgcggatggcgctcaatgaagcgcatctcgtgcagacgaaactgattgaaggcgatcagggcgaaggtaaaatgaaagtcagcctggtgctggttcatgctcaggatcacctgatgacgtcgatgttagcgcgggaactggttacagagttaatcgagcttcacgagaagctggaacagtga

SEQ ID NO: 86184 - DNA, 462 bp, Citrobacter koseri
atggacgatataaatttcaattattttgacattcatcacgccatccgtgttcatgattggatcattgataaaacaggcggcttacacggaatcagagaccaaggggtactagaaagtgcccttgagcatatccaaaacgattggtactaccccgaattcgtggataagctatgtcacttattctttgcaataaacaaatttcatgcttttactgacggaaacaaaagatcaggcatcgccctttcaacatactttcttgagataaatggtttcggccattgtgtacaactttttgtgcgcgaaatggaaaacatcgcggtttgggtggctgatggggcgatagaaaaggaattgctcataaacatcatccatgatctgatcttgtgcgaagaaatacttgaaacaaccaagctggatatcgccatagctgtaatggagtttgacgcccaaaggcatggttaa

SEQ ID NO: 86185 - DNA, 1014 bp, Citrobacter koseri
atggctaaagatcttactacctccgcacacgaccgacagaacatacttaataacgcctatgcactaactcatgctgaaaaacatatggccttaggtgggattgagttcaatggcgaacggctttttacaaaaagtcagctaatggagatttttggtatcagtgatgccacagtggaacggtatatcgcaaatcatagcaatgaactcaaaaacaatggatatcgactcataaaaggaagagagcttaaagaattcaaggggttagagcatgtctccttcatcaatgagggtaacaaggcacctactattggggtgtttaattaccgagctgttctgaactttgccatgctactggtcgaaagtgagcaagctaagattatacgtacacgcctgcttgatattgtcattgatactttagctgaaagggctggtgggcataccaagtacatcaaccaacgcgatgaaaattacttattggcttcttttcaagaagaaagctatcgcaagcaattcactgatgctctagatgaatgcgttgaggggaacaattggaagtatgcaaagtttactaaccttgtatatcaaagcatctttcacgaagacgcagcagagtaccgtaaagtattgaatcttgcgcaaaaagaaaagatacgggataccatgtattccgaagtcctgactcttattgctggtttcgaatctggtattgcacatgaattaaaacaagaattctctcgtttaggccgaaggcttacacagccggaagctgaaactctttttaaacaattcgaatcccatccattgtttaaacctatgatgctggatgctagaaccaaaatggcaagtagggatctctgttttagagacgcgctgcatgaaaagcttgaggcatacgtaagagctgtacctgaaggcgattttgagcgtttcttgggtgaaaaaagtaaatcgcttgaagaacgtttgaacgaccctgaaaccctagaagtgtttaaaagactgaaagatcgctag

SEQ ID NO: 86186 - DNA, 2967 bp, Citrobacter koseri
atggacgccggatcagttgtatacatcatcaaagccgaaacagaccaactgcttaaggccaataagcaggtcgataaattcctttcacaactacagtcatcttttgacggcgcggacaaagcagcggataaccttggcgatacgctcaagcaggctggatcggctattgatgataccagtagcgccgctggtggtatggctaagaatgttgccgccgtagagggtgccattggcaagctaaataccaatatcaactcactgacgcgggctatccttgagtctcgttctggcgtcagtggggccagttctgaatttagccgggcggagtccataattgaatcgctgggtaatcaactggcaattctggaagaacaacaggaaggtagcgccagaggtgctgctattcttgccgcccagcttcgtgccggttccaacgctacggaagcagagaaaaagaccatcgccgatctgactggccgtctgtatgacatgaagaacggtactgaagcaggtgcaaagggtactaaaaactggaaatccaccatgcagcaggcgggttatcaggtacaggattttattgtgcaggttcagggtgggcaatccgcgttggtggcatttagtcagcagggttctcaactggccggcgcatttggtccgggcggggctgtgttgggcgcagtgattgcgcttagctcggtaattgccgggacgctgattacatcgttaagtggcggtaaaaatgccatggaagcccttaaagatgcgacggaggcgatggatcgggtaattaatatctctcaaaacggagtggctgccctatctgataaatacgcgatgttggctaaaacaaatgcagaagcagccactatccttcgtaatcaagccattattgagtacaacgtcgctgtttctaaaataccaaaggctataggtgacgcagcagcgtctgtaatcaactttggcgacaaggcattaagcgctttttcgggtgggtatgcgtcaattcagggatttagtgatcggcttgcggcgcttgaaattactaccgatgaatattccgaggcaatgaagcaggcgtacggagctggtcaggcattcgaggctacggcgaacagtattgggaatacagtgggctcagttgcgagcaagtttgggatatcggagcaggccgcatttaaactggttaagcagatggacgaggtgcaaaggacccgaacgcctgaagcacttcaaaggctggttattgaattacaaaataccaaaagctcctccgatagtggtgccagcgcaatcgctacgtttttgaagccccttacagaattagtcagcgccgcgggaatggcgaaagttaatttggctggaatgaatagcgaaatggatcttctgactgccggccagaagaacctcatcaaacagtctgagcgtaaccttgcgctttcaaagctgcagggggaagcgcgcgcacgactgcaggcgcaatatgctgctgaggatgccgggtttgcgaaagacgatccccatgctaagcgcatggaagatgacgcggccgccacgtatagaaatacgcaggcacagaaagacctacagtcccagcaaaagaaaggcgcatcacaagcggaatccattgcgcagaagctggagcgactgaagcagcaatccgatctcgcagctgattcaacaaaagaattaagccgcgaacaggcagttctcgcagcccagcaatcgctagggaaaggagcaactcaagagcagatcgcgctggctggtaaatatcgcggggaaatctgggatacagcaaacgcccttaaagctcaggccgctgctgaaaaactactaccggaagccagagaaaacgcgagctacaagcaggatgttgaagaccttaaaactgctttggcagctaagaagataagtcaggagcaatattaccaggcgagtgagcagcttgagcagcagcaccaggttaatttagccaaaatcagagcagagcaggcatctgttaaccccattgccgaggctagaggacaggttgacccggttcaacaactggctaatgagaatactcaaaaactgaagctcatgcagcagtaccagcagcaggagcaggccgttctaagccagtcgtataaaaacggccaaatgacttatgcggaatacatcgctgccaaacagacaacagacgctcagtatctcgcgctcagaaccgcacaggaaacacagtatgaacagcagcgaattgaagctcaatgggaaatcttccgcaatcagagccaggctaacgaattgctggccgcatcgctggaaggcctgcagaacagcacttcaagcgctcttactggcttaataaatgggactcaaagcctgcaggaatcattcgcaaatattggctcgacaatcctcaacagtgttgtaagcgccattgtggatatgggtgttcagtatgttaagagcctgattatgggtaaggccatgtcatctgccgcaaatgccgcgcagatagctgaggcaagtgctcttgccactgcctgggctcctgcagctatggcggcatctattgcgacccagggcaaagcatctgctattggtctagctgcttatagttcatctatggctgcaggacaggcgctttctattgccggcgctcgttataacggcgggccggtttccgctaactcaatgtatcgtgtaggtgagcacggaaagcctgagatattccaggcggccaatggcagccagtacatgataccgggcgacaacggacgggtgataagtaacaaggatatgcagggaggcggtggcgcagtcattcaccagcagatgaatgtgactattcacacgacaaatggcattacagaggaaaatttacggcagattgaatcccgaatgtataaagttgggagaaaagcggccctggatgagatgtttaaccaacagaggccgaaagggatattgcctccaaggagatag

SEQ ID NO: 86187 - DNA, 276 bp, Citrobacter koseri
atggtaaaggacagcaaagccgaggctctggaagcgaaggggctgtatcgcagggcagctacacgctggcaggaagtcatgatgacctgtacgaaggatgatgagcgtgaatgggttaagcagcgccgtgatgcgtgtctgacgaacgcgaagcgcccgccattgaaaaacgatgattatggcgatctgcataaagcagtaaaggaaactcagcgtcgcatgggaatagccagaccgaacggcgaggcatttaggttgaagggcaaagctatttag

SEQ ID NO: 86188 - DNA, 339 bp, Citrobacter koseri
atgattaccaaaaacttccgactgaatgcgctggcgaatcagtatgccgcagcgctgtatgaccatatcaagaccaccagcggcggcgattatttcatgattgatgcggatggcgagcctgttcgcgtggagatcgccgggggcgtaaatggcgtccgtgaccttgtagacggctacgcgctggaagcgctgaaagagcattacccgcaatgggaaagcgtagggatcgggctactggaaaagtgcgttaatgctggtggcctgactgataccgggcgcgagatatggcaaagcatgaccgccgacatgggcgcaacggtagggggtcacaatgcgtaa

SEQ ID NO: 86189 - DNA, 201 bp, Citrobacter koseri
atgagtaattttcgcgtgattgcctcctgttttgatggcgctgatgcgccgatcccggtcacatggtacggaaatgccgctagttccaatgatgctgtattgcaaatgacccacgaagcacagcgcaacggctggagcgtcggggtaattatttgcgtacagcagagaaaaatcagcaaggacatagaggtggcagcatga

SEQ ID NO: 86190 - DNA, 264 bp, Citrobacter koseri
atgaacataaataccatctaccgccacccggctgaactggaagccgatgcgatgctatcccgtgaagaagcgcacccggggagttgctcactggcagggcgtaccgcagaacgcatgacccgcgcccgcaatgggctggctcacgtaatgaccgaattagccccgcacatggacgcagagcaaacagcagtcgtgcagtgctggctgatgaaggttttggctattgtggatgccaccctgattgatgcggaggccagcgcatga

SEQ ID NO: 86191 - DNA, 831 bp, Citrobacter koseri
atgcccaccgtccagaataaagcctttcccttggctggcctgatgtatgcaaatgttaacgtctggagcaaagcagcccgccgccagattgcgacaaatagcgacgtttggaacctgtcaaaacctgacatttgccaccgccagatctttacaaatcttggtgttttcgggacaagtacgcacgcgcatgaatgcgaagctggcataacagtgccagctaatgccagctcctcattttctcgtcgtggtgacgaggagagtttcgagaccagtacgcgcacgcgcgaaggtgagtttctggagtccataaaaaagggcttgccgactatcgccaacccggtttatggttatagcgcaccagcaaaatctggtgccgggattggcgtcccggaaatgattaaggcgacacacgacgcgcctagcgtctttttttgtgccgttaatccaactcacgcttttttcagcgatgcgggtattattattcgcgccgctcacgaaataatggtgggctggatgggggcttctacggaagcgccggtttccttgatcgccggttacgccaaccctgttcagtccaccaccagcaagattggcgtctttggtggtgggtttaaaaccctgatcaaggaggctgccgctatgctggctactacccctacccaaaatccgcaattcatctggttaatcgctgctgttcgccgtgatatgccgacaattaccgccaaaatccatcacattgccgctgaaactgagcgcgaagcccgccgtacgctggcgcgagatcacgcctgtttctttgcatgccgtatccgtctggaggtggcagcatga

SEQ ID NO: 86192 - DNA, 813 bp, Citrobacter koseri
atgaagaagaatgtgtggcaagaaaagggaatacctgtcttacccaaagcatcagttccacgtgtttgtgatttaatcgggtgcgaattgcaggatctgctcacgttatgctcctatggcatgatttggattaaaaggaagatcagcgaggagccagcaagggcaaggattctatgtgataaggcgtttgagaaaagggctatagaattactgagcgcatcgcctttcagcagcctgtctcttgggtatgaaggaattaacattcatatcctttcagagccaaaaaaggttgaagattatccccgaacccatcattcccttttggagtttgaagttaaagcttcgggtgagtacatcttaaagcctctcggctatatgatttctaagctaactatcgaagcagacccatccgtcttaattaagttcaccactcacccgaagcttagttatcttcaagtggaccttaagaatcgaagccaagttttagctgatgagttgtggatcgacagggaagatattgagagtttatatgcttccaaaatcagtggtgagattatgcagtcgaagatatttcctgagcacaactcagatggcgcagtgatagatcttaatcttgccagggtgacggcaaagcaaaccaccgtgattgtttcactgcttaaggctgtcggagtaacagatgaagagttgaaaggcagcaccccaagactattggcaaaactccagaatatagccgctaagaacgggatcgacttccctgatattgaccctaagacgtggagggagtggctttcaagggagggggcgaggtag

SEQ ID NO: 86193 - DNA, 231 bp, Citrobacter koseri
atgatgccttttaagttaactaatgaacaacgtatcaaagtcttaagagattacggtgaaacttgtgatcgattagtacgagaaaaagagcggcaatatattacctctatttctcgctcaacagcgtggaaactggaacagtctggtaagtttccactgcgtaagtccattggtctgaaatcctgcggatggttgctaagtgacctgctctattggatcaatgagcgttag

SEQ ID NO: 86194 - DNA, 876 bp, Citrobacter koseri
atgcaaaaaactgacggccttctggccattgagaagcctctggcttcactgcctcctactcttcgcagtcttattcttaaacgccttcgtagtctcacacagtacgagccggttattggcattatgggcaaaagtgggtcaggtaaatcgtctctctgcaatgccctgttccagggcgaagtcacgcctgtcagcgatgtggcggcctgcacgcgcgatgtgctgcgcttccggtttcgcaatggcaatcacagcctgatgattgttgatttacctggtgttggtgaaagcgagcaacgtgacgaagaatacaccgcactgtatcgtcgcatcctacccgagctggatttggtgttatgggtcatcaaagctgatgatcgggcactgtcagtggatgaacatttttatcacaaggtgatgctggcgtatcagcgccgggtgctgtttgttgttaatcaggctgacaaggccgagccctgccatcagtggagtgttgccgataacctaccttccccggctcagatgtcgacgattaaggcgaagcgaaatgccgtacaacagcagtttctgccgcatcaccctgtttgtgtggtgtcagcacgaaccgggtggggtatggaatctctggtagataccatgatgaatagcctgcctgaccgggccaccagcccattgacgacacaactgcatggcaggctctgcacggagccggtcaggtcgcaggcccgtgacagctttggcgaagcggtgggtcgggtgttcgatacggcggagtcttcgtcgctcctgcccgccccgctgaaaacggtgattcgggccgtgcgtgatgcggtggtgtcggtggcacgggccgtctgggactggattttcttctga

SEQ ID NO: 86195 - DNA, 708 bp, Citrobacter koseri
atgactcaggctgagcatcgccatgaccggcttgctgtcagactatcgatgattattggtcgtctggtggcaggcgagacgctggatatacgcaaactggccgctgagtttggcgtgtcagttcgcaccctgcgccgggattttcgtgaacgactgatgtacctggacctggagtatcgtcagggccggtgccgtctgctgtccggcagtcgtcagcgggaactgacggtgatgacctttgcccgtcagtcgggcgttgagaccttgtttccgggacttgacggacatctggtcagttcacttctgggtgggccgggtgaatccccctgccttatctggcagggggaatctgcacagaccgtcaccgacagtggggtctttatccggctggtaaatgccatccaggaatgccggaaagtgactctgcgcggcaacggatgcaaccatacggatatctcaccctaccggctggttctgcatgccggtagctggtatctgacgggggcacaccagacccgcatcatcgcactgccactggctgatatccgggtcgtcacgcttcatcccgacacttttaccccggacaccgccgtgcgcgacatcctgtcccgtccggattttttacaggcattacctcatttccggttcattggtgaagtgttgtccggcttcgtccctgaaccacaacaacccgcaacagaaggataa

SEQ ID NO: 86196 - DNA, 216 bp, Citrobacter koseri
atgggattctgggataccgcagggaaactggctaaagaagtggcaaaagacgctctggacagtgcacgggaggtaagggtgattcatgaccggctggagagcaggggtagcgcagagctgagaaagataatcaccgacaacggtatgttcagcagcgcaacggagacggaaaagcgcctggcgcgcaaggttttgcgtgaccggggcgaactttga

SEQ ID NO: 86197 - DNA, 411 bp, Citrobacter koseri
atgaaagcattcatattgccattaatggtttcagtttttttattgagtacatcagttaatgctgcggcggttaaattaccccggacagtaattgatgtgacagacggcagtgagcagatgtgcggaagtgaggacgtgaaagacgggacgtgccgcctcactggtgtttcagatgatggtaaatatgctctgctgagcagtcctggaggttcggcctgttatgacccttatctcatcgctgtcaacctcgctaccggtaagggcaaaatgatggattataaccgtcatgcaacatgcagcggtgaagccactgcgaagtttgtccgctcaccagagaatggtcaccttactgtcgttatttacgaccccaccatcaaaaagaatgtcggtcttaatactattgacttttaa

SEQ ID NO: 86198 - DNA, 939 bp, Citrobacter koseri
atgtctcttgttttacgtaaattaaaacaggtaatactgatatcctcgctttgttttatttccgccggagtttacgccgcaagtgttgcaaaaacggcagcagatgcaatgcattgcaatcctgatgcagctaataatggcaacggatacggttcctgtcccttcctgggcagtatttacgattcggacccggtatttaagaaagaccttgatgacgcgctgacgtcagcaggacttgccgggttaacgggaaaacagggttcaatgaacggcccggacagcggattaattccggtggacgttggtggtgagaagtggctgcagggctctgtctgcgagcggggtaactgcggtgaccattatctgaaaatactgtatatcccctcagaacatgttattgccggtttttattacaacggtggtgaggaaaagatgtttggcgatatcggggatgcggaagtacgaatattacgccgtgatgttcctgacgttacgacagtgcagcaggctccggcattgccagtagcacctgcagacggcgcaccggcagacactatctggacctttaagggtgacagtggcaaaacgttatggcagatctgcggcggtcagagcagcagttgcaccattatcgccaacactaagtattacgttgccgttctgaaccgtaagtcagcaacgggctgtgctttcggtgatttttatgttgccgcccgcggtaccgcatcatggcggcagtatgataccggcacctgcagtgcggatgcgtatatccgcaagggcagcatcaacaacggtcagtatctgtcagttgatattggtatcaacggggtgctggtgaagcagttccctattggttactggtcaatgcagaaggaattttccggtaaccggcgcccgtcgtggtcaaagactaaggaaaaaaaccagcagcattaa

SEQ ID NO: 86199 - DNA, 444 bp, Citrobacter koseri
atggatacacaaaaccttcaattcactgagcgagaggcaattaccgcctcattgatccctgacgagttacgcatcgacttctggccacagcactttggcaccatcccgcaatggttaacgcttgagccccaaatctttgcttggatggatcgactgtgtgccgattatcacggtggtatctggaacttctcgacgctcagtaatggtggcgcttttatggctcctgaggcagagagcgatgagaagtgggcattattcaacagtatgaacggcaacggcgcggaatgtactggcgaagctgcagggattatcacctgcctgatggcatacagccaccatgcctgtcgtaccgaatatgacgcgatgactgagcactattatcgcttacgtgactttgcgatgaaccatccagagcgcagcgccattatgcatctcatcgactga

SEQ ID NO: 86200 - DNA, 234 bp, Citrobacter koseri
atgtcaaaacgattaccacccttaaatgcattacgtgtttttgatgccgcagcgcggcatttaagcttcactcgcgcagcagaagagctttttgtgacacaggccgcagtaagtcaccaaatcaagtcacttgaggattttttggggctaaaactgttccgtcgtcgcaatcgttcgcttttgctcacggaagaggggcagagctatttcctcgacatcaaagagattttttag

SEQ ID NO: 86201 - DNA, 1266 bp, Citrobacter koseri
atgagtaagtggcgagtctataccattggcgaattagttaaagataagattattgcaccgcccatggatggaaaccatggcgacattcatcctaaggggaatgattttgtattcgaaggcataccttttattatggcatcagatataaaagatggcgtaataagttttgatgagtgcaaatttattacaaaaaaccaagcggatggattaagaaaagggtttgcccaagagggggatgtgctactcactcataaagcaaccattggaagaacagcaatagtcccaaagacaaaatatccatatttaatgcttacgccgcaggttacgtattacagggttattgatacgaaactacttgaaaatcgttatttgaaatactgttttgataatgatactttccaaaaatcattggggttatgggctggtgctggttctactagagcatatttaggcattttaggtcagcataacctcgcgattaaaataccctgtgtagaaactcagaggaagattgctgacgttttgtcggtattagataacaaaatcgcctgcaacaaccgcatcaacaccgaactggaagcgatggcgaaaacgctgtacgactactggtttgttcagtttgatttccctgatgcaaacggaaaaccgtataaaacctccggcggggaaatggtgtataacgcgattctgaaacgggagattccggcagggtggacggttaacacactgtctcaaatagcgaatatcacaatggggcagtctccagccggggagtcttataacgaagatggaatcggaacgctattttttcagggttcaacggactttggttggcttttccctactcctcggcagtacacaacatcacccgcgagaatggcgaaaaaaggtgatattttactcagcgttcgtgcaccggttggggatatgaatattgccaatgccgattgttgtattggccgagggcttgcggcattaaacagcaaaagcagctcagatggatttttattctacgttatgaagtatttcaaaaaagtatttaatcgtcgaaatgcggaaggaacaacatttggttccatgacaaaagatgatttacattcactgcaagtcgtttgcccagaacccggattactgaagcgatatgacgatattgtttcagaatacaataaaatgatatttacgcgtagccttgaaaatcaggatctaatcaaactccgcgactggctcctccctttgcttatgaacggacagatcacagttaaataa

SEQ ID NO: 86202 - DNA, 1635 bp, Citrobacter koseri
gtggtagaactggaatttagagacaaaaccaaaaccctgatcgacagcctgaaaagcatctgtgcgaactacggtctgggtaacgacggtaacgaattcaaaatcatcactcaggcattcctgtacaaattcctgaacgacaaattcgcctttgaagccaaaaaggtggataaaagcatcgccagcgccgaaaaatgggaagtcgcactcaatcagatgagtgaagaacagcgggacaagctgcaactgaagatgagcgccgacaccgcgcgtctgaagccgcatcacttcattcagtatttatacaaccgccaaaatgaggcgaatttcgccaccacttttgacgacaccctgatggacatcgccgccaccaacaatgacgtcttcgcggtcaaaaccgacggcggcgcgaaagtggtgctgtttgagcgcctcagccagtacatcgccgacgaatcaaagcgcgatgacttctgccgcgccatcatcaacaaactggccgatttcagcttcgaacgtatcttcacgcagaaattcgacttctacgccactatctttgaatacctgattaaagactacaacagcaactccggcggcaaatacgccgaatactacacaccccacgccgttgcgcgcatcatggcggaaatcctggtgccaaaagcgcagcagggtgtggtgcgcgacgtaagctgttacgacccgtccgccggttccggcaccttactgatgaacgtggcgcacgccatcggcgaagatcgttgcagcatctttgcgcaggacatctcacagaaatccaccagcctgctgcgcctgaatctgatcctcaacaatttggtgcattcgatccccaacgttatccagggcaacaccattctgcatccgttccacaaggacggcagcgcgctgaaacgctttgactacattgtctccaacccgccgtttaagatggatttcagcgatttccgtgacgcactggacagcaaggaaaaccagcaacgtttctttgccgggataccgaaaatcaaagccaaagccagggacaaaatggagatttaccagttgttcctgcaacacatcattttctcgctgaaaccgggaggtaaggcagcgattgtggtgccgaccgggtttatcactgcgcagtcgggcattgataaagggattcgcgaacatctggtgcaaaacaagatgctggcgggcgtggtttccatgccgtcgaatatcttcgccaccaccggcaccaacgtgtcgatcctgtttattgacaccagcaacaaagagaaagtggtgctgatcgacgcctcgaatttaggtgaaaaggtcaaagacggcaaaaaccagaaaaccgtactgacggaagaagaagagcagcgtatctgcgaagtgttcaacaataagtggagcgaagaggatttctcggtggtggtcagttatgacgcgatcgccgggaaaaattactcgttcagcgccggccagtattttgatgtgaaaattgaatacaccgatatgacgccggaacagtttgccgcaaagatgactggatttacggagaatctggagagtttgtttagtcagtcgcgcgagctggaagcagagattaagaagcagatggcgggactgaagtatgagtaa

SEQ ID NO: 86203 - DNA, 3099 bp, Citrobacter koseri
atgaaattcaccgaagacacccgggtaaaaatccccgtcatcctccacctgatacggctgggctaccgctacctgtctctgaaagaacaacactgggacaaagaaaccaacatctttcctgaccttttcaccgctgcagttggcagaattaaccccggaattgcgcccgacgacatcaggcgcctgttaaaagatctcacgctgcttctcgacaacgacgacctgggccgcgccttctttgaaaaactcagcgaccgttccggcatcaaactgatagacttcgacaatttcaacaacaacagcttccatgtcgtcaccgaactgacttgcgaaaacggcgatgaagagttccgcccggacatcacgctactgatcaatggcatgccactgatctttatcgaagtgaaaaagcccaacaaccgcgaaggtatcgtcgcagaacgcaaccgcatcaacgaacgctttaagaaccccaaattcaaacgcttcgccaatatcacccagttcatgatcttctccaacaacatggagtatgacgacagtgacccggagccgattcagggggcattctacgccagcagctcatacagcaacccggtattcaactacttccgcgaagaagaactcttcaacctgaccaacttactgaaaccgctgtcagaagaaaccgaaatcgccgttctgaaagacaacaacctggaagtcattcgtaccaacccggaatttcagaccaacaaagatcacaaccgcccgaccaaccgcctttgcaccgcgctgttgagccgcgatcggctggcatttatcctgcgctatgcgctggtgtacgtcgccgaaccgggcggcatccagaagcacatcatgcgttacccgcagctcttcgccaccaaagcaatcgagcacaaactgaacgctggcgtgaaaaaaggcattatctggcacacccagggcagtggaaaaaccgcactggcttactacaacgtgcgcttcctgacggattacttccagaatcagcaggtgatcccaaaattctactttattgttgaccgtctggatctgctccagcaggcgcagcgtgaattttccgcccgtggcttaatcgttcaccttatcgactcccgcgaagccttcacccgcgatatcaaagcgacgcaggcgctgcacaaccaccacggcaaagcggaaatcaccgtcgtcaatatccataaattccgcgatgacccggacgtcgtcaccaccaaagactacgacatcagcatccagcgcgtgtacttcctcgatgaagtccaccgcagctacaaccctaaagggagcttcctggcgaacttaacccagtcggataccaacgccatcaaaattggcctgaccggcacgccgctgctgggaacggactacaactcccgtgatatcttcggcgactacatccacaaatactactacaacgcctccattgccgatggctacacgctgcgcctgatccgcgaagagatcgccaccaactaccggatgatcctgcaacaggcgctaaaagaggtggaagtcagaatgggcgatgtggatcgcaaattcatctatgcccatcccagcttcgtcaaaccgatgctgaactatatcgtcaccgactttgccaaaagccggggcgcgctgaatgatgacaccatcggcggcatggtgatttgcgacagctctgaacaggccaaacagatgtttgagatattcaacactgactacaccgaatcgcccaccgccgccgatgacgtcaccgaaaaaatgcctgtattacaggctgcagaacctgccgccgtttaccacatccacgccaatgaaacgcagaaaatcaaacgcgccgccctgatcctgcacgacgtcggtagcaaacaggaacgcaaagagtgggtggagcaattcaaagcgggcgagattgacctgctatttgtctacaacatgctgctcaccggctttgatgccaagcggctgaaaaaactctatctcgggcgggtgattagaaagcacaatctgctccaggcactgacccgcgtcaaccgaacctacaatcacttccgctacggttacgtagtggactttgccgacatccgccaggaatttgacgccaccaacaaagcctacttcgaagagctgcaggccgaactgggcgacgaaatggagcattactcccgtctgttcaaatcggcggaagagatccgcgaagaaatcgaacatatcaaagacgttctgttcagcttcgataccgaaaacgcggaaatcttcactgaccagataagccagatccaggaccgggaaactgcgctggcgctgaaaaacgcgctggccgacgcccgcagcctgtacaacctgatccgcctccagggcaacactgaatttctccaggcgctggacttcaacaagctcaacatcctgtaccgcgaagccagccaccggctcgacttactcaacctgaaagcggatctggaacagggcgttgacctctccggcctgctgaaccgggcgctggaagaggttgtctttgaattccacaaagtgggcgaagaagagctggtactggccgatgaactgaaagagacgctgcgccgcacccgcgaggcgctggccgccaacttcgaccagcaggacccgcagttcgtcagcttgaaagacgagctggagcgcctgttcaagaaaaagaaactcagcgaggtcacccggcaagaaatggttgcgaatatcggcacactcaataaaattcatgaccgcatcaaagagctgaaccgccagaacgccctgctacgccagaaatacaggggcgacgtgaaatacgcgcgaactcacaaacgcctgcgcgagctcggcggccttagcgagccggagcgtaaaatctttgaagcactgcttggcgttaagcgggatgcggatgaaaaagtgctgaacaacagcctgatactgaacaatgaaagctattttgagcgccagattgtgtcatgtgtactcgatcactttgaacaacagcagcacatcaccctcagcgcgaaagcggctggcgacatcaaccgcctgattgtggcggaatacctgaacgaatttaataccggagcacgaacgtggtag

SEQ ID NO: 86204 - DNA, 918 bp, Citrobacter koseri
atgacagaatttcatgacgttcatttggaactacttgttgaagcctattcgcttcctcaggcagagcgactggcgtacatcgatttgtgtatacgctacctcggcagcatatccagggccgaaattatggctgagttcaaagttgcacaggctgcagcctcaaaagatcttgctttatatcgggaactcaaaccaggtaactgtagtattgatacggcaaccaaaaggacggttatttctcatggtacctatactccattggtgcagattagtgttcatacggcgctgaatctgatccagtatggtttctctcgttcggagctgatgcaaaaacgtccgatgctgccgattgatgagatagacccgctttatctacccgagcgtttgaaagaagaacaggtctatgttgtcaccagggcaataaaaggccgctatgcaatcaaatgcacatatggctcagaaagtggcgagcatggcaaacggatactatttccatcagcattatttgtagatcggaaaaactggtacttcagagcttatgatcgaaacgattcggatccaaaactgagtgggtttaaaaactttaagttatcgagaatttttgatgttgagcaagaggaatcgatactgccgacggttgcagagttgacggacagagaatggaatgaggaggttacctttatcattgcattcaaaaaggatcttcgacctgagattgtcgataaaatctctcgcgagttttcgatcagcggtaatgtgcattctgttacatgtcgcgctgctttggcctggtacgtaaagaccaactggaaaatagatctgacagggactaacaataatggttggttgtattttgatgtcctgaataaagaagctttacaagaagttaaatgcctggagaagttgtttgaagagtaa

SEQ ID NO: 86205 - DNA, 516 bp, Citrobacter koseri
atggaaaaagtaaccgaccagtattcacccgaaattgcgcggcacaagctcaatgcttatttttcaggtaatttcatcatgcttgacgtgataaagcgtttgcaaaaatcaagcctgtgcgtatttgcagccttatgtgatggaaaaacgatcacaactgcagggtatgaaattaatgccgattttagcgttaaacgagcctctgcggtcattcactccttgaagctgaagaatctccctatctcaacaaattccgtttcaacgggctctgatgttggtggaatcaccaatcaggcggtttttttcatcagtaaagaggatcttcattctctgaagtccgatccggagaggattatgagaaaatgcgcaaggctacacgcgcaacataaacgctcacatgcacaaagggacattgctcgtctatgcaaggagtttggtaaggaagcgatacttaaattagtaaaccaagctgcagccaaccctaagatgcctcctgatgggatgagtgcatgttaa

SEQ ID NO: 86206 - DNA, 132 bp, Citrobacter koseri
atggctaccctcgttttttcctattctcatgcagatgaagccttgcgtaacgagctcgaaacgcatctctcaccgttaaaacgtatgggaacaatcagcgcgtggcatgaccgacgtattgctcctaagtag

SEQ ID NO: 86207 - DNA, 252 bp, Citrobacter koseri
atgtgctttctgatgctgaaagctgtagtggtcaagctggactgtgggggtgacgacatgtgtatgctaaagtgccacctagcaaatgaccgtcaaaatcactttgtgacggctgacgaagccatgagcgcaccgaggcagatatggagctgcgcctcatgtggctgtcgtctggcgctgcatgcaggctcttcctctgtgatccggcctagtttgaaaacgacctgcgctcagtggctcaacatgtgttga

SEQ ID NO: 86208 - DNA, 420 bp, Citrobacter koseri
atgtacgcaaaatcctttatctctttcgatggtaacggtcgtctgatcggtgcccgtaccgcgcagaccgccccttacgaccgctacacctgccatctctgcggcagcgccctgcagtaccatccggaatacgacacggaacgtccgtggtttgaacaccggtctgacgcgctgacggagaacgggcgacaacactgcccgtatgttaaccctgaactgaaagaaacccgtcttatccggcaacttctatcttatgtaccggatgcacgcccgctggtttaccaggccgactggcactgcagcggctgtgatggcgattaccacggggaacgctactgtctgacctgccgaaccggtgagcacagtcatgtgctttctgatgctgaaagctgtagtggtcaagctggactgtgggggtga

SEQ ID NO: 86209 - DNA, 594 bp, Citrobacter koseri
atgaaaggctataaaccgcgttacgaagaactaaagaaatattaccagacctggctgacaggttatacccggctggcagtctgcctgggaatgtgccatcagaatataacccaccatcataccatgacggttggcagccttaagtttccgggggagggagaggttattgctgttgttccccagtgcctgcaccggattatttatggcagaacagtagccccactgactgttaatgatgacctgagcgtcagtttatttacccaggaacatctgctggctcaccatcccatgctggaggggattttgctgtcggagtgcgtgcgattaaaacagcgtcctctggcaaataaactcatcagtttgttccaccagttcagcggtaacgagttgcgtctgaagctggtctggctgtgctggtacgatttgatgctggggaattgccttgatgactggacagacaacctcaggttcaaaaaagacaaagaaatggatatctggatcattgatcggcaggcagaaaaccctgcgttgacccgactgatggacgagtacgtctgctttgcatggcggacgacagcggaaccactgaattag

SEQ ID NO: 86210 - DNA, 207 bp, Citrobacter koseri
atgactacccgcccctctcttctggaagaccagtttgttgacatggcatttattacgagtctgaccgggcttacggataaatggtactacaaacttattaaagacggtcttttcccaaaaccggtgaaactgggacgcagttcccgatggttaaaaagcgaagtggaagcctggcttcaggaacgtattaaccagtcccgtaaataa

SEQ ID NO: 86211 - DNA, 1068 bp, Citrobacter koseri
atggaaggtcattcagacaaaacgctaaaggcactggataaaaaaacagcatggttaaaaaataatcctagagctttccacttttatctcttccgggcgtgctcactaatctcggaacaattagaaaaagatatcctctctgaggatgactgccccccaccttttccccttgaggaaagatataatgctttcaacagaactatatccaccagtcaatatactcagccttcccgcgatattatgccgtggtcgcaggctcttcctgctgagttagtggacactattgataaacaatccagtactattgatgctaaaaataaaacttcttcctccgcattctcgtcaccggagaaaataaaccttagtacctgtaaacaaggtaagaaagaaaagaccgacaaacttccacctgaaaatatcagaaatgcaaacgggttactttttaaaagaattaaggatgtctcagagagaaatgttggcttttctttattcgtacacctgttgataaccttcgtaaaaaagcctcaaaaaatatcaaatttaatctcatctatagatatcgaatggcgtcaccagtacgccctttacccagcacctttttcatgggttaacagcaaagatgaaactcaatgccagtggttatggcaacaaatgcaggaacgatgcttaggcattccattaaaaccacatgataataaagagaaatattattttatctttgctatttttgataactggaaaggatggactaccgagcaggaatcttatcttaacggcaaaaataaaaggcgtaataaaggaaagtttcttggacatggcatcatgccggaaaatggcatcaataaaaatcataaagatattcttcttgatgagcttaaaaaagcatgggagcaaaaggaaagaagagccagaagagctaaggaaccagctgctgtgaagttgaccaaagcggctcaaaaaaaacttgagtttattgcgcatgtagagaagaccacatcgaaggaaattcttaacgaactgattaacaatgcttttaatgatgcgaagagtcaatcacggcaatcataa

SEQ ID NO: 86212 - DNA, 714 bp, Citrobacter koseri
atgtctcagcctgagcgtcgctatgaccgcctgtctgtccggctgtcgctgattatcagccgtctgctcgcaggtgaaacactgaatatgcgtaaactggcggcggagtttggcgtctcggagcgtaccctgcatcgtgatttccgcgaacgtctgatttatctcgaccttgagtatcagaatggctgctgccgtctgctgaccggtggacgtcaggaaattcgggctgaggccgcaatgcagtttgcccgtcagtcaggcactgacgcgctgtttccagagatggatcaccatctggtcagctcattactaagcggtcagggcagcccgccatgccttatctggcatcaggggacatccgtaccatcttcccgcccgggcatcttcacccgactggtcagggcggtatcagaacagcgaaaggtaaccctgctggccgacgggtgccgttgcgacagccttgctccctaccggctgattttctgttccggtgagtggtttctggccggagaacacctcggccggataaccatttttgcactgcacactgttcactctgtgatgtttcacccggaaaccttcacaccagacggatatttcacccgcatcctgtcaagcccggattttttacaggcgttacctcattttcatctttttcattcactgctcactgacgacagttacgggcagattatccataaggaacaggtatga

SEQ ID NO: 86213 - DNA, 636 bp, Citrobacter koseri
atgaaattactcaccacggcggcgctggtcgccagcctctgcattatctcagcgcccccggtcctcgctgaaaatattgtgggttcagtcagaacctggaagtccatgcaggcagatggctggaaatccgctgatggatacgatgataaccatatgcataacgcactctatcaggcggttgtgctcgacaattatccctggactaatcacttttttcttcgcagcagagatggaggctcgatttttctggcagacaaaaaatccctgacggtcagatacattgatataaaaccccgtgacgaatatccgctacatctccggattatttatcagggcaataatgaaggacagggctgttatttcgctgtcgttgatgaccggatggctaactactggacagccgttgaagacaagctgctctaccagtatcccgccgttgaaaatgttgatgaaaaagcggctgaactcaaaaaacagttcacgccggaagtcatgatgatggtaaaggacaattgtgttaacaaacggcagcaggcagcgcttgcagcccggcgtactgaaaaagacagggaattgcaacagtgggtggcacagcagagtcttgctgagctatgccgtcgtaccggtaactgctga

SEQ ID NO: 86214 - DNA, 450 bp, Citrobacter koseri
atgaagaagctgaaaggcgttctctcagtttgcgctctgagcctttgcctgctgtcaccggctcaggccgaagaacagcgttacatcagtatccgtaataccgacatggtctgggtgtcgggcaatatctgcgtgtggcagtttcgtctggataacggcggaagtggcgaaggattcggacctttgacactctccctgcgcctgaaagataaagggggaaacacgctggcgatggggaatatggcggtggctgcatttggcgacagcgatgccacccgaactcaggaagcctcactggaacatgaatgtgtggaaaacgtcagttccatcgaaatcatgaaggcaacggaagcttctgatggttaccagactgacctgccgctgtcagtgtttgacccgcagtattatcgtccactaccggtgtcggttgccgggggtaagacattctga

SEQ ID NO: 86215 - DNA, 231 bp, Citrobacter koseri
atgcctgaactcaatgaactgcctgatggatcgtttacgcgccagcaggcagaggtggttgcggctcaatataccagtgttgcgatagaggacgaccagggtacgcatttccgtctggttatccgtcatgagcgttgcatggtctggcgagcctggaacgttgagccggatggcggttactggctgaaccggtatatcgctcgttatggcctccgcaaattcccttcataa

SEQ ID NO: 86216 - DNA, 351 bp, Citrobacter koseri
atgaaaatcaaaaacaccctttttgtaatattaatgttatccctgccagccatttctgctgaacattcggaaatgaaaatgtcagatatgcactcatcggcatcatcacaggaatatatggctggcatgaaaaatatgcatgaaaaaatgatggccgccgttaatgaatccaatcccgataaggcctttgcaaaaggtatgatcgcacaccatgaaggggcaatcgcaatggctgagaccgagctcaaatacggaaaagatcccgaaatgagaaagcttgcgcaggacatcattaaagctcagaaaggtgaaatcgagcagatgaataaatggcttggcagtcaaaaataa

SEQ ID NO: 86217 - DNA, 315 bp, Citrobacter koseri
atgttcaggataatccagcctaatacctggtacgccgacatgttcggtgagccatgcaaaatcctccgcgctacacacgaagtcattcactacacccgcaacggccgcacctgcatcgccagcatgggtcgctttcaacaagaattcgagccgccgaccaaagcacaggctgagcggatcgccgaagaaatcgaaacagcagagcacatcgaaaaattaaggagcatgagacgtgatcggaatactcaagccggtaccggaatcgcagtggccggtacgatgccacgactccaaacggagcaacgtgtgggctaa

SEQ ID NO: 86218 - DNA, 348 bp, Citrobacter koseri
atggattacagcaaactcagcgatggtcaaatcagcgtgcttctcgcaaaccttcttaagccgaaatatgaagcagaaatcagtcctcatcactctggaggtgctcagcttagctgggattggtgtggaaccaaagcaaccactggcttcttccctttgcacaaagcggaagagcttttcccagcaatgaaaaagtatcggatcggcctatccccatcaggaaagactgtgtggacggcatcaaccgagtcaggtgtcaccgccactcaccgtaatccacttcgcgccgtggcaatcgtctacctccttttgcgggagtcagccaatgttcaggataatccagcctaa

SEQ ID NO: 86219 - DNA, 216 bp, Citrobacter koseri
atgagcaataaagaatacgaacaggcgtttccaacccgagatgataattacgactccaaatactctggcccgggcatgacgctgcgtgactacttcgcggcgaaggctatgcagggaatcatcagcagcgaatgcaactatggagcgtttagtgatttagcaagcgatgcatacagcattgccgacgccatgctccgcgcccgggaggcatcatga

SEQ ID NO: 86220 - DNA, 633 bp, Citrobacter koseri
atgagccttgcggatcgcgttaaacaaaaaagaattgagctggggttaacccagacagaagctgctgagaaggccggtatccggcagcagtcatggcagagcattgaagatgggaaaactctcaagccacgtaatataattggaatagccaaggcgcttaaatgcgatgctgattggctaatgaacggcggcgcgtttatgccgatggcagaggtcaacagcaggagagttccgttgataagctatgtacaggcaggagcactggctgagaaaagccctattgaggctttcgatggcagccttgaatacatcctcactgatctggatgtgtcccagcacacttttgcgttgcgcattgaaggcgactcaatggaacctgacttcaaggcaggagacgttattattgttgaccctgagattgaacccacgcccggggaatttgttgttgcgaagaacggcggaacacaggcgacattcaagaaataccgcccgacatgggtagaccctctcggctgccagcactttgaactggtcccactcaatgacgactaccctgtcattaacagcgatcaccagcctttaaccatcatcggtgtaatgattgagcaccgcatttaccgccgcaaacgctaa

SEQ ID NO: 86221 - DNA, 222 bp, Citrobacter koseri
atggaaacaatttctcaacgcctcaagcaaaaacgtgaagagatgaatctgtctcaggaccagctggcaaaactggcgggtatgaaacagcaatcacttcaggccattgaggccgggactactaagcgtccacgttatttggttgagctggctcgggctctcaaatgtgaacctgaatggcttctttttggcgatgagccgaataaaacaacagccgcttaa

SEQ ID NO: 86222 - DNA, 690 bp, Citrobacter koseri
atgaacagtcagcaactggaatacgtacgtcagcagctcattgtggcgaccgcagatctgagcggggcgacgaaagggcaactggtggctttcgctgagaacgcgcaattcactgctacggcgcgcagccgggggcggaagaaagtctatgacgtgcagagaaagcgcatggttaaccccgatggcccgccgatgagtggcagccagtcacgcgccaagggatcgtcaatcgcgctggtgtgcccggtagagttcgtgaccgcatcgtggcgccgcgctgtcctgtcgctggaggaccaccagaaagcgtggctgctgtggaactacagcgagaatatccgcttcgaatatcaggtagcgataacacagtgggcgtgggctgagttccgggagcaactcggcgcgaagaaggtggcgggcaaaacgatggagcgcctgaagaatcttatatggctggcggcgcaggatgtgaaatcggagctgtcggggcgtgaaacctacgaataccaggcgctggcagaactggcgggcgtggctaaatccacctggacagaaacgtatctgcctcactggctagctatgcgtgacagctttaagcgactcgataacagttcgcttatctccgtaacgcgatcacgttcacaacaaaaggcgacaaatttagatgtaagtcttgcaaaaccgaactga

SEQ ID NO: 86223 - DNA, 480 bp, Citrobacter koseri
atggctgcactaaaaccagaagtgaaagccgccattgttcaaatgcttgcgtgctatgacaccctgtcgattgttgttgacgctatccaaaaagatttcgggataaaagtaaccccacagcaagtcgaatcgcacgatccgacgaaggtgagtggaaaagggttagcaaaaaaatgggttgatctgttcaacgcaactcgcgaacgcttccagaatgaaatttccgatatcccgatcgccaataaagcgtacaggttgcgcgtgctcgaccgaatggcgaccaacgctgaaaagatgaagaactacggcatgacctcgcagcttatcgagcaggccgccaaagaaatgggcgatgcctacaccaataagcacaagtttgagcattccggcccgaatggtggtgccatccacacggtcaccatgagcaaagaggaatacaaatccgcacggcaggagatgatggaggatgacgactgctga

SEQ ID NO: 86224 - DNA, 183 bp, Citrobacter koseri
atgagtagcgtttattttgagtcaaagaaaattggcaacatctcctgcacgcaggttaaggctggtggagtggaagcaattatgaagcaggtaggtgatcgcaaggtcattaaatcgcgaggtcgtggcaacgtgcgacaggttaaaaccatcgccagaacgttgcataaaactattcaataa

SEQ ID NO: 86225 - DNA, 216 bp, Citrobacter koseri
atgaccgaactggaaactcaattattgagcgcattcgagcaactgcagcaggattacgcgcagcagctgagcgcgtgggaagccgcctcctcggagttgcagaggatgtttggcattacgcaacgggagaacgcggcgctgagcgagcgcgtatcggacttgagcaggcaggtgcagagtttaagcgagcagctgcgccgcttgtccgtgagatga

SEQ ID NO: 86226 - DNA, 492 bp, Citrobacter koseri
atgagcagtcttttaacgctggcgcaggacttggagcagaaatcgaaagcgcagcggcaatctaccggcgagatgctgaaagccgcattcagcgagcacgaggcgtatgtaaatcaggaactgagcgaaagcgcgaagcgaatcaacaacgctatcctcgaccacgaccagaagctggcctcagctatcagcctgaacaccagagggatactgaaaaccatcgggcggacgtggctgattatcgccggcgtgtcgttcctgttgatctgcacgagcgggagcattctgtggtggcaggggcagaaaattctcgacaactaccaggccatcagcgagcagaaagattcgctgacgaagctgaacgcgcagacgtggggcgtgagctttcagacgaccagcgacggacggcgctttctggtgatgccggcaggaacaacgccggaagccattccctacaacggtacgacatgggtacaactgaaacaggactga

SEQ ID NO: 86227 - DNA, 300 bp, Citrobacter koseri
atgcagtcccagccggccattcaccaccgtctgccacgcatcgatgcgcggacgatcggcccggtcgtaataaggctgcaggcgttttccggtcaacagttcagtgttcggaatgaggaaattcagctccacccgccttttgtcggcgtgttccacccacagcacgctgtactggtctttatcgagtccgggcatcagaacccgctcgaaactctccatcagcttttcgcgctgaccgggcgccaggtcactctcggcaaacgacagcaccccggaagtgtatttcttggcatatggtga

SEQ ID NO: 86228 - DNA, 345 bp, Citrobacter koseri
ttgaataaaaaacgcgacaagatgctgaccatgtgggtcacgcaggatgagcatcagcagttgcttgaacgctgtgacggcaaacagctggcggcgtggatgcggcaaacctgcctcgatacccggccggcgcggtcatcgcggctaccgtccatcgatcctgttttactgcgtcagctcgccggcatgggcaataacctgaaccagatcgcccggaaaattaacggcggtcagtggtcaggtgctgatcgggttcaggtggtggctgcgctgatggccatcgatgccggccttgaacagctgcggcatacggtgaggaagaacggagctggcgatgatcgttaa

SEQ ID NO: 86229 - DNA, 180 bp, Citrobacter koseri
atgtttttaggtacttttattgttttggcgggaatcctttctcttttagagagccttggcattgttgctgctgaggttaagtggggaatgccgttagcagttatttgcttcggcttgcatttggtttatgaagccattagagccaggaaagaaagaatgagtgagaaaggatcttcttga

SEQ ID NO: 86230 - DNA, 294 bp, Citrobacter koseri
atgctaagcgataaaatcagagaactgaggagcatgcgtggactttcattggaacagctcgccaatatggtaggttcaaccaaaagctacatttgggaattagaaaagaaacccgagataaaaccgtctgccgaacttgtttctaaactggctcaagcgttaaatgttacaatggactccctgatggatgagagtaaggaaaatgaccgagacatcgttttctttagagaatacaaaaacctatcagaagaaactaaagtacaattgatgagtatattgcaagcaataaaataa

SEQ ID NO: 86231 - DNA, 765 bp, Citrobacter koseri
atgactacacccaggctccaagctgcactggtttccgagcagtggcttagtggaaagcacttagctgatgctcttccggtcgattgcattcagatagctgaaagcctggggatcaaagtccaaggggctcctcttaaagatgaattccaaggagccctttttatcactcctggtgtaaccgccatcatttacaacgaaaacataaaagaagatggaagaaaaaacttcaccatagcccatgaaataggccactactgcctgcatagcgacagagaggaagttcaatgtcgattagaggatgtgggagcattttctttaactccgcatggtaaagagatagaaaaagaggcaaatgaatttgctgcatgcctgttaatgccggaaaaagatgtacagcaacaactattagataaaaacctcgatatcaagctagtgcttgaactcgctttgcggtacggaacgacagtaacagcgaccgcttgtcagatggttcacgtgtctgatataccgcttgccgttgttatgttaaacgatgataactctacaaaatggtgccttcgtaattctcatttccgtgatttttttatcaagaaagggacacacataaatctcccggaacacttaccagaggagcagtctccaacacaccaagacatctggcttccaggcccggtgaaaagtgtatggagtttaaaggcttcatctttagatatggaagaatacaagcaaaggatctatatgatttcaggtagtaaacctgcttaa

SEQ ID NO: 86232 - DNA, 510 bp, Citrobacter koseri
atggctatcggcgataacgcactgcgcaacgcaattgcgttttatatggaatggatcagtgacgtatccgcctcgggccaaatgctacccgatgatgaatggtctgcacccttattcacctacctactgaccaaaaagcaactcaatgatctaaataaactatgtgcagaaaatgattggccgccacaaacatgcaatgggattacatttttcccacaaacaatcaagcacatactaacatccagaggcgggaaagatggcctgagctggcaagaatgcgcggaagttttagccgcagccctcaacccaagaagctctgtagctgtagaaaaagggcatgatcagcaagttattgttttgaattctttagatgtactgaaagtaggaccaacaggtcaaaaataccgagggatgttgatagtggaagtatccataaacgatttggccccggttactgcgtatcacgcgtccgaggccaaaagtcgtgccattatgagaaacggcaggtag

SEQ ID NO: 86233 - DNA, 432 bp, Citrobacter koseri
gtggcaaaaacattgctcaacctttcacaggcagcacaggcagccggcatcacaagaagaacgctgtataaccacgtaaaacaagggaaagttaccgtgtcacgcgacgggaaaaacaacccagttgtggatgtatctgaactgatccgcgtatacggcaatgtgaatttacctgagaaacaaattcccagtgtttcacaccgtgaaaatacacagaaaaatttcccacacgagcaactgacagccatgcagaaagagctggctgaaatgaaacaggccattacgctgatgctggaagacaaaacgctgcgggaaaaagaaaatcagcagcatgaggacgagaaaaaccagctgcgggaagaaatcaaaaagctcagcgaaagcctggagcaggcacaaaaaaaagggttctggtccaagctgttcggttaa

SEQ ID NO: 86234 - DNA, 360 bp, Citrobacter koseri
  misc_feature (25)..(34): n is a, c, g, or t
atgttcgcgcccttagttagctttnnnnnnnnnnttattggtcttgaccagaacaattttggcttcttctggttcagccatccccttcacgtcagagaacgcatttttatcaacccagcccggaacgccatccagtttccacgtataggtcacttgtgtgattttagcgccagcgccatcactcggttcagtccaactggtgatctcaacaacagcacgatggcccacgcaggcaccttcctcacggttccaaaaatcaacctcttgtcccttgtctgttacttccagaacatcaacactactaaaaccgttaggctgttgagaaacattaagcagaccctgctcaacaagccctcttaa

SEQ ID NO: 86235 - DNA, 567 bp, Citrobacter koseri
atgatcatccagtcgaaacttatccgcgccgccctggtgtgcgctgcgaaaaacgatgtccgttacttcctgaacggggtgcatatcactccgaaatatatcgagtccactaacgggcatgttgcgttgcgtatggagcacggcatcaggacgaagaaaaatatcatcgttcagtttgaagggccggttccggcgaaagcagaaactaccgaactggtattcaacaaagaggcgtttgctattcaccgcgacgcattcgaacgccgcatttcgatcaccggcatcaggctggttgacgggcgctttcctgacatggagcgcgtcatgccgaaaaaagtggatttcagtatcaatcctgttatccaggctgaatatctcagctatccggaaaaaatgtttggtcgcgagcgaaagtttattcccgttcagttacgtccttccggtgaggatggcgcggtacgcattcagttcgataccgtgatcaacgccagatacggtaaccctgagttcgtcgtgatgccgtgccgtgatgatgctttcaaaattgttgaggagtgtctggcatga

SEQ ID NO: 86236 - DNA, 819 bp, Citrobacter koseri
atgaaaaaccaactgatgacctttagctctgaagaactgagcttttcgatgagcggaattctttacaaagacaaacccgcctttgatgccgtcgaactggcgaagtcactgggctatgccgatccacatcaggcgcttaaaaaccactgtaaatcattgattaaacttgattccgttgaatcgacggaattgggatttggtttccgtccgaagggtatcactctggcgggtcaggctgatttgttccggcttatcctgcgcagtaatctcccttctgctgagcgtattcaggactgggtgtgtgaagacgtacttccatccattatggaaacaggctcgtacaacaaacatcagtccgttgttgaagcgaagcagcccgaaattagtcagcccccagatatgacctctctggctcgcgttgtagctgaagccaccgcgttcgcaatggtgaaagtcattatggaggctggcggccatcaggattcggcaccactgagtgatgcgaagattatcgagacaaaggctgggtttgttaacgatgatgatgaattcattccagtacacaaggcgtcatgggaaacggggctgtccgatccttcctgccgtcgccttgtccagttcgcaaatctgccctccagacagttaccgggcgttcgcggtctgtgtgtgcatcgtgaatcattcctgcatgcctttcaggtgctgcttgaagaatcaacccgtccgagtggcaagcgcaagcgctggcagcatcctgaatttggcggcttcattctgcgtaaagatccgaaagagatcttcggggaggaggaggcatga

SEQ ID NO: 86237 - DNA, 225 bp, Citrobacter koseri
atgaataaagaatcaactttcaaaggcctcactctcgaatctgaaaccgcttttcgtcagatcgctgtaatgattgaatctggattaattttttcagctgtagacggggaagacagttcagatctgagcgactgcatctttcacttagcaatgcaatacgccgaagctgcacacgattatgcgagggagagcagaaaaaatgaaaactccagtcgaaatgcttga

SEQ ID NO: 86238 - DNA, 702 bp, Citrobacter koseri
atgaatttttctgaacgattgaaggctgcaatggacttaaggggatactctcaagggaggctggcaagagatgtaggaatggcccaatcaagcgttaacaagctgttgaatggggcatcaggctcaagaaaggtagttgaaatagcctcagtgctcaaaataagtccagaatggttgtcgcatggcgttggcaatatgcaaaaaatcaccccaacacctctcccttcacttcccgaagagaccggttcgaaagaagctccaaagggtgtttttcgtgttgaggtgctagatatttcagctagtgcgggaccagggacattcctcgtctcagactttgtagaagctgtacatgcgatcgagttttcatccgataccgccagatctctctttggtaaccgctccgctagcattatcaaaatgattaccgttgatggagatagcatgtctcctacgctaatggctggagatcaggtttttgtcgatgtatcagtgagaaactttgaaacggatggcatctatacctttgttttcggtagaacttttcatatcaagcgccttcagatgcaaggcttgaaactcgctgtaatttccgacaatcctatttatcagaactggtttgttacagaagatgatgaagatcaattatttgtaatgggtaaagtcttaatccatcaatctattcaatacaacagagttggttaa

SEQ ID NO: 86239 - DNA, 231 bp, Citrobacter koseri
atgaagaacgttgcaattggccgagctattgccctcgtcggaagccagagtgctttggcaaagaaatgccaaaaatcgcaatcaacaatttgtgattggctaaatgggaagaaaaaaatctctccagaacatgtaccgacactagttaaagcggtggatggaaaaatccttgcatatgaatttcgcccagatcttcctgacattttcccgcacccgggcaatgaggtgtga

SEQ ID NO: 86240 - DNA, 342 bp, Citrobacter koseri
atgtcacacgctttgaccccgaactgtttgcctgcaatccattgcgatgctgatgcctcctggatacaggaacagttgcagcagttgccaacggttatgaggcagaaagcactggtgagttatgcgcaggtttatcaggaagccttcgatgctgaggcggtgagcttccgacagcagaaccgggcaaggaatatggctaacacccgcctgcgcctgtttgttggcaaataccacaaagcagctatggggctgactgaaaaggcgacgctcgccagcacacacgccccagccggagctgcggtagagatccagcaggatcaggcagctgagaagtggtggtga

SEQ ID NO: 86241 - DNA, 534 bp, Citrobacter koseri
atgagcagcgaaagtatcaacaaacaactcgattttctccgcctgtttcgtcagggctgcaaacagatccgcaccctgctgcgcgagaataaggctgccgctgatttgttcctgtacctcgctgagaacgccgacatgaacagcggggcggtagcagtggatcagtctgtactggctcacgaactggagtgctccgatcgccatgttcgtcgggcgataaaagcactggaggatggcggttttgtacgccgggtcggtactacggttttcgcgatcaacccgtcaattatctggggtggatacgacagcgctatgcgctcatcgctctacatgacgatggatcgtaagtcagcgaagaaagttcgctatgtgttcaatcctgcatctgaaaatctggttcctgcttacgtgggtatggcaccagttgaagaagatacacctcaaattgaacagccgacggacagcaaaaacaaagggcgggaagtgctcgcaacacaacccgcccgtagtacggagcctaaatacaatgcttaa

SEQ ID NO: 86242 - DNA, 1503 bp, Citrobacter koseri
atgcttaatctgaaacccaaagctaagcaggtcaccggcctgaagatgctgcacgatgactggaataactatcgcacattcctgctgtacgcgccagtgggctacgggaagacattcatctctgcgtacctggccgataaggcgctggagagcggaaagcgaacaatgtttgtggcgccttaccagaccctcgttcgtcagactgcggaacggtttgttcagtatggtttgcctgaggaagagatcggctttgtctggcgcgacttccagccgcatgatccgaaccgcctgattcagatagccagtgccgatactcagatccgtcgtgactttccggacaatatcgacctgctgattgtcgatgaggcccacatgaagcgtcgcgggatactggagataattcgcgatcgcgacatccgtgtcgttggattgtcaggtacgccattttctccgtggatgggccagtattacgagcgcctgataaaaccaaccacgatgaaagagcttattcagattggtgacctgagcccgtatgagttctatgcgccgacaacgccggatctgaaaggggtcaaaacctcaaccagggggaatttcggtcgggatttcgatgaagaacagctggctgagattatgggtgatgcgacgctggtcggtgacatcgtgactaactggctacagaacggtgaagaccgcccgacaatatgtttttgcgtcaatcagtctcacgctggctttatcactgcggagttcaaccgcgctggcgtgaccgcagaaatcatgattgacgtcaccccaccagaagagcgccggatgatcatccatcgttttgagcagggagcgacgaaagtcattgtcaacgttggcgtgctgaccgccggtttcgacagcgatgtccgttgcatcatttacgcccgcccgacgaaatccgagatgcgctggcttcaggtgctggggcgcggattgcgcacggcaccgggaaaagaccattgcttaatcttcgatcacagcgggagcattcaccgcttgggctatccggatgatatcgagtatgacgatcttccaggtaagagcgatggcatgaaagctgccgccgggcgcaatgagtcagaaaagacggagaaaaagccgaaggaatgtactcagtgtcacttcatgaaaccagccggggtttacgtttgcccgaaatgcggattcaagccggttggcggggagaatgtggaaacagacagcacccgtaaacttcagcggcttagtcgcaaagagaaaatttatacccgcagcgacaagcagtcctggtggagtcagattaagggctatcagcggcagcgcgctatgaagggtaagcccctgagcgatggctggtgcgcccatacctttcgggacaaattcggcgaatggccgaacggactctctaatttcccgatggaaaccggcccggaggtctgggggtatatcaggtcgaaattcattgcattcagtaaatcgcgaggtgccgcctga

SEQ ID NO: 86243 - DNA, 984 bp, Citrobacter koseri
atgaaaacgacggacgctgttattgggcgctggccggaagtctttgaggcgttcggtcttccgccagttacaggaaaaaagcactggacaaaagagtgcccgctatgcggaaggaaagacaagttccgttgtgatgacaaggacgggcgcggtacgtggatatgcagctgcggcaatggcgacggatggaaactgctcactctgacgcagaagaaaactatcgcagaactgtatgctgaggttgatcagatcatcggcaatgtgtgggagagaagcgccagcgttccacaaaagcagagaaaaacggtagatcaggagcgggaatctgtattacgccggttttattcgatgccagggttaaaagatacgctggcgcaggattatctccgtgggagaggtatctttgttactccgtctgctgacgcctcaagatattgttcaaatcagccgctgaatgccgggggatcatatcaggcgatttggtcacttgtgaccgacagtaatgcaaacccctgctatctgcatcgtaccctgctggatggaagtcgaaaggctgatgtgaaagttaccaagaaacaaatggcacttcaggacaacaacgtactggagttcgcttcgtcagtggccatccggttgtttcccgtcgcctccacactgggcattgccgaaggtatagaaacggcgctgtcctgtaagcaactttatggcgtcagcacatggtcagttattaacgcgaacttcatggcgaaatttatagcaccaccgggcgtgaatcatctgattatttttaccgacatggatccgcattccgcaaccggtcatgcggcggcatgcacatgtgcaaataaaaacctgctggcgaaaaatgatgttcagaaggtcagtgtcagatggtgtgacaaaggggattttaatgatctgctccagaatggtgatcaagtacgtgagctggttttcacgaaaaaacaaaaggcagcagcatga

SEQ ID NO: 86244 - DNA, 267 bp, Citrobacter koseri
atgacagcacataagattgattttgaaggttatctacaaagagaaaaagagttggaagaaatagtccaagttgatgatacgcatattgttatcaaaatccctggaaaccatcttgacggtgagtatgagattgcacttgtttcatgcagaacacctgagcaagtggtcagttggatttttcagttgtcagaaaagcaatgggtgacgcgagatattctgcgacgctttattaaagttgccagcgctaaagctggtatcgagttataa

SEQ ID NO: 86245 - DNA, 417 bp, Citrobacter koseri
atgagtgacgaattagagataaacgaagtattggcgtgcaaggttaaagacgaagatttgacttttttaaacatgatggttaatcgttttgactttagtttggggatcacactcattgttaaaggtagcgtaatctctgggcagcttattgctggtaagaaatattacgaacttaccgcagaaaatttgaaggcggtaggctctgtaggtgaatctttatctcaatacttcgaacggaaaggaactatcggttacacaagcacagatcctgattttgcatatcctaataatttcctgcaccttgaaaaggtcttcatccgtcaagacaatgggcaaatgggggcgttaaataacgcattattaagagtcaaaatcgaagagattgaaggccatattttaggaactgcctccaactaa

SEQ ID NO: 86246 - DNA, 1131 bp, Citrobacter koseri
atgcatcgaattgatacagccacggctcaggttgataaatttgggccggggaaaaatggctttacgaacggagacccggcaaccggccgccgcgcgacggatcttaacagtgacatgtgggatgcggtgcaggaagagatctgcactgttattgagtcgtccgggctggcgctcaacaaagaagaacatgaccagctttatgaagcgatcattaaaattatcacctccaaaatccccgacgctctcctgaaaaagaacaacctgtctgatgttgcgaataaagccatcgctctttccaacataggcggtgttccttcgacgcgcaaagtaaacaaacgtgcattatcaagtgatattacgctaactgccgatgatgttggcgctattccgaccacatttgttggaagtatcgcggatggtggaagtatggctaatgctaccacgccgggatggtggaaaatcactgttccgacgccatcctcagtcgcggcattccctaagttcccgaatggtaactttttatatggctatggctatatgtttgttgaagttgtggaaaatacgtggattcagcactattacagccaccacgggcagaatgcaaagcgtcagaactggaactcagggccagatacaacgacagcatgggttactgattataatactgcatataaaccaggtgctggagatgtcggggcgtatacgaagggagaaagcgataacaaatttcaacctaaagggaattacacccctgctggcgaggcttatacgaaagcagagagtgacggtcgttttcagcccaaaggaagctatacgccagcaggacaagcctatacaaaagcggaatctgatagcaggttccagaaaattaacacagccctcaaggcctctaacggatggtttaaagacacaaacaccgggcttatctttcagttcgggaccggctcttatagcaaaggcgcgcgggttggctttccggttgtattcccgacagcctgtgtttctgtagtgggtaatgattcgggtagcggtgttgtcggtacggctctcggagagaggacggcttacggtttcacaatgtattcgacgcaggcgacggtttcgcttagctggtttgctgtggggtattaa

SEQ ID NO: 86247 - DNA, 1074 bp, Citrobacter koseri
atgaaaacaacaaaccacggatatttatcaagacttgatcatctgagattttttgcaatcgcattggtattactgacgcattttagtggcagcttacccacaccaaaatccatacattcagtaatggattttattgatttgtggataaaaaaaggagtaaccggcgttagtctttttttggtaatttcaggttttattttctgcgttataactgatgcaggagagaaagttattgactacaagaaattcatcactaatagattatttagaattttccctttgttattagttatattttttatagtcataacaattaatcgtgaaaattcaacccctatggatgttctaagagttctaaccctgcaattaaacacagggcattcatacactggttgggggcgagaatttttcccatcagggccaatatggactattgccgtagaatttcaattctatttaatatttccttttttgattaaaataatgcatcagcaggggatatcaaaaatatttacaatgatgatttgcatgttcattattcgtgcatttatagtttttgattctgacaatggaacatacaacaacctctatcattctattacaggcaggcttgaccagttcctttggggaatgctttttggatatttttacatcaaaaataaacatacaaaatttaataatgtgcaatccttcctgcttatactcactggagtggctatagttacaatactaatgatggcgggagatcgatcttatttcgtcagaatattctcattcaatcttgaagcattggggtggggatttattttgctgggatatatgaaatcaaacattcacattaataaacaagttgattcctttttcgcatacctcggtggattgagctattctttatacttaacgcacttacctgttggatttattttaataaacaaacttgataaatacagctttatgcacaatggcattgccactacattattgattatattcccttcttgcatttttatttcatggataacttatagcggaatcgaaaagccgtttcttatgatgcggaagaaatatctgtga

SEQ ID NO: 86248 - DNA, 273 bp, Citrobacter koseri
atgcgactgattaatgactacgctccccctacttccgaagatcttaaccaactaaaagaacagcttggttataccggaacgcaaatggctgatctggctggagtagcaagcaacagccaatggagaaaatatacagggggcgagtcaccgcgcgcgatgtcaccgcacatacttttttttattgctgctcaattaacactgagtgataaagatctagctttagttatcaataaaatgcgtgaaatcggtgctactattcggagggaacaatga

SEQ ID NO: 86249 - DNA, 735 bp, Citrobacter koseri
atgatcactatagaagaagcaacatcggtccatgaatatttaacaaattactatcaaaactctgatgatcctatctctcctccgggaataaaaaacatagagcttttagagtctgccatagcaagaccttttatgaccatgaacagaaaggatgtctatccagatgatttagataaagccgcagctctatttcatggtgtcatatccaaccactgtttccataatggtaataaaagaacagcacttctactaaccatgtgctttttagaccgagctggatattggctggataagtgtgatgacctgcaactctttgaatttacaagaagtgttgcggcacatgagatatgtaaaaatagaattgatgaaataaaaacaatcaaggcatttttccgaagtaattcacggaagaaaaaaatcacagatgaacaattgagttttattgcattaagcaggcatctaaccaacgcaggtttcaatatagaagacgatggtgactattactctatctttaaaaataataaaagatatacaaaaataataaaaaaaggcgcatcaggacatgaaaaatacgatccacaatacataaaatcccttagaaaaagattgcttcttaccccgaagtatggatgggatagcataaggttttatcaattatattcatcattgacggaaaacattggtgaattattacgtttacgtggagaggtaatggactggcttgcaaaaatataa

SEQ ID NO: 86250 - DNA, 234 bp, Citrobacter koseri; identical to SEQ ID NO: 11589

SEQ ID NO: 86251 - DNA, 1095 bp, Citrobacter koseri
atggcggtttatgtagtaacaggcaaattaggctcaggcaagacacttgttagtgtttccagaatacaggaaagacttgctaagggttgtcctgttgccactaatcttgatcttaaattgcataatatgcctatggttgggcgttatgcgaaaaaaacgcgcgttattcgcattcctgacaagccttcattaaatgatttacttgctattggtattgggaatacatcttacgatgaatcccgtaatggcctccttgtacttgatgaatgtggtacttggtttaattcccgctcatggggtgataaagacagacaacctgttattgactggtttttacatgccagaaaattaggctgggatattatatttttgattcaggatatttcgataatggataagcaagctcgtctggcgcttgctgagcatgttgtttattgtcgccgttcagataaattaaacattccttttgttggctccattatgaatttggtttcaggggcgagattttctttaccaaaggtacactttggcattgtcaaatatggtgataatgttaattcaatcactgttgataaatggatatatacaggaaaatctctttattctgcttacaataccaaacaagcgttcacagataattatcctcatggcgcattttcgcttttgccaccatttatcacgcacggtcaattttctgttcacagaggatttaattattatatgcgcctcactaaaatttattttcgcaaatcgaaccgtcttatattaatgctttcttttttggcgctggggcttgcgtttggtttctggctccagtctggaaagaatgttgatgaaatctcagctattaaatctgcttatgctgaacaggcgagggcggtaacgcctgattcgtccagtgacttaccccgactttctattaattctttttcacaacttggctttgacgtttccgttacgtttgttgatgcaaaaggtatgaaatatcagtattttgatttgattaaagatggttattccgttgatattaaagatgcctgtcgtgttgttattagaaaaggccgttatttacagactgttacctgtcaggagtaa

SEQ ID NO: 86252 - DNA, 342 bp, Citrobacter koseri; identical to SEQ ID NO: 11593

SEQ ID NO: 86253 - DNA, 1236 bp, Citrobacter koseri
atgaaaaggaaaatattaattctttccgctgtcctcatttcttctttttcacatgctgagtcatgggaaagcattactaaatccacttatcaaagttctgcctacgctgaaagtaagcaaataaccaatcaggatggctctaagacaacggtttactatattgatgctgctatgcaggcctccgcttgtcagggtgctaaatccagtgctcagagtgtatttactcgggttaaaccaacttatgagggtatctggcctgattctgaattccgtcttgtttttactggtgattgtacttacagcgattcaccagggcagaaggataaatattggtctttaacggcttatattgttggtaatattcagcgttctgttcctgatgaaaaacctactgacccgacaccagaagaaatttgtgaagcgaagccgccagaagaaggtgtatttaataatgttgattcatatgatggtggtcgctatatctactataacggctgtgaatatgaggctactggtgtcattgtttgtcagggtgatggtactgtttgcgctgcaacatggaagcctacaggtgctgtagctgacccctctgataaaccctcaaccccccaaaatggtggtggtgagtctggcggtggtgagtccggcggtggtgagtctggcggtggtgagtccggtggcggtagttctggcggtggctctagtggttccagtctttctaaaggtgatattcagtctgcgatcgaaggtgcttcacccaaaatagccagcgatattcatgataaattaacggagaaagacacttcatcagatgataaaaaaaatgccgatgaacaaaccaggaataatataaatcgtcttgacgattccattaacaatcttacgcggggggctggccgttttgctgacccttcaggtggtgattctcgttatggaaagggcgactctgaattagatggcgcttctactttggctgattctgaattgggaattgaaaaggattctcacggtgctttatgggaagcatttttaaataaaggtgctatgctgcctaatttacccaatggtaacggctgctctgattttattatttttcccggagaggtttatcagattgatattggttgcgataaattactgactattaaagatgttctttcatgggttttttattgccttacgttctggtatgtctttacttctttaacttcattgcttcgcaaagggggtgagtga

SEQ ID NO: 86254 - DNA, 327 bp, Citrobacter koseri
atggaatctttgattgcacaaacatggaatgcgctggagatcatcattgttaacgacgggtctaccgacaactccgttgatatcgcaaggcattttgccgatactcattcacatgttcacctgttgcatcaggataatgcaggcgcgtccgtggcccgcaaccgggggttggctgcggcgaccggcgactacgttgcttttgtcgatgccgatgatttggtgtatccgaacatgtatgaaacgctgatgactatggcgctacaggatgacctggatgtggcgcagtgtaatgcagactggtgcattcttgagacggggcatacctag

SEQ ID NO: 86255 - DNA, 447 bp, Citrobacter koseri
atggtggatttaatggtgggtgagcagcagtcgggtgcagcggataaaggcgtgcctgcggggtttaagatgacggaagtgggggttattccgcaggattgggatgtaaaacctttaaaagaactatgtcagctaaaaagtggcttaggtattacatcgaaatacatagatgatttcggaaattacccatgctacggaggaaatggaatacgtggctttactaatagctttacgcatcgaggtgaatatgccttgatcggaaggcaaggcgcattgtgtggaaacattcaatatgtagaaggggatttttttgcttctgagcacgccctagtggcaactatgcaatcaggagtcaatgcaagatggttatccatctatcttgagaaaatgaatcttaaccaatattcggaatcatcagctcagccggactttcagcggaaaaactaa

SEQ ID NO: 86256 - DNA, 1401 bp, Citrobacter koseri
atgacaaataaccaacaggtgcactacagcgttgacgctgaacaggctgtgctgggctgcctcatggttaacacggatcgtgagcgcacagaccaggtgtttgcaatgctgaaatcaggctcgttttatctccgggtgcacagtgtcatttttgaggttattcgggggttataccgtgcagaacagccgacagatctgctgacgcttgctgacaagatggagtctcttggtcgtattggcgaggtcggtggtttcgcatatctggccgagataagcaagagtaccacgccgtcggcaatggtccactacgcaggaattgtccgtgaaaaagcgatcatgcgttatgcggtggaaaagctgaattcgtgtatggaaatcatgttcagcactgctgacatgacggcagtcagccgtattgatgccgtccagcaggttattggcagcgtggttgagcattcccgtacagggagacgcggtgggttaagaccagccgccgatgtggttaatgactgggttaatgatctcgagcgccgtttcagcaacccggaaaatgccgcaggactgacattgggaattgaaagccttgatcgccttatggctcctaaacaagcactgcgtggttccctggtggtgattggtgccagaccgaaaatggggaagagcgcaaccctcaacaaaatcactacgcattttgcactaaaccatcagttgcccacgctggttttcagcctggaaatgacagatcgcagcctgattgaacgcatggtagcccaggaagcaaaagtcaattcagagattttttatgtcggtgcccaggacgatacagacatgagcagggcgatggctaaagctctggaattgtcggaatccaacctgatgatcgacagcaccccgggagtgacgctggcgcatgtggtgacggaatgccggaaggtgaaacgtcaacgaggggtcgtaggtctggtggctatcgactacctgacactgatgaaagccgaggcagcagaacgccgcgatattgcctttggggatattaccaccggtttaaaaaatctcgctaaagagctggattgcgtagtcctgctgttgactcagttaaaccggaaactggaagaccgcgccgataagcgtcctaaccccagcgacagcaaagacactggacagattgaacaggattgcgatgtctggatcgggctgtatcgcgacatcgtttacaaccagaacgccgatccgcaactaatggaattgctgttgcgtctgaacagggaaggtgcgacggggacagcttacgccctcatgagcaatggttctgtggttgatatcagcgacgaggaggttgctcgccgccagatttccagaccggaaaaaagcaagcgttacgcgcagacggaggatttttag

SEQ ID NO: 86257 - DNA, 213 bp, Citrobacter koseri
gtgaaacgaatcgacgaggttttagaaaaaacgttgttgcagttcggtcgcggcaataccccggaacagtgtcagcggaaccagagaaatattgtgtcactcagaaaaatgattgatgcagtaaaaatttcagaagctattgagaaagaacagaaatcttcaacgcggagggataatgacgatggcaagcaaatcactgtgggcaattgttga

SEQ ID NO: 86258 - DNA, 657 bp, Citrobacter koseri
atgagcaacatcgacaaacgcgcattacgtgaagcggctgatgcggcaaacaaaacctcatggggtcgttgggaatcatatcacccacacaaaggcgcgcggggctatgaggtcaaagtaggggtgaaagcaatcgcccagcactgcctcaaggttgattcagtattcatcgccgcagccaacccctccaccgtgctggctctgctggatgagctggaagcctcacaatcagaaaacgagcgcctggcgaaggcgctgactgaaagaaacggcgagcccgtagagggattagtgaaacgtgttacagagctggaagagatagccaccgattacggcatgaaatttcagagggcgcaggacgcactgaaacatcagtcgctgctgcataaatcgcaactggaagccgcagagaagtacatggcagaactgcgagactggaatgcaggacttgcgcaagagtcattcgaacgacagcagcgtattgctgagttttctggtcagaaacggctgattgggtggcgagcatcagattacaccgatgagacatcagaccctgagttagctaaaaactgggctgctgctattggcgtactgcctatttttgaaggtgacgtgaataccaaacttagcgccgctggcatcggtaagggggagtga

SEQ ID NO: 86259 - DNA, 204 bp, Citrobacter koseri
atggcaacagtaaccagattcagtgatggatttaatcacctcatgagcgggccatgtacaacgctggactctttgtgtggcatttgtcaggactacgaaaaccaaccagaggggccggaatttgaaggtgatgtaacttgccatgcctgccgggaaacggcttacgtggtgtttgaatcatgcaaaaagaaagaggttcaataa

SEQ ID NO: 86260 - DNA, 1488 bp, Citrobacter koseri
gtgatgtacggagaggagaagtcggacttgctcatagtagctgcgaagctggcgaacaatccgcaaggagcggagtcagtggagcgaaggagcggggccaagggaaacgcggaacagccacacatgcgccggacgcagagctgggaaagtatgtcacagaggctgtcacgcgtgcgggaagctgcgaagcagcggaagaaagaacggtttaccgcattgttccacctcctgacagcagaggcactggagaacgcattcctctccctgagcaggaaagcgcctgccggagttgatggtgtcaggtggaaggactacgccgaaaacctgaaggtcaacatagcagatctgcaccggaggcttcatcagggcagttacagggctcagcccggcaggcggcactacatcccgaaagcggatggaaaacagcgcccgctcggcatcgcctcactggaggacaaaatcgtccagtatgcgctggttaagatcctgaatgcagtctacgaaaatgactttatggggttttcatacgggttcagacccgggcgaagccagcacaatgcgctggacgcactggccacagggctggttcggaccaatgtaaactgggtactggatgccgatatcagtcagttcttcgacaaggtaagccatgaatggctaatcaggttcatagaacacagaatcggcgaccagagggtaatcaggctcatacgaaagtggctcacagccgggacctcagaggaaggagaatggcgggcatcggaggaaggcaccccacagggtgcggttatctcgccgctgctggcaaacatctacctccactatgtcttcgatctgtgggcgcatcagtggcgacgccgccatgccacaggcaatgtggtcatggtcagatacgcagatgacatagtcatcgggttcgacaagcgaatcgacgctcaatgctttcgtatagccatgcagcgcagactgaaggagttcggactcacggtacatccgaagaaaacccgactgatggagttcggccgcttcgcagccgaaaaccgcgccagcaggggaaaaggtaaaccagaaacgttcaacttcctcgggttcacgcatatcagtgggaaagatcgtagtggcaggttcatgctgatacgaaagacacgccgggacaggatgacggcgacactgaaagcgatcaaggacggactacgaaagcgctggcattactcaatccccgaacagggaaaatggctcaggagagtggttcagggatacctgaactaccactcagtcccgggcaactatcccatgatgcggaagttcaggatatacgtaacagacctctggcgacgggcgctgaggcgcaggagccagcaggatgatacgacatggacgaaagcaaacagactggcagccgtatggctgccgaaggttcgggttctgcatccatggcctgtggagcggttcaccgccagacacccaaggcaggagcccggtgcgtga

SEQ ID NO: 86261 - DNA, 180 bp, Citrobacter koseri
atgctgaaaaggaaaaaagtaaaaccgattacgcttcgtgatgtgaccattattgatgatggtaaactgcgtaaagcgattaccgcagcctcgctgggtaatgcgatggagtggtttgattttggtgtttatgggtttgtcgcctacgcgttaggtaaagtatttttccccgggggctga

SEQ ID NO: 86262 - DNA, 1680 bp, Citrobacter koseri
atgtttgtaaaacccaaaatccatatttcaggaataacattctccgatggtcaaattatttcattcaatgaaacagataaaataatcattgttggacccaacaatagtggtaaatctcaaatgctgagagatatcatagatctcgcatcaaatccggctacagaatgccaagtaatccgcaacttagaagttaataaaactggcacaatagatgatttgaaagaattattaaagagcgaaggtaattataaaaacaatgaatacacctatggacatcagacatattacacgtcatggttaaacacttggactcagcctaatagcctttcgaatacggctccaatatttatgaaaaatgttacagccaatgacagattagacatttgcaagcagcaaaacaatataagttcaactgctccaaaaacttgcccacagcattacctgtatcaaaatagcagcctcatgtcgcatgtcagctcattatttaaagcagccttcaataaagatatcataattaattatcgcggggggaatgtaataccaatacatgttggtcagttaccgaaagatgccccgatagaccgtgtaagtgatgaatatgttagtttggtcaccaagttaccattgttagacaaacaaggtgatggcgtcaaaagctatgccggaatattattcgaatgtgtggtgcgaaaacttgatgtaatcatgattgatgaaccagaggcatttctacatcctcctcaaatgagaaagctaggcgaaacattatcttcggaggtggaagggcagctgtttgtcgcaactcacagcagtgatattctgaaaggcttcctggaaaaaacaaaaggaaatattcgaatattaagaatccaacgtcaagacaatgttaactttgtccatgagattgaacaaaaatcagtagaacaactatggtctaagccaatccttagatattccaatgcattagattccctattccatgaacaagttataatttgtgaagacgggagtgactgtcgtctatttaattttgttgctgattacttgacgacaaattttgataaaagatatccagacacatgttacgtacctactggagggaaacatgctattccagggattgttgaagctttacgggcttcaggtgtccctgtaaaagcaatatttgacttcgacctcatttccgaattaaacacactgacaaaaaccttagatgctttcggttgcaagggtgaagaaaaaaacaatttactttcactttggaggcaaataaattcagaagttactcaaaaagttaagccgcaatcaaatgaagatttcaaaaccaacctattagagttcatttctaaaacagaagcagataaactttcgaaaggtaaggttgaagaaattttcaagcaaaaaaaaccatggagtgccgtaaaaacaaatggcatcaatggcttaccaaaaggcaacatcaggaaagcattcaaagaatttaacgacttattaaaaaaccttgggatatttttaattcccgtcggcgaaatagaaaatttcagtgctgaaactggtttgcatggtcctgcattcgtggagaaattccttgatgaacgagatgtcagcgattcagagttagagagtttaagagagtttgtagatgaagtgtacggtacaaaaattcgctcaggcttgtga

SEQ ID NO: 86263 - DNA, 312 bp, Citrobacter koseri
  misc_feature (233)..(242): n is a, c, g, or t
atggctcaaataccagcaagggcaaatcgtccccgccagttaacgagtaaacagaccggcgacgtgtgggaagctgccgcacgccgctggctggagagcaagggactgcgttttgttgccgccaacgtgcgtgagcgcggcggcgaaatcgatctgataatgcgtgacggaaaaaccacggtctttgttgaggttcgttatcgccgctcggcacagtttggcggcgcggccgnnnnnnnnnncctggagcaaacaacacaaattattacagaccgcccgcttgtggcttgctcgccacaatgggagttttga

SEQ ID NO: 86264 - DNA, 282 bp, Citrobacter koseri
  misc_feature (236)..(245): n is a, c, g, or t
gtggcgcaggcaggttttattttaacccggcactggcgggataccccgcaaggaacggaggtctcattctggctggcaacggacaccggtcctttgcaggtcacgctcgcgccgcaggagtcggtcgcgtttatccctacgcatcaggccgcccgcgtcacctcgctgctgcgcacagaaaacggctatcgcctgacgccgctcaatttgcaggattttcatcgccagcctgtctnnnnnnnnnngtctcggggttgtactgccgctcgcaccgacaactga

SEQ ID NO: 86265 - DNA, 1710 bp, Citrobacter koseri
atggcgattgcaattggcctcgattttggcagtgattcagttcgtgctctggcggtggattgcgccaccggggaagagatcgccacctgcgtagagtggtatccccgctggcaggaagggcgctattgcgacgccccgaacaaccagttccgccatcatccacgcgactacatagagtcaatggaagccgcgttgaaaaacgtcctcgcgaccctgagtgcgtcacagcgtggcgaggtggtcggcatcggcgtcgacagcaccggctccacccccgcccccattgatgccgacggccacgtactggcgctgcgtcctgagttcgccgaaaacccgaatgcgatgttcgtcctgtggaaagatcacacctcggtcgaagaagcggaagccatcacccgcctgtgccatacgccgggcaaaaccgattattcccgctacatcggcggcatttactccagcgaatggttctgggcgaaaattctgcacgttacgcgtcaggacagcgccgtcgcgcaggccgccgcctcctggattgagctgtgcgactgggtgcctgccctgctctccggcaccacgcgcccgcaggatattcgccgtggtcgctgtagcgccggacataaatcgctgtggcatgagagctggggcggtttaccgcccgccagtttcttcgatgacctcgatcccatcatcaaccgccacctcgcctggccgctgtttaccgataccttcactgccgatctgccagttggcacgctgtgcgcggagtgggcgcaacgcctcggcctgccggaaagcgtggtcatctctggcggcgcgtttgactgccatatgggcgcggttggcgcgggcgcgcagccgaatgcgctggtgaaagtgatcggcacatcgacctgcgacattctgattgccgacaagcaaagcgtcggcgaccgcgcggtgaaaggcatttgcggccaggtagacggcagcgtcgtgcctgattttattggtctggaagcgggacagtcggcattcggcgatatctatgcctggtttggccgcattctcggctggccgctggagcagcttgcggcgcagcatcctgaactgaaagaccaaatcgccatcagccaaaagcagctactcccggcgctgaccgaggcgtgggcgaagaatccatcgctggatcatctgcccgtggtgctcgactggtttaacggtcgccgcacgccgaacgctaatcagcgtctgaaaggggtgattagcgatctgaatctcgctaccgatgcgccagcgctgtttggcgggctgatcgccgccaccgccttcggcgcacgcgccattcaggaatgctttaccgaacagggcattgccgtcaacaacgtgatggcgctgggcggcatcgcccgtaagaatcaggtgatcatgcagacctgctgcgacgtgctcaaccgcccgctacagattgtcgcctcagatcagtgctgcgcgttaggcgccgccatttttgccgccgtcgccgcaaaagcgcatgtcgatatccctgccgcacaacaaaaaatggccagcgccgtagagaacaccctgcaaccgcgcccggaacaggctcaacgcttcgaacagctttatcagcgctaccggcagtgggcggtcagcgctgaacaacactatcttccgactgccgccccggcgccaaaaaccccggtcagccaggcaaccctgacccattaa

SEQ ID NO: 86266 - DNA, 504 bp, Citrobacter koseri
atgtccgaaatgggctacgcgatgatgggctccggcgtggcaagcggtgaagaccgtgcggaagaagcggcagaaatggcgatctcttctccgctgctggaagatatcgatctgtctggcgcgcgcggcgtgctggttaacatcactgcgggcttcgacctgcgtctggatgagttcgaaaccgtcggtaacaccatccgtgcttttgcgtcggataacgcgaccgtggttatcggtacttctctggacccggatatgaacgacgaactgcgcgtcaccgttgtggcaaccggtattggtatggacaagcgtcctgaaatcaccctggtgaccaacaaacaggtacagcagccggtgatggatcgttaccagcagcacggcatggcgccgctgacgcaagagcagaagccggtcgcaaaagtggtgaacgacaatacgccgcaaacggcaaaagaaccggattatctggatatccctgcgttcctgcgtaagcaagccgattaa

SEQ ID NO: 86267 - DNA, 642 bp, Citrobacter koseri
  misc_feature (543)..(552): n is a, c, g, or t
atggctatcgaaatcaacgtaccggacatcggggctgatgaagttgaaatcaccgagatcctggtcaaagtgggcgacaaagttgaagctgaacagtcgctgatcaccgtagaaggcgacaaggcctctatggaagttccatcgccgcaggcgggcgtcgttaaagagattaaagtctctgttggcgacaaaaccgcgacgggcgcacttatcatgattttcgattccgccgacggtgcagctgacgctgcgcctgctccggcagaagagaagaaagaagccgctccggcagccgctcctgctgctgcggcagcgaaagacgtacacgtaccagatatcggcggcgacgaagttgaagtcaccgagatcctggtcaaagtgggcgacaccgttgcggctgagcagtcgctgatcaccgtagaaggcgacaaagcttctatggaagtgccggcgccgttcgcgggtacggttaaagagatcaaagtcaacgctggcgataaagtgtctaccggctctctgatcatggtcttcgaagtggcgggnnnnnnnnnnggcgggcgctgcgcctgctgctgcgcccgctcaggcggcagcaccagcagcggcggctccggcagcagcggctggcgcgaaagacgttaa

SEQ ID NO: 86268 - DNA, 531 bp, Citrobacter koseri
gtgcagcgtcacaaacgccatctcaatgcctttttcgcgcagcgcggccagcagcggatcgtcaaagtgcaaacccgcggttggcgcggcaacggctcccggtttttcactgtagaccgtctgatacaactcacggtcggcatcttcatccgggcggtcgatgtatggcggcagcggcatatggccgatcgcgttgaggatctccaaaaccgggcgcgcgtcgttgaactcaacttcaaacagcgcgccatgacgtgcggtcatggtggcgttaatgctttcgtcatcgcccaacagcagttccgcgcccggtttcggcgctttggaagcgcgaatatgcgccagaatgcgtttgtcatccagcatccgctcaaccagcacttcaatcttaccgccgctggctttacggccaaacagacgcgccgggatgacgcgggtattattaaagaccagcagatcgccagggttgagcttatcgagcagatcggtgaaagtaccgtgcgtcagcgcgcccgtcggcccgtccagtga

SEQ ID NO: 86269 - DNA, 1041 bp, Citrobacter koseri
gtgggtccagtaatgttggatgtcgaagggtttgagctggacgcagaagagcgcgagattctggcccatccgctggtgggggggctgatcctctttacgcgtaattatcatgacccggagcagctgcgcgagttagtccgccagattcgggcggcttcgcgcaatcatctggtggtggcggttgaccaggaaggcggacgcgtacagcgttttcgtgaaggttttacccgcctgccagccgcacaatcttttgctgcgctgcacgggctggaagaagggggcaaactggcgcaggatgccgggtggctaatggccagcgagatgattgcgatggacattgatatcagtttcgcgccggtgctggatgtcgggcatatcagcgcagcaattggcgagcgttcttaccatgccgatccgcttaaagctctggcaatggcgacgcgttttatcgacgggatgcatgctgccggaatgaaaaccaccggtaagcacttccctggacacggggcagtcactgccgattcgcacaaagaaacgccaaccgatccgcgtcctgaggcggaaattcgcgccagggatatgtcggtgttccgttcgctaatcaccgggaacaaacttgatgcgattatgccggcgcacgtcatatacagcgatgtcgatccgcgtccggcaagtggttcaccgcactggctgaaaacggtgctgcgtgaggaacttggttttgatggcgtgattttctccgatgacctgtcgatggagggggcggcgattatggggagctacgcggagcgcgggcaggcgtcgctggatgcgggttgcgatatgatcctggtctgtaataatcgtaaaggagcggtcagcgtgttagataatctgtcgccgatcaatgcagaacgtgttacgcgtttgtatcataaaggttcattttcgcgtcaggagttgatggactccgcacgctggaaacggtcagcgcccagcttaaccagttgcatgaacgctggcaggaagaaaaagcaggtcattaacccgagttttgtgtga

SEQ ID NO: 86270 - DNA, 561 bp, Citrobacter koseri
gtggactatttgcagggagaggtaaaatctggattaccggataccgacgaactggcgggcttattgtatcatctgcaccaacaaccgcgtttcggctggcgtatttcgctgttaccgctgcttatgcgctactggcaggggagcgatccggcacgcaggacgccgtactggttacggatgctaaaacggctgcgagcggcgcgggaacctcgtccgctgcgtctggcgcctttgcatatggatgtccacggcgataacctggtacagacggcatcggggctacggttgattgactgggagtacgccggggacggcgatatcgctctggagctggccgccgtatgggtagaggatgagcggcagcatcaacggctggtggcatcctatgccgccgttgcgcatatctgtccgcaaacgctatggcggcaggtcaggttatggcgcccctgggtaatgatgctaaaagccggatggtttgaataccgctggcagcaaaccggcgaacaacaatttatcaggctggccgacgacgcctggcggcagctgaaaaagaaaggataa

SEQ ID NO: 86271 - DNA, 2424 bp, Citrobacter koseri
atgattcgcggttccgctaaaaaaggaattattgtgttttgtctgacggcaatcgctttcagtatacgggcgaaaataatgccgacctctactggaacgatggagttggcgagagcggtatttgatactgatgcattagaatctaatggtctcgatcctgtgattgctgattattattccttagcgtcccggttcactcctggtgtccataatgtgaccgttattattaatggcaagaaacacagtgtcatgtcggttaagtttaatgaggaagggcagccctgtattgataaagcatttctggaaagcgcaggactcatcacgaaaataaaaagagaaacctgcccgctgatccatcaatactggtctacggcaaccgttagcgctacgcctgaaacagaagaaatgtcgctggttgttccgcaggaagcgattgatccagataataaccgacaggtcgcggacgttcgcggtggtcatgccgcaatgctgaattactccatgtttggcacgcattataaatatgacggcgataattcagaccgctttcagtcaacgtttgaacttggttttaatgcgggtgactggattgtgcgcagcacgcaattcgtcagcgacggcagcgaccaggaattagagaccgactcgtattatacctacgcgcaacgcactttcgccgactatggcgtgatggtgcagggcgggcaaatcaacattgccaacagccgctttagtattccatcggtctacggtgtgcaagtcatgccggataataccctgctgccgaacgaggggagcggcatcgaggtgacggggatcgccagatattctcaggcgcgcgtggatattcgccagggcgggcagatcatctattcaacgcttgttcccgctggcccctttaccttaaccgatgtacccattgctaacctcaacaccgacctgaatgtcacggtgacggagaccgatggaagcgagagccattttaccgtatcggcgagcacgtttcgtagcaaccatgtcggcagggcgccgggcttttctctggccgtggggcgtgcggaagatatggacacgaattttgagcagccctggattgtgtcggcgtccgatggctggtcagtgaataatcgtatgaatctcatggccggaatggtgatggcggataaccactattacggtttctctgccaatgtggataccgttcccgtacagaatttatatgcctcgctcgggtttcttgggtcgatcgataaccgtagccagactgatgggcacaaaaccacgctggatcttgggtattccttgccctgggggatggggatttcgctgggcggcagctacggcacggcggactatcgcgaaatgcaggaactgtatagcgacgacgatgattactccccaacgaaatacgatacgaacgtcgcggtcagttggtcggatacgcttctgggacgtttttcactcggctactaccgtaatgaggcctgggacagcgactataatagccgccgcattatctcttcctggtcgcaaacctataaatatttcagcgtcagcgtgaactgggaatcggatatcagtcgtggggatgagagcgatcgcgatatgttctacgtgaacgtttctgttccgttaggccgtaccggtgtttcaacgaactcgtggtatcgcgagagtgaaggaagaagctcttatggcacgcgggcgatggggtcgctgaatgacgacaaccaatacacggtcggcgtgtctcgcgatcaggacgaaagtgttaccgactgggatagctcgctcaacagcaatcttcactataccacgctgtccgtggcggctggcggcgataacgacagcaatacgaactactctgccgcattgagtggcggcattgtggcgcatgacgatggcgtgaccttctcaccgtatccggtcgcggacacgtatgccattacccaactggacaagcctgttgccggtatcgaaattgtgacgtcgcgcgggcctgtctggaccgataaatggggtcaggccgttgtcccgtcattgacgccgttccatgaaagtacgctggaacttaatacccaaagtcttccgggcaatcttgacgtcaataatggccggacggcgattaaagcatcgcacggggcggtcgcgaaatggcaattcaccacgctgagtcagcggcgcgtgctgctctctgttatgcgtgcagacggtactccgttgccaaaaggcgtctccattgttaacgacgccggggaatacatcacttccgcgccagaggacggtttgatcttcctgaatgatatctcagcaagccatcagctgtatgcgaaggtggacggtggacggtgcaaactgaactacaccctgccggaagccgatccgcagaaattctacgaggagataaaagggaaatgtctctaa

SEQ ID NO: 86272 - DNA, 129 bp, Citrobacter koseri
atgaaaaagccagttcatgatgaactggctttttttttgccggatggcggctgcgccttatccggcctacagaacacacacgttgtaggcccggtaagcatcgtgccaccgggcattgcattcgactag

SEQ ID NO: 86273 - DNA, 633 bp, Citrobacter koseri
atgttgaacataaaagtaggaaccgatacgggaggaaaagcagccattgaaaggctgttagaagcctatggtttcactacaaaacaagcattaagcgagcatctaaatgtatctaaaagtactatggcaaacagagtgttacgtgacagcttccctgcagattggataattcaatgcgctttagaaacaggagtgtcattgctttggcttgcgacaggtcaaggaaatatgagggatgagaatgagacagaaaaagagtctcgaaacgtgaccaaacctgcaatgcgaccactatccaaactcataaccccctcgatacctaagggtaaattggaaaatggaatgcttaatgtagatgaagagatttttttagatcgcagcatcttacctacgcagttcgaagagtcgatgtttttagaaacccctacagattgttaccttatcgataaatcggttaaacaggtcagcaatggattctggctgatagacattgatgggatgattattatcgcaaaaattgcacgcgtccctggcaatcgaattgtggtccaccaagaggaatcaacatttgaatgctctattgacgatatagaaataatcgggcgtgctgcgaaagttataaagagcctctaa

SEQ ID NO: 86274 - DNA, 249 bp, Citrobacter koseri
atgagcactgatatttcaattcgtgtaccaaaagtgatagcgactcctgctgagttcgcagagtgggaggggtactcccgcggctcggtttatcagatgattcataacggtaaactggctaactacattgaaaagaaagaaaaaaacaaaggccgcgtattcattctttacctcaagtacaaaaaggaccaggcgagcaaaaacatggacaagtctgcattcaattacaacgttgtagttggttgttaa

SEQ ID NO: 86275 - DNA, 861 bp, Citrobacter koseri
atgagcactatcctgaaatgggcgggaaataaaaccgccatcatgccggaactgattaagcaccttcctgatggcccgcgactggttgaacctttcgcgggttcatgcgctgtaatgatggcgacagactatcctcattatcttgtcgcggatattaatccagaccttataagtctttacagtgtcattaagagcggtcctgaattattaatctcaattggcaaggacttgtttgctaaaaacaaaacgacagaagattactacgatattcgaaaagaatttaaccatgggcgtgattggcctgcagattgtcgtgctgcaatgtttatttatcttaatcgccattgttatcgtgggttgtgtcgctataaccaaagaggtgaatttaacgttccatatgggaattataagcagccgtatttccctgaaaacgaaatactcgcatttgcagaaatggcccgccgggccacgttcatctgcgccagctatgacgaaacactggcaatgctgcagccgggcgatgtggtttattgcgatcctccatatgacggcacatttagcggttatcacactgccggttttacagaagacgaacagtatcatctggcgtctattcttgaacgccggccatcagaaggtcatacggttatcgtttcaaatagcgatacgtctctgacccgttcgctgtatcgcaattttacccgccaccgtataaccgctaagcgcagtatgggtgtggctgcgggtgatggtaaatctgcagcagaaatcattgccacaaaatcagcaggttgctttggtatcgatttggcgttcggccctgatatctcggtggaaactgaggtgcgggcgtggcagtga

SEQ ID NO: 86276 - DNA, 606 bp, Citrobacter koseri
atgtcataccttaatgtggtaatggcgttaaattttactaaatggttgcaaatgcttgttatgaatcatgtaatgttagatatagaaacattggatgttgaaaaaacggcttatatcctttcggttggtgcggcttttttcgtgccggagactggcgaggttggtccgggtttctatcaagttatttcgcttgatcatgaacaagcaggcagaaccattgccccctccactgtaaagtggtggatgtctcaaagttctgaagctaaaaacgaaaattttggtggcactaaggaccttctagacgttctgaatggatttgtggcgtttgttcttcataatcgtaatggccgagtaaaagtgtggggaaatgggaaagagttcgactgcactatcatgcatcatgccctgtcacaggcgggtctggagtgcccatggtcattcagagatactcttgatgtcagaaccatcttagcgcttggtgaaagcaaaggaattttttctcatgctgacaaaaagtttactggcatcaggcacacagcattcgatgatgtattatttcagatcgcacaggtttcacatatctatatgaatttaaataaaaaataa

SEQ ID NO: 86277 - DNA, 912 bp, Citrobacter koseri
atggattgcttagatgtaaccgattggactgagctagatgtttttgcacaatatcctgttggtgctcgctctaaggcattggttatttccccagatatagcacctcatggtatcaaagcatcgtggccgtatctttttaaaagaagtatcaaaaagtatccagatcaattttggtgtgagatcgttgcctacaggattggcttgcagcttggttttgatgtccccaaagcagttccatcggtaaagactaatgatttggggcatacgttttgcggggcgctcattgagtggtttcatcataaagattatgagaaatttgctcccgctggtgattattttgtcagaagagatccaaattttgatcgcgagaaaggaactcagcattcccttgaagggctgaggattatcgcgaaagctcttaaagttgactatgttgagtggttggaggacatggctctctttgacgctgtgataggtaatacagatagacatcaagaaaattgggggtttgtcttttcacctttagccagcgagtgccagcttgcgccatttttcgataatggtacgagcttatgttacgaacgctttccgaagcatgttgccgattggaccgaccatagactcagggagcatgttggccggggattgcatcacttgcgtaagactctgggcaaagatgaatatcagagattaggtcatttagagttcatcaaagaactttgtgataaaaaagaagcattaaaacagcgggtagctgaaaaactggctgttttgaaccatgatttttgggagtcaacctttgcggagttgacggaaataaactgccctgttccgctgactagagaacgtgctgcatggattgttcgtgtaacaaacatgcgtattgaactgattaaaggtgttacttcatga

SEQ ID NO: 86278 - DNA, 705 bp, Citrobacter koseri
atgactatcttaatagaaaacattcccatgcccagtaggcttttactgacatggcaaccggtcgacggaggctctcgctatgtcgttggtgagcttcttcaagatgagtctgaaggctacgagtttaattatcttactgatagtaaagattttgctaaagctgaggataacggctttcgcggttttcctgcttttgacataaaagttgcgactcatcgcaaagacgttatgcaaactttttcaagaaggttaccttccaggaaaagagaagattttgacgattacttgctgacgtttcgtcttcctgctgattttagagagaatgacttcgttttgctcgcatgcactggcggaaaagttgctagtgatggtttttattttgtcccagacttgtcttctgttcggccacctttcgattacgtcatggaagtcgccggaacgagacacatgatcaaggaagggcgtctagcgcttgacgagatatcaattggtgatgaagtcatattgcgcaatgaagataccaatactgttgatccgctggccatattggtaacaaaaaacgacaatcatctcggatatgtcaacaaggcattgtgcgccgcattacgtgatctaagtaaaagccatgatgtcagtggagtggtcgtacgtaaaaatggctcttcggataggcctttgatttatgcaaaagtatcagtccgatga

SEQ ID NO: 86279 - DNA, 924 bp, Citrobacter koseri
atgaaaaaaaacttaactgaaaatcaacaaaatcagcttataggccacctcacaaagaaaggcttttaccgagggggcaatacaaaattaacgatattcctgtgcgggggagatgtagaaaatcatctttcgggaagacatttattatcacaatttttagctaaggctaaaaatgtagatgtcttttatccagaagatttgtttgacgatcttttggccgggcaggggcaacatagtttgcttagccttgagaatatattggcggaggctgttgatgtaatactactatttcctgaaagtcctggctcatttactgagttaggcgcatttactaataatgaaaaactaagaaagaaattagtttgtatacaagatgttaaattcaaagcaaagagaagttttattaattatggtccgataaggcttttgagagctaataacccaagctcagtcgttcgtttcaattcacaagaattgaatcagctaagtagtaagccactggcagagttaaaaaataaccctctatataaaagcttaaataagtcaattaatagaattttaagagaaaataaagttaagaagggtatcagcaacttactgtatgttgatagatttatacttccttgtatatatcttttagaggatatagatttcagaacactcgttgaactgacatcacgagctattagacaagacgaggtgttatctaaaataatagtcagatccaccctaacaagattgataaatgagcgaaagatacttcgtactatcgaaggatataacgttactaccttaggtgcgagttatgttcggggagtttttgacaggaaaaggcttgatggtttacgtttagaaataatgaatttcgaaaatcgtagcaagtcaaccttcaactatgataaagttccatatgcgcacccttag

SEQ ID NO: 86280 - DNA, 906 bp, Citrobacter koseri
atgtcggaccttagcgatatgtctaaggaaacgcgtgtttcagtggaagctttgcgtttgttaatctaccgtgctgattatcgttaccatatctatacccttgacaaaaaaggggctggcagtaaaaagagaactatatatcaaccgtccagggagctcaaagctctacagggatgggttcttcgtaatattcttgataaattatcttcatcgccattttctatgggatttgaaaagaaacaatctattttgaacaatgcgaccccacatgtaggtgcaaactttattttgaatattgaccttgaggacttttttccaagtcttactgcccataaagtttttggagtatttcattcgcttgggtacaacagaactattgcttcctctttaactagattgtgctgctataaaaacctgctacctcaaggggctccttcatctcctaaattagcaaacttaatatgttcgaggcttgattatcgcattcaaggttatgcgggtaggagaggtttgatttacacacgttatgcagatgatttaactatatctgctcagtctatgaaaaaagttgttaaagcgaaggattttcttttctcaataataccttctgaaggactgatgattaacaagggaaaaacctgcataagtggccctagagggcaaaagaaggttacaggcttagttgtatcccaagataaagttggtattggaaaaagaaaatacaaagaaattagagccaagatacatcacgtttttgttcgacgttctaatgagattgaacaagttaaaggatggttggcttatattttgagtgtagatttaagaagccataaacgtttgttagtgtatatgaataaattagaaaaaaagtacaattggaacccttttaaaaaagaagaccgctag

SEQ ID NO: 86281 - DNA, 216 bp, Citrobacter koseri
atgacgcttgaacgaatcagcgcctttatcacttactgcgttgccctgcttctggcatggctcggcgatttgtctcttaaagatgtatcgaccattaccggtcttgcgctggggattattactgcagcggtgacctgttatttacgctggaaagcctaccagctgctgcgggacggcagaatatccaggggggaatatgagtccttcaatcgttaa

SEQ ID NO: 86282 - DNA, 516 bp, Citrobacter koseri
atgagtccttcaatcgttaagcgttgcctggtcggcgcggtgctggcgattgccgccacgctgccgggttttcagtcgcttcatacctcagttgaggggctgaaattgattgctgatttcgaagggtgccgcctgcagccataccagtgcagcgccggggtctggactgacgggatcggcaatacgtccggggtagtgccgggcaaaaccataacggagcgacaggcagcgcaggggctgattaataacgtgttgctgacggaaaaaaggattgaagcctgcctgcaggttaagccacctcagcatgtttacgatgccctgatcagtatcggctttaatgtcggaacgggggcaatctgccggtcaacaatggtttcttacatcaatcgccaacaatggtggcaggcgtgcaaccagctcccccgctgggtttatgtaaatggtcaatggaataaagggctggaaaaccggcgcgcccgtgagcttgcctggtgtcttaaaggggctggggcatga

SEQ ID NO: 86283 - DNA, 429 bp, Citrobacter koseri
atgacgcgcgtgctggcggtgattctggctctggtgctggcactgctgggctggcagtcatggcggcttaataatgccggtcacaccatcgggacgcaggctgaggcgcttaaaaagaacaagcaggagctggcgaagaaaaacagccagctcatcagcctgtccattcttaccgaaaccaacagtcgggcgcagatgcaactttatgctgcagcggaggatacttccgcgctgttgcggagtcgccagcgccggatcgaggagctaaaacgtgaaaacgaggatttacgccgctgggctgacactcctttgcctgctgacattatccggctgcgggaccgcccggccctcgccggaggtgcagcttaccgtgagtggttgtccaaaagtgacgcagtgccgcctggacaggtcagcgccgcgcagtaa

SEQ ID NO: 86284 - DNA, 432 bp, Citrobacter koseri
gtgaacaagccgcagtccttacgcaacgccctgaataaatcggtggcgtatgtccgtgacaacccggacaaactgcacctttttgttgataacggttcgctggtttcaaccggcgcccgttcaatgtcatgggaatatcgctacaccctgaacgtggtgattgaagattttagcggcaaccaaaatttagtgatggcgcccgtgctgctctggttaatgaccaatcaaccggacgccatcaacaacccggaactgcgcgaaaaactttttacctttgacgtcgatatcctgagcaacgatctgtgtgatctcagcctcaatctgcagctcacggagcgcgtgattgtcagcacagacggcaccgtatcgagcattgaagcggtgccggaacccgacgtacccgaagaaatgtggacggtgaaacgtggatga

SEQ ID NO: 86285 - DNA, 447 bp, Citrobacter koseri
gtggatgacttgcagagggtggatgactggctggcggccctgctggcgaatctggaaccggcagcccgcaaccgtatgatgcgacaactggcgcaggagctgcgtcggtcgcaacagcaaaatatcaggctgcagcgcaatccagacggcaccgcttttgagccgcgccgggtaacggccagaagtaaaaaggggcgcataaagcgccagatgttcgccaaattgcgcaccactaaatacctgaaaaccgcagccactgcggactctgccagcgtgcagtttgatgggaaaatccagcgcatcgcccgtattcaccattatggtctgcgtgatcgagtcagacacaatggcccagaggtgcgttatgcagagcgccgcttgctgggtgtcaacaatgaaatagagatgcttacgcgcgacactttaattgattggttgagaggctag

SEQ ID NO: 86286 - DNA, 669 bp, Citrobacter koseri
atgatggatgatgaagaaaaatattatcagagcaccttatttgcgctggagaggcgggcaaaaatcacaaaactcgtaacgctgagctttgtttatatcatgttcatttccatgatattggtcattggtggtgttgtatctatgagggctaatagtgataatgcagtaagtagattcatcactggaataatggataaagacaaaatcgaatcggcaagagccattaacgacagcctcaataaattattcaatcaaattaacattccaaatcaaaactcatcaattcaagacgatgaaaacaaagtcaccagaagaccgcttcaacctggagatctggtttactttaaaaaagacacttcagaaaaaattgcagattctgtcacttcgattttagtcagtttttccgtacttatcttcattggatatgttatgcgtgtcgccatggtatttgttaaataccatatgcaacttggaactgattatgaaaaccaaaaaattgcatttatactcagcaaagggcagcccgaagaatttagagttaatttagatactcttcggaaccatactgttggatttgataaaacacccctgccaccccaagaaaaaataataatgggattaatcgaagcagttggtgcagtaagaaaaaacaccaaaggtgaaagctag

SEQ ID NO: 86287 - DNA, 2223 bp, Citrobacter koseri
atggaaggtatggatctgctgaaactcaatccagaagagattgaaaagcagatgactaaggacgcaatggggaccattcagcgcgtgctggagaaggtcaacaagttgccgcaggacaagcgcctgtccgccatgacgatgatatttggtaaggagtttggcgatgatgcggcgaagctggcaaacaacctgccggagctgcagcgacagctgaaactcacctcaggcactgaggctaacggctccatgcagaaagaatccgatatcaataaggattcactttccgcgcagtggttgcttgtgaaaacgggcgcgcagaacgctttcagtagcctgggtgaaaccctgcgccagccgctgatggatatcatggggtacgtcaaaaacgttaccggggcactgcgtcgatgggttgaggctaacccgcagctggcgggcacgctgatgaaagtggcggcagctacagcagcgatcaccgttgtgctcggcacgctggcggtggccgtggctgccgtgctggggccactggcggtgatgcgtttaggcctgtccgtgctgggtgtaaaaacactcccctccgttatgtctgcagtgacccgcaccggcggtgcgctgtcctggctggcaaatgcgccactttccctgttgcgccgtggcatggcggcatccggtagcagcaccggattgctgacgactccccttaactccctgcgacgttctgccgggctggctggcaatgcgctgaaagcgctggccggtgcgccgcttgctgtccttcgcggcggaatgtctggtattcgcaacattatcggcatggtcatgaatccgctggccgcgttgcgcgggggattatccgcagccggtggcgtgctgcgttttctggcgtccggcccgctggccctccttcgcgttgcgctgtacgtgatttctggactgctgggcgctctgcttagtccgatagggctcgttgtggcggcgctggctggcgtggcgctggttgtctggaaatactggcagccgataagcgcatttttaggcggagtggttgaaggattcaaagctgcagctgcgcctgtcagtgcggcgtttgagccactgcagcctgttttccagtggataggtgacaaggtccaggcgttgtggggctggtttactgatctgcttactccggttaaatccacctctgcagaactgcaaaacgcggcttcgatggggcggcagtttggtgaagcgctggcggcagggctgaacatggtcatgcacccgctggattcgcttaaatcgggcgtgtcctggctgcttgaaaaactcggcattgtcagcaaggaggcggccaaagcgaagcttcctgagcaggtcacgcggcagcagccagccacagtaaacacagacggtaaagtggtgctgccgcctggcggattcccgacgatgggttttgcgggcatgtacgacagcggcggtaccattccgcgcggccagttcggcatcgtgggcgagaatggccctgagattgttaacggacccgccaatgtcactggcaggaaacggactgctgatctggcaagggtggcggcaacgctcaatccttccaggacagaaccggccagcgctaagcaacatcctgaacgcgggatagttctgccgcctgatagtgtgaacggtccggcaaatcttccggtaatcaatcgtactactgagctggtgaaactggcggcaacggtaagccccgttcgtgatgtaacagccagcccggagcaacggcctgaaaacaggttaatactgccacctgagattgttaacgccccggttaatcttcctggtcgggatcgtgctgcggagctggctgatatcgctgcggctgtgatgccagttccggccattacggaaatcacggataacagggccgacccgatggctatgcgccagaaggtgtttgcttccgtcgtcgctggcgtaatgggcctggcttctgccccggcagaagccgcaccacttcatccgtacagcgtacctgtcaggacgcaaccggcgccatcagagaagacagagagacagccgcaggtcattaagtacgagataagcgcgccaattcatatagtcgcccagccagggcaaagagcgcaggatatcgcccgcgaggtggcccggcagcttgatgagcgtgagcgcagggccagggcaaaaacacgcagtaattttagtgatcgagggggttacgaataa

SEQ ID NO: 86288 - DNA, 363 bp, Citrobacter koseri
gtgcgattaacgcagcagggacagaacagtctgcggaacctggtttgcctgagacagtacagaagtaccagcctgctgcaggatctgcgcgcggctcatattggaaacttcagttgcgtagtcagcatcctgaatacgagactgtgcagcagacaggttggttacggtgttgttcaggttagagatggtggattcgaaacggttctgaatcgcacccaggtcagaacgctgagtatcaacagctttcagtgcagtatcgatagaggacagcacgtcagtagccagaacgtcgaaacctttggtggtaacgctacgcgtttcaccagaagccagacccgtagtaacaccagcagtaccggttga

SEQ ID NO: 86289 - DNA, 474 bp, Citrobacter koseri
gtggttgtgcgcggcgtaacggtcgtgcgtgacggtgaaattacctggcccgcgccgccgattcaggtgtctgctcagccgcaggctgcgccgcaagcagctcctgcgccgaaagaagcggaaaaaccggcttcaccgtggcgtaaatatgcgctgatggcgctggcgatcattctgtttggctggctggctgacgtggcgccgaaagagttcctcggccacttcaccgttttcgcacttgcttgcgtggtgggttactacgtggtgtggaacgtttcgcacgcgctgcatacgccgttgatgtctgtgactaacgccatctcagggattatcgttgtcggggcattgttacagattggccagggaggctgggtgagtttcctgagctttatcgcggtgcttattgccagcattaatattttcggtggcttcaccgtgactcagcgtatgctgaaaatgttcaggaaaaactaa

SEQ ID NO: 86290 - DNA, 387 bp, Citrobacter koseri
atgctccagcaacctcatcaccttgaactgttaagtccggcacgcgataccgccattgctcgtgaagcgatcttacatggcgccgatgctgtttacatcggcgggcctggcttcggcgcgcggcataatgccagtaacagcctgaaagatatcgcggaactggtgccttttgcgcatcgctatggcgcgaagatctttgtgacgttaaacaccattctgcatgatgatgagcttgagcccgcgcaacggctgattaccgatctgtaccagaccggcgtcgatgcgctgattgtgcaggatatgggcatcctggaactggacatccctcccattgaactgcatgccagtacgcagtgtgatatccgcctgtctcttatacacatctga

SEQ ID NO: 86291 - DNA, 315 bp, Citrobacter koseri
  misc_feature (261)..(270): n is a, c, g, or t
atgacggcattgcttgagctgagcaatattcgccgtagttatacgtcaggtgaagaacaggtcgaggtgctgaagggcatctccctgcaaattcatgccggagagatggtagcgattgtcggcgcgtccggttccggtaaatcgaccctgatgaatatcctcggctgtctggataaacctaccagcggcacctatcggattgcggggcgggatgtctccacgctcgacagcgacgcgctggcgcaacttcgccgcgaacannnnnnnnnnattttggttttatcttccagcgttatcatttgctctcacatctga

SEQ ID NO: 86292 - DNA, 3123 bp, Citrobacter koseri
atgtctggcatactgcttaatcgcctcacgactaaagtgagagccgaactcaaatgcaacctcaaacgcaataagacatataagaagcatcgctggagccttgttgagagagcgcaggtttactgctccacgcattatctgaaggccatgtttttgctctgggttatggcaggcagtgctgtcctaatagcgataggttttcgacctgaatttagtagctttgcggccaatcatctgaaaaaagttactgatctttctggatggatgtcaaacctgcttggcagccaactgacgataatcgggattgtgttcccgctagttgtcggacttatcagcgtgctttttcagaaaaaatcgtcgaggatacacatccagagcgcctatcagttgcattcgggttatatgtttgctggactcagcgggctatcacttgctgcatttatactgattagtggattatttatatctgcaggtgacaaatatcttgatacggcatttgcagttacggccttaatctggatgcttttcaatattgtactttcgatatggttctttattaccagccttaacattctggatgataagaaacgcgatcacctcatgctgaagtatttccagtcacagattgtggaagaccacattttgtgctccctgaaatactcatggatacaatatcccggctcacaaatagacaaggattatattaatggaataaccattcttccctactcagtctcaagagaagaaagtatgggctcaattaaattccatattgatgatcatatggaaatcagtgatgttaatcttaggccactaaattttctgttacacttgctgaaatctgtgcaggataagaatggctcgattattattctgccgtccctagcaagaagggataacacaataacactactttcctcaactgacgtgattatcccttggtggtggccattctttttcaggcaatgttttataaaaggtccgaaaagaaactggaaagagtacagacacattacccgtgatttttatggtgaagtttatgatgctctggaagacaaaaacataagtacctttatcatcgcaacagaccgactgattgatacatacacaacattgaaaaaaagcttccggtacgctgatggaaactatattgatgaatgtcatggttcaggtatgtcacttacattcagccagtcattctatcatgatttttacactttctgtcacgaggtagtaaagtcagtggaaacaacgggtgaatatttccgtaaaattattgatttaccattctctgtatatcgtgattcagacagccgtgaaatcgtcgattttcagcagtgtatggaatctcttttctacgtatggcatgcgttgaacagttggaaaagagggtatgcagaaactctgtcggtcagccaggggcagcgtcacagggaaattgtcaaagattttataggggaatgggaaagctggtacatgtggcgacgtattgagggccgtggcgagaacagattagatgatgactctgctgaactgctttatcatctttatgagacagcccggatagtcatgacagcagtgatgtcagacgatcgctatgcctcagatcacagtacggatatgcttttactctggttcagccggaataggtttgaacagcactttgaacaataccgctggcacagcttcttcctgacgccatcatatcttacgcaggcctttgaaaaaccggcctggcaggttatcctacgaggaaatgaatattcagaaaaagctgcacaggcaatcattttctacaatgcactgacagatattcgtttgctcactgccggatatattctttcacatgtacagcagaaaaaaaatgtacgtctgaaaaaggttataaaacgacttcttacttccgcacctgtctatccgacaggtgcgcatgatcttatgacgacgtcgttaacgtcttcaactgatattattgacattattatcaggctggaatgtcgtccgtgcgacagtgaggattcctggtacaagacgcagtctgatctcgtaaaggctttttcatcatttaatgaaactgagatcatatccgggcgtatctatatgggaacctatgaagatgtcaggaatatttacgccagttatgctgatatagctttttatctttccgttaagtccctgcctgtcacccagcgcgtaagtatggcattgaacgataatctgttcacttatcatcagaaggaacagatcatttatcaactccagggaattaaacgtcgtgaagacatgccatcggatggatatttaatgtctaataaagcctttaaagagaagatatcctgttttaatgaaactcttgatgcctatattcaggctttcagccggagcatgcattcagaacttcttaacgctgaaattgatactgagttgctgaaaaatacggatcttactcttacccatgaactaccctctatgcttgcccaggatgcactgctttcccgattttcttacagtacatcaaacagcggggagataacatggacagccaggtcagttaacggaaccatgcctaaaaatatcttagcccgtggaatcagtactaattccggaatactggcatcggtttctgacgtcaaattcactctgcttcgtgacgtttacaatggactgagtcaactgcagcccctccaaacaatcaacgttcgcgacgaatatgaactgctgaagcatttaagggagatgactgccgacaatgaagactatacgctgattttcttcggaacccatctgggaagcgagctgcgtgaaatgagctaccacgctgaaaggtttgcggaactggggatcacactggacatgaagagtggtctcgatggccttatgccagtcaggatcaataactgtaggatctatcaggtatgggataatgatgtgggattttactccctgctagtccggaacaatgtctttggctcccttcacatgctgagcgatcccgacgggcagcctttcagttcctcgtggcatgcaactgatgaaaaccctctgtctggctgggttacaaccagctggaaacaggagctagggattagtggttccgtcgtggcaagatttaatcacccctga

SEQ ID NO: 86293 - DNA, 147 bp, Citrobacter koseri
atgaacattcggaagaatatttccgtattaaccatttttcggatctgctcagaggaaaaggcggattgttgcgggaggatcaaaaaaatcagtggattgttgagattttttattattgcctttatcgcaaaatttaagactaactaa

SEQ ID NO: 86294 - DNA, 198 bp, Citrobacter koseri
atgactgtatttctcatggccgttgtctatggcctcttaaaaactggctctctcatagccctacttgttggtgcctataaaggctggaccttgttctgcaagaactatgaccgcctgccccatatctaccgttcacaatggcgataccagagacgattcattctcagacgcatctggaagcgaatcttcagccactga

SEQ ID NO: 86295 - DNA, 291 bp, Citrobacter koseri
gtgaatacggacaacaagcggtacatatatgatcttatcgaagccagaaaattcaatggtaatacgctggtcagcggagaagactggcagaagcccactgtccccgaaatcctgctggtccgggaccttatccccctgactgatattcagctggcgaaccgactggatgtggacgaacgtaccatccgtaagtggaaatccggccagaccaggatggtgtataccacctggtgctgtctgtgctggctggccggactggggatgccgcttgatcacattatcagtggctga

SEQ ID NO: 86296 - DNA, 810 bp, Citrobacter koseri
  misc_feature (795)..(804): n is a, c, g, or t
atggactacacaaaaaatcagcatgtactttcacagtgggtgctacgcaactttcgcagcgatgacaccgctctgtctgcaaaagaaaagcagcgagtatggtgtcataccgtttatatgacgcccgataaggaaaacgttctccacacgcaacctctgccaatatccagtgtggcagtatcgaaaaactgctttcgtcttattgatgctgagacaggactgcctttcgatattgaagacgaacttggtgtgtacgagcgcctgaccgccggggtcgtgaacgatataattcacgagcacaatttctcacgcctccgtcacacactgccggaagattttccggtagagaaacttgccagtttcgcggttatgcagttaatgctcaatctgcataatccgcaaaataaaaatccgtacaaacatgaactgcttgaacagttccatgctgatatacaggatcatttatcagaatacatccattcgataaatcagttgcctcacactaatcctgagttaatggaagatcatttctatcgcaaaattttgcgcgtcgctaattctgtttcttccgaagaagataaaagcagagcgctgtttgtattgtttggtcttttatccatactaaacaagccgactctttacgacaacataaatatattgcgaaacaagatctttgctggtatcagaaccattgaagttattcatacaggtcatgaattcgatagcactgaacccaggccggcattcgcaatagcacccaatatattttgtcttaataaagatgaaaatagaatnnnnnnnnnnaaatag

SEQ ID NO: 86297 - DNA, 1593 bp, Citrobacter koseri
atgacatcacttatagttacttcgttacgcaaaatcggtccttgtcttagctctgtacttgtagaggaaatgctgaaaacccaaggagttaaccgtgataccgcacgcaaacagatttcccgggcggcttctgcagggcagatccactgtgttgacaagcttttccccaagcgcgaacgatttatttatctgaaacagcagtatggtaccgggcgcttctggtccagtctcaatacagccctccttgataccggatcggcctacggtctcgccctgagttgcctccgggcacgcggggggatcctgccggtcagacattttcctgcagcctgcggttcaccggtagcaatgaaaaacagattatcctggaagtcagttctggacggtctgcttcagtacaagatggtcagggttgttacgttaccaagtctgggtgagtgtgtggcgctaacagaaaaaaatgataacgggtatcagcgcgcgctccatccccttaaagccaggctgctcaccgagtcagttctgatgaaatccctgagtcagtgggtccgtcataacggcatcattagttacgacacgctgcgcacgcgggaggaaatcgattcagatcaggcaccctgtgtggcaaattttgattttgacgtcactgcagcatcctatcttaatcctcttctacagttctcccggtcaggggaaattcgacctggtttctttgtctgcgacatgcttctgggctgtaagctcagtcttgtgcatctccaaccctttattacaaaatgtcgatcgataaacagcctcaggaacagcccaagatgtctgtttatgtttattgccgacgaatacagcgaagaagcttttctcgaaatgaagcgtaccgggataatacccgcgacaccagagaatctattcggaaaagagtttgctgatgcgctctttcagttacgggatctggttggctcaataacgctcagcttaaaaaataatatagcagcaatagatgacatcatgtccaaactgacgaatatagccggtgttactaatcagcttcagggggatttgtttgaatatattgtcgctgagaccgtacgtatagatagtaaggatgtcgaggttggaaagatatgtaagtcacttaaaggggaaacagcggaatgtgatgtgcttagtgtgaatgggtatgcaaaaattacttttattgaatgcaaaggttataagccctattcgactgtgagacatgaggatgtcaaaaaatggattggaaaacaggttcctgtattcttcagctatgcaaaaaaggaatacccaaatgctgaaattaatgttgagttatggactacaggaaagctctgcgatgattccagagagtctcttcgtaagtttcaagaaaataacttaactaatcagcgttataatataactgtcatggagccgcatgatgttcgaaaaagaataaaggcaacctggaatgatgctcttatccgggtttttgaaaagcattttctcagctatccggaaaaaatcgttcgccgtaaacatgttcccgaaccggtcaggcttgctggtcatgatgaggcaacagaattcgatttctga

SEQ ID NO: 86298 - DNA, 726 bp, Citrobacter koseri
atggatgacatatacagcctaagagattcagccatcaagctcatgaaaattcgtgaattcaacgttcacaatttcatcgagacaaacggatataccatgtctatcaataccgaacacagcatcgctatccggcggcaattctctaacggatgtgtatgcgtaactcagcgcggcttcaagcgcaccttttatcattgttttatggtccgtcgttttgaccgtaccgatgctggtcagcgtcttcattttgcatccgccatgacgttgacccgacaccaggatggggatgattactcagcaggagtcagctatctggagctggctgaagttctcatcagaaatggcgcgcagaccaatgctgacttacaggaactctggtcacgcatagtttttaatattctagtctctaactctgatgatcatttgcgaaaccacgggtttattctggttcccggcaagggatggcgactttctgaagcctacgatataaatccggctcccagagctgatggcttgaaactgaatattactgaggcggataacgcgcttgatttggaattagcccgggaagttgctgaatactttcgcctgaaactgaccgaagctgatgagattattgccaactaccggtggatagtcagccaatggagagctattgcggacagccttactcttccttaccgggagcaggaacaaatggcggaggcgttcagacgtgcaatgtga

SEQ ID NO: 86299 - DNA, 699 bp, Citrobacter koseri
atgacgcaagcagcttggacccgcgatggtcggccggtggatgcggcttctattcccggcgccgagtgggaggcgttgaaggcggcggcgcagttaggtgacttcatgatgccttgctgcaaggcaccggcagtactcaagacaagcatcaatggcttgcctttcttcgcccatctgtcggacgagtgcagtactgcgcccgagacaaaatggcataagtcgggtaagaccgcagtgatggccgccttaaccggcatgggtatcgagaaccgcgacgaggtgccgggccgatcaccaagcggcgacaagtgggaggctgatgttctcttttcggtttccggtcgcaccatcgtaatcgagctgcaacgctcctaccagcatctacgcgacttcacacgtcgtcaggagcggtacactgcatcgggcgttgagtgctactggctggtccgcaaggagacattcatgactttaggcaaggccacgtcgcgcctgctgttgaagcgtgatttcggcaacgtgtttccgcccagtggaattggtacgggcatgctgcccgagctgccggtggcgatgctggacaccgagggcgagcaactggttcagttcggcgggttcaagagcgcgactgttcctgtttggctgtcaggcatcctcaatggtgcataccaatatcgcggcggctcgtggaatcttgactga

SEQ ID NO: 86300 - DNA, 189 bp, Citrobacter koseri
atgaaagacagaccacatagagaggcgatggccgagcaattccgggccgatccgacttatgcggcggagttgcttgccgaagtccgtcgcgacggcaacccggacgagctggcaattctgttgcggcagatgcatgaggcgttcggggacgattgcacgcgttccggctctgcaacgaggcaactatga

SEQ ID NO: 86301 - DNA, 825 bp, Citrobacter koseri; identical to SEQ ID NO: 17388

SEQ ID NO: 86302 - DNA, 1953 bp, Citrobacter koseri
atgatcgcacatcgcatcaaccgtgaacgcaaggcctcaagcccagcccggttaatcaagtatatggtggcggccaagggcggcattgacccgacgagctgggagcgcacggccgattacattctggattccgccaatggcacgaccgagggcgagaaggtcgccagctaccgcgttaccaactgcggcacggatgatccggcagatgccgcaatcttgatccaagccacgcaagcggctaacaccaggtcgaaggcggaaaagacctaccactttgtctattccttcccgcccggcgagcagccagaccttgagacgctgcacgccatcgaagacgaactatgcgctgccatcggcctcgatgagcaccagcgtgtatcagcggttcatatcgacaccgataacctgcatgtgcatgtggccatcaacaaggttcacccgaccgggttacagaacattgaaccctattacgatcagttccgcctgatggaggcctgtgagcgtcttgaggtagagcacggcttgcaaacaacgtttcatggtctggaggcaaagcagcggcatcagaaccgcgacattgagctgttgccagcgaaagccccagagcagcgcgacagcctattccgtgaacaccttagaaacgcttacgacctcagcatatcgaagcctcctgaagccaaaaccctgaacgggttgcgcaagctgtccgatacccgtctacagagacagtcagcagataaagcggagccagtccgcatcggcgcgaaggtggccagcgtggaggcgcagtccggcatcgagacgctgaccgggtacgcggcccgcgagctggccccggcgatgcgacaggcgacgagctggcaggagctgcacggcgcagcggccgaacacggcctagaggttcgccagcgcggcgctggccttgtcatcggcgagccagattcaggcatttgggcgaaggccagcaacgtcggccgcgacctttccatgaaggccctaactgaccgtcttggcccgttccagccttccgaacggcaggccgaggcgaaggcgaaccgcaagcggtacgagccacgaccccggcggccggataacccgacgacagcgggcctgttcaatcagtaccagcgcgagcgacaggcggccattctggcccgccgtcagggcctcgaccagatcaagcgcgagagtgcagctttcaatgcgcaggttaagcagtggagccagacagagcgaatgcttttgaaggtcgcgggcaaggggccgaccaaacgcctgatgtacggcactatcaaacagcaggccgacgcctcgcgccaaaagaaccggcagagcgcagacgctcgccgtcaggcgctgttcaaacagacgacgatgcccacttgggccgactggctgacgcagcaggccgagcgcggcaacgccgaggcgctggccgtgctgcgcgaccgcgaggaacggacacgccgctggaacggggagctactgaccgccgaccgggccgacaaggccaaggctgttgttctcgacaagctcaagcccaaggcccggaaagacgggacgatggcgtacagtaccatcgacggcggcatggtgatcgaccggaagacgcacgttcaggcgcagaaagccacgaccggcgcggcactggttgcgctcgaactggcgtccaagcggttcgagggccaagccctcatcgtggaaggcacagacgagttccggcttgaagtcgcccagctcgccggtatgcacggccttaaggtcacgttcaccgatccggcgatggagcgtatgcgccgcgagacggccgagcataaggaaatggagaaggcctttcagaccgaggtatacgctccgaaggacaccaaaaagggagaggcgagcgatatgccaggcgtggccccacagcgtaggcagatgcaaccgaaggaccgctctaatggactgatatag

SEQ ID NO: 86303 - DNA, 381 bp, Citrobacter koseri; identical to SEQ ID NO: 17385

SEQ ID NO: 86304 - DNA, 792 bp, Citrobacter koseri
atggaactagaatcgcaaaaaatgtcggcttatgccgcccgaaaattcggtcgaggcgcggcgctcgctcttgcaatcgcaagcgcaggccttggtgtaagtctctacatggcaccggctccggcctatgccatctactgctcgaactgctcgacgttctatcagcagatgtacgagtacgccgaagcggtcaacacgcaactgaacacggcccagcagttgcagacgcagatccagcagtacgacaacatgattaagcagggcatgtcactgcccagccgcatgttcaacaccatcactggcgaccttcagcgcgtggtcagcgtctacaactcggcgcagtcgctcggccgcaacatcagcaatctgggcgaacagtttcgccagcagttcaagggctatgacagctatctgaactcgattggccaagggcaaaacaacatgccgcagcgctatcgggactgggcacaatccggcttcgataacgcccgcacggccatgcaggccgctggcgtaaatacgagcacattcgaggatgagaacgcgatgctggatcagttggtgagccgttcgcagtcggccgttggccgtcagcaggccattcaagccgggaacgagattgcggcgcagaacgtgcagcagctccagaaactgcgcgatctggtggccacgcaaatcaccctgcaaggcaactacatggccaaacaaaccgaacaggaagccgtgaaggacgcggccagtgaaaggttctggggaggtacagacactcccggcccatccaaggggttttga

SEQ ID NO: 86305 - DNA, 183 bp, Citrobacter koseri; identical to SEQ ID NO: 16564

SEQ ID NO: 86306 - DNA, 1500 bp, Citrobacter koseri
atgctgttgatgaccgggagtgcaatggccgccggtttacaaagtaatgtggagatgaacgggctgctaacagacattcataatgcgtctgctcagtgggggccaaagttgcagggctatgccagaaacttgctgttcctgctcgctgggattcagtttgtttggacgttcggcaacctgatttggcaaagcgccgatgttggcgaaatgttccgcgagctgatcaagttcgtcatgacgataggctttttccttgccttgctgacgtactccacagagtggagcacggctatcgtgaacagcttccgcgaagcgggatcgcaagcctccgggtttgcgcaggagttgatgcccggtgacgtgttcaccttagctatcaaattggcacaaaaagtcctgtcgaacatttcgttgtttgacctcgaaactgcggttgtgattgcgctatccggcgtcatcattttgctgtgcttcgcgttcatcgccgcgtttatgttcgttacgcttgtcgagtcgtatgtgattatcaatgcggccgtgctgttcatcggtttcggcggctcacaatggacacgggaatttgcaatagccccgcttcgctatgccgttgcggtaggcgctaagctgttcgtcctgaccttgattgtcggcctgattatgtccgtatcggacaggtggttcgccaactacgacggcactattgggccaacattgacactattgggcctgtccttggtgtgcgcttatctgtctcggtctatcccggagctgattgcgggcatgatcaccggctcatcatttgggggaggcagtgcgatcggcggcatggcaatggcggccgctgcggcggctactggcttggcggcaggcaccatgatggcgggcggcgcaaacgcggccggtggtgctgcgggtgctttgggcggcggttctggtggtggcgctggcagtggactggccgacagcatcaatgccagcatggccggtggccagcagaacccggcagcgtccgccatgccgtccatgaacagtgcggcgaccacaggaacggcaacgggcggtagcgcagcagctcagtcagccggttctcgcgtcggtggctcgcaggcgggcaaatcgccgtcaggtagcggcatcaacagccagagcgacactccgcgcagcagtggtctgagtgggccgcagcaggcggcgcaaacactgaaaaaagcggcctccggcgcgaacaacttggctagtgtggccgcccgcggcctcgggacgctcgccgctatctctgtgccgggtatggaaggcgcggcgagcatgggcggcggccccccaccgcaaatgcctgacagcgatgagggtgacgaaaaacgtccagctaacagcggtgtatccgcggatgttgccgaagaaacaaacgttattcgtcccgcacaagaaccgtccgccgccccggctcagccgaacggcgtggagaaatccaacaacccgaaacaggaaggtgaggcatga

SEQ ID NO: 86307 - DNA, 174 bp, Citrobacter koseri; identical to SEQ ID NO: 16562

SEQ ID NO: 86308 - DNA, 309 bp, Citrobacter koseri
atgattgaatatctgattttttgcgtggtggccttcgctgccgccttcggcatgtacttgctgcgcgaatacctgcgctcgcggggctatgggccgcaactcgatgcgtttgcgcggtggctggaaccacgagagcaacgcatgaaccgttatcgctttaaggctgctaatggcctgtttggggcggcgcagtccatcaaccgcctgcccctgttcggaagcaaacatcaggtggtgatgatagagcaactgcgcatggccatcatgtccgaacaagcactaagggagcgccagcagcgccgcaaatga

SEQ ID NO: 86309 - DNA, 558 bp, Citrobacter koseri
atgcgcgctaagcgccgcgccttgatggcgcagctcatcgcttgctgctcttggtcggcctacggccgttgggcaccaaaaaaaggtagggcgggcctgccgtcgtcgacgcggttagttccgtcgattacccaccggtcgcagcacctggtcgagccgttgaaaccggcaaaaagacatcaggcaccaaaaagggaagggcagggccaaaacccacataaggcctctaacggcctgcgaaagcgttccagaatccctcccgtatgggtcgtggcggcgttttttcagtgtcggaatggggtttggctatcatgtgtgaaaacttctcacagcgcgatacacgccgtttttgcggtgtgtaatagacggctgcccccactgaccctgtgccccgtgtatcggggttatcttcacaggggcggctgcccctactttgaaacgagtgtcaggcttcgcaggcggcccggagagccgttttcagagggggctagagttgtggtggcggggaggaccataaaagcgcttacgctgtcattacagccgatttgcgagacgtag

SEQ ID NO: 86310 - DNA, 831 bp, Citrobacter koseri
atgcttgaatgtagatgtattaatgcgatgaatggctcccctcaagaggcacccttttatccgtatcatactatcaaaagcttagcagcgaaaattgctccgtcattaaatgatgaagatattatttgttgtatgttggcttctttgcaatctaataaccctccccaggtattattcaacctactacagaaatgtgaattattacattctgattgtaggtatgaaaatctagtggcggatgttaaaaaacaattaaacgaacaggatcaaacaataaacgagtcacttaatcaaataattcaaatgtttcctgttgatgaaccgatgggaaactttatcaagcttactcttaacagaataagtaataatttgaactacagaaagcaaaatccgttttttgagttggatataataaaaaaaataacagaaaaaactgagcttatgaatgaagtaatacaggaattcggtggttgcactatcattcaggtaaggcatggagatgatgatgaatcacagcgtgatattatgtatgacttttgcttacctgaaaataatgattcaaccttatttggttcgaaaatgttacgcgcttgttttcactttatatctattcactttgaattttctggtgaaatcataaagacagaaaacttaaatgtttcacggcgtaataaatgcccattttatactgtttgctgtgcatcagttcgaactaataatagcaatatttgcgctgaatccccttggaaatcaatgtctatcaatgacaacgaaggttgttattatgcagcagcgattaaagctactaatccaccagttttgccggattag

SEQ ID NO: 86311 - DNA, 1419 bp, Citrobacter koseri
atgacccgcgcgtatacccttctcgggcgcaacgcgggttaccagggcgtgctctcggtagggcgtgttcagacaccggttctcgggctggtggttcgccgcgatgaagagatcgagaacttcgtcgccaaagatttctttgaagtgaaagcgcatatcgtcacgccagctgaggagcggtttaccgccatctggcaacccagtgaagcgtgcgaaccgtatcaggatgaagaggggcgtttgctgcatcgtccgctggcggagcatgtggtgaatcgtattaacggtcagcccgcgatcgtcaccagctataacgactgtctcttatacacatctgacgctgccgacgatctactctcggcgttgcagattgaagcggcaaaacgctttggcctgagcgcgcagaacgtgcttgatatctgccagaagttgtacgaaacccacaaattaattacctatccgcgttccgactgccgctatctgccggaagagcattttgccggacgccatgcggtgatgaacgccattggcgtacatgccgcggatttgttgccgcagccggtggttgacccggacacgcgaaaccgctgctgggatgatagaaaagttgacgctcaccacgcgatcatcccgactgcgcgcagttcatcaatttccctcagcgacaatgaagcgaaggtgtacaacctgatcgctcgccagtacctgatgcaattctgcccggacgcggtatttcgcaaatgcgtcattgaactggagattgcgaaggggaaattcgtcgccaaagcgcgtttcctggcggaggccggatggcgaacgctgttgggcaataaagagcgtgacgaagagaacgacggtacgccgttaccggtggtggcgaaagacgacgagctgttgtgcgaaaagggcgaggtcgttgagcgtcagacccagccgccacgccattttaccgatgctacgctgctgtccgccatgaccgggattgcccgtttcgtgcaggataaagatctgaaaaagatcctgcgagcgaccgacgggctgggaaccgaagcgacgcgcgcgggcattatcgaactgctgttcaggcgcggattcctgaccaagaaagggcgttacattcattcaacggatgccgggaaagccctgattcactcgttaccggagatggctgcccgaccggatatgacggcgcactgggagtctgtcctgacgcaaatcagtgaaaagcagtgccgctatcaggattttatgcagccgctggtcggcacgctgtttcagttgatcgatcaggctaaacgcacgccggtacgtcagttccggggcattgtcgcgccaggcggtggcggcgagaagaaaaagagcgcgccccgtaagcgagcggcgaaaaaaagcccgccgtcagaagaggcgagcgtataa

SEQ ID NO: 86312 - DNA, 1308 bp, Citrobacter koseri
atgaaacgtgtttctcaaatgaccgagctggcactggcttcaggactcgcctgcgcttcctcctgggctgctgatatggcgcagtcgcttaccttcagccagctacagcaaaaacagggcgccgcaattgatacgcgccagagcgctttctacaacggctggccgcaaacccttaatggcccttccggtcacgaaccttccgcactgaatctgtcagcctcctggctcgataaaatgagcgacgagcagctcgccgcctggctgcaactgcatcagctcaggaaaaacgccccgctggcgctgtatggcaatgacagtggcgtacaggcggtgaaatcacgtttacagaaggcaggcttcagccagattgctacgctgagcgatgcgctgaccgatccttcccgactgcaaaagctccctcacttcgagcaattagcatacccacagtggttgcatgcccttcaacaaaaccagccggttacggctaaaccggcgggagactggaaggtgattgaagcaggctggggcgcgccgaaatattatctgctcagccacattcccggcgccggatacatcgacaccaatgaggtggaaagcgaaccgctgtggaataaagtctctgacgcgcagttgaaagcgatgctggcgaaacacggtattcgccatgacacgacggttattctgtatggccgcgacgtgtacgctgcggcgcgcgttgcgcagattatgctctatgcgggcgtgaaggacgttcgtctgctcgacggcggttggcaaacctggtccgatgcgggtctgccggttgaacgcggcatgccggctgacgtgaagccggaacccgactttggcgtggcgatcccagcgcagccgcagttaatgctgaatatggaacaggcccgcgccctgctgcaccgtcaggacgcatcgctggtcagtatccgttcctggccggaatttatcggcaccaccagcggatacagctatatcaagccaaaaggcgaaattgccggcgcgcgctggggacatgcgggcagcgactccacgcatatggaggatttccataacccggacggcaccatgcgcagcgcagaggatatcgccgccatgtggaagcagtgggatatcctgccggttcagcacgttgccttctattgcggcaccggctggcgcgcctccgaaacgtttatgtacgcgcgggcgatgggctggaaaaacgtcgccgtgtatgacggcggttggtacgaatggagcagcgatccgaaaaatccggtgtccaccggcgagcgcggcccggacagcagtaagtag

SEQ ID NO: 86313 - DNA, 513 bp, Citrobacter koseri
  misc_feature (292)..(301): n is a, c, g, or t
atgaaacaaaccgttgccgcttacattgcaaaaacacttgaacaggctggcgtgaaacgtatctggggcgtgacgggcgactccctgaacggcctgagcgacagcctgaaccggatggggacgattgactggatgtcgacgcgccatgaagaggtcgccgcctttgccgctggcgcggaagcgcaactcaccggtgaactggcggtgtgcgcgggttcatgcgggcctggcaacctgcatttgattaacggtctgttcgattgccaccgtaatcacgtcccggttctggctnnnnnnnnnntctggctatcgccgcccacattccttccagcgaaatcggcagcggctactttcaggagacccacccacaagagctgtttcgcgaatgcagccactattgcgagctggtttccaccccggagcagattccgcaggtactggcgatcgccatgcgtaaagcggtgcttaaccgtggcgtctccgtcgtggtgctgccgggcgacgttgcgctga

SEQ ID NO: 86314 - DNA, 1185 bp, Citrobacter koseri
atggcactcacaaatcttgagataaagcgggctcagccaaaagaaaaagcatattcgctaagcgatggtttgggcctggcgctgctgattgaacccaacgggagcaagggttggcgctttcgctatcgttttgataacaaagcccgcttgatgtccttcggctcttatccactagtctccctctccgaagccagagaaatgcgcgacaaatcgcgcaaacttgtcatatctggtgtagacccaatggccgaacgtcgtacacaaaaagcgctgcgagagcaggctaaagccatgacttttgaggtagtcagtagggagtggcatcgtagtaaagccgatcgctggacgctgggctaccgtgatgaaatcatcaaaaccttcgaacaagacgtgtttccttttatcggccagcgccctatgggggacattacgccgcaagaattgctacaggttctcaaacgcattgagcaacgtggtgcactggagaaaacgcggaaagtacgccagcgctgtggtgaagtttttcgttatgccattatcactggtcgtgccaaatacaatccagccccggatcttgcgatggcactggctacaccgaaaaaacaaaactatgcctggctgcccgcgaacgagatgccttattttatccgcgatttggaagggtacaccgggagccttattaccagaaacgcagcaaaatttgtgatgcttacaggtgtcagaacccaagagatgcgtttcgcgacatgggatgaaattgattttgagaatgctctctgggagatcccgccagagcgaatgaaaatgcgtcgtcctcaccttgtacctctctcacgtcaggtgattgaacttctcaaacaactggaaccgatcaccaaaaatttcccgtacatctttattggccgcaatagccgtaagaagccaatcagcaaggaaagcgtaaatcaggttatcgagctactgggttataagggacgcgcaaccggacatggtttcaggcatactatgtccacaattttgcatgaacatggttttgatagcgcatggatcgaaacacagctcgcacatattgataagaattcaattcgcggaacgtataatcatgcgcagtatctggagaaacgccgggagatgatgcaatggtatgcggatttcctaggtagtcaaaaagataaagttaactaa

SEQ ID NO: 86315 - DNA, 882 bp, Citrobacter koseri
atggcagaggacagaaaacagctaaccaaacggcaacaaaaagccattgatacagcggcactaatccggcaggaaccgccgcagggtgatgatatggcgttcacccactctattctgtgccaggtcggtttgcctcgctctaaagtggaaggccgcgagtttatgcgccgctctggtgatgcctggcttgtggtgcaggccggatggcttgatgaaggtaatggtccggtagagcagcctctaccctatggggctatgccgcgactcacgttcgcctggatttcatcgtatgcactgcgcaacaaaacgcgggaaatcgccatcggccacagtgccagcgaatttcttcgccttatgggaatggaacttcagggggcaaggcacagaaccttgcgtatacagatgcaggcgctggcagcatgtcgcttacagctgggcttcaaaggccgtacctataacggccagcccgttgaacagtttgatgcctggctcaaagatggagacacaaagcagctcacgttatggccggggacactcactctgtcagagggctattataacggcctgattgagagcgccgttccgctcgacaacagggcgttgcatgtgctgaaaggctccgctctggcactcgatatatacgcatggcttgctcaccgtctccaccgcatcgagggccgcccggtcatgctgtactggatgaagctgcgggagcagttcgcccaggagtacagcgggaagaatgccgacaaggattttaaacgggcattcatgccagcgctgaaacaggtgctttcagtgtatccggcggcaaaggttgatcaggtcaaaggtggcctgctgctgtacagttctcctccccctataccgtacaaatcgtga

SEQ ID NO: 86316 - DNA, 333 bp, Citrobacter koseri
atgacagaacgccagcagaatagaaatatttgtgttgtggggaaggtcaaagacggaatgaccatcgatacctcaaaaatcaaaatcgaggacgtgtcagaaagagttatcagtattgatgatagctttaatactgaggatgctactttgtctctgcgtacagtaatgagaaatgttgcaacacggatttatctaccatcagttttaaaaggcgcatgtccagcatttgaagcatgggcagataaacgctcggttggtgaaaagctaccgcgtggaaagtatttcaaatcgcgtgaatttatccgtcagttcaagatccaaaactatgtctaa

SEQ ID NO: 86317 - DNA, 609 bp, Citrobacter koseri
atgtacatatttggatacctccgggcttctgcacacgatcaggatgcgtcacgcgcccagcagcggcttaaagcctttgcacttgagcataaccaccgggtagccggatggtacgttgagaatgcgtctggcgcgtccctgcaacgccctgagcttatgcgcctgctaaatgatgctgagaagggcgatcttatcctgattgagcaggtagaccgcctttcacgcctggatgatgaaggctggcagcagctgaagcgaatgatgcaggaaaagaatctggcgattatcagtctggacctgccaaccagctacgcggcgttaatgccccacggtagcgatgaatttacacggagtatgctgacggccatcaatagcatgatgcttgatatgctcgcggccatcgcccgaaaagactatacagatcgccgccgtcgccagcaggaaggcgtaaggaaagccaaagagaagggggtttatcgtggccggatgcccgaccagaataagcatgacctgatccgttctttgcggcatcaggggaaatctatcagcgagacggccagactcgctggcgtatcggaaaggacggttacgcgggtgagcaaaagttaa

SEQ ID NO: 86318 - DNA, 186 bp, Citrobacter koseri
atggccgaaccctatttaaaaaatcgccgacgcttcacctcgtcccttgataatcagcttgttccattgtttgacgctttagcggccaaaacgcggatacctaaaagccgcctgctcgatgaagctatagaggatttgctggtcaaacacggcgttcctggtaaacaggtcgatagccagaattaa

SEQ ID NO: 86319 - DNA, 309 bp, Citrobacter koseri
atgaagaaactaatcccagctattattgccgccgccctactctccgggtgcgccactcagaacgacgcagtagcgctctcaaaccgaatcagcgatcagcagaagcaaatcaacgcgctttccgttcgtctccagtctgccgagcatcgcttgagtcagcaggagtcagcttttcgctcagaacaaacgcagaacagcagctactgctacctgaacggtgttaagtactctcagggatcggtgttcgctggccgtatctgtgatggtagttccggcagtgccgcctggcgtctttactcccaccgctaa

SEQ ID NO: 86320 - DNA, 339 bp, Citrobacter koseri
atgagtaagctaagaaccgttgcaaaaatattattgatgtactgcatcttcagtagcgccagcgcctttgcggagggaaatactaagggtgatccgtgtctcgcgttcacctgtatggccggaaagttacaaggtaacgaggcaacatccgggcctgactgtgtaatgggccgccagagcttttttgagatacgaatttacaccccctactacaaccccggcgcgacagctgcggctcgtaaagtatttctaagcagctgccctatgaccactatttcagaaaacaaaaacacactggagctgattattcagcgatacggacgttcatttcaggagtaa

SEQ ID NO: 86321 - DNA, 351 bp, Citrobacter koseri
atgggcaatgtgattgagtttaagaggccgaaaggcgaaagaaaccaaaaagacaaaatgcctaaaagggggatactgctgtggttcaaaaagactgccctgtccctcaaaaacaacctctttacctactctaagtcatgttgctgtatttgtttgttttttgtaagcgctgcgtcaagaaagctattgaagttgatcgcaacactatcaatcgtgctgtttcttgtcgagtggtttatgggccgtttgggagcgccagagttttataacctgttgttcctaatgggattgctgttggttatcaatgtgatttcaacaagctgtatcaaatggataagagggaacgtatga

SEQ ID NO: 86322 - DNA, 318 bp, Citrobacter koseri
atgcttgttcctttgcagtcggagaagcgaccaaaagggacgcctgtataccgtgacccggagaatccatttaacacctggagcgggtacggaaagcgccctgtctggttacaggaacgattgagtgatgggtatcttctggatgaaatgaagctgcctggtgcagtggtggatcgggataccaaatcccctcgataccgtgacccggctaacccggataatacgtggactggcgttggccgtcgtcctaagtggttagttgagttgctggaaaatggtgtggatttggacgatctgaagattcgagaaagggagtga

SEQ ID NO: 86323 - DNA, 783 bp, Citrobacter koseri
atgaaaaaaacatggtgcttgatagcggtatgtatctccggcctttcttttcagggggtcgctcacgcggcttctgcctcggatacgatcgccagccttgcggcccgatgcgcaccagacgtttcaccgctaacaatggcctatatcgtcggccatgaatccgggaacaacccgtattttattaacgttaaccgtggcgcaagcctgaaacgtcaaccgcaaaccgaagctgaagcggtagaagttgccaaccggctaatcaaaaacctcaagaaagatgaaagcatcgatatggggcttgcgatgattaattctaacaatttgagttcgttaggtatcacggttgagcaggtatttaaaccctgcatcaatctccgcgccagtcagaccattttaaaagactgttatagtacggccctgaaatccaacccgcccggccagatagcattaagacacgcgctgtcctgctacaacaccgggtcacaagtgcgggggatttcaaacgggtatgtcacgaaagttattaacgtggctaaacagtctgatttaaagatccctacgttgctacctgatgggcagaacgaggaagcggagagccagcctgtgagtgcgaagggcgcaacctttgagggtgagcacgatgcgtttacgggtgaaagtgatagtggtggtgatgtgttttcgcaggataacactgacgcgtttctgaccaaagcagagcaaaaagggagtgaggttatgaatgacaaaaatctatctcctgttgcagtctcaaataattga

SEQ ID NO: 86324 - DNA, 279 bp, Citrobacter koseri
atgacaaaaatctatctcctgttgcagtctcaaataattgatttatgcgaagccggaaaaatacaggaggttgtaattgaaaggatttcactaaagcagtggtaccccatatttgacgtaaaggacgaaaatttgggtgaggttcgttgctccattcggttgaataaagatcacgaacttcgcacatgggcagacctgagactcctaacggagtttcttctggataagtgcaatgtcggcgagtgccgattgatattgaaatcaacaaaggaaaggtag

SEQ ID NO: 86325 - DNA, 297 bp, Citrobacter koseri
atggttacttttttcaaaaataacgggtttgcgctgctggttgcgctgttatgtatcgcagcgccagaactggccctcgcagctggcggggcagacaccggggccagtacaggtaacaacatcaagtcatggctggatacctggattcctatcgcctgtaccatcggcgtgatcgtgtcgttcctcgtttggctgttccatcttatttccgctggttttatgttccgtctcgcaatcgcaatggttggcattggctccgcatcatatctggtatccctgactggtatcggcagctga

SEQ ID NO: 86326 - DNA, 318 bp, Citrobacter koseri
atgtttgaaaatggacaacggccattatttaaaggtgcaacacgcgtcccccggcttgctggcgttccgcgtacagtggcgctggttatcttcatgatctcggccacgctgtttatgacgttacatttatggtcactccttgtatttgcggttctgtggtcaattgcagcagcgctaactaaatacgacgaccgtatgtttcgcatcctttcattatggctacagactaagtttcgtaatgcacacgacacgccatttaaacaatggagtggttcaagttattcccctgtggattacaagaaaaaggagctgaaataa

SEQ ID NO: 86327 - DNA, 2574 bp, Citrobacter koseri
atggtggcattgcttaaacctaaaacgttcagagacgagccgagcgttaatgaaaagtatttgcagcatagccagcaccttgatgattatattatctcgatgcgtaatggcgatttgctcgcattctttaaagtcgatggccggacacatgattgtgcctctgaccgtgagctgattacatggaacgatgatcttaatacgttgattaagtccttcgggactgaccacgtagaggtctggtcacacgagtatcatcaccagtctaaagagtatcctgactctgagtttacccaattcttcccgcgctatctggatgaatacaaccgccgcctgcaaacggggtctaaccagatggttaatgacctgtacctgacggtgctttatcgccagataggcgataagacgcagaagttcctggctaagtttgagcgaccgtcagctgacgagctggctcaaatgcaggctgaagccttcaccggaatggaagaagtctgtgagcagatcatggaggggatgaagggctatggcatcaagcgcctgggtatttattaccgggataaaaacggtgaggaaatagcgctaactgacgctgaagaaaaacagtcgctgcttgaagtagacgaagcagatattttcgacgaaccggtaatgctcaacgtcgctgataccgtcccgccgactgctcacgcttattctaaagcgctggagtttctttatttcctggtcaatctggaatggtccattgttcctgtttgccgtgaccgtatcggttcttacatcatggaaaaccgtgttgtcagttctgtatggggggatattgttcaggtcagaacactggacagcaatttttatactacggctatcgaaatccgtgattacgaaaaaaacacggaaccgggtcagtttaatttgctgaaagaagctgattttgaatatctgctgactcaaacattttcttgcatatccgaggcttcagctaaaacgcttctggagcgccaggagaagtccatgatggaaactggcgacagaagccagtcccagcttgaacagttgaatacagcgctggatatgctgctttctaaagaaattgtgatgggctatcaccatgccactattcacgttttcgataccgatcagcgagcagtgcagcgcaaggcccgtaaagctaaagtcatgctaagtcagtgtggcttcgtggggggcggcgtagggctggcctctgaagcggcttactttgcgaagattccgggtaatcagaaatgggcgccacgcccaacgccgatcaactcatggaatttcttccatttctccccgtaccataattttatgcgcggcaaaccggacaataatccgtggggtccggctgtgacgatgttccgtaccgcgaacggtacaccgctgtattttaacttccacgtcaccccactggaagaacgctcaatcgggaagcgaccgctggggcatatgttgcttacaggtacatctggtgaaggtaaaactacgctgctggatttcctgttatgccagtgcatgaagtttaatccgcgtatgttctgctatgaccgtgaccggggaatggagccgtttatccgcagtgtcggcggctactataaagttttacagcagggcgtaaaaactaacttctcaccgctcaaacagaaaggcacaccgcgtaatattgcaaccactaaaaatattatgcgtgtctgtgctgaaattacaaataacggcccgttagataaagatatggggatggaactcaataaggcagtagatgctgtgatgggtgagcattcattggttcctcctgaagctcgcgatattactcgtcttaacggatacatcaatcacccataccttaaagaccttatcaaagactggaccaatgaaggccagtatggctggctttttgataatgatgaagatgcgttagatctcgatgctcatgatgtattcggcttcgacctgaccgagttcattgctgctgaaggtgagattcccagcccagccagaacgccattgttaatgtatctgctttaccgaatccgtaattcaattgacggaaagcgccgtgtcattcagtgcttcgatgaatttcatgcttatcttgacgatcctgttttaaagctggaaataaagcgcggcattaaaacagaccgtaagaaagatgcgatttatttgttttccacgcaagagccaaatgacgcactcgcaagcagcattggtaaaacggtgatgtcgcaaacgccatcaaaaatctgcctgcgcgatcctgatgccagccgtaaggactactccttcctgaccgatgcggagtttgatgtgttgctcaaaattcctgagcattcgcgccagttcctcgttaagcaggggtcacagtcagctcttgctacgttcaatctcaagattcataacagcgatacgccagaacgcgatgaaatggaaatggacaacattatcagcatcctttccggtgagccgcaaaatgccgagttggccgaggaattgataggtaaatatggtccagaacccgaaaactggatcgaagaatattggcgtctttgtcgtcattaa

SEQ ID NO: 86328 - DNA, 702 bp, Citrobacter koseri
atgaaagcgaagttaattgctattgcactggctgggctgttaggcgcgggaaccattggtacggcttctgctatagggggtactggtgttgtggtctacgatccgactggcgtggctaaaatgcttgaccaaatagaacagttaaagcaacaactggcaacccaaaaggcgacttatgaaagtctggcaaaaactactgatattgggaatttgttgggttcgtctacaagtgccctcgctaaaaatcttcctgacgactggaagaaagtttatagcgatgcgatgaattcaacatcatccgtcactggtgatgttcaaagcatggttggtgatttcaattctgaaattgatgatatgaacccttctgatgcaattaaagcgctaaataaaaagttggccgagaaaggagcatatgaccgagttatagctgaaaaagcctataacaatcaaatgcaggaattaagcgacatgcaggaactgacagagcagatttccacaactaaagatgtaaaggaagtggctgatcttcaggcccgcattcaaaccgcgcaaggcgcaattcagggcgagcaagcgaaactgaagcttatgagtatgcttcaggaatcacaagataagttgtatgaagctcaaagagaacgcgccgtaggtaattttatttatggtactgatggtggtcataaccccgctccgttgaaataa

SEQ ID NO: 86329 - DNA, 1038 bp, Citrobacter koseri
atggcatttgatactgttcaacagatatttgacataattgatgatctgataaatattatggttgataccaacgtaacaaccattattgcaaccgtcacaccaacggttgcaatatttttgaccatcaagtttatggctcaaggtgcatattccgctcttagccccggagggggcggggaggcgcttggggatttaattacacaatatatgaaagctgccgttgttttgagttttgcaacggctggcggtttatatcaaaccgaccttgtacatttggctttaaacctacctgataactttgcttcaatattggttactcaaaataaaacctcaagtacagggatggcagccattattgatactggggtagaccagtctataacggcaatacaaacggcgttcgaaggggctggcattagcgctaatggcataatgagcgcagtaatcggactcattctaatagcagcgaccgtagttctttgtgggttgggttctgcctttgtaattatggctaaagtgctactggctataagcctgtgtttagggccaatagctatattctgtctcctgtggaatccaacaaaaggcatatttgctaagtggatggggaccgttattaattacagcctagtcatagttcttttggctctcgtatttgggttgttaatgagcctctttacaaaaatgatttccggtcttaacggcagcgaaggctttgatgccttatcaacagcaattggactggtcattctcaccattgtttccgtctatgtgttgttccaggttccagcggtagcgtcgaatttcggtagcggtgtttctgctgatatagcttctgcggcccgccatgcgggccactcgatgaatacgatgggtaatgttgcctctaatgggatttttggtggagcgaagccttcagcaagaccttcagcagctggcggcggcggtggacaaagtgccagcactagcggcaatgcaggggctggcggttcaggtttgacaggaaaggcgcgtggtagccggggaaaagctgcataa

SEQ ID NO: 86330 - DNA, 132 bp, Citrobacter koseri
atgcgcgcaatcgtacttttaggggtgttgttgttaggggcatgttccagcagtttcaagccaccaccggagccggactggagccacaccgtgccagtcaataaaacgcttccagtagatacacagggataa

SEQ ID NO: 86331 - DNA, 696 bp, Citrobacter koseri
atgagagagaaaaagaaagggctgaccaaagaggccatcaaagagttcaacgaaagccgtaaagggctggaagtggacgttatgaacgaagtgttatcttcacgccgcacggcgtggatagtcgctgcggtcgcatccgttgtggctgtcgtcgcaatcggtaatgctacctttgtgaattaccgctatagccagccaataccgccgttcctgttgacgctgaaccccagcaatcatgaggtatcacaggttaagctgacgcgtgacgatgccacctatggcgacgaaattgataagtatttccttactcaatacgttatccaccgtgaatcctacgatttttattccctgcaagtggactatgacgcagtaggtttaatgtccacgccgaacgtggcggaagcctacctttcccggttcaagggcaagcaagggattgataaggtcctgggtgacagcgagacgacgcgagtaagtatcaactcaaccattctcgatagagagcatggcgtggcgaccattcgctttacgaccgttcgccgctctcgtagcaataactttgacgatccaccgaagcgctggattgccatcctgggctacgagtacaaatcgctggctatgaacgcctcgcagcgctacatcaacccgctcggcttccgcgtcaccagttaccgcgttaaccctgagtcgaactga

SEQ ID NO: 86332 - DNA, 888 bp, Citrobacter koseri
atgaaaaaagtagtcttatccgcagtgatcgcaatggcgctggccggggccacattcaacgcggcggcgcttcaagcgccgaaaagttcaccgtatgactaccgtatcaaaacggtagtttataacccggttgatgtggtgcgaattgatgcggtagtgggcctgtttacacatatcgttgttgccccggatgaaacatacatcactcacgcgtttggtgattctgatggctggacgttctcccataagctcaaccatatgtttgtaaaacctaagcgcgaaatgagtgataccaacctgaccatcgttactgataagcgatcttataacatcgtgctgcactatatcggcgacacgacaacaaagaacgctgacggtacagagacaaaatcgtttatcaaaacgccgtggtcaatgaaacaggccacgcttcagctgacctatgagtacccgtttgacgagcagaaaaaagcctccagcgcggctgagaaaaagcgcctgacggagaagctacgggagtctgctttcgctggccctaaaaactaccagtacgaaatgagcgacgagccggaaatggcagatattcagccgatccatgtttgggataactaccgtttcacgcgctttgaattcccggaaaacgctgacttaccgcaggtttattacatatcgtccagcggcaaagagacgctccctaactgtcgcccggttggtgaacataacaacattctggaatgccagaacgtagcgaaagaatggcgtgtaaggcttggctggacaaaggttgttggtattagaaatatcaactacgtgccatcagctggcgcaatttccactggcacagcctccccggatgtaagaagggtgcaaaaaggaggggataactaa

SEQ ID NO: 86333 - DNA, 1134 bp, Citrobacter koseri
atggcccgtaaagtcgatattgatagcgagctggataacaacaacagcttcgatgatgaacgcgggggaatgcccgcacagaaacgccgcaccgcaccagggctaaaagcctttatcgctatcctggctatcatcgccatgtgcttcgttggtgtcactatttacacgcacacacgcaaagcgccggacacggccaaagctgacagcggtaataaaaacgatggggttagcagtctgcctaactaccagttcaacactaacccgaacgttggcggggccgcggctcctgacgctaatcaaaaggcgatgcaggataaagccagagcggaatatgaagccagtcatagcaatgcgggccgggccagcaacgggaagaagcaactgacaccggaagaagtcgccatgcaacgccgtcttggtggcgatctttccggcgagcagggcggtagccagactccggccaaaaaagagcagcaaagcgacgaaggcagcgaaggtagcagcgcgttagcaaaagagcttacacctgcccgactgaaaggcagcagagcgggcgtaatgcagaatatgagcatgaccattgccaaagggacgatgataccgtgtggcacgtctacggagctggatacgaccgttcccggcatggtgtcctgtcgtgtgacgcgtgatgtgtattccctcgatgggttggtgaagctgatcgacaaaggcgcatttgttacgggccagatgaacggtggcctcaaaaatggtcaggcccgcgtctttgtactgtgggaacgagtggtaaacccggatggcacattcgttaatctggatagcgccgggaccaactctctcggtagttccggtgttcccggacaggttgactcccacttttgggatcgcttcgaaggtgcggtgttcatttccgttctgtctgacgcgcttcaggctggcgtggccgcagcccaaaatggcaataacatccagtttagtaatacacagaataactcgcaggaactggcctctgaagcactgagagccacgattaacatcccgccaacactctatgaccagcagggcgacgcaatcagtatctacgtcgttcgtgacctcgatttcagtgatatttactcactggcagacaactaa

SEQ ID NO: 86334 - DNA, 1002 bp, Citrobacter koseri
atgaatcaatcatcggcttattaccagctggggccgctgcgggagtatttcgaagatccgggcgtatttgaaatccgtatcaaccgttataacgaggtggtttgtgacacattcgaaggccgtaaaattatccagaacgacagcattaccggcgcgtttatcgacaacctgaccgcagcattaaccagcgccaatgacgttaagcgccagatgattaatgacgtggtattgccggacggctccaggggaattatttgtttaccgcctgcggtgatcgataacaccgccgctatcgcttttcgcaaaaatatcgcgctggataaagacctggcgacgttaagcaaggaaggtatctttgagttctgccgggaaattgacagccataagcgcgagctggacgacgacgatctcctgctgaaagagttataccgggctaaacgccgggaagaatttttgcttactgcggtacggaaaaaacgaaccgttgtcgttgtgggggaaaccggatcaggaaaaacggtactcacccgcgccctgctcaaagccattagcccacaggaacgcgtgataatcatggaggatgctcacgaggttgaagctacccacctggaagaagccgtttatatgaaatatggcggtaaagataaaccagggctggctacgccgacgcagtgccttaaagcctgtatgcgcctgacaccagatcgtatcttcatgacagagctgagagatgatgctgcatgggattaccttcaggcattgaataccggacaccctggcggcttaacctccacacatgctaactcggcgatggatgccttcacccgtatagggttgatggttaaagctaccgaagtgggccgtatgctggatatttctgacattatgcgcctactgcactccactattgatgtggtcgttttcatggcgaaaaggaagattcgcgaaatctactattcgccagaatataaatatgagtgcatgaatggagggataaagtga

SEQ ID NO: 86335 - DNA, 528 bp, Citrobacter koseri
gtgagaaaaggagcagtcatattcctgacgggccttctggccctttcctccctgccctcgatggctggcgattcgccatcggtacaggttgggttttctcctgaaggtagcgctcaaacgctggtaattggcgctatcgactccgcgcaatcctcgatcagaatgatggcttatagcttcaccgcgatggatataatgcaggcgctggtcaaagctaaaaatcgcggtgttgatgtgaaaattgttatcgacgaacgcggcaatcgtaatgacgtaagccatcgagcgatgaaattcattgtgaaaaacgagatcccgctgcgggtggatagcgactttcctatccagcatgacaaggtgatgattattgatgaacggtcagttcagacgggcagcttcaactacaccaaagcagcagaatctaaaaactcggaaaacgcggtggtgatctggaacatgccccagctggcgaaaccttatcttgagcactggaaggaccgttgggatcgtggggaggactataaatga

SEQ ID NO: 86336 - DNA, 312 bp, Citrobacter koseri
atgagagaaaaatttgaacgctatattttcaaacatgctgtacagccactgaaattgcttgctgtggtagcaatagttgcggagctatcgcgcagaggattaatgttcataggtgtacctgcttttacctctttcattacgaatatgctcggtattttgatcatcatgttaatgcaaaagccgataatgataagaggtgtttacgagacgaaagatcgctcaagttcttatagatggatgcattttgccataacaggacttcaatctatgtccgttgttgtcctgctactaataccgatctatgaacgataa

SEQ ID NO: 86337 - DNA, 363 bp, Citrobacter koseri
atgggtgagcaaattactaacgcggagtgggaaaaaatctcaccggataattttgaaacagcctctttgttgcgggctgttgatgctatcgatgatttacgcggggattttagtgatggcgagtattcagcaccgccgcaaatcagaactgatttactcaggctccatgagatagcaatggcggtaattaacgaaggttcacgtagccgggtttcggcattattcgagctggcgagcgacctggacgaacaaatatcccatctggtaaatcggctggatgaagtacaggacacgctatcccagctaatggaactgtatccagaaagcctttactacgatgatattgaaggtgatgaggaatag

SEQ ID NO: 86338 - DNA, 666 bp, Citrobacter koseri
gtgatgttctggaaccgaaataagaaagaaaaagccgctgccggcaatgaaaaaaatcgcttcgatcacctgctttcggtggccgaaaaattacccgttgaggcgctgcctgatctcattcgcgctatcgtgcggccagtgcagagtgatttcctgctggcggtagccgaggaagggactgatgcccgcccggatatgaccccgcaggagttcttctttgaggggcttatccaggtgcaatcttacgagaagatgaaagagggcgagctggacggcgcagattatccgttgtcgctggcaagtgacatggtgttgccgtggccgtggagcctgacacgctatatcgataacgtttcgcacattggaacccgtaagggcaggccgtggaagcaggataaaatcaaccactatgttgacctgtggttgccctggcgcattggctttgtgcgcggcggcaaccattccataacggcgggtattctggccggggaagggaccgtgataccggagcacgtttacgatatgtcctggctgtttgagctggtccgaacggacggtaatcactggtttgttgacggccagaaagctgaagcggtgaagtcggggcggtcagcggctgttttcgaaattggccgtttacttactgaaggagcaaaaaatgggtga

SEQ ID NO: 86339 - DNA, 3219 bp, Citrobacter koseri
atgcttgatattacgactatcacccgtatcgatattgcgtcagttgtaggctactacgctgatgcaaaagacgattactacagcaaagacagcagttttaccgcgtggcatggtcagggcgcggaagcgctgggcctttccggcgaggtcagttctcaacgcttcaaagagctgcttgtcggggagattgaccctttcacgcagatgaagcgctccagcggtgacgcgacgaaagaacggctgggatacgacctcacattttccgcgcctaaaggcgtatcgatgcaggcgctgatccacggcgataaggcaattatcgccgcccacgaaaaagcggttgccgctgccgtccaggaagcagaaaagctggctcaggcccgcacgacccacgcagggaaaaccattacgcagaataccggtaatctggttgttgcttccttccggcatgaaacatcacgcgcccttgacccggagctgcatacccacgcctttgtcatgaacatgacgcagcgcggggatggtcagtggagggcgcttaaaaacgatgaactgatgcgggccaagatgcacctgggggatgtctataagcaggagttggcgctggagctgacaaaggccgggtatgagctgcgctataacaacaaaaataatacctttgatatggcgcactttacggatgaacaaatccgtggattttcgcggcgttctgctcagatagaagaagggctggcggctatggggctgacccgcgaaaccgcagacgcacagaccaaaagccgggtatcgatggcgacccgcgacaaaaaaacagacgactattcgcgtgaagatattcataaagagtgggttaatcgggctaatgagctgggaatagacttcaatgatctgtcctgggcgggcaaaggcaaggacggcccgcaaacgtcaatgaataccgtccctaacttcaccagcccggaggtaaaagccgaccgggcgatccagtttgcgcttaaatccctttcagagcgcgatgcgtcttttgaccagtcccgattgctggccgtggcaaataaaaaggctatcggccaggcatcaaagcaggatattgaagcggcctattatcgcgctgtggcaaagggggccattatcgaaggtgaagcgcgatacaccaccacgactgaccagagaagcaaagacgcgccaccgctaccagccatgaccaaagcggaatggcaggcgcagctgaccgacaaaaaagggatgaacaacggccaggcgaaggcgttagttgctgaaggtatcaagtctggccgcctgaaaaaaaccagccatcgggtaacgaccgttgaaggtatccgggtagaaaaagcggtgctgaatatagaggctcgcggtcggggcaaggtgatcgccgcgctgacaagcgagcaagtcaccgcgcagctggtcggtaagacgctgaaggccgaacaacagaaaagcgtcgtagatatttgcaccacgacagatcgctttgtggcggctcacggcttcgccggaaccgggaaaagctatatgaccatgagcgcgaaggccgttctggagtctcagggctttcacgtcaccgccctggccccctacggtacgcagaaaaaatccctggaagatgaaggtatgcccgcccgtaccgttgccgctttcgtgaaggcaaaggacaaaaagatagacgagaaaagcgtggtctttatcgatgaagcgggcgttattccggccagacagatgaaggtgctgatggaaaccatcgagaaggccggggccagagcggtattcctgggcgacacctcacagacaaaagccgtagaggcgggcaagccatttgaacagctgatcagcgctggaatgcagaccagctacatgaaggatattcagcgccagaaaaatgacgtgttgcttgaggcggtgaagctggccgcagagggccacatatccggctcactggcccgactcagcaatattagcgcagagaaggaccaggataagcggctggaggctgtagcgaatcgctggctgtcattctccccggagcagcgcgaaggtacgctgattatttccggtacaaacgaatcaagggtaatcctcaatagccagattcgggaggcgttgcagctgcaaggaaagggcgtggaggtgaattttctggagcgcgttgactccacgcaggccgaacgtcgggacagtaaatactaccaggtagggcaaattattatccccgaaaaagactataaaaacgggcttcagcggggcgaatcttaccgcgtactggatacaggtccggggaaccttctgaccgtggccgggagcgacggccagaaaatcagcttcagcccgcgtacccataaaaatctgtctgtttataccagcgtggccgccgagctggccgtgggtgacaaagtgatggtgacgcgtaacgataagacgctggatgtggcgaacggcgaccgcttcaccgtgaccggggccaccgagaaaggcacgtttacgctgaccaacgcgaagggccgggaaatcgagctggaccagaagcaagccgcctatctttcgtatgcctacgcaacgaccgtccataaagcacaggggcttacctgcgaccgggtgttgtttaacatcgatacccgttcgctgacgacttccaaagacgtcttttacgttgggatctcccgcgcccgtcatgaagtcgagattttcaccgacgataaaggccgcttgttgagcagcgccagccgcaacagtcctaagaccacggccagcgaaatagaccgctttttagggatggaggaacgttacaaagacgtaaaccggagctatggccatgacgatggccaacaggcaaaaagctatggccatgaagctggccaacaaaccggagagaaggaaaacaccatgaaaaatgcgacagaagccgcccatgatggccccgatacttcaggtactgaaaacacgtctcaggatttgcgccagcgtgagcaggaggaagtcaacgccgctatccggtacgagcagaggcaagaagccacaccggaaatggaggcgaacccctaccatgactatgagcggtatgctgacgaaggcccggactatggcgacatgcaggactacagcacatatgaagaatatgaacgtgcgcgtgacgtggaattaccgcagcatgagcacgaaaatcatcaacatgactacgacaaggagggctacggcctgtga

SEQ ID NO: 86340 - DNA, 1533 bp, Citrobacter koseri
atgacggaacaagaaagaggacttatatttttatgctcgctgctgggaccgataccctttgtgtggtttattacggcaaagtttgtatatggtatcaatagtgaaacggcgcactaccttgtcccctatttgctaaaaaatacgttcaacctttggccgttatgggtgtcgattatagcaggttcggttatagggttgtgtggattcattggattcatcatttacgataagggtagggtgtataaagggccacgatttaaacgtgtactccgtgggactaaattagtcagagcttcgtctttggccgagaaaacaaaagaacgcggtcataagcaattaacggttgcaggtgttcctgtgcctactgaatatgaaacgcttcatttttcaattggtggggctacaggtactggtaaatcgacaatcattaaagaggcgatatattcaagtttaaaaagagggcgagataagcgtgttatcttagatcctaatggagagtatgtagaaactttttatcgtgaaaacgatataattcttaacccctatgataaacgctctcctggctggtctatgtttaatgaaataagagatgagtttgactacgatctttatgcagtgtctatcattcaggaaagcaaggaacgttctgctgaagaatggtatcggtatggtcgcttattatatcgtgaagtttcaaagaaattactcacacataaaagaaacccttcaatggaagaagtgttgtattggtgtaacgttgcagaatacgacaaagtgaaggattttgttaaaggcacacccgcagaatctttattcattaaaggtgctgaaagagctacagggagtgcccgatttgttttaggtgataagttggcttcccatttaaaaatgcctgaagggaatttctcgctgcgtgactggctggaggatgataaacccggcacgttgtttattacctggcaagagcagatgaaaaagagcctcaatccgctgatctcctgctggctggatattatgttttctagcctgctgggtatggggaaacgcgatcagcgcacgttattttttatcgacgagttggaatcactggaatacctgccaaatctacaggacttactgacgaagggccgtaaaagcggtgcgtcagtatgggcaggctaccagacgttttcccagttggttgaacgttatggcatcaatatagcggaaacgttattgggtagtatgcgatcaggtatcgtcatgggaagcagtcgattaggtaaagcaacgcttgaacatatgtcccgcgcgttgggcgaaatagaaggagaaatagagcgcagacaggggagcttattacagtctggcccaaataataggccgcgaatcgaaactcgcacagtcagagcagtaacccccactgaaatctcagaactcaggaatcttacgggctatatctattttcctggtgatctacctgtcggcaagttcaagactaaacatgtgcaatacacgcgtaagaacccggttccgggaatcatcatgaggtag

SEQ ID NO: 86341 - DNA, 423 bp, Citrobacter koseri
atgccgatcatcacatgcaaggtaacggacgaagaaaaagagcttatcgacaggctggccggaacgaacagatcggactatatgcgccgttgtttgttggccggatcaggtggtcggataggtggattgagtcaggttacggaacagataaacgaagtaaatcgacgactcgatattctgtttgaccaggtatcagagatagacatgagcgcgttttcctcggagctgaaaggactggtcaagcagctgtcacaactcaagttgccgcctcccggtcagatgatgctgcacgaatccctggcaatcgagacggtgatcctgctgcgttcgatggcgactccagccaatatgaaatccgcctggggagagctggaacgtaacggttacaaggtatgggaaagtaaacaagagaggacggaataa

SEQ ID NO: 86342 - DNA, 432 bp, Citrobacter koseri
atgaagcccaaaagcatcagggcagcaattcagatgatgttgccggaagtagaagaaatgctgtcgctgggagtctccagagaggaggttttcaaggcggtatctgaacgcttcggcctggagaatgtgaacgttcggagttttgatactgccctgtatcgggccaggcaaaaccgggcgaaacatgccgcccctgattctgtattgcacaatacaaaatcagccggagccagtgagcaacagaagaaacctgtattgcacaatacagaaaaacccgcgaagtctgagcaggtgaaaaaagatgtattgcacaatacacaaagtgcgaccgagggagacaaaacgaaacagtcaccgggtatcatcggaaaggaattttttgacgaggcaagagccgagttcgatcctaatgagttcatcaaaaaatattga

SEQ ID NO: 86343 - DNA, 717 bp, Citrobacter koseri
atgaaagtagcggttattaattacagtggcagcgttggcaaaactttagtttcaacttaccttctcgccccgcgcctgaaagatgcgaaatttttcgcggtcgaaaccattaaccaatcagcgtctgacttagggattgaaaatgtcaccagttttaaaggtgatgatttctcccgtctgattgaagatgtggtttttgaagatgcagcgattattgatattggcgcgtcaaacgtggaaccgtttttaatggcaatgtcccgcttcgatggcggcgcaaatgaatttgatatgtatttcattccggtaacgccggaagataaagccattaaagaaagtatgaaaacggcgcacacgttaagcaaggctggcgtggataacaaaaagattatctttgttccaaaccgcgttaatccgggtgatgatgttgaaaatgttttcggcccgattttcgactttgtgaaacaaactaaagtaggccgcattaataaaaactctgcgatctataatagtgaggtgtacgaatatcttgcacaccataaaatttcttttgaaacgctgaccgctgaagatgcggaagaatttaaagcccgcgctaaagcatcagctgacgcagacgaacgccgcaaaatggcgcgtcgttatacttacatgaagcaggctatcccggttaagagcaacctggataaaacattctccctgttaatcggagattaa

SEQ ID NO: 86344 - DNA, 369 bp, Citrobacter koseri
atggataagcagcccgataaattagacgtattgatggactggtttttgggagacgcgaaggaaattttagaagccatgaagttaatgaaggccgaacaagccgacatgcttcagcggctgggcgaactcaaaagcgcacttgaattgacggcagacgattcgagagcggaaatcatcggcagcctgagagatatacaggcggcgatgaaggaggaaaacaaggcgcggtcagactttctgacgcgctggcaatctctccagcacaacaacgccagcaccatcgttaaccgcgtcgtgatcatgacggctgtttgttccatcgtcggcgcggccatcgggacggcgctgaccttgctgatcctgaagtaa

SEQ ID NO: 86345 - DNA, 267 bp, Citrobacter koseri
gtgaccgtcacgctaacgcacgatgaagcggcgcaactggacgaactacggcaggtgcgccggatgggtaaacagccctattcaccaaatgagtttttccagctgctgctgatccgcaactggcaacagtgggagaaagaaaaagccgcgctgggtacatgccagcactgcggaaaatcaaaagccggtggcggctgcggcggggagtttcaaaaggaaacataccaatgctggctggcgcaggacgcaaacgcgcttaacatttag

SEQ ID NO: 86346 - DNA, 183 bp, Citrobacter koseri
atgacaaaagtcacaacaccgtcccagctgaaagcagagctggagagccagaaaacctaccttctcgaagcctgcctgatggccttcaatcagttacctaaccagcgtacaaaaggcgcgttcccgtcaacatacgcgcttgcagcaaagattgatcacctgttgcaacaggaaaaaaaataa

SEQ ID NO: 86347 - DNA, 207 bp, Citrobacter koseri
atgaaacaacatatcgctgcaattattcgcgaatacaacacccctacagtaaccgtcgaagtagccaatacagaccgctacgatagcgagcaaatcgagatccgccacgttgttgatggtcgccttgcctggcgagcgtgggactatgaaacaggttttgaaaatgacctgcatcgcgagctggcctattaccatattccggcctga

SEQ ID NO: 86348 - DNA, 678 bp, Citrobacter koseri
atgaaactgactcgcgaagcaaccaccgcagcaaacccggatttacgcggccgcaaacatcatttcatcatcgagagcgccacggcggcagagctggaagcgatggacgagatcctgacgctggcaggctgggaaaatgacagctgcccttgctatgaggacggctttggttgtggttactggatcgacatttccgaagtggcttgtttcaaagcggcatacaaagcagcgaaaacgggcctgaaaggctatatggcagttgaagcggagaaggccgcagcagtgagcgaagccaccgcagagccagccccggaacacatcccggcggcaagccttgacgattacaccgtgtacaccttgcatgaacctattgaagcggaagaaggcaagccatacgcagagaagcgcgtaactcgcgcctacgttgcccgcagcatgacccgcgccctggcgagccaggagaagcatacagagaagtacaaagcgcaggatgttatctggctggcggagcacaacgcagaccacgcttttagaatgggcgttttaagcccggaagagttcacagagatctatcggatggtacacgcagagaacgcgcagcccctgcttattctggcggccctgcgtgatgccctgctaaccggagcgccagcacttgccgccgtccgtgcggcataa

SEQ ID NO: 86349 - DNA, 648 bp, Citrobacter koseri
atgagaacagttcatcaactactttgtcttgctaaatcttggaaaaatggaggattttgtattgcaggaaaaaacgatgataatcaatgggtaagaacaataacagcaaaccctagtaataacgccatattccatcatggaaatgccatccaacccctcgattttttccaagcaacaaccattaaccacgcccctcaaggacaccaaacagagaaccacatcattgatgaaagcgtgatctttactgtgaatgggcattgtgccgctgatgatttagatgattatgtggatacgcctgcgactctatgggggacaggaacaagcagtaactacggtataaatgacaaaatcatcattgggcagagagtagttaacaattcactctatttgatcaaacctgatgatacggtgatagtacagatgcagaacgagtatggtactgataaactaaggataagatttagctataattctgatgaatacttactgacaactacagatatgggaatacaaaattatttcagagaggaagataataggttaaatgatggcgaggaagaagaacttgatggtgtctcctatctaactatcagtctagccgagccacttaatggaagtttatataaagtagtagccggagtattttaa

SEQ ID NO: 86350 - DNA, 453 bp, Citrobacter koseri
atgaaaaatgtcaaaatacatacaattggttttacaaaaaaaacagctgagcatttctttaatgcattaaagaaaaatggcgtcattcgcataatagacacaagattgaataactactcacagttatccggtttcgcaaaagcaaaagatcttgaatttttcttaaaaaagatatgtgatatagattatgtatacagatcagaattagctccaacaaagaaaatcctagacgattataaagataaaaaaataacctgggagcagtattcaatagaatacttaagccttatggaacaaagacttatatcatcaaagctgtctggtatcgatgtagataatggatgccttctttgcagcgaagataagccccatcattgccacagaaggcttttggcagagtatctaaaacaacaatggtcaaaccaaaaaactaacattaaccatatattatga

SEQ ID NO: 86351 - DNA, 567 bp, Citrobacter koseri
atgagtgtactttttttagaatatagcaaagagttcaattgctttgggaaattccaaaggaaattaaactttttgactgaaaatataagcatatcagaaataatcttcatctctgattcaagagggtttataaaaaaatttgcagaagataagcacctcagcactcgtgaggtgagttctgctgaagaggctgaatatgcgattatttttagagataaacgtcaagatataggcgattttaaattaactaaaaatgctaaagtaaaagttgtgcttgtaagtctgacattagttgtcaataaagataagggcgataaatttgatgtatatataggtagaggcactatatgggggaatccgtatcaaataggtgtagacggcgatagagatgaagtaataagaaaatttaaatatgattttgacaaaggatttttaaaaccctttgataatattgaaaaaaatgctctatcgcttaagggaaagattatcgcttgtcattgcaagccgtatgcatgtcatggggatgtcatagctgattatgtaaactctcttgatgacggtgaatga

SEQ ID NO: 86352 - DNA, 846 bp, Citrobacter koseri
atgagcaaaatcattgaaatttttggattggatactcactcaactcaagattgggaacgcgtgattcaagagcaacgttgcccttttaggcaacggacatgcttcaaaacccggaagtcagagtcgagtgtcgccattggtacatgttctgtgctttacggaagagatccccgtccaataatgatctgtccagcaaggcttctcgaacgagggcagatatttgcagattgtctgcacttgcttactaatcatgaaccaggtaatgaatttcatgttgttccagaagttaaaatcccaggaggtaatgttgacttcttcttagcctctgtaagaaatggaaaggtaagagattttgtgggtatagaactgcaaacaatggatacaacaggtactgtatggccagagagacaacgttttcttagggaggtaaatatcattcccagtgacgacgcagagcattcagtcagaccatatggtattaactggaagatgactgccaaaactattttggttcaaatgcatcataaagtgaaaacatttgaacatataaataaaaaacttgtattggtggtgcagaaccatttgttgaactatatgtcaaatgaatttaatttttcacatttgaatcagccagcaaggattggagactcattacattttcattcgtatagcatggagcgaataggagaagaatacagaattgagatgaatgcaagacttagtactgatgatgatggtatttcacaatgcttaggtttgcaagcggaagctcgtattgagcttgaacaaatattactaatacttgaaagaaaaattggtccaatgacattatttagaatgttttga

SEQ ID NO: 86353 - DNA, 1026 bp, Citrobacter koseri
atgtacgagcaaacatcgggatgtactccacttttgatgtgtggtgattctcttgaagttctggcacagctccctcctgactctatcgatttcatcatgacttcccccccgtactgggggaaacgagaatatgataatggaggaattggattagaaatagatcacatggattttgtcaaaaatttggcgaaaatttgcctacaactcaagagagttttaaagccaacaggttcgttttggttaaatcttggggatacatataaagataaaaatttattgggattaccttggcgtgtggcttttgaattaaccgataatcaaggatggattcttaggaatagtgttatatggaataagttgaaaggaggcatggataacagcgctgatcgcctcggaaatgttcatgagaacatttttcactttgttaagaaaaataaaggttattactataatgcagacgcaattcgtactaaatctagagatgcaaaagtagtaaacggttccgtaatttctgctactggtgtttcaggtgttagatacaaaagacagattgagctttctactactctgacaccgcttgaaaaagtcaacgctctttcagcattaaatggcatgcttaatgatatttcaaccggaaaatattctgatttcagaatggtgattcgtgggcagcaaagaaccacacactcagaaagtgaaaaagtttctggaagagcaaaagaacttagagataaaggttattattttctgaggtatcaccctaaaggtagtaaacccgctgatgtttgggatattttgccagaggatacacaaaagagaaaatcccactttgctgcttaccctttagacctttgtagaatcccaattctggcaacttgtcccgaaggtggcattgtattggacccattttctggtactggttcaacattgattgctgcatatgagttaggtcgtaaatctgttgggattgatatatcagatagctatttaaagctcactatggaaaggtttaatctattaaaatga

SEQ ID NO: 86354 - DNA, 714 bp, Citrobacter koseri
gtgcgggcgggtgtgactgataagagtctctctctcaaatcacctgcttcacctacgggcatcgcaaagcaaagcccctgttataacgttgcctcgcgcaagcgtcgccggttcctcaatcggtggattaagtcgctggcgaccgaagccgggcgcatcaaaatcaaaaacgaacttcggcgccgcatccggcacaacaagtattgggtcaatgaagcgaacaagttcggacttgaggctctttgcgagctgatgttggccatccttgacgatctggatttaagggactggcaaaccatacataaccttgaaacgctggccgaacgcgccgggctggcgacgcgcagtgatgcgggtcacaagtcgatttctcgtgccagccggggatgtgatcgcctctcctggcttaatgccattatctcggaaaaagcccctttcaacccttatgacgcccgttgcgcctgcaagcacattgaggttacagaggatttctttgccattctcggcatcccgctaaagcaggtttaccgggaacgcgccaggctacttaaggccgaccagaatgaaatcatatcatccggggatgtgcggttaatcgcaatcagggttgaaaactggacgcgcaaggccgcagccggattagccaggatgaaagcgaggcgtgacgcagctcgccagcgcaaacaggaatactactccctaacctttgcctga

SEQ ID NO: 86355 - DNA, 357 bp, Citrobacter koseri
atggttccaaaacgtttgaaggaagcgcgagaggccgctggtttatcccaggaaaaattatctgaactggtgggtgtggaaggggtcaatcctcggtcaaggatgtctaattatgaagctggacggtttgcaccgccgtttgagttcgtatgccgagtggctgatgtgctgggatatccagagtattacttctatatagtgaatgacgttacggcgaagcttcttctccggatgcatagaggagaacaaaatttgcatgaagacattgagtttgaggcaaaaaaaatggctgaacagcttgaagacgcaagaaaactggtcgcccagcttactgaatgcctgaaacatcgcccgtaa

SEQ ID NO: 86356 - DNA, 456 bp, Citrobacter koseri
atgtatgaatggtacgttttatactgcaacaatcaggatgttgaacgcatcacccgaagagtcgagggactggatgtcgaggtgttttgcccccgctatatcaaagtaacgccacgtaaggattgccgggcggtacgtcaggaagagaaggtgttgtttcctaattatcttttcctctgctttgacgtcaacataacgcatacatcggcaatcacatccattccgggcgctcatggttttgtcagcttcggttcaacaccctgcaccgtccccaaatcagtgataacagcgattgaatgcgcccgtctgatggcgctcaatcctgatgaagatgctatcgagtgccgaaatattgccccggatttgctggcaaaaattcaagaactctctctgataaggtctccgctccaacgccaggtagccttttcaaaactactccagaaccaataccactaa

SEQ ID NO: 86357 - DNA, 216 bp, Citrobacter koseri
atgccgaaaagcgtaccaggcaaatcaagcacggctgttatttacatcgggcaaaagcgctatcaggagttagcaaagcaagcccgtgaaatcagctacctatctgaatcaaatatccggccaagcacctttctccagttcctgatggatgaatttggtgagcaagcccgtactgagctgctccggcagctactcgcagagaaacagaaggagtaa

SEQ ID NO: 86358 - DNA, 219 bp, Citrobacter koseri
atgagaaaacccacctataacgtgtacgtcacgcaggaaacccagcccggcgagaacggcgaaaaaaatacgtactggacgaaagtcggtgcggccttcgcacacaatggcaagccggggctgaacatcatgatcacacccggtatttccgtttccggcaagctggtactcctcgaacctaaagatgacgcagcgccgcaggctgctcctgtcagttaa

SEQ ID NO: 86359 - DNA, 711 bp, Citrobacter koseri
atgctttccaccactgcttttctggcggtggctatgcagtgtgccgccaccgttcacccttctacgtccctcgatgtggcaagggtggagtccggttacaacccctatgccatcgctgagatcgtgcctaagcccgaacggaaacccggcgataaaggctttattactcacatgccaaaaagtaaggaggatgcagtcagcatcaccaatcagattgaggcgaaaggtcgccgctattctgttggcctgatgcagataaccagcaccaattttaagcgttacggcgtcaccgctactgaccttttcaatccctgcatcaatctttccgtctacgaaaaagtcatcaccgactgctaccagcggggcggcaccctgaaaagggcgttgagctgctactactccggcaatttcagtaccggacaacagcaggaacccgctttttcaaagacgagctatgtacagcggattggctactccccggcggatacccgctatgccgttcccggcacccgcgatgatatcgcaaccccagcggccaccctgaaagctacgccagtggatgcgccgacgcgcccgcgcgtggtgtggccgggggcgatcgttcgcggcgttccggctcaactccgccagaaaaaggcggccaccgtctattaccccgcgcaggttgtgcgcggaaatcgcgatgtaacaacgaaagaggatgaaaaatga

SEQ ID NO: 86360 - DNA, 306 bp, Citrobacter koseri
atgaaacttttcagtaaggtaaaggaattaatcagccgtgcatctgcttatgttctggctccggccatgagcgtttttgctgccagtccggcgttcgctgatggctttagccgggcaaataccatcatggagaaggtatccagcgggctgcatggtctggcggctatcacaatcaccgtggccgtgatctggattggctataagaccctgtggaaaggcgagagcctgtcgcagtgcggctacatcatcattggcggcattttaattggcggaggcagtgaaattggcgctctgctgatgagctaa

SEQ ID NO: 86361 - DNA, 711 bp, Citrobacter koseri
atgaaaactcacttttacgcgctgattttcgcatgttcgcttgcaagccctctggcacaagcgggaggtattttagtatttgatgccacggccaaactggaaaatgtccgtcagtggcagaaagaagccaagcaatggatggagaccgcacaacactacaaagaccagatacgagcttataaagaccaactggcaacagccacaggtgttcgagacatcgccagctttgttgaccaggccaaaagcctgaaagccgatctcgaaaaactacgcaagccgggacaggctctgaatgatttgcttctctccggtggttcctccggacagttcgacgcgctgtacgagaagtacaaaatattcgatacctgcaatgccgaacggtcggggaactatgccaacgtatgcaagcagcaagtcatcaataaagctatccagcttgagcagaccgacgaaatccagaaccaggtaagccagaccctgggggaaatcaacagcctctccaacagggtagcgttagccaaagattcgaaagaatctcaagaccttgcaaacagtattcagctaaaatctgtcatgctgaacacgcttaccacccaatgggaaatgagcgtgaaagcagcagagaagcgcgaaaaagtgcttgaggcggagcgcgttaaacagtggaatcagcagcagttaaacgcgccaactttaaaatttcatgagtaa

SEQ ID NO: 86362 - DNA, 1077 bp, Citrobacter koseri
atggccgaactcggtacatttgaatttatagataaacagctaattggtgggataactcaatctaccagtgggttgatgatggaacattcatcaatggttatggggctggccgctgcgtcagccaccatctacatcatgtggagaggctatcagacgttagcaggtaagctctccacgccgatggaagacacgatgtgggacatcatgcggatggcgatcatcctgtcgtttgtggctaacgtcagtggttatctcgatggcgtgatcgatgccatcaacggtttaaaggagggtttttctggaggcgacaatatctggcaaatgttagataccttatgggataaggcaaaagttttggggaaaacattacacgatatggataattcaacatatgtgaaagatgaggggatgaccgctcaattttatgtatggcttgggatatttattcttatggttttaacagcttttgtttcgatggtcgctgagataatgatcttacttcttagcatcactgcgcctatttttattttttgccttatgtatggttttttgcgaccgatgtttaataactggttgcaaaatatatttgcagcgatattaaccgttctattttcagcattatcattaagaatagtcataaactttatgactaaaatattagcccaatctcaagccggagctgcacagtcaaatattgtggaactaggcgcacaggtctgtttggctggtatctgtgccgcaatactggtgtatatctccgctaaagtagctgctgcattggccggggcaagtgccaccgtatccatgcaggggttggccgctgtaggtatcggtgctgctgcttttggtgccgggaagctggccgggggggcggttaaagaaaccaaacgttccgcccaggacaacattcagggctggaaggatgcgaatgctggtaagcccggcaagcccggaggtgagttaggctataacgcttctaaagcgcgtaaatacgcgattgagcagatgatagcccggaacgaagcccgaagactggcacagtcgagggaatccgcggttaagaagttcaacagctag

SEQ ID NO: 86363 - DNA, 1026 bp, Citrobacter koseri
atgaccgctaaaaatatttccctcgaccgctataaacagcgtttctttggcgactttctggagcttcccggcctgacggaaatcgccgtcaaccgtccaggtgagctgtataccaaaatcaacggcgtatgggagcagcacgccgttcctttgagctatgaggattgctacaactttgcccggtgcctggcaaagcaccacggcgacaatatcgaagatattaagccgggactgtcagccacgctggaatctggcgaacggtgccaggtgattgttcccccggcctgtgagcgcgatacggtgtctatcaccatccgtaagccatcgaaggtacaaatcccgcatcagtcatatatcgatgcgggattttataaccgggtaacaggcgaggaaaaaacggagacgcacgacgaggaattaattgcattgtacaatacaaaaaatattcctttgtttatggagaaatgcgtcgagtacggtaaaacgctcgcggtcgccggggaaaccagtaccgggaaaaccacctatatgaaaatgttgatagggtatattcctgtacatcttcggatatcaaccattgaggataacccggaaatcacgttctttatccataaaaactacgtccatcttttttatccgtcagaatcatcagatgaaaaagggtctatcgttaccccggctagccttttacgctggaattaccgtatgaaccctgaccgaattttattaacagaggttcgcggtgcggaagcctgggacttccttaaaataacaggttccggtcatgaagggagtatgacctccattcatgcaggatctgcgaaagaagctatagacgggtttattacccgttgctatgaaaatccacagtgcgcccagctcccctatacatttatgttacgtaaggtactggatagcctggacgtgattgtgagcattgatttagacggaaatgtccgccgtatgaatgacatttatttccgtccaatccatcgcaatcaatattttgaggaaatgaaagcatga

SEQ ID NO: 86364 - DNA, 306 bp, Citrobacter koseri
atgaaaaaaaccgttattacggcggctgtattatgcctgaccgcaggaacgccgatttattcatttgccgctgacccatgcgaagttgttctttgcatgtacggaaaagcaacgggtaatagtggtgggagtgaatgcagttcagcagaacgcgcattttttaaaatcaacgcttttaaaaaacaccatcgttttaatccgggtaaaacattcgatatgcgaaaagaatttttaggcgaatgtaaagccgcagaccctgaatcaataagcaaaatcctttcaaaatttggcagagtgaaaggataa

SEQ ID NO: 86365 - DNA, 306 bp, Citrobacter koseri
atgataaacgaaaatttattcattaagaatatacactcaaaaaatcaggacagaatatctgtagccctggtatatgacacgttatcaaaagaagcccacagaggttgtgggctgtattacgaaatatacgaaagctgttttatcggtcttttgcgcgatcatctttcagaacttaatgaagctgacgcaaataaattaagacgctatgccgaaagcaaaggtacgaaaattgatgatgcgtcctacagtgaagcgctggaagctgaaagggagtgcaggtctgaaatataccgcgagcagatgtaa

SEQ ID NO: 86366 - DNA, 1737 bp, Citrobacter koseri
atgggttcccacctgatgcaaaggctgaatgcctttgccgatgcattttccttttttctgttatggctgcaaaacagccctgtcatattatccctgctcgcaggtcttacattaccttttatattccaccttccccgagaggaaagaaagaacgccccattctggttaaagtcggtggcgtgtgtgtccattttcttttttatattcggcaccatatcaccgctaactattcaggggttgagctacttttttaagtcactcgacaacaacatactgtttagagttccgctatggatcatgaccataatatttacggcagcaggattaatatttcatattgcagcccgacgacttttagcaggagaaattgacaacctaaaacatcgaatgattaagaaaagcaagctggagagaaatacccgaaccgatgtacgcaaagtaaaagagctattacccgaccccatagaatataatccactcgattacattgatttaaagaaaggcgttttcattggattaaacaaagatgaccagccgcaatacataaccataaaagaattcaaaacccaacatgcagcaattatcggtacaacaggttccgggaaaggcataactgcgaccgttctactttatcaggctattcttttaggtgaggctgtttttgtagaagatccaaaagatgatgaatgggcacctcacgtacttagggaagcatgtaaaaaagcaggcaagaaattcacacttataaatttaaacaagctcaatttccagcttgatttactggctgatatctctcatgaacaactggaggaattatttaacgctggctttagcctggctaaaaaaggggaggcttcagatttttatcgcatctctgaccgtcgcgcagccagaaatacatctgcaatttatgaaaaaggaatgacacttcgtgatttatttaacactgactttgttcagtcattacgtgaagatgttcccgcattttgtggcgagctggaagaaattgctttagttaactcaattaatgccaccaaaggattttcattaaaagaggtttttgatgaaggtggttgttgctacattattggttcaacgcgcaatcaaaagataatttctgcacaaagaatgattctgacccggctgatacaaatagcagagaccagggacagaataaacagcaccccgcgtactgttgctattttcctcgacgagttgaaatatcatctttctcgccctgctcttgaaggacttggaacggcgcgagataaaggcgtgcatatattcatggcttttcaggcgatagacgatctgcgtgactgcccgtctgatttaaatggtgattcagttattggcgctatcattgaaaacgccaaattcaaattaatttataaaatccaaaaccccgaaacagcagaatgggcggcaaaaatgacaggctctatcctggttgatgatgaaatgaggaaagtacggactgatttgtcattaacggagaaagtggatacagaccgaatgataagacaggcagaaagttactatgttgacagtaatatgtttttaaatctccctgaaaaagttggttttgtatttacgtcaaccgaactaccaagagctacaaagatgtttcaggttcaggtcaaaaaagaaaacatcgaacttctttcatttgagtataaacaagccacacctgaaaaaaatgaaagtcaggaacataagccatcaatcaatctgtga

SEQ ID NO: 86367 - DNA, 756 bp, Citrobacter koseri
atgcttattcataacgttgcagaaaggaaagaagccgcaaacagaaaaatgcttgcattgctgacattccttaaagaagaaacatactccgattttaaaacgctgaaaaaagttgttgggttcaagggtaaaagtcaccgcccaacgtatgcgctactgaataaagcggttgcattggggtttctgataaaacatgaatatccggtaatagccggaaaaaaatcactatgggggatcaccatgcaagggctggcaatggtggttaaacccgatgataaagtattccccggttattttgagccggggaaactcaaatactggacactggaacaccggctcctaaatcatcgggtcagaattgcactggaagagaaaggcgggcaaggctggcttaatggtgatcggggggagtttattgcgcgttatcctggcgttcgccatcgtcctgacgggattatcacgctagatagcggcgcaatcgtcgccgtcgaaactgagcgctcaatgaaaacccgcgcacgctatatcaacatcattaacagccatctggcggccagcgatgccggacgctggcactacgcgatgtatgtcatgccggatgacaaaaccaaaacatcgttaatccggctgtttgactccatcaaaacggtaatgaggaacaacgttccggtgccgttcgatgcgaaaaaccgcgaaatgtttcttttccgcaccattgatgaactggagcaagcagccgccagcggcggccagtga

SEQ ID NO: 86368 - DNA, 474 bp, Citrobacter koseri
atgaaatgccgatctcgtttgcttgtgtttctgcccctgcttttccccgccctttgcctagcggacttttctggccgtgttgttcgggtcgtcgatggtgatactgtccaggtgctcgccgatggcaaaatgatgaaagttcgccttaacggtatcgatgccccggaatcggggcaaccgttcggccagcgctcgaagcaaaacctgttagagctggccgtccagaaacagacggtggtcatagccaacaatacagatcgttatggccgctggctgggaacattgatgattgacggtatcgatatcaacgcagagcaggttaaagcgggtatggcgtgggcttatcgatatcatggccgtgccagtgatgaatcaatgctacgccttgaagaagaagccagacggcataaaatcgggctgtggtcgtcatctgacccagtggagccgtggaagtggcgcaaacagaataaatag

SEQ ID NO: 86369 - DNA, 279 bp, Citrobacter koseri
atgcacccgcaaatgcccggcgtcctgctccagcgcctgcccgatgccgagtacgttgccgtgaccgaagatggtcgccacgccttcgatgaacggcatctcctgcccgtctacatcgacgtactgttgattgagaaacttgaccagcgcctgcgccatggtcatacgtacggttgtcataagtccctccgtcagcccagcgttggcatggagaacgcggcgccgctatcctgctgcatctccggccagcgggcggtaacggttttcatgcgggtataa

SEQ ID NO: 86370 - DNA, 1164 bp, Citrobacter koseri
atgcacccgccacgcccggcagccgtagctttgcgcattttgggcgaaatcaaccgccaccagcgggccgtccagctgaccggattgtggttgacgggcgcgattctcggtgccaaaactgcccatcccatgccccatttgcaggttattgatgcagccaaacccgccgttatcaaacagcaggatggtgatttttatcccctcctgcaccgccgtttgcagctcagaatgcagcatcatgtacgaaccgtcgcccaccatcgcatagaccggctgctgcggcttcgcgagtttcgccccaagcgcggccgcaatttcataccccatacaggaatagccgtactccaggtggtagctgtcgggcgttttcacctgccagagacgctgcaaatcgcccggcagcgatcccgccgcgccgaccacaatggcgtcatcctcaatgtgctggttgataatccccagaacgcgagtctgagtcagccgcgtgttcagcgcttcactgtattccgccagttgcgcatcaaggtgcccggcaatttccggcgcgtcatccgggcgccactggcgagaccacagccggcggcactcctcgtcccaggccgatttcgcctgcgccacctcgtctccccagccgctgcgataatcctgaagcccttccgtcagcgccgtcagaccggcgcgggcatcggccaccagcgccgtggcgtccagtttgagggcgtcgaactcggcgacattcagcaggagaaattctacgtccgggtgtgcaaacagcgctttcgaaccggtggtgaaatcggtcagacgcgtgccgacgccgataaccagatcggcctgcggcgcaagctggtttgccgccagcccgccggtaacgccaataccgcccagattcagcggatggtcgctgaccagcgcgcctttcccggcctgcgtttccgcaaacggcaggtgcaggttttccacaaactgacgaaacgcgtcgtgcgcgccggaataacgcaccccgccgccgcaaaccaccagcgggcgctgtttacgggcaatcagcgcccgcgcctgcgccagccggtgtgggtccggcggtcgtctttcaatatggtgaacgcgacgggcaaagaaactctgcgggtaatcccaggcttcgccctgcacatcctgcggtaa

SEQ ID NO: 86371 - DNA, 180 bp, Citrobacter koseri
atggtgtccggcgccggtcacgatacctgttatatcagcaaaatcgcgcccgccagcatgatttttatcccctgcgaaaaaggcatcagccataacgaggcagaaaacattcagccggaatgggcagaaaaaggcgctaatgttctgctgcacagcctcctgccggctgcgcttgaataa

SEQ ID NO: 86372 - DNA, 435 bp, Citrobacter koseri
atgtctagagaatacttacacattagtagtcaggttagatatttccttagcaagggtcactatttttggacatgctgccaacaggagcttgatgatttggcagcggattttctgtcctataaaaaggatggcgtgttgcctgacacctttggtcgtgatgcaccttacgatgatgaccgcacctatcccttggtaaaagaagagcaggtggcccacattcatcttgccgatgtggatgcccctttccctaagttcttgcgtcagttcaaacgaaccagcgatcaggcgcatttggtatactgccaaggtgcgatggatcccgatgcctatctgctgattatcatcctgaaacccgaagcgcataaaatggcgcgcaacaataaccatatgcataagatcgggatgatggctgaagcgttcaggatgaaacattaa

SEQ ID NO: 86373 - DNA, 423 bp, Citrobacter koseri
atgacgatttcccccggccttgccgctatgttgccggtactgaaaaacaaagggtttaaaacggccattatttccggtggtctggatattttcacccaacgactgaaagaaaagtatcagctcgactacgccttttccaacacggttgaaataaaagataacgtcctgacggacaatattaccttcccgatcatgaatgccgggaaaaagcggcaaacgctctctgcgctggcaacacaactcaacctcgctgtacacaacattattgcctgcggcgacggcgcaaacgatctgccgatgctaacgtacgcgggaaccggtatcgcgtggcgggcaaaacccgttgtcagagaaacaatccatcaccagattaattttcatggattcgaatcacttctgttctttattgaagatgaattataa

SEQ ID NO: 86374 - DNA, 804 bp, Citrobacter koseri
gtgatcgctaccgtaagcagtcatattgcgggtttcagagtaggtggtcgccaggtagatgttgttcgcatcgtatttcagaccagcagcccaaacttctgcgtttttaccgcctgcgttcagttcgttcgcagcagaattcacctgcgcgtcagtacggtcagattttgcataagatgcacccacgccgaaaccgtcgaactcataggtagaggagataccgaaaccgtcgccattcgctttagtgatgtcagcgccgtagattttatcgctgttactacgttcgtttttaccctgatactgagcagcaaagttcagaccttcaaccagaccgaagaagtcggtgttacggtaggttgcaacgccggtagtacggccagtcatgaacacatcgctctgggtccaggtatcgccaccgaactcaggcagaacgtcagtccatgcgccgatgtcgtaaacgacgccgtagttacggccgtagtccagagaaccgaactgatcaaatttcagaccagcgaacgccagacgcgttttgttgcctttggtgccgttggactcgtcgttgttgcctttgaattcatattcccactggccgaaaccggtcagttggtcgttgatctgagtttcgcctttgaagcccagacgcgcataagttttatcgccatcatcacccttgtcgtcagagaaataatgaagagcggttactttaccgtacaggtccagtttgttgccgtctttgttatatacctcagctgcgtttaccgcacctgctgccaacagggtagtcactgccactgcaactaa

SEQ ID NO: 86375 - DNA, 810 bp, Citrobacter koseri
gtgcgaaacggaagtgtacgcaatcagacgtttaatgtcgtactgggtgaaagccatccacgcgccgtagaagatgccaatcacacccagccacatcgcaatcggcgcaaactcggcggaggcgttcgggaacagcggcagcgagaagcgcagcagaccgtaagccgccgttttcagcaaaataccggcgaggtcaacggaacctgcggtcggcgcctgggagtgcgcgtccggcagccagccgtgcagcggaaccaccggcattttcaccgcaaacgcgatgaagaagcccagcatcagcaggtattccaccccgtgcgacatcggcgttttcagcaggtcttcgtagttgaaggtccagacgccggtcgcattgtggtgtacaaacaccagcgccaggatggcaatcagcatcaccagaccgctcgcctgggtatagatgaagaacttggtagccgccgtgatacgcgttttaccgtcagaggctttgtgcccccacagcgcgatcaggaagtacatcggcaccagcatcatttcccagaagaagaagaacaggaacatgtcgatggcaaggaacacgccgataacgccgcccagaatccacatcaggttcaggtggaagaagccctgatatttttcgatttcattccaggagcagagtaccgccagaacgcccagcagaccggtcagcaccaccatcagcagcgacaaaccgtcgatagccagatggatagagatgccgaaacgcgggatccacggcagaatgaactcagactgccactgcggaatgccagcggcttgcgtcagtga

SEQ ID NO: 86376 - DNA, 1029 bp, Citrobacter koseri
atgctgcaactgggctttatcacccaccagcggcaacagcgattcgctgcgggtcagcgtggcgtagttttccacgatattggcggtgttcaccgtcagctcaaaatgccactgcaaggcttcggcaagcggcagcaccttaccgttaacggtaaccggctccgtgcctttcagccagaccagttcgacgatctctttgaccagttcaggatcgttctgataccagacgcccagggcatcgcccggctgataacgcaggccggaatcgcccagatcgatttcgatatggcgcacatctttttccgagtcgcggccggtgattttctgattgacggcgagcgaggcgctcagcggcgcttctttggtataagggctggaatgcacgtcattcacggcccccgttgccgcgacagcgacctgcgctgccgatgcgctcggcgcacgtgctttcagtacgtcaacaacgcgagcccgccattcttgtgccgcagcctgatattccacatccgcatcgacgcgatcgagcagacgctccccccccagttccgccagcttgctgtcgaaatctttacccgcctggcagaaaaattcataggaggtatcaccgaggccaaagacggcgaaggcggtgttgtcgagcttcggcgcttttttagagaacagaaacttacgcagcgcaacggcttcttccggcggctcgccttcgccctgcgtggacgcgaccacaaccagcagcttttcattggcgatctgtttgaatttgtagtcgcccgcattaaccagcgtgacgctcagtttcgccgccagcaggtcatcgcgcagggcttccgccacgcgccgcgcattgccggtttgcgatgcagaaataagcgtaatacccggcatttcagcgacaggcgctggcgtggcggcgagcgtgcccggctgctggttcagcattccccagaaatagccggaaacccaggcaagctgggtgggagaaagatcggttgtggccgcctgaaggcgtgccagctgctccgggtttag

SEQ ID NO: 86377 - DNA, 279 bp, Citrobacter koseri
atgaatgcaggttttcatctgctcactggagagatacaggtcatctttacgtccttcgacacgcaaaaagccgtagccatcacggtggccgataacggtacctttcagcaggtcgaggcgttccggcagcgcatagcactggcggcgggtaaagaccagctgtccgtcgcgttccatcgcgcgcagacggcggcgcagggcttcctgctgctcttcaccttcaatgttcagttccgcagccaactcatcacggttggctggtttttcacgttttgttaa

SEQ ID NO: 86378 - DNA, 783 bp, Citrobacter koseri
atgccgattcaggttctaccgccgcaactggcgaaccaaattgccgcaggtgaggtggtagagcgacctgcgtcggttgtgaaagagctggtggaaaacagccttgatgcaggggcgacgcggatcgatattgatatcgaacgcggcggcgcaaagcttattcgtattcgcgataatggctgcggaattaaaaaagacgagctggcgctggcgctggcccgccatgccaccagtaaaatcgcctcgcttgacgatctcgaagcgattatcagtctcggatttcgcggcgaagcgctggcaagtatcagctcggtttcgcgtttaaccctcacgtcacgtaccgcggaacaggcggaagcctggcaggcctatgccgaagggcgtgatatggacgtgacggtaaaaccggcggcgcatccggtcggcaccacgctggaggtgctggacttgttctacaacacgccggcacggcgcaagtttatgcgcaccgagaaaaccgagttcaatcacattgacgaaattatccgccgcattgcgctggcgcgcttcgacgtcacccttaatttgtcgcacaacggtaaaatggtgcgccagtaccgcgcggttgcgcaggacgggcagaaggaacgtcgattaggcgcgatttgcggcgcaccgtttgcgcggctgggtggccgatcctcaccacaccacggcggcgctggcggaaatccagtactgctacgtgaacggccgcatgatgcgcgaccggttaatcaatcatgcgattcgtcaggcctgtga

SEQ ID NO: 86379 - DNA, 657 bp, Citrobacter koseri
atgatgagtaaagttcgcgccgcctgcccaccagatcattttgatatccgggaaggtttgctctttaccattatgctgatattttcctcccgggttttccagcgcctccacaattcgcgccacaggcaggttcaccaccgcatccgataccgcccagtcgttccctgccgacgatcccccctcaatttgcgccgatatcgcaggcagtacaccaccggtacgcgtcgggttcccgccgttggaatagtgataggagaaaccgaaaccgccgccttccgtcccaatttgccccagcatcgcggccagcgtcaccagcatccagtgtttttgctcaccgtattgctgacgttgaatcccccagcccgccatcagcatggtttggttgctggcgaaaatttccgccagtttctcaatctgttctgcgggtacgccacagacgccggatgcccattcagcggttttctcaacgttgtcgctcttgccgagcagatactcttcaaactgcggataaccggtggtgtatttttccaggaacgctttatcgtgacgctcttttttcaccagcgtatgcgcaatccccagcatcatcgccacgtcagttcccatatgcggggcgatccacgttgcattgtcgccaaaaaactcaatggtttctga

SEQ ID NO: 86380 - DNA, 420 bp, Citrobacter koseri
atgtttatccatcatcagcgcgatgcgcctttccgacagcgcgccgatttccgcaatcgccagcgccagattatccgccgccatcgccaccggttcggcatggaagttaccgccggaaatcacatccccctcttcggcaaacaccagtgggttatccgaaacggcgttggcttcaacgagcagcacctccatcgcctgacgcagttgtgtgaggcacgcgcccatcacctgcggctgacagcgcagcgagtacgggtcctgcaccttttcacagttatggtgcgactgtgctatcgcgctggtctccgtcagaacgtggcggaacagcccggcggcgtcgatctgcccacgctgaccgcgcgcggcatgaatgcgcgcatcaaacggtcggcgcgaccccagaacggcttcggtggttaa

SEQ ID NO: 86381 - DNA, 441 bp, Citrobacter koseri
atgcgccagcggcgccagatcgcccgatgcccctacagaacctttcgccgggatcagcggccagacctctgcgttgaccagcgcaatcagcgcctcaatcacgctcaggcggatacccgagaaaccacgcgccaggctattgattttcagcaccatgatcaaacgcaccatcgcgtcgtccagcggctcgccaatacccgccgcgtgggagagcaccagcgaacgttgcaggttttgcagatcctccgtggcgatgcgcgtctgcgccagcagaccaaaaccggtattgataccgtaggccgtgcgcccctcggcgacgatattgttcacgcagtcgacgctggcattaataccgtcaaccgcgctgctatcaagacgcagttgcactggctgctgccagacggcgcgaagctgcgcaaaactcagatgacccggcgttaa

SEQ ID NO: 86382 - DNA, 885 bp, Citrobacter koseri
atggaagacgtgcaccgtgcgggcggcgtgctgggcattctcggcgagctggaccgtgccggcctgctgaaccgcgaagtcaaaaacgtgctcggcctgaccctgccgcagacgttggagcagtacgacatcaccgtaacccaggacgaagcggtcaaaaaaatgttccgcgccggcccggcgggtattcgtaccacccaggcgttctcgcaggactgccgttgggataccctggatgacgatcgcgccgaaggctgcatccgctcgctggagcacgcctacagcaaagatggcggtctggccgtgctgtacggcaacttcgcggaaaacggctgcatcgtgaaaaccgcgggcgtggatgacagtatcctcaaattcaccggcccggcaaaagtctacgaaagccaggacgaggcggttgaagctatcctcggcggtaaagtggtcgaaggcgacgtggtggtcattcgctacgaagggccgaaaggcgggccgggcatgcaggaaatgctctacccaaccaccttcctgaaatcaatggggcttggtaaagcctgtgcgctgatcaccgatggtcgtttctccggcggtacctccggtctctctatcggccacgtttctccggaagcggccagcggcggtaatatcgcgatcatcgaagatggcgacatgattgctatcgacattccgaaccgtggcattcagctgcaactgagcgaagcggaaatcgccgctcgtcgtgaagcgcaggaagctcgcggcgaccaggcgtggacgccgaaaaaccgtgaacgtcaggtctcctttgcccttcgcgcctatgccagcctggcaaccagcgccgacaaaggtgcggtgcgcgataaatcgaaactggggggttaa

SEQ ID NO: 86383 - DNA, 1545 bp, Citrobacter koseri
atggcggaatcacagcccctatccggcacccctgaaggtgccgagtatctcagagcggtgctgcgcgcaccggtctatgaagcggtacaggtaacgccgctgcaaaaaatggacaagctctcttcgcgcctcgacaacttcattctggtcaagcgcgaagaccgtcagccagtgcacagctttaagctgcgcggcgcgtacgcgatgatggcgggcttaacgcctgaacagaaagcgcgtggggtcatcaccgcttctgcgggcaaccatgctcagggcgtggcgttctcctctgcgcgtctgggcctgaagtcgctgattgtcatgccggtggcgactgccgatatcaaagttgatgctgttcgcggctttggcggcgaagtgctgttgcacggcgctaactttgatgaagccaaagccaaagcgattgaactggcgcagcagcagggctttacctgggttccgcctttcgatcacccgatggtgatcgccggacaaggtacgctggccctggagttgctccagcaggacgcacacctcgaccgcgtgtttgtgccggtgggcggtggcggtctggcggcgggcgtggcggtgctgatcaaacagctgatgccgcagatcaaagtgattgccgtcgaagccgaagactccgcctgcctgaaggcggcgctggatgccggtcatccggtggatctgccgcgcgtgggtctctttgctgaaggcgtggcggtaaaacgtatcggtgacgaaaccttccgtctgtgccaggaatatctcgacgacattattaccgtcgatagcgatgcgatctgtgcggcgatgaaagacctgtttgaagatgtgcgcgcggtagcggaaccttccggggcgctggcgctggcggggatgaaaaaatacatcgctcagcacaacatacgcggtgagcgtctggcgcatattctctctggcgctaacgtcaatttccacggcctgcgctacgtttccgaacgctgcgagctaggggaacagcgtgaagcgttgctggcggtgacgatcccggaagagaagggcagcttcctgaagttttgccaactgctgggcgggcgttcggtcaccgagtttaactaccgcttcgccgacgcgaaaaacgcctgcatttttgtgggcgtgcgtctgagtcgcggcttcgaagagcgtaaggaaatccttaatctgctcaacgatggcggctatagcgtcgtcgacctctccgacgacgaaatggctaagctgcacgtgcgctatatggtcggtggtcgtccgtcgaagccgttacaggaacgtttgttcagcttcgagttcccggaatcgccgggtgcgctgctgaagttcctctacaccctgggcacgcactggaatatttccctgttccattatcgtagccacggcaccgactatggccgtgtactggcggcgtttgagctgggcgataacgaaccggacttcgaaacccggctcaacgaactgggctatgagtgccacgacgagaccaataacccggcgtttcgtttcttcctggcaggctaa

SEQ ID NO: 86384 - DNA, 516 bp, Citrobacter koseri
atgagaatggatatagttgataccccgaatgaaaatgcgcaaggaagtaaatatttaacgcctcagcttacgttcctcgataagcattataataattccacggactttttttcttcgatatttttactgctgaaagagaaaggctacgttcgggattctttcctcgatgccattcttgccagagaaaaagcctatccaaccgggttacccacgctgccggtggctatcgcgctgccgcataccgacccccagcacgtcattcgtccctttatctctgttacgcgactgtcacaacctctcgcctggcaggaaatggggaatgacgacaatacgctctacgttcaatttattgttcttcttggttttattgaccacagcagccacctgacagcgctgcaaaacctgatggactgccttgctgatgaacaggtcgtccagaccctacgcgagatagacgatgtagatacctttctctgtaccctcacatcaagactgcaattggataaggatttataa

SEQ ID NO: 86385 - DNA, 279 bp, Citrobacter koseri
atgaaaaaagtcattgttgcctgtggaagcggcgttgcgacctcacaaacagttgccagtaaagtgactcgcttattgaatgaacgtaaccagtcgcacattaaagttgaagtaatcgaccttaaatctctcgatagccatattaaggatagtgctgcgtatatcgcaattactaaagttgataagcaatatcctatccccgtgattaacggtatcgcatttctgaccggtatgggtatggaacaggaattacaaaaggtcattgatgcctgtaaataa

SEQ ID NO: 86386 - DNA, 1404 bp, Citrobacter koseri
atggactttcttggtgtagtcataaattatattctgaatttaggcgcgccggtttttgtgccttttatcatgttattagccgggctggtggtgcggatgaaattccgcgatgcggcttcggcggccatcacgctaggcgtcgccttcgttgggatgagcatgctgattggctttatggttgatgccatcggggttgccgcgcagaccatgatgaaccgcaccggccttgaactgagtatcgtcgacggcggttggacgacgatggcgaatatctcctgggcttggccttacgcattcgccatgttcccgcttcaggttggcgtaaacattgtgatgttgatgctaaacaagaccaataccttcaacgccgacctctggaacgtgtgggggaaaatctttaccgcgtttatcgtagtgagcgtcaccaccccattgtttggcccggtctggagcctggtgctggcgttcctgattgcagctttgcagattatcgttgagctgaacgctggcgacattcaccagcatcgcattgagaaactgactggaatccccggcgtcacctgtacccaccgcatggtgttctttggcgcaatttattacccgttcgatctgctgctgcgcaaaattccggtgtgcaataagccgatggatgccaccgcgctgcgcgcaaaagttggcgtttttgcggaaaaccatatcatcggttttattctcgggatcctgttcggcattatcgcgggctacagtgtggcgaaaacgctgatgctgggcgttcaggccgcaacggcgctggtgctgttcccgatgatttccaaactctttatgcaggcgctgtcgcctatttcggaagccatcagcgactacatgaacaagaaattctccgggcgtaagctgttcgtcggcatcgattggccatttatgggcggcgccagcgaaatctggtttgccatcatcgttgcgattccgttcacgctcatctgggcgctgattctgccgggcaataagattttacccttcgccggtattattaatatttccctgattgttcctgcctacctggtgacgcgtggcaacaccctgcgcatggtgatccttagcattatcggggtgccgttcttcctgttcgtgggtacgcagtttgcgccaatgattaccgaactgggccaggcgacgaaggcaattaccattcccgccggccagctgatttccaatagctccattgatgctccggtctttacctatgccttctccttcctgttcaaattcctggaaggcaactttatcccgctggtgtttgcgctgtggtggggctgcggctacttcttctactcccgcgaactgcgtcgtgaaagcaatctggcgcagctggaagccgagcagcaggagaaagctcagcaggcttaa

SEQ ID NO: 86387 - DNA, 2064 bp, Citrobacter koseri
atggctatggataaacgcgtggttgcagtgctggatgccattgtgaacgatcccggcatcacggggacgaagcttgaggagcagttttgcctgacgcgcaaacagctgagctatacgctgaaaaaggtgaatgattatctggaatcgaaccacttcgaccggatcaaccgcctgaaaaccgggaaactgcatatcccgcgccatgtgattgagcattttcgtcagaatcagaccgctgaaaccgagcatcgctatctctactcggaagatgaacgcggacagatgattatctttatgctgttgacccgcagcgagcggctttcattgctgcatctctcctcttcgctgggcgtcagccagaatacgattatcaacgacctgaaaaaggtgcgcaccgaggttatcgagcacgggctggagataagctatgacaggggtaatggctatcatattctgggtgaggagctggaaaaacgctacctgttgctaaactgcctgcgccgagtgctggaaatcccggtcgccaaaaatattattgctcaatacaacaatgtgatgagcgactatctggaaaaggtgggcaatgttttcagcgaaattgaaaaacgttttaaaattcagtttaccgaccgccagcttcaggagcttatttattttatctgctttgtcctgcaccgtattgattcaggaaaaagtctggtcaatatcccgagcagctacgctgacattattggcagcagagaatatacattgatgcagagcgttatcagtaaaatcaatatcagtagcgagaatgaactggttttcctgacggcactgatccaaagttcaaatattcaaagcattgccgataaatatttccaccttgatacgcttctgctcgaaagcgtggtcgcggtggtcgataacttcgaaaaaataagctgcgtcaccatcaaagaaaaaaatgagctgattgaaaagatctatcaacactggaaaccggcctattaccgtattcgctaccatctgaccaacaccagcagcgtttacgatctggtggtgaaagagttcagccacctgcacgagatggttcgccgggcggcggtgccgttcgaaacggtattgcactgtgaaattcccgatgaagagatggcatttttgacggtgctttttggcggctggctgactcgcgaaggggttatccatcagattaagctgcagaaaacggcggtggtcgtgtgtgagaatagcgctacgatttcgacttatctgtttctgacgctgcaggtgctattcccggaactgcactttaccgaggtgatgtcgcgccgcgagtttgagcgctataccgggcactacgatgtggtcttctcgaccacacacctgaataccagcaagatggtgtttgtggtgaatccgtccatcagcagcatccataagagcgcattccgcaatcatgttatcagcgcgctacagggcgtggacccgaacattattcagatagagcaactgctgcttatcttcgaacgcttcggcaacattatcgatcacaaaggattgcagcgcgcgctggccagctatatctacgatgaaaaaagcgccgcgagcgcggtgggcaacattgaaccacaagcgccgtcgctgaccgacttgctgcggcgcgaacacgttcagtttgtcacttcgtgtcccggcgactggcagcaggccattactcaggccgctgcgtcactgttggaaagcggcgtgattgaaccccgctatctgcaaattatgctgaataaaatcgctgacgagcagccctatatcatgctggccgatggcgtgattatcgcccacgcaggcgtcgatgatggcgcactggatacggggatggcgttattacgcctgccttctaagattgatttcgcgggttatatgcaggccgatattattatcgtcctggcaactaataatccacagaaacatctcaaggcgctcgcgcaattaaatgaatttctcgaattttatgatggcggtaatgttattcgccgcgcccaggatgaatatgcattgataaaagaattcgtccatcacctgtaa

SEQ ID NO: 86388 - DNA, 663 bp, Citrobacter koseri
atgttagaaattcagaaaaaacacgttgtcgaaatggccagaaccgctcagcaatggggactgtgtaaacataaagcgggtaattccagcgtacgagataaagagacgggacttattctggtaacccccacgaccatcgacaaaatgcatttaacgccgcgcgatatcgtggtaatggacgttgaagccaatgtgattgaaagcgaagcgggtttgcgtccgaccagcgaatgtctgatgcatatcgagatttataaggcgcgcccggatgtgtttgcgatttcccacacccattcgctgtatgcgacgtcgtttgccgtactgaataaaccgatcccggcggtggtgtacgaatgcgcgatcctcaatctgaaggatggcgtcattccggttgcgccctatggccgccccggcacgcctgcgttgtcgaacagcgttatcgaacctatcaaacgcgctgatgccattctgatggaaaagcatggagctatcggcgtagacaaggacccgtatgaagcggtgctgaagtctgcctaccttgaagagatggcgcagatttactaccacgcgctggtgattaacggcggtaaggagcctgaatccttcgccccggaagagctgcaacgctgggcctatccgtcgcagattaaattttcccgctaa

SEQ ID NO: 86389 - DNA, 1014 bp, Citrobacter koseri
atgaaaaaatttctgaatcaggcggagaactttatcccggagatgctggaaggtatctatctggcgcatcccgataaattccgctgtgttaatgaggatcttcactgtcttgccacggcgcggccggtgcccggcaaagtggggatcgtcaccggtggcggttccgggcatctgccgctattcctcggctacgtcggtcagggcatgctggacggctgcgccattggcgatgtgtttcagtcaccctcgccggagcagattctcgccgtcacgcaggcggtcgatagcggcgcgggcgtgctgtacctgtacggtaactataacggcgatattttcaattttgatatggcggcggaaatggccgacatggagagtgatatccgaaccgcgacggtagtggcggctgatgattcggcaggtgcggtgccggacggtacagaagccactacccgtcgtggggtcgcggggatcttctttgtctacaaatgcgccggggcatccgcggccagaatggatgaccttgaaaccgtccagcgcattgcgcagaaagcaggagaccgcgtgcgcacgcttggcgtcgcgctgtcgccgtgtatcgtgccgcgaatcggtaaaccgggtttccatattggcgacaacgaaatggagattggcatggggattcacggcgaaagcggtattcgccggggtccgcagctcagcgccgaacagattgccgaagagatgatgtcctggctgctggcggactcaccttgccagcagggcgatgaagttgccgtgttgatcaatgggcttggcgccacgccgctggaagagttgtacctgatgtatcgccatgtacatcagattctggccgagagccagatgcgcgttttccgcgtctggattggcgaatttgcgacggcaatggagatgaccggtatgtccattagcctgatgccggtggatgaagagctgaaaacgctgctcaacgccggggccgataccccgatgttccgccagtttccggcttaa

SEQ ID NO: 86390 - DNA, 642 bp, Citrobacter koseri
atgacgctagatacgcagagtctgcgaccgctttttaccgagtgggcgcgcatcatggaggccaacaaatcggtcctgaccgagctggatagcgtggttggcgacggggatctggggctgacgatgagcgacggtttcgcggcggcggcgcgctacgcgcagcagagcgaagaacgtgacctggggcgattcttctacatggcgggcaaggcgatggcctcggcggtgccgtcgaccatggggacgctgatggcttccgggctgatgcaggcgggtaaggcgtttaaaggccgggaaacgctggggctaacggaagccggcgtgttgttccaggcctggtatgacggcgtgcagcagcgcgggaaagcgcagccgggcgaaaaaaccttcctcgatggcatggcccccgtgctggcggcgctgcttgccggagaggaaccgctgaccgcggcgaggaatgcgctactgcaagcacaacagggcgtgcagcagacaaccaccatggtggcgaagcacgggcgtgcagctattcatggcgagcgctcgcgcacgtttgtcgatcctggcgccatggtcgcgcaactgttgatccagggctattttaacttcgtgcaggctatttgcccgagcgacgggcggtaa

SEQ ID NO: 86391 - DNA, 267 bp, Citrobacter koseri
atgttgaaagaagtggtgaaaatcagcaatcagcacggcattcatgcccgtccggcgggggttttggccaaagcctgcgcgcagtatcaatcgcggatcgagatgatctatgacggcaaggttatcaaagggaaaagcatcatgagcattctgggggcagggatcaaaggccgaggatcgcttgagatcatctgtagcggtagcgatgagcaggaggcaatggaaaagttgaaggtgctgttcgcggaaggctttggcttcgattag

SEQ ID NO: 86392 - DNA, 1194 bp, Citrobacter koseri
atgataatcaaaccaaaaattcgtggattcatctgtacaacgacccatccgactggctgtaaagtcaacgtggaaaaacagatcgaatatgtgaagaaaaacgggaaaatcgctaacggcccttcccgcgtgctggtgatcggtgcttccaccggttacggcctggcttccagaatttccgccgcgtttggtagcggtgccgccactatcggcgtatttttcgaaaaaccgggcacggaaaccaaaccgggttccgcgggctggtataactctgccgccttcgatgaggccgcaaaacgcgaaggtctgtattccaaaagcatcaacggcgacgcgttctccgatgaatgccgcgacgcagtcatcaaactgatcaaagaagacctgggtcagattgatttagtggtttactcactggcctctccagtgcgtaaaatgccgaaaaccggtgaaatcgttcgttctgcgctgaagccaatcggcgaggtttatacctctaaagcgattgataccaacaaagatcagatcatcaccgccagcattgagccggccaccgaagaagaagttaagaacaccgttaccgtcatgggcggcgaagactgggaactgtggatgggcgcgctgagcgaagcaggcgtgctggccgaaggcgtgaaaaccgtggcctactcctacatcggtaccgacctgacctggccaatctactggcacggcgcgctgggcaaagcgaaagaagacctcgaccgcgcggcaggtgaactgcgtaaccagctggctccgctgcacggctccgcgaacgttgccgtactgaaatccgttatcacccaggcctcttctgctattccggtgatgccgctgtacatctccatggtcttcaagctgatgaaagaacaggggattcacgaaggttgtatcgagcagatcaaccgtctgatgaccaccagcctgtacggcgataaagtggcgcttgatgacaatcagcgtatccgtatggatgactgggaactgcgtgacgatattcagcaggcgtgccgtgacctgtggccgctgatcaccaccgaaaacctgacgcaagaaaccgactatgcaggatacaagcaggaattcctgaacctgttcggttttgctctcgacggtgtggattacgatgcggacgtgaaccctgaagttgaattcgacgtcatcacgctgtaa

SEQ ID NO: 86393 - DNA, 477 bp, Citrobacter koseri
  misc_feature (419)..(428): n is a, c, g, or t
atgtcgcaaaatcaatatattagcaagaaagaacagtacaacctgaacaaattacaaaaacgtctgcgtcgtaacgtgggcgaagcgattgctgacttcaatatgatcgaagaaggcgatcgcatcatggtgtgcctttccggcgggaaagacagctataccatgctggaaattctgcgtaatttgcagcaaagcgcacccgtcaacttttcactggtcgccgttaaccttgaccagaagcaaccgggttttcccgaacacattctgccggaatatcttgagaacctgggcgtagagtataagatcgttgaagaaaacacctatgggatcgttaaagagaaaattcctgaaggcaaaacgacctgctctctgtgctcccgactgcgccgcggtattctctaccgcaccgcaacagaacnnnnnnnnnnattctctatcgcaccgcaacagaactgggtgcgaccaaaattgcgttag

SEQ ID NO: 86394 - DNA, 144 bp, Citrobacter koseri
atggggcaggtagggaataagcgcatgacacagataaatggcgtcatcgccatcctgaacgccaatatgaatatgctgcccaaatacgcaggccattttggtgatgtagccatagcgtacggccagattttgatgacgttgtaa

SEQ ID NO: 86395 - DNA, 255 bp, Citrobacter koseri
atgtgccctgtcctgctgtccccgtcgcatttgcctccgccggaggtatctatgaaaattactatagaacaaccctcagcccgagaattggttgatcgctctcgggttcttgtgcatgtgatggttgataatcctgatgatatcggtccgaactatgtactattgctcgttctggctgaacagttacagcagctacgcgatatttttgaagaggatgaagtccggcgactcagggacgacaaattacctcaatag

SEQ ID NO: 86396 - DNA, 1047 bp, Citrobacter koseri
atgtccgaactcacccacgcactaaccacctcccttccgctgcgcagaggctcggaagggtttaacatcagtcaggactatctggtgaaaggactgatccccgccggggcgctgtgcagcatttatggcccaggtggctcgtttaagtcctttctggccgtttcactggcctgtcatgttgccagcggaaaaccatggagtggcagacgtgtcagtcagggcgcagtgctgtttattgccggagaaggaggaaccggtgtgtcacgccgtatccgcgcctgggaactttgcgtaaatgatgagatggcgctcgataatctgtttcgtgttgactgcccggtatttccggccacccccgggagcgttcagcaagtcatcctcgcggcgcaggatattttgcaactgacagggatgccggtcaggctgattatcctggatacactggcccgttgttttggcagttcagacgagaataccgcgcgggatatgggggcgtttattcagggctgcgatgccattcgttaccatacgcattccaccatgctgattgttcaccattccggtaaagatcaggatcgtggtgctcgcggctcaagtgcctttcaggcggcgctggacgcggagttcaatgttcgtcgtgaaggtcgtcgcaacgccatcaccctgagttgtaccaaaatgaaagacgcagaaatgccggaagttaccgcctacgaccttagtgaagcggaaatctgtattgatgatgatggtgagccagtgacatctctggtgctgaatgatgtgccccggcaaccggacgacgatgacagcccggccacatccggtgtgccctatatgacgcataaccatgccgctctctggaaatgtataaaccagcgtatcagccagaatcagtcctgtacgcgagcgctgctgcgcgatgacctgcgtgctagaggtatgaacgtggacaagaaattttcccgctggctcgaaaagctgctgcgcgaacaactgattgttctcgagggagaacagatccgactggctgatgtgggggaataa

SEQ ID NO: 86397 - DNA, 975 bp, Citrobacter koseri
atgagtcgttacgtttcggatattaccgccagtgcccgccatcagtggccgatgatatttgagcaactgggtatcgttgtgccgcctgcccatcgtcacggcccctgtccctgttgcgggggaaaggatcgcttcaggatggacgacctggacgggcgcgggacatggttctgtaaccggtgcggcgcaggtgacgggctggatctggtagcccggttcttcggttgtaacctggcccgggccgcacgcaaaatatgggagctgagtccggaacctctggttccgccagccagggaaaaatggcaggccggaaacatggacgcgcgggtaaaagccctgctgcgtcactgccaaccaggcgatgcgccatacttggcaaaacgtggctggcagcgccaccagtggcttctgacagaacacagcagccggactatcggcgggtttcgctttggtgccggaacgctggtactgccgctcagggataccggtatgcggctaacgggtgcccagttcattcatccgggagggaaaaaatacctgctgcccggtagcctgttgaaagcatgtttttgcccggttcaccaggcgacggataatggttttcctgagccctggaagccggacgtcacaccgccagaaggtctcatcattacggaagggtatgctacggcactggctgtctcctgtcttcaccctttccctgtcgtcgcggcaatgtcagcaaataacctgaaaaatgttgcggtggcctgccgggcacagtggccgtgctgtcgctttatcctggctggcgataatgatttccgtagccagaaaaataccgggctattgaatgcgcaggctgcggccattgctgtaaatggcaggctggcgatgccgcccggtagtgaaatgagcgactgggatgaattttaccgacaccatggtaaagccgcctcgcgtagcgctttcgctcgggaactcttcaataattaa

SEQ ID NO: 86398 - DNA, 249 bp, Citrobacter koseri
atgaataacagtcaacggtttttacgtttacaccaggtgaaagaaaaaactggctttaaaaaatcctggatttatcagcagatgcgcctgaagaaatttccggctgccattcgtatcggctcaacccatgtcgcctggctggaaagcgacattgaagaatggatcaaacagcaggtcagtaatagcagccagcctgaaaagaatcgtgcagctgtccatgacaggaaaaaatacaggagggcaacatga

SEQ ID NO: 86399 - DNA, 1035 bp, Citrobacter koseri
gtgcctgtggggatttacctgctctggcaggcggctgcattcgtgcatcaccgtaccccgtcatacctcatccgcgcatcttccggcgcaccggtatctttcgacacagcacgctgtgaccagaccgcgcgccggaggactgagtggagtaatgctatgccgagacttacgcaacgcatggaaaaactcgccctgctggctggcggcagttttaaaaccatccatgaccgcatccgtattgccggacgtttaagccagcatctgcacaggctgaatatccagattaaggatctccagcatcttaaatcatcgcatatcgagagttatatccaggcgcggctggattcaggtatcacgccgcgcacacttcagaacgaaatggcggcgctgcgcaccatccttgcgcaggccgggcgtgaaaaattcgcgcattcagaacgtatcagcaacaaagcgcttggcttgggtaacgccagccgggccggaactcaccgggcgctgacgccggagcgctggcaggatgcactggctgattttcgcggcagggatgaaggtctggcggttactctggagctggcccgcgcgatggggctgcgctcacaggaagcggtacagtgctgtcagtcactgaaaagttgggctgctgcgcttgatcgtggtgacgaacggctacaggtggtgtttggcaccaaaggctcacgcccccggaagacactggcgctggagccagaacgcttacgggagatcctgagccgggccataccgctggcagagcagcgccacggacgtcttatagataaaccagacctgcgcagcgccatgaattactggcgctcaagcgcctcccgcgccgggttaaccgggccatatgcccctcacagcctgcgctatgcctgggcacaggaggcgatgacagcctaccggaagcagggattcagcatgaaagaagccagggcgatggtcgccatggatctcggccatggtgatggccgtggccgctatatccagcgggtatatggagaacaaacagaatga

SEQ ID NO: 86400 - DNA, 330 bp, Citrobacter koseri
atggcccgcaaacagactcgcagcatgacgcaggaagaatgggatcgcctcttacccgcaatgcagacgtttacccacttatcgaccgaaatcggccattctgttttggttaaaggggaaagcaataaagatgtggccgaacgtgttggacggaccaagcagaacgtgggttccacggtcaaacgtatttgggatctgtaccagtctgtagccgtcgattttgagggcgagaagctacgcaaagttgacgtttggctacccgaaaagatggccctgaaggtgctgaaggaagccgaaaaatacgccatcaaccagaacaaaactgaatag

SEQ ID NO: 86401 - DNA, 534 bp, Citrobacter koseri
atggcttcacgcggtgttaacaaagtaattctcgttggcaatttaggccaggaccccgaaatgcgctatatgcctaatggcggtgcggtcgctaacctgcgccttgccacatctgaatcatggcgagataaagccactggtgagcagaaagaagtcacggaatggcatacggtggttatctttggcaagctggccgagattgcaggcgaatacctccgcaaaggttcgcaggtgtacattgaaggccagctgcgtacccgcaaatggcaggataaggaccagcaagatcgctactcaacggaagttgtggttagcatgaacggcgttatgcagatgctgggcggtcgccagggtggcggcgctcccgctggtcagggtggacagcaacagtttagcggaggtggtgcgccagctgctgcaccgggaacgcaagggcagcaaccacaacagggcgcgatgccggactttgaagatgatattccattcgccccggttacactccccttccctaaccatgcgatccatgcgctgtaa

SEQ ID NO: 86402 - DNA, 789 bp, Citrobacter koseri
atgacattgccaacacccgaaacctacgaagaactccagcacgcctacgatttttttgatgaacggctttttaataacgagctgccgccatgcctgatcaccctgcaacgcgaaaagcgtacttacggctattgctcgtttcagcgttttgttggccgcgagagcgggcaaatggtcgatgaaatagcgatgaatccagtgtttttttccatccgaacaatcaaggcaacgttatcatctctggtgcatgaaatggttcaccagtggcagtatcattttggcaaggccgggagacgtggctatcacaataaagaatggtccgcgatgatggaacgcattgggctaatgccttcagatacagggcaaccagggggacggaaagttgggcaaagtatggcgcactacatcatcaccggcggcgcttttgaccgggcgtgtgatgaactgttaacgcgcaattttcagctgtcctggatggaccgctttcctccgttccagccgaaaccgggagcgccgcagtcacccagcggaaaaggttacatcgatgatgaaaatgatgatagggaatacccgccggacgacgactacaccgacgaacctggcgaactggataatgaaatcatcgaggcaatgaagtttgtttcgccgccgccagaaaccccggtaaacaagtccaaccgcgcaaaatacacctgccctgtgtgtcatgtgaatctgtggggtaagccggggctggtcgtgttctgcggcggggagcattgcgagaaggccgaacttcagccctcataa

SEQ ID NO: 86403 - DNA, 423 bp, Citrobacter koseri
atggctaataccgtcaccgcaaaaatctatggccccgctcagaaaatgcgtttccttccttacgcgttcgcagaattttatcttcaggcagagaactacgtttgcagctttatgaaaaaatacgcagttggctatgatggcggctgctgggagtacatcacctatgaaaatggcgcgtgtgcgttcatcgcgccggatggctaccagcttacgctccctaactattttgatgaacctgttagcgcgaaagaagccgggattatcgttgcgctgtatgcctacagccatttttgctgcgtggcgtttgagcgtggctggcagcgcgtgaatgagacgatggccgaacgctatcacacgctgcgggactttaccgaaacgctcccgccggagtcacagagccgtatttttcgggcaatagattaa

SEQ ID NO: 86404 - DNA, 291 bp, Citrobacter koseri
ttgcccgccttactcgttcaggaagaaatgctgatggttgcgacagatgaagtctggtttcggtatctcgactattcgggccaaacaaaggcggtccgggtggcatccgtgcggttctggccggacattcaggaaacgatattcccccctctccaggtgccggaaggcaagcgccgcgttgtacgctgccgctgcgggattaatgactggaatgaggatggccgctggctgggtgaatactgctgcgccagctgcgggcaatacatacaggtatttgagaaaaaggactga

SEQ ID NO: 86405 - DNA, 564 bp, Citrobacter koseri
atggctttcgacttcaaaaaagaggatgcggccaagtatggccgcgaggtttaccgggcgtttcgtagtaagggcaatcaccgctgggatacgtgcgttttcgtgaatgaatccggggcttactctgccgttttccggcactcgttccgcaaaaaggttatcgaggatggcaaagagatccggcgcaacgtcattgatgatgaaatcgtggtggccgcgccggatgcgggcagctttaccagggcaaaattcccacaactggccgacgcgaaagagctgaagcaatcaggctttttcgcccgcttacggtttgttgctgaagcatctgcttatcgtgaagcatggccggggcatgatggcggcgtggtgctgatatgggaagggaaagcctatggctggaaaaattgcctgcgcgatgcgcaccatgaacggcctggcgcgatagcgatcgacactaacggacacgtctttatcgcggaaggtggaaatgagtatgatggtgcgaaatgttgggtagctatgactggcgatattaccgaaggagataatggtgataaaagttaa

SEQ ID NO: 86406 - DNA, 378 bp, Citrobacter koseri
gtgataaaagttaatggggtagcgttgctggcgattctgtttatttcggccactgcgatggcggggattaaaagccctataaaggtggtaagcctgattgattttagaggggataatcaagagctgatggttcgtgatactgaaagccaatgtgattaccatgtggctgtcacaaagagcgaaaaaaacattgaatggctcggtgttacactgccccagtctcgctgggagtttgtagtagacagaagaaaatgtggtgacatcattgagcgagtaaatatgcagattgtccctgacacgaagattaagacactgcctatagaggctggttctgtttattatatctatccagattgggacgccttttcacagaagtga

SEQ ID NO: 86407 - DNA, 285 bp, Citrobacter koseri
atggaacagccaacagatatgtttagtatgtacctgaaatttatccccgtaattctggctgtgattttctggatatactgcttgagtagtaaatattcattgagcaggatggaaacgatgcggcagctgaagcggtggtatgatttacctcgcgcctctgcaacagaaaacaaggaagaaacgctaaataatatgatagcggcagaacagaaaagagcagcattatcctttagaactgcaattgtatttaccgcaattgctatattctggttggtttatatttaa

SEQ ID NO: 86408 - DNA, 567 bp, Citrobacter koseri
atgctggaactgaacgccgcaaccactgccctggtcgttattgatttacaggaagggatcttacctttcgctggcggcccccatgcggcaagcgatgttgtcgcccgcgcagcgaaactggccgcaaaatttagggcaaacggctcgccggtggtgatggttcgcgtcggctggtccgacgattatgccgacgcgttaaagcaacccgtcgatgcccgggtgccagccaacgcgctgccggaaaactggtggcgttatccggcggcgctcggtaaaggcgacagtgacctggaagtcaccaagcgtcaatggggcgcgttctatggcaccgatcttgagttacaattacgccgccggggagtcgacaccatcgtgctgtgcggcatctccaccaatatcggcgtagaatccaccgcgcgtaacgcctgggagctgggttttggtctggtgatcgccgaagatgcctgtagcgccgccagcacggaacagcatcaaagcagcatgacacatattttcccgcgtatcgccagagtgcgcagcgtggaggagatccttaacgcgttatga

SEQ ID NO: 86409 - DNA, 297 bp, Citrobacter koseri
gtggtcgtccataaaacgacgcaccaggctggtgattttggcacgggttttcaggcgttgagccatttccgggcgacgcagatccagataacggtatttcagacgcgcttcttcggtattgacgtgattagagtcaagcggcagagaatctgcacggttgatgatcgtcaaatcggacgccagcacttcgatttcgcccgtcgccatgtcggcgttgacgtttttctcgtcacgcgcacgcacggtgccggtcacctggatgcagaactcattacgcagttcagaagccagctttaa

SEQ ID NO: 86410 - DNA, 363 bp, Citrobacter koseri
atggtgcatcgccgtcaggccgccttcgccgtcatcttcaaacatcgggaagtcgataacccacagcggcgcccatttggcttcgtcggtcaggttcagatctttacccactttcagacgcagcgcgcccagcgcatcggcaaccactttcttgttgtcggcgccgaagaaaatcatatcgccgtcttgtgcagcggtacgatccagaatcgcttccacgatttccgcattcaggaacttcgccaccgggctgttgatgccttccagacctttcgcgcgctcggtgactttaatataagccagccctttcgcgccgtagatcttaataaaattgccgtagtcgtcgatctgcttacggcttaa

SEQ ID NO: 86411 - DNA, 228 bp, Citrobacter koseri
atgcggcggcgtaccgtatttcagcgcatccagcaggaagccgaatttctcgcgctgttcctgttcattaatgcccagaataccaaacacggtctgctgcatgtcgccactgtggatacgcacggaaccaccaccgacttcataaccgttgatcaccatatcataggcgttagcaaccgcgttttccggcgcggctttcagctcggcggcggtcaggtctttcggtga

SEQ ID NO: 86412 - DNA, 792 bp, Citrobacter koseri
atgactactttaactgtcggccagtgcctcacctcttttaacaacgagtatgtagtaagcgcggttaatctggctgacggcaaaatcagctataccatcctcggcctgaatgccccgacctgcgccccgctgctggaaacctccctgcgtttttaccaggtgatcgacaagaccctttcactcgatgaactccgcgcccgccgtcaggttgtgcagagtgtgaccgaccagcgcgaagcgagacaccaggcgaaagaagatgcccgccagctggcgaacgaacgtgccagcgctgacccggaaaacgccggattgctgacaacggccaccgaaagcaacaccaccaagctagccgctaaaaacatccgtattctgctgaaaaagcatttccccggcgtgaagttttctgtccgtatgcgtgactataacgcgctctatgtttcgtggacggatggcccaaccaaagaggctgtagaagcgattacagataagtttgaggaaggtagcgttaactcaatggaagacatttacgaatacaacattacgggcttccaccgtgtttatggtggcgtgaaatacctgttttgctcacgtgacctgaccgacgcgctgatcgctgaatctatcgacctgctacgcaaagaatacggcgaaaccaccatccccgctgatgtgacgcttgaggcgtacaaatccggggcgctggcggggcgcgggcatgactgctttacctgggggcttgcagcgcaaatccgcatcaatgcgggaaaggtggataaatccagccgctaa

SEQ ID NO: 86413 - DNA, 270 bp, Citrobacter koseri
atgaactatctgatcatcatcccaatcgcgtttattctcgccgcagccgcgctggcccttccgtggtttatggttcgccagggctaccgcgagcaagtccagctgggcggcgcgtgtactaccgtgctggggctggccgcatcaacaggcgtgtttagctatgccgataatatgccgctggcgctgctgtacggctctgcgtcggtcgtttcattcctgtatgcgcttgattgcttcctgccgctttacctgtcacgcaaatctcactaa

SEQ ID NO: 86414 - DNA, 201 bp, Citrobacter koseri
atggaaaacggaaaactcgcacagcaacagggttttgacctggcgttgcagatcctgaaaagccagagaggctattacattggcactgcgaccagtgagggctacccggtatcaagggaatccgctgaatacttcccggacagcagcactgcgcagcaggctttgacggataaccgctggacacagcgcgaggattgttaa

SEQ ID NO: 86415 - DNA, 498 bp, Citrobacter koseri
atggctgatcatgacgacgcaccggaaaaaattaagtgcctggagtgcgggaaggagttttctttcctggcccctcatttgagtaaagcccaccagatgaacgccagacagtaccgggaacgctggggcataccactacacacgccgcttgccagcgccgagcattcccgccagtgtcgggaaaatgttttgcgccgtatccggcggggcgaaattcgccccgctgaccagctcgcgctcatggccgaaggccggaagaatgctcctgaacgtgcgaccagcaccaggttgcataaagtggcggcggcgaacgtcgcgcgggtgcatcagatatggaagcattctccggtggtgaaggtcgttcctgatacgctcagggatgaagccgtgcagagaatgacggccagaaaggtgactggtgagaaagttaaggatattgccgccgacctgaatctgtcggttgggtgtctgtacaaatgggtggcggacgctaaatag

SEQ ID NO: 86416 - DNA, 909 bp, Citrobacter koseri
atggttgtgcccgttgatgcgacctcctctctgacagcgacacctaatatcattaagccgaatggagtagatcaagcagtggttagctgggcgatgaaagataaatacggtaaccctatatcaggaaggagcaatgttggtttcaacattaatgaagcatccggtgtcttactgggggcagtaacagaaagtccatcaggaacttacactgcgacgctcaaggggacagtgtctcaagtcgtcacaattaagccgacattagacggtacgatcaatggaagcctgggaacgactgtgacgctaccgacggagatgtctgcaacaacgaaactagtagcaccaggaaatatccagttcagtaaaaatagtggattcccaaaaaccggaataattggggttcagttccaggtattaattgatggagatacttcaaaaagcgccagctacacctggagttcgaatcagtcctgggccaacgtaaacacgacgggcatggttagtttttctggtactccaaatagtacaactaaaaatgtggcaattatagccagaccaaaaacaagcggcgcacctctggtattttattttacgctcgctaaatggtttacaattccaggagagcagggctcagtagcccaggcttatgcttattgctctcagtcaggacttggtgaagtaccttcccgcccggaaataacaaatacaactgttgtcaatgcggatggtatacgaggaaatgacattggggtcgggatcctgtggccagaatgggggaatggaatcacgtcaataccaatagtattatcatcgtcaatagagagttctattaatcaagccgtccgtatccctatgaatggaaggtatattttatcaaataatgcatatttcatatgccggaaaaatctttag

SEQ ID NO: 86417 - DNA, 1137 bp, Citrobacter koseri
gtggatttgcttattatactgacctatattgcactggcatggacagtttttaaattattcaggataccagtaaatcagtggacactttcgtcagcggctctgggcggtatagggctggttagtgggcttattttattaatgaactataaccatccctatacatttaccgcccaaaaagcagtgatttctgttcctgtgatccctcaggttacgggaagggtaattgaagtcattgacaaaccaaatcaactaattaaaaaaggagaagtactttttaaaattgagcctgataaatatcagtctcgcgtcgagcgtttacaggcagatttagtcacggccatccataatgttgaggtactaaaggcccagttgtctgaagctcaggaaaataccatacgagtctcagttgaacgcgaccgtctttataaagattatcaacgctatgtgaaggggagcctggctaaggtaaatcccttttctgaaagagatatagacaatgcccgacaaagttatctgtctcaggatgcagtagtaaaagcttctgttgccgaacaggctcagattcagagtcgactggacagtaaggtaaatggcgaacagtcccagattgttagtctgagagcgcaacttgctgaagcgaaatataatcttgcacaaacaatcgtccgggcccctggaaatggatacgtcactcagttgttgattcagcccggtacatatgcgtcttcattaccgcttcgtcctgtgatggtcttcatcccggaacagaaacgacaggttgtagcgcagtttcgtcagaactcattgttgcgtctaaaacctggtgatgaagctgaagtcgtgtttaacgccctgccaggaaaagtgtttgaagggaaattaatgagtattcttcctgttgtgccgggaggggcttaccaggccgagggcacactacaggcactaaccgttacaccggcaatggatggggtgatggtaactattgaacttgaacataatgaatatattgatgtgttacccgacggtgtttctgcgcaggtagctgcatattcggaacatttctcgcatgtttccgtattgcgtaaggtgcttttgcgtatgacaagctggatgcattatatttatcttgatcattaa

SEQ ID NO: 86418 - DNA, 555 bp, Citrobacter koseri
atgaaaaagattttgctcgttgctggcgccgctcttgttctggcgggatgtggtgagaaaggtgactttgaaaaggctatcaacacgaaaatttcaaaatcaaatctgtgctactccctgcaggacaacgacattgtattcaacaaaggtttcccgattcaggttaaccgtggctatcgttctgccggatacagtgccagtgatgaaatccttaaaggacttgttgaacaagggctgctcacagtttcacaacaggcgaatggctttagcagtgtcgatgttctggaagttacggataaaggccaagaggttgagttttgggatcgtgagaaaggtgcctgtgtcggtcatcgggctgttgttgagatttcaagctggactgaaccgagtgaggggaatggcgctaaaatcactcaagtgatctatacatggaaactagatggtgttccgggctgggttgataaaaatgctttctcaggcgttaaagggatggctgaacccgaagaagccaaaattgttctggtgaaaactaataacggttggcaagcccggtaa

SEQ ID NO: 86419 - DNA, 768 bp, Citrobacter koseri
gtgattaaaatagctaatctttcaataaaatgcctatcccatccatctttcaacgaagatgtatttcatgacttcttaaatgaaaattcgttgtcatgggtaaaaaagggtgtaggcactaatgctgagtatctagcagaagcagcagggaggttatgttatatgtcttttggtgaagaccgacaatcaccaagagacacaggacaatatatttcaaatataataaatcaaggccatgagagtgtgctagaacatttaaattggacatttttaattacaggcgtttctagagcatttactcaccaattggttagacatcgtgcaggatttgcgtatagccaactatcacaacaatatcacgatgaatcagaagcagaatttgttgttcctattgaggttaaaaatgacccaatcttatataaagcatggtgtaagcatattggtgaaagtctttcattttacaaagaatcactgataacaatcgaaaatagtgctcaatataaaaataaaaaagaaaaaatgagagcgctcaggactgcctctagatctattctaccaaatgcaactgagacaaagattatcgtcacggccaatgcgcgagcaattcgacattttctaaacatgcgaggctcaatagagggggattatgaaatgaggaaggtttcagaaaaaatatacgatattgtggctagcgatgcaccatcaattttccaagatttcaaaaaatctggtgggggcacagattctgttaaaatctttaaaatttaa

SEQ ID NO: 86420 - DNA, 756 bp, Citrobacter koseri
atgagatttttaaggttacctgtcaaagatcctagaactgtagcgcgagatattcccggcatctgtgatttgttatttccacaattgctaccggcaatcattgcacatctcaatcgcgaggcacaacctatacccggctgcacgattattgatgaaagtatgttggtaggaatagatacaaatgcagctatgctatttgaagttgcctatgtaagagcagagcaaatacttgaagaaaaaaatgaagattggaatgagtgtttgtctatcgccctgattcggcaatcaaggtattttgatgcagttttacccgataatttatcagatattgagattaaaatagctaatcaaactgctactaatctaacaaaatcaataagatatttgagtgaggaatggggtgatggtaatgtaattaggtctcccatcattcctggatttcaatggatagcacaaggtcaaggagatttctcaatcggccagcggctgatcgaagtaaaatgcacaaatagaaacttttcgtcttctgattaccggcagattttaatttactggctattgagtttctcatcctcaattgagggtggtacggatgagtggaagacaggtgttctattgaaccctagagcaaacaaatatattgaaattaatttcaatgagttagttagcatagcagcttctggaagaactaagttagagttgttggagttattttcgtcaattgtgggtgattatgcatacaaattaggtgagtga

SEQ ID NO: 86421 - DNA, 393 bp, Citrobacter koseri
  misc_feature (229)..(238): n is a, c, g, or t
atgaagtattggatcgcggtttgtttcaatagcttttgccagccagattgctttctcttcattggtagcggcagcagtagcctgttcaagggcttcctcatactgaacccggatagaacggtgatcaacgcgttcatcatgaccatacagctcaaggaactcattacagacgttctgccagcctttacgccagctatcaagggtttcaggcttgtcccactcacgaacnnnnnnnnnnccggtagaaagaacctcacgggttgttgccatgatatggatatgtgggttatgaccattgatatcgtggataacaacatctgcaatgatgccttgcttggtaaagtgctcaagaacaaaagcagcagtgagtttgatgctctgttctggtgttag

SEQ ID NO: 86422 - DNA, 297 bp, Citrobacter koseri
atgtgctgttttgcgaccacacacttcacctgttctgttatcgaagaacactttacggtgacgatatgcagcagagttaaccgaagactgaccttcgcctctgctgatgttctccattttgaaactgtatatcgccatccaaatattcctcaatgccaaatgctgcttttcgttttacgtaaggaaaacgccggggttgacgttgaccttgattttgtttccgaaggaaacggttttagcctgcggcggcaaccgtcggtagaccccacggcattagagcgaagcgataatgcgtaa

SEQ ID NO: 86423 - DNA, 399 bp, Citrobacter koseri
ttgattgtcatcgacagtgctgcgtatgcgacgaaatcgttactcagcctgattgatattgtcgatttgctggtactgccgacagggtttagcgtggacgatctacgaacgaccgttacgaccgtaaacgcgctgcgtaacaaagggcattcgacagataaaatggcggtggtgtttgcgggggtaagtgaaagtgagagtgaatatcgcgcggcgctggaatacctgcaaccctgcggcgttcctgtcattccgggcgctattccttttctgacatcgttcagccaggcgcaggataaagggcttgctcttacggagtcgccttttcctggcccacggcaaaaagctgatgatgttgtgcagggtgtgatcgaccgactgacaacgcttacgcagtag

SEQ ID NO: 86424 - DNA, 234 bp, Citrobacter koseri
atggcgaacgtcccagcaaaaccgcgcaataccaaaggtgagccgccaagccaggcagacacggaacacggctttaatcctacccggaaaagtgctgatggccgtaaggcacagcttaacttatacattgatatggagctgaaacgtgagttccgctccattgctgcggccaacgatatgaaacatggggagctgttcgaggcgtaccaggaattctggaaaaaacatcattaa

SEQ ID NO: 86425 - DNA, 531 bp, Citrobacter koseri
atggtgcaattccttcttcttttatttccaaagtatattcatgttattgaaaatattaccatccatgattactacagcatcccaggcaagaaaaaagatcgatacatagatataggcttggttgattctaatggtaatttagatattatcgaagttaaaaagccatttgacgacaagatcttgcgcaggacaaagtatagaggaaatagcataccaacgtctgagctaagcggtggtatcatgcaagctgaaaaatatctcttccatttatcaaaatggggaacaaaaggtgaagacaaccttacaaaaaaatatgcaagtgaactaccctctgggatgagtattcatatttctaaccccaaggctatcatcatagttggacgtgaccaaattggtaatggaaatatgacagaaaatcaaaaacttgatttcgaaattatcaagcggaagtataccaatatgatggacatcattacctacgatgacctattgagacggcttaaccgtacaatttcagcacttaaaaagtaa

SEQ ID NO: 86426 - DNA, 156 bp, Citrobacter koseri
atggggcgggaagtggccggacctgccagcgtcagaagatacgccattttagatgttaaaaggcggggggtggtccccccgcctttagctacgtttccgcgttcatcaatcgacaaattcgcggatcagttccaggattgcaatcacagcgtttga

SEQ ID NO: 86427 - DNA, 408 bp, Citrobacter koseri
atggctgcaataggacgttttttcttgtggcgttgggcaatactaaatttaaatgtgaaggtaggggatattccctgtttattatttagcgataatattgaagactgcgagcttggtgcctatagattaccacagaacctatcattgccgacgctttctacctatattatagatgcacttattaaaccttcattgttcatcaggccaccttccagagtattcaaattaactgaacgacagcttcacatccttgaaagaactctggcaggagactctattagcaggattgctgacagacttgctattggtaaaggagctgtatttgcaagcagaactgcattgatacaaaagatgggattacgtaatcgtcttgagttaatgagcctggcaggaaaatttttcgagtaa

SEQ ID NO: 86428 - DNA, 252 bp, Citrobacter koseri
atgtataaaaataacgatgaagccatcgatcttgaggcaaagcgattacttgataatggaatctatacggatctggaaaaagcgtatagtgaagcagaaaaaataatcacagaaataagagttgaatttaaaaagaaacaggaaaagaaagaattccgttctcgtattaaatcaatcaaacgagtactttcagatgatgagttcagaaataatgttccttataatcatagaaatcaatggagtaaaacatga

SEQ ID NO: 86429 - DNA, 294 bp, Citrobacter koseri
atgactacttatgcttcttatttgcccgaatcacaaatcatcactttgcgcaaggatttcccagcgttttctgatcctgacaaattagatggattcataaacccagagcagtttggcgtgttttttcatgagtggattcattttcttcataatatttccacaattaatggattttctattttttgcgtgcaaaacatcctgtggtctaatttttgtatgtcttggttcaaatggcatggatccagcaaatatcgaatcaaacaaaaatcttctcagttacatttattccaatag

SEQ ID NO: 86430 - DNA, 300 bp, Citrobacter koseri
gtgccgtcgccgcgatcggtgacggtgcccggcatggtgccggggaggctgctggtcagggtgatgctccggccggtgaccgggttgtcgtggctgtccctgagggtcagggtgacaagggcgctgtcgctgccgtcggcggtgatagcggacggtaccgccgtcagggcggagtgcgccgtgtccggctctcccgagacgagggtgacggagacgggggagacggcgaaggggctgccgccgacggtcacgccgagggtggtggtgccggccgtggtgccggtcaggccggcggtgtag

SEQ ID NO: 86431 - DNA, 180 bp, Citrobacter koseri
atgctgaatggttactctatagattacagaaatctcatattgaatttcctccttctgaaggtgaaaatcaagagcaacttgagattagaaatcaaattgaaaggatttcaaaaacaattcaagaacttgtttctaacaatcctttgttgttatcaccctacaaagatgatcaagctatag

SEQ ID NO: 86432 - DNA, 327 bp, Citrobacter koseri
atgccattattttcacatcatcacttacgttcgcttttacaacgctatctggtgcgggcgggtacgggatctgatatcgcgcaaaaagtagcggataacctggtcgaatcctcattaaaaggccacgactcgcatggcgtgaccctgttgcctcgctatatacgggccattctggcgggagatttgaaccctggcgccacgctgaccaccttgtctgatgccgggccgattgtctcttttgatgggggacatggcttcggccaggcgttgggcgaacaggccatgaccgtgggtattgagcgtgtgcgccagtttggggtgcaataa

SEQ ID NO: 86433 - DNA, 201 bp, Citrobacter koseri
atgtccggactaacaccccaagagatggtcaaaagcctgattgattcaggatatacccaaagccaaattgctgaagttgcaggcgtgaagcagtcttctattagtcggcttcttactggggtccattctgacccccgcttttctacggtacgtgcaatagaaaagctgtttcaggaagtgacagccagacaaaaggcgtaa

SEQ ID NO: 86434 - DNA, 675 bp, Citrobacter koseri
atgattgaaactaccgatatcctctctcaaaacatcaagtacctgatggacaaagccaagataagctcgataactgagctggcacgtcggttacagctgaaccaaccaacgctacacaggctcgtttcaggagaggtgaaagacccgaaatacgcaacgctaaagcagatcgccgactactttcgtgtgtcaccaatagacctggcagaaaggagccttcaggagatggaaaacgaggacgacacaggtataaaaacttatatttctcttaggtttaataaagtacctgttttgggaaacactcagctaggcgtaggtggactttggagcgacacccagtattcagtaggtagtagtgatggctttatatactggccgacaaaggatgaagatgcgtacgccctgaaatgtgttggtgattcaatgatgccaagaatcaaagagggtgagttcgtaatagtcgaaccaaaccacgactacgctccgggtgatgaagtacttgtggttacccaagacggcgaggtcatggttaaaaccttcctgttcgaacgcgatggcctcttccatctcatgtcagtaaacgaagatcatccgcctgtcagagtatcgcgcgaaaatatcgagaaaatccattacgtggcggggatcgccaagtctgcactacgcatgtactaa

SEQ ID NO: 86435 - DNA, 171 bp, Citrobacter koseri
atgagcaaattcccgcaggttcgttacttcgcatcccgcaaaaccaagtttatagaaattacccatacgccagtaaatggcgtcagcaccaaagttaccaagccagttaacggcaaagtcgaagcgcgccagattaccaaagaactgagcggcgtcgcctggaacttctaa

SEQ ID NO: 86436 - DNA, 291 bp, Citrobacter koseri
atgcgtaataaaagtctgaacgatgatgtactcgatgaaatcatcgctgcgccaaaaactcctctggagcagatgcttgctctggcgctaaagcaagaacgcgcggacacgctcagttcgctggaagctatttcacgtttgaataacgcaatgtatcgctggacttcctgtatgtcttacaacgcttcatacgttggcgagcctgacggattatttaaaagcagcatccgtgagatagaaaaaatttgcgatgcttgtcgcgagtccctgaaagaggagtctggcgagtga

SEQ ID NO: 86437 - DNA, 294 bp, Citrobacter koseri
gtgccgtacgcgtggtgggaaggtggaaaagaacacctgtacgacgataactggcagcaggagggttttgtcgaggttgagccccgtgatatgcgacccggcgatattatcatgatgcgcgttcaggcgccggtcactaaccacgctgcggtatatcttggcgacaacatcattctccatcatatgttcgggcatctgtcatcgcgtacgccatatggcaaatattaccgtgacagaacggtgcgggtggtaaggcataaggagcttgtgaatgctgaaaacactgattcttga

SEQ ID NO: 86438 - DNA, 168 bp, Citrobacter koseri
atggatatcaaacctaactcagtgatccacctggagccaggcgatacattacccggccataccaatctgaaacccgtacctgataagtatctcgatgagttaaaggcactcataaataaactcaatactcaatactcaatactcaatactcaatactcaatcaggtaa

SEQ ID NO: 86439 - DNA, 777 bp, Citrobacter koseri
atgaaaattacacgcaaagaactacaagtaatgaaagaaaccgtttctgatgattgtatcatttatctgtctggaccatcatcgttagatactccactggagctattacgcgccaaaagtatcatcagcgtgaacggtagcacaggttacttactggaaaacgatattccagtgtttgcatatattgtctgcgatggttcattttatgaaaagaataaaacactattcttaaaatactcatcttatgccagatatacttttattagtaatgacgttctcaaacgtgcaaatacttcagaaaaagagcaactactcaacacatgttttgtgttaaatgatatctgcaaatcacgaggcgggccgggaagaaaaataagatatacaataaaatcggcaattaacagaagtgtttttatcaagtgttctgcatcaaggaaagaaaaaacaatcgcattttccactgatatatatcacggacattttggcagtgcgacggttgcatttagtgcgctacaactagcgatcacactaaaattcaataacattttcttctcaggattagacctgagcgggaaattcgagaggttctacagcgaagctcaaccgcaaccgacaacattgcctacagattttgatttcatattgaaatcttttgttttcctgatgaaaaaacatcgtggaaacattttcaacctttccagtaaaactgctataccatatgaagtaattccctttgcgagcgcagcagaaataatgaatcaaactactctggtgtaa

SEQ ID NO: 86440 - DNA, 1560 bp, Citrobacter koseri
atgattattggatttggaaataatgtcgtttcctctctggccgcagatatcactgccagccagacgactattcaggttatgcccggtacgggggcgatgtttgctaatctgcttacttatgattatgcaaataactcaaatacgcttaaaacttacgccaaaataacgctcacagatgcgaaagaaacagttttcgaaatctgtcatctgaaatcagtcagcgatgataccctgactgtagtgcgcgggcgagagggaacgacagcgaaaggttggtcattaaatgatgtgatcgctaatttcgcaactcgcggttcagaaaatcagtttgttcaaattgaacatttacagagcgggcactatacggcgggcgtcgcaggagggacggcgaacgctctcaccctggcactaccagccacgtattttgtcgataacgctactgaatgggcgttacggacgccgatcgttgtctatcccgcacagaataatactggtgcagcgacgctacagcttacattaggtggtaaagcgctcggcacgtttcctctgtataagggaaataaagccccgctggtggctaacgacattttaaaagacgtggcgcttgtctgtctgatggataagacgaaaacgttctttaacgtcgctaaccccggcgcgatttatgcggggctgggaaccgctgcgttcaaagatattgtaacctcaatgacggatattaccgcagggcgtattcccgttgttggttggcagggaattggtggcgacgcaataattaatcagaatttggggactatcaacgcaacggggataattgcaggaactaccggttcccctgtcgctaccgtcacatatatgggaattaacatcagacactccacgacatatcagtttacgcttgtcgggaggtctaaacggtattttgcgcagacgtgggaggctggtgttgctcagggatgggacgagttctatacaacagctaataaaccaaaagcatcagatgttgatgctgtatctgcaactaatggcggcgtttttaataaaacagtcagatttaatgatgggcttactctcagggggagcaaagtcggcgatgccggaatggttggtatatctccgggctctgatgctgccagttttgatggcgcgaatttgttattacaaagctggtatggaataggcttttatagttcttttcctgctgatgctccacgcggcatcatgggttatatagatgtccgtatggggcgactggcaatgaaagaacaagtcattccaggcaattatacgaactttgatgcgcgttaccaggcgaaaggcaattacacccctgctggcgaagcttacacaaaggccgcatctgatgcgcgttacgtgcagaatatacgcgtaagtgcgacccaaacccgctcatttaccgatggtggtggcttttcatcaaatgacgcggcattcgccactgcgatccagatggtcggcggatcatcaaacgtgggttctctgcttgtccgatatgttcaaaaaaatattaacggcacctgggttaatatcacgacttaa

SEQ ID NO: 86441 - DNA, 159 bp, Citrobacter koseri
atgacagaaaaactactggatgacgacgtaaaaatcctccgccgtcaaatcgataaaggtagaccatatggcgaggtgattaatttcatggttaatcaacttggactgactcataaagaagcggttgcagcttacgaagaactaagcggggaggactaa

SEQ ID NO: 86442 - DNA, 234 bp, Citrobacter koseri
atgcgtaagttcccgcagccaaactatgtgctactgaaggttgcagaagaggccggtgaggtggttcaggctggcgtgcattacgccgaaaaccgcatgacgtggaacgaggtagagggcgagattgtccagttgctggcgatgctcattcgccttgtgacggagggtgaccagattaacggcgtcacccctccgcaatcagtccgcgtcgctggcatcggtaagggggagtga

SEQ ID NO: 86443 - DNA, 243 bp, Citrobacter koseri
atgaaactgattaccacaggactttctttcttcctgataattaccgttgtttctacaggatatttatggaaacaaaataaagagttgcattatcagattaatgagctatctaccgttgttgctgaacaacgtgttgcagtacaaggttgccttaaagaaaaaacagatacgcaacatagaggtaaagctaattttgttattccagatgattcaggtaatgcggaagattggttaaaacgataa

SEQ ID NO: 86444 - DNA, 729 bp, Citrobacter koseri
atgaaaaagatattaattgcaggtgtgtttgcaataagcacatttacaacgctgaatagctttgcgtggcatggggttgctactgaaggcacgcaatggctgaataatcttcaactggtaaaacaggttgaagagcaaatgagaaccgttaaaaatcaaattcaggatttacaacgattgccctcagatgttctgaatatgggatcaaacaagttaaaggttcttgagacgtttaatgatttaaagcgaatttatcaggaagggcaaaatatagcgcaggcagggcgggacgttgctaaatattataaggatatgggcaatattgatattgccgatgccctgaaaaacgggaattacccgcagttattcaatcagtggagccaccagaaccacgatacggtaaaaggtattctggaacagaataaattatcaatggactggtttaatgaccgacagggcgaggttgcaggatataacagtatgctcaattctgctgatggtacagtcagtgcattacaggcagcgggtaaaattgctaatgctcaactggatagtctcagccagttggggcaattgcagatggcgcaaaataacctgttagcctctcaggcggcagttcagcaaagcgaaaaagatgcggagagagccgatacgatccggcgttcagaaatgaatgtgatcataaattctgataacaacaccgctgctgattttctaaagagggactaa

SEQ ID NO: 86445 - DNA, 321 bp, Citrobacter koseri
atgaaaaaaaatttttttgagtacatagaagaagcaaaaaagctaaccatttgtgatagttaccgaaaaatagcccaatatctggacgctccaccgataaaaatttcacaatggaaacagggaaaaggctatgtctctcccgcagaatgcgcacacctcgcaagattactggggatcacaacagaagaaattgcctatgtaatcaaggcagaaagagaagaaatccctgaaaaaaaagaatactggtacaaagaggctgagattttttcacgcccgataaacccccctgaatcattaaaactgaaaaacaagaaatcttaa

SEQ ID NO: 86446 - DNA, 951 bp, Citrobacter koseri
atgactatgaatctgcacacccagacaagcgcccctaaccccgcagcggcggccagcgtatccccgctggagcagtcaggctccacaaaaacgaaattttctaaaaacaaaaccaaaacagatatttatcagacagtgacagacagcattatagaagcccttgaaatgggggttaaaccgtgggtgtgtccgtggaagcgtaacggttcggtgtctggtattccttcaaattttatgactggtacagcctacagcggcatgaatatcatgctgttatggtgcagtgcggcaaagcagggatttaatgattcccgctggctgacctacaagcaggctcaggagcagggcgcacaggtgcgtaaaggggagcgcggaacgacagccattttttacaagacgttagaaaaagaagctgaagacggcgagatagaaaaaattccgatgctgaaaacgttcactgtatttaatgttgagcagatcgacgggctgacactcacagaagaagacaccgccgagccggtaagcgagtttgatccgctgccgcatgttgaagcactttttcagcgcaccggcgcgaacatcaccgagcgcggccagcaagcctttttccgtccggctacagatgaaatctggttgccggagcgtcatttattcaccgatgccgccaacttttacgctacggggcttcatgagcttgttcactggacaggggcaaaaagccgtttaaaccgtgaaaaatgcggacggttcggatcggaagggtacgcatttgaagaactgatcgcagagcttggaagtgcttttctgatggccgatttaggcattaccggcgacgttcagcatgagagctatatcgcttcctggttaaagtcattgcgtgatgataaacgttacatcttcaaagcggcggcggcagcttcaaaagcgcaccgctatttaatggagtgctga

SEQ ID NO: 86447 - DNA, 459 bp, Citrobacter koseri
atgcttgaacataaattcaaaacagttagagaacttaaagatgcgcttaatgaatgccctgatgatgccgaaattgatataagcgagctacctaataacatatcaagacacggtttaaccacggtttttgatggtaaaaaagtcttaatttgtgaatatcacgattatgaaataattaacaaatatcgtaatatattcagtgagttatcaaaaacagaacaatctcgttgcgggtgtgtctatgaaatgtaccaacgcaacttgagcacagcaattgatggttatttaagtgaattaactcaagaggataaaagaaaagtaatccaattggcaagagctgaatttgattatatatcaccagaggaaataaccgaagctattcgacaaaatcaagaagatggttattgttcacacggtttagatcctaattgctgccctttaggttgtggtgatatttaa

SEQ ID NO: 86448 - DNA, 927 bp, Citrobacter koseri
atgtgctctttctgcgcaatatatgcgcagaatacagtgatcgatagtcataatcaggcacaagaacagcgttcacgtggcattgagtggcggaatagttatgtcacaaatgctaatcctgtgtactccgcgcctaaagaatgtgccagtccgccgcgcattatcaccgctttacgtaaggcggctttgacgtccaacccagccagacaccctatatggcgtacagcggatcgttttcatgccattaatcatcaacggttgcctaaagaacgtgcaatgaatgagcaccgcgcccgtgcggtaaatgccatttgtgcgtgtattgctgaccgtctcaatatcgttaccggcaaagtgtttatgacactggcgcaaatttccgacagttgtggcctgaccacctacaataaggatggaacgccctgctacagtcgcgccagtcgcgccattaacgaacatcttgaagctatcggcgcaatccattgtgatcgcgtatgggacgaaacaaccggctcatggattcctaacctgatatgggtatcagaactgtttttcacgttgataggctacgagtacgggaaatatgaggcggcacaacagcaacaactggcatgggaaaacaagggactgaaagaaaaaggggaaccggctatttcattaaccgaagcccgcagacgggcaaaggttaagcacattcagaccgcatttgaagtccgagccaaaaaacgcgcgtttaaaacacagttacgacaggccagaaaactggccgctatggaaaaacagaaagcgcaggctaaaatccttaacgatctcgtcaaactctactcacaggacgaactggccgctatggggcatgttgaactgaaaagacaggttgaacatcgctatgcggccatgagaaaactggctaccgccccgccacattaa

SEQ ID NO: 86449 - DNA, 429 bp, Citrobacter koseri
atgtttatccttgataccaatgtcatttctgaactacggaaagccggagacggaaaggccgacgcacaagttatgcgttggctttcatctgtaaattcacgacaactttatctttccgtgattacggttcttgaactggaacgggggattttgcgcgttgaacgccgtgataccactcaggggaagatgctgcgccgctggatggacggccatgttctgccgctttttgcaaaccgtatcttaccggttgatatggctgtagtgcgtcagtgtgcccgtctgcacgttcctgatcccaagcctgaaagtgatacacttattgcagcaacggctcttgtgcatggctatattgtcgttacacgcaatacgaaagatttttgttctacgggggtgaatatcatcaatccgtgggaagataacggaaactga

SEQ ID NO: 86450 - DNA, 258 bp, Citrobacter koseri
atgttgacgaccttttttaccagcagagaatttaaccaagagataggcaaggccaagaaagccgcttgtcagggggctgtgttcattacggacagaggtaaggctacacatgttttgctgtctattgatgagtatgaacagatatcaggactgaatgatgagaatattgttgacgcattatctgtccccggtctgtcagaaattgactttgatacttcgcggttaagcatttttccgcctgacagggacattttctga

SEQ ID NO: 86451 - DNA, 240 bp, Citrobacter koseri
atggggacattaacagtcaggccgcagccggaacatgaagatgctctggctgctgtaggtgcattgttgcaggaaaaacgagcctcacagacgttgctcaaatcactgatggcctacgagccacactgtaaagagatcgcccaactgaaagccgcactgcacaaggccgaaaaagaacgcgatatgtataaagataagatcgagcgttttaaagctgcccagcttgcgttatttgaataa

SEQ ID NO: 86452 - DNA, 222 bp, Citrobacter koseri
atgcaaatagcaaaattaacgtgtttgataatatttggcctttctgctctgactgcaactgctgctgagtctgatacggaaaataataatcaatgcgtataccaagggcagtcatacggtataggctctcctattaacattgatggtcactcatatatctgtgtcaaaaaagccaataaaatgatgtggctaccggctattgatgcacaacgatatctttaa

SEQ ID NO: 86453 - DNA, 441 bp, Citrobacter koseri
atgctaatactgtggttctggatatgcctttttttgattagcgttattgttcatggttctgaaattttaaactttgctattgtttttggttatatatcattattgttttactttttggcaaaaaaagagtctttttttataatcagtagtttctttctatggtcaatccttacaacagctataagtggtttgatccttgagtctggtgtttttctgcctgaacttggtatgatgtcaacgctaaatggtgcgacggctattaatgttagtctcgccgttattacattactagctacgtgtaatattttcaattttctgaatgaacgtattagggtaaatttaaattcttcatttttggtccaagtaattatgggcaggatcgattttattattggaataatattgcaccgtcttggggaaatcttgttcggctttttgtag

SEQ ID NO: 86454 - DNA, 198 bp, Citrobacter koseri
atgcattgtgtagccagtccgtttctccagagtcgcgtatttctccagcagttcaggatggttccgggcgccgttccgcagatcgttacgactagccataatgcaaaaaacacagctcagccgttcattccccagtgcataggcatagtgtggctgctgtcccgcattgcgaatcgtggcgaatacctctccggttaa

SEQ ID NO: 86455 - DNA, 546 bp, Citrobacter koseri
atgcaggagttaacctttgcatatctgcgtgaggctctttcctatgaccatgattctggtttatttacctggaaagtgaggccgaaaagccacttcagcagtgtgaaggcatgtaatcagtcaaattctcactttgccgggaaaattgcggggagcaaggatcctaagcatggatacctacgaattaagctttgtgggaaaaatcataaggcacaccggcttgcatggctttttatgcatggttgctggcctgagggtgagattgaccatgttaatggcataagggatgacaacagaatggaaaaccttcgcgatgtttcccacaaattgaatatgcgaaatagggccaccccaataacaaataggcatggtctgcctggcgtctcatatagaaacagaaagaaaccatggtttgcgcagattatgaataacgatggcagaaacgaatatcttggttcattcaaaactccggaagaggcttcttgcgcctatctcctgagggcgagagagcttggctatcacgaacaacacggtaataggagttaa

SEQ ID NO: 86456 - DNA, 291 bp, Citrobacter koseri
atgaatagtaagatggatgacaatattcactttgtagatttcccaaaacatggaggtggcggtagtggaggagatgacatgctagagaagcgcgtaaagaaactagaggacgatctggctggcattcggactgatatagcagtcataaaatcaaattatgcaaacaaagaagatgtcgcctctttaagatctgagttgcaccaatccatttcttcgcagacaaagtggttagctgcaaccatgttaggcattaccgggcttgccatagcggttgccaaactgattttctaa

SEQ ID NO: 86457 - DNA, 135 bp, Citrobacter koseri
atgtattacgtattgatgctgattgaagtgctgaaattattgcaggacatgcctggatggatgtccgcgttggttcttgtcatagtgctgttgctggcattgggttatgttttggagaaagtaacaggcagatag

SEQ ID NO: 86458 - DNA, 174 bp, Citrobacter koseri
atgacagaatcgctttatacggaaagaaagaatatcaagctaaatcttcgccttcctgcaaggcttgatcaggaagttcgtcgcctggctgagatggattgcatttctttaaactctgcaatcgttcgattgattgccaagggggtgagagaagaggctttgaatggtcgttaa

SEQ ID NO: 86459 - DNA, 858 bp, Citrobacter koseri
atgaagaacacaagtaaattccagaatgtggtgattgtcactgtcgttggttggcttgtgttatttgtctttctgcccaacctgatgattattggtaccagctttttgacccgtgatgacgcgaacttcgtcaaaatggtctttacgctggataactacgctcgtttgctcgatccgctctattttgaggtcttgctgcattccctcaatatggcgctcatcgccaccttcgccagcctggtgctcggctatccctttgcctggtttctggcgaaactgccggaaaaagtgcgtccgctgctgctgtttttgctgatcgtaccgttctggaccaactcgctgatccgtatttacggcctgaaaatttttctcagcaccaagggctatctcaacgagttcctgctgtggctgggtgtgattgacaccccgatccgcatcatgttcacgccgggcgcggtcattatcggtctggtctatatcctgctgccgtttatggtgatgccactctactccagcattgaaaaactggataagccgctgctggaggccgcccgcgatctgggcgccggtaaattgcagacctttattcgcattattattccgctgaccatgccggtgatcatcgccgggtgtctgctggtgatgctgccggcgatggggctgttctatgtctctgacctgatgggtggagcaaagaacctgctgattggtaacgttattaaggttcagttcctgaacattcgcgactggccgtttggcgcagccaccagcattacgctgacgattgtgatgggcctgatgctgctggtttactggcgcgcatcgcggctgctgaataagaaggtggaactcgaatga

SEQ ID NO: 86460 - DNA, 744 bp, Citrobacter koseri
atggaaacgctgctcaaagagtatacgcaaatattacaggggcttaacgctcggtcattcaacctgaaggaagataaatactcgggtgtctttttacctgtcccctttgatgaatactggcactctccggtaaaaatcatgctggttggacgtgaaacggctggctggaatacccggaatgggaagaatacgatgttaagggcgctgggcattatacccggcgtcaccgcagatcaggtggttaaagaggctatagttcgttaccagcagcatctggcagttaaaaacgatggaacaccaaacctcaaatcacgtagccgcttcacgcaatatcatttcaggctggcccggaagttagagattccccctcaggctatcgtatatgccaatctactggcgtgggattacgacagactgacaccactcattcgccctgagaatgaagtacaggaagtgatatctgcctcactgaagctgttgactgcacaaatcaagcatctggcgcccaatttcattatctttgcatccggagtgcggagaacagactacatcctcaaacggttgctgactgagtatttggatggttatgagacattatccgtcacgcctgggaggctatgggaatttaaagcgggtaatgcgatatgtttcagaatagctcatccaagggctatgcgcggacatcagaagtacagagatgaggtgattgagcgcattaagcaactctgcaacccgggccactag

SEQ ID NO: 86461 - DNA, 1203 bp, Citrobacter koseri
atgcaaaaatccttccggtttaccaatgcatccatcaaagcccttccggcaaacacagataccagatctacagagcttgaggtatctgataccgaagttattggcctcaaatgtctctcaggtcgaacgggtaacaaacgtttcctcctgcgctacacattccacggtaccaaaaaaagtatcagtattggcagattccctgaaattgatgtggggacagctcgccagatagctcgccgtcataaggaggcgattgcactgggaaatgaccctaaagcagaacgcgataattatcgtgcgatgccaacacttagtgagttttttcaccagacctatgttccgttcatcaaacgccataaaaagtcctgggataaggatgttcagcgtttcacgcaatacattgaacctcgtctgggaaagatacgttactgcgatctcagggccagagagatacaacaggtgctgtttgacatgcttgagggtcgtattcacggccagcagtatgcaccgtctacctgtaacagggcactggctattctgaaaactatggggcgttatgcgctacgacaggatgtcttagagaagaatgaagccgataagatccctttgctgaaggagaataatcagcggacgcgcttttttgacgccgatgagatcagaaggatcctcgacgctgcggcacgataccccaataaggcagccgggggactgatagccatgctgctgttaaccggtacacgcaaatcagaaatgctgaatgtcatgcacaaacatattgatcgggataacaggtcgttattcattccttatactaagaatggtcgcagcagaactgtgtatctcagtgatgttgcattatccattattgattcgatcccacgggctggcagcaacccctatctgtttgccgtaaaagataatggaaaaccaatatcagaaccccggtgggcctatgaaaaaatactggcagagtgcgggatagataaaagtgaagtctgtttccacactacgcgccattccgtcgcatcattacttgtctccagcggacagtacagtctgtatgacgttaaagcccagcttgcgcatgccagtattcagagtacggagcgctacgcaaaactgacaccagagcgaatgcgtcagaccgggcagggtgttaccgaccttcttttaccccccgtagctaccagtaaagaacagtga

SEQ ID NO: 86462 - DNA, 252 bp, Citrobacter koseri
atgccgttaaagtgccctaagtgcggttgtcggaatacagtcacagaaactgccggaaatatagcaaaggtgactcgcgatgaccggtttctgacattgacatccggttatattagcccggagcaattaccagaattgcttaaagaaatcatcagggcgatacaacgtctctttagattccttgaacagcgtgaaaggaataatgcgccagtgctgatctgcaaggattgtggatattatgaaagaatatag

SEQ ID NO: 86463 - DNA, 315 bp, Citrobacter koseri
atgagtctgttgaaaacagagctggtactcccatttgaagatgaatactctgcaatgagtttctgggatgaagtcggggtgacattaatatatgtcgagcccgatgatgtacctgaagatattaaagcgcaggtattaaatgtgattcatcagttaattgcaaatccagaatttgtagtccgtctgacagatgactattacctgatgctttctgttacggaagataacgggaacggtatttatctgttatttcaccccgattgccctctgaagggtattgatttattaatttctatggccgaatcacgctattaa

SEQ ID NO: 86464 - DNA, 534 bp, Citrobacter koseri
atgagtaaatcaaaattagttaaaaataatgttgagtcagtttcgaaggagattaaaaatgaggcagaggttattcatgaaaatctcagtgcagatgaacaaacattatctgatataaaagactatcagttgctcattgaaacaggccaggcagaaaaaatcagtcctaaggcaagtggtatgctgacatggcaactggcgatatcagaggtggacaatgaactttatcttcgtctggtggcaaatggctgtggagggttgttctctaaggactggatctcactttcaaagattgcaaccgttctggaaacacaacctgctaccggcttctcatccggagtattcaggccgttattcaaaggggcaagcgccaacaatgcaggttttctggctgctgttttacgctccccggatatatgtctgctggaggcacatccagagaagttatttactcatgtattatacccggactggagggagcggttgaataaacttaatacgatcagtagccaggaaaagattacagaggattaa

SEQ ID NO: 86465 - DNA, 435 bp, Citrobacter koseri
atgcaaacccaatatgccttaaaacaggcaggattaactctgcctgttactaaagaatttcagcagcatattactactcttctggcaaatcaggttttacaaaaaataactgaggcagtggttattaatttccgtgatccggactacagtgcagaatccgggggctttcatcccgttgaaatacggtttatccgtaagaataatgaatggtattttgattatgtcacagatttcagttatatggggcgtgtctaccctgagctggaaaaagaaattgatttttgctggtcggggaattatgtcttccattatctgattggggatatttcactggcagcagagaggaatgaactctggtccctgtgggagcgtaattttatggagtatctctctatggggatttaccgggtaacggtaactgtggaaagttgttga

SEQ ID NO: 86466 - DNA, 819 bp, Citrobacter koseri
atgaaaaaatgcccggttcttcttgttgtatcagggtttctgaccgaaaatgatatatcatggtttaaccgaattaaagcagggtgtggccttgatgtcagatactataaatgggaatcggcaaatctactatccatattaagttctgacatagcgaacaagtgggggttatatactctcttccccctgagaacatctcctttattgtcatcaatctccatcccatttaaagcgcgtcaggcctggtataatgcaacgaaagcagcagttaataacagagaaaaattagcacacgtaataaacgagatatacgttaaagaaaagcgtaatgtgatcataatgggtcattctttagggactcgattaataaacaatacattaccctatattaaaaatgataatattctcttaacaatctctatggccggagccaccccaataacaagttatacagagaacataatgaaaatggcttacggttcaaaaatggggcatttaaatatctacagtgaacatgataaagtacttaacacgatataccctctcgttgagtcagtaacaccaattggggttcgggaggtgagattcagacctgctcggataatcaactggaagtggaatgttggtcacactgaatatattacttcaaacaggattgattcattaacacactggttaaatgttacctgtgccgatttagctgatccagccgtagagctcactgacgacgacataaaattgtttaatgatattattgatcttgcgaatttaacatgtcataaaaacactgtcgcacccaaattaatatcatttgagtag

SEQ ID NO: 86467 - DNA, 903 bp, Citrobacter koseri
atgggtaagcacgataaacttggatatcgactcggattgatattaactcgcctgaacaatggtgagtcactagccgtccgggagttatctgaggaatttaacgtttgcgaaaaaactatccgtcgtgatcttactcagcgcctgtcctatcttaatctgattcgacaaaatggtcgctatcgcctgtctgacggtgttctcggtcaacgcagcaatgctgatttacgtcatttcacgcgcatcctgggtattgaagggctgttccctcgctgggatgacagactactgagtattttgttaggtaacacgaaaaacaacccgtttctgataaaacaacgtccatacgaaaactgcggatcattcatgtcaattctgaatgtattatccgatgccatcctgtcacagaagaaagtaaattttaattacaaagataaagagtttcgggctgttgagccatacagactggttaatgacaacggattgtggtatctcgctgccgcccatgacagtacattaaaaagctttgttatctcatctgtcaaagacgtttgcatgagtaatatctctttcaggataatccccgaaattaatgaaaaaatagaaaagacagatggtatctggtatagcgaagaccttatcgaagttctcatttcagtttccgcacatgttgctccgtggtttacccaccgtcatctattgccaggacaggaaataattcatacttcccggtctggcgatttactggtgatatcacgtgtaacacacacagatcagataatgcctttaatgaaatactggataccggatgtcgaagtaatacaaccggcctcaatccgtcaacaacttgctgaagatatacaatccgcactgaaacgttacacccagccaagtaacgccccgtaa

SEQ ID NO: 86468 - DNA, 327 bp, Citrobacter koseri; identical to SEQ ID NO: 27105

SEQ ID NO: 86469 - DNA, 2601 bp, Citrobacter koseri
atgagccataatttgcaggatatcctcgctgccgcctcggggtatcagtccgtgacttcagagccagcgctcaatcgtaaaagacctaaaacgcttgatgattatcctgtgatgccacctgcatcaaaaaacgtgtctgtgatttcaaacgacctgacgctccatatcggttttgataccgaatatgttttcaaccctgaaacacgacagaatgatattctgtcatatcagagttatgttgtcttacccgataatacaggtatatcgaacattatctatccacctgactcacagaaaaaatcccggctgtcttttaaggaatttctctgtcaaacgattacaccgcttcttgaaacgggtgtgattacaaaatggcccggtattattaatatatatgcgcatttcattcgtgcggatatcgcctcctttgccaatttctggtcagactacaaaattcttctgaaaggaatacgcggtactgtcagcagcttcaaaaatcgttacggtatcgattttgatgaacagcaggaacgtcgcgtaaagactgaacagataatgtttgacaaacgaacttcccctccgcgttgcagtaacgtagctttcatcgatacactgcttatcactcctgggggtatgggtctggctgaatgtggtgaattactgggtcttcccaaactcaccattcctgcaccttattccataaccaatatgcgtgaatatcttctgggcgacagagcagggtttgaagcctatgctctgcgggatgccgagattgcggttcgttatgctttacaggttcgcaatttttgcgcccgggagctgatgattgatcgtgtccccgccaccatcggggcgatggcagtttcacggttcaccaaaacacttaaagaaaacaatatgtctcctgaagtctgccttgggacacacattaaaacccgtgaactctggctcacggagaaacaggcattccggacgattaaaaaccccgccagtgttccttcaagagagctgtttgaaacgttcccgatcaactgttaccacggcggacgcaatgagtgttttatgatgggggttacaccgtctgatcactggtatgactacgatctggctggagcgtataccaccgggctattagatatcctcacacccgattacgggaacatccgcctcagtaaaaatccggacgattactgtgggcatgtgatgggatttgcgcttgtcacatttcggttcccggaatcagttccctatcccagcctgccggttcggaccgatcaatatgggttattctttccattaagtggcgaatcatgggcaacggcacctgaaatcgaacttgctctgtcgctcggggcagagatgacgatccataatgggatcatcgtcccctggatctgtgacacctccccacataacagcgaatcaacatcggtgtttcttccctttgttcaacaggtccgtgagaaccgtaatcgccatattaaaggttctctggaggagaaattctggaaagaaattggcaactcgctttatggcaaacttgctcagggccttcgcgccaaaaccgcctttgatactgcccgtggattaaacagatccctcccaccatcatcggttactcagccattctttgctgcgcatgtaacgggatttatccgcgccgttgccggggaactcatgaatgctttgccttctgattcatcggttgtcagcgtcacaaccgatggctttttgacaaattgcccacttaacaagataaacatgagcggtccactgtcttcccgcttccagtcgctgtgcgatattgttgatccgggttcatcaatgttgacatgtaagcatgaagtcagccagcttatcgccatgaaaacccgggggcagttaacctatagagctattcagggaaaacctgttgttcatgccagggctggcgtcaaacctcctgccgatattccacgcagtgactataacgactatatggtagatctttaccttaatcgtttacccggtcagacgttatcccgaagtacgttgatatcaacgcgtgagatgtggctgtcggaaagcgatctggtatcccgggaacaggatatccgtcttaatctggaattcgatttcaaacgccagcccgtacagcccgccatgaatgaagggcatttactgatgttttcccgcccatgggataatatggaagaggctctgcagcaacgctctcttttcgacgactggcggcaaacgcatacactgaagaccctggctgactgggatgactggtgtgattttctctattgccggacggtgttttctgatatgaaactaaaagtcggaagcaaacgtagtgatgatattttagtcagactatttctccgggcgctgactcagtgccaatgggggctgatgctgaaagataaaaaaagttattcctgtaaagaggttgctgaatggctgacgtcagaaggctattcagtaacggtgactgatgtaaaaaatgcggtaagagcaaaaataccccaaatgaaatttagttctgtaacaccgcgaatgaagtcactgatggatatcatagcccgtaaatatccgacattctgtcttccagtctga

SEQ ID NO: 86470 - DNA, 639 bp, Citrobacter koseri
atggttactaagaacacggaaaataacgctaataatgcactgaacattattcccgaatcagcaagcacagctgtagacaacgatgaaaaatatctgtcctttgcattagttctcgctatcacgattatggacaacttagtaaagctcatcggcacagatggcttcgtactttatacctacaccctgcaggacacggctactgctcgtgctgtttttaatgaattagccaggcgtctcaaaaatttcagttgtcaggaggagatctacaccaccgacgccctcacttttcgaatgaaatacatttacggtgttaccctgttcgaacatgatggtaaatctatcctcagcctttttgataagaagggctatccggtattgagtgaatcaggagaacccggttctcttgatgatatgtataatgaaattaaagcccgactgcatggcggctacgcctcaaaaaagtttcttcagttacatgaaaattgtctgttatctgcacacgtcaccccatctgtggaaaagacgcaacgtggcatcctgattaaagcaggcaggaacctcgtttcatttatccatgcagatgatgaatcacgcaaaaccgatattttcaaatctgtagtaaatgttattaaatcttga

SEQ ID NO: 86471 - DNA, 1137 bp, Citrobacter koseri
atgcctattctggatctgcgtttcagcaacaaatcacttcaccaacttccccatcccctcacgggctgtcaggaataccgtgatattcactgccaaaacctgcgtgctctggtgtatcccaatcggatcacgctggcctttcgtgccactataaacaatcagcgtatatatgaaaccctgggtcagttccctcagctctgcgttgaggatgcccgtcagcatgtgatgaaactgcttgctgataaaaatcgtcttgcggttcagtcccgtcgattcactgtggaacaggccatcaatgacctgtggctaccggatttgcagttgtataaaaagagtcctcagtcagagttgtcaaaactcaacctctacgttcgcccgttctggggcaagcggcaacttcgcgacatcacggcaggagaactagaacaatatgctgctggcttacgggaaaaattacgtccgtcaacagtaaaccgtatcctcgcaatattgtccaaaatatgctctctggcagtacgtgctggatggatcacacattccccgatgtcacatgtccgctatctgaaagaaaataacattcgctatcgcacactatcagcgacagaaatcccgcgctttattgacgcggcaacagcgctgcaaacaccggcagctgattctatattgcttgctctttatacggggatgcgtattggtgaggtatgtaccctgaaatgggagtactggcacccggatatgcatcaactcatactgcctgatacaaagtccggacaccctttcacctgcccacttgcacctccagccattgcagttgtccagtgccagcaggacctgatgctcagcaaaacttacatttttccacaactaaccgacaatgcccgccctctggcatatccgcgtgcaacctttgcccgtatttgtcgggatgccaacattgataacctgcggatgcatgacctgcgccgtacctttgccacccgggtactacaggcgaccggggatattgcaatcgcttcccatctgctaaatcaccattcactcacggcgacccgtcgctacgcttttcacaatgcagcgacatcacacgcagtggtttctcaggtcatagaaagttatgacacaaaaatgaacctatga

SEQ ID NO: 86472 - DNA, 1131 bp, Citrobacter koseri
atgttcgagaaaatgaaaaacaatgtaacccgtatgccggggaatttaaccaaacttaatcaataccaaaaagacattgatcacctgtctaaactattttctgaacagcaattactggaactaatgacgactaccgaatccgatcaaatattgcaaatgaagcctgctgtagatattcttcatgtactatctccatcagcatctactgctaagcatatcaatttttttcagcacgtcccagtgctcgaacaatggttaaaaaaggagtgcactgcctttaatttactggcagtacatttctattcacagcaatcccgtaaaaatgtaattccgaaagaaatctgtatgctactggatgcatttattgaaactgaactttcatctgcggttaatggtaataataatgccgaactcctttcttgttttcaaaacacgctggataaaatgtgcaatacactaacatttatagaccacacagttacggaacaatcaggtcaagtagcaatgcttgatttcagcgcaaaaatgcatgaatatactgttgaaatcaggacctttttgaagtctgaatactggctaaacaaactacctaaggatattaacattccagccattgacctatcctggcttgtgttttgttacttttgctctgaatatctttttgtatttattcaaacaacgctcaatacaatgaaggcaggaaaaatcattcgtgataactacctttatcatcctaaaatgattgcattgatcattttatctatgctgccttatgaagtcattcgtaacgatgaatcactgagtgagtttaaaacgcctttaaccagccctgatgagttcataatcaaatctatttgcattaaaggtaagcaaaacactacagggcataaaaaagatatcgaacaattgcttcgtaagacatatatctatattgcattactcttaaaccctaagtgggcaccatcttccaaggagttgatttcctttttatcaggaaagtccacagtgataagtggttcactcaacttccagtcaacctccagtggtctgggtgttcaaacaaacaatataactcttcttaagaatgaggtttacttcgaaaaaatagcgaacaagatcatgaaactgtag

SEQ ID NO: 86473 - DNA, 1167 bp, Citrobacter koseri
atgagtattgctaattgcgttatcggcccactttacgatgagcaaataaaaaaaacacttatgtatgctgaccataaattcaagcggctggtaaatacacgaatgtcgttactcgaacatctatcaccccactatgacttatcttccatgttcagctatgagttggagggaagagttttccggattaaattgatcaagcctgagattaaattatctcgccagcagttgatcttctcctcactctttttagagcaagattttctaaaagaatataaaaaacacatctcaaatactctacaaaaaacaatcaaacagtgcattaaaaaatacaaacaaaaaatcaaaatcgagccttctattttagattacatatcagcgtcaccccgcaatacgtcgagttatgtattacatgagatagtttttgaatctaaacattgcgatgaaattcgcaatattaaaaatgatatattgcttgatgaactaacgttgaatggccggatcactaatatttcaaaatacattaaaaatagtcaagataaaatcgtcgaacatatagagttctgcactcataaatttgtcaatataagtcgtaagaatcggcacattttcaacaccaccacaatatctggcagaaaacctaacatcactggtgttttactttgcctttcagaattgataagcaacctgcatatttacccaactgaaattaataatataagcaatgccataatattaagcattgcatactctgtacttcaacatcttcaatccggaagagaaacagaaaaaaccaaaacctctccagcactggattttatccccaccatcatcgcacctcatgttttctacctggcgaaacgcgaaaaatcctctcaatataaatacattgaaaaagaatatcttctcggccagttacttatatttttgatgtataaaacagtttactactcgattcataacatcagggtaagccataagcacttctataacgatataaaaccaaaattaatggcattaaaaaaagaaagcttattaagcaccaacttcatgaaaaatagaagtgagattagaggtgaagtctttggtgatgttggtagtattgaggctgatttgagggaaatcagtacactgattcatcggcgaaagtcattatttatttccttttaa

SEQ ID NO: 86474 - DNA, 1524 bp, Citrobacter koseri
atgaacgacaaaatcagtcaggacacgatcaacaaagccctgtgggccgcgtgtgatacgttccgtggcaccatcagtgctgatacctataaagactttatccttaccatgctgttccttaagtacatttcggatgtctggcaggatcattacgatgaatataaaaaacagtatggtgatgcaccagaactcattgaagccatgatggcgaatgaacgtttcgtattgccgaaaagcgccagtttctatgcgctgtatgaacgtcgtcatgaaccgggcaatggtgagcgcatcgaccaggctctgcatgcgattgaagaagctaatggcaccaaactgaaagacgccgggaaaagcgtgttccaggatatttcgtttaacaccgatcgcctaggtgaagaaaaacagaagaacaccatcctgcgtcagctgctggaagactttgccggtcaagatcttaacctgaagccgagccgtgtcggtacgctggacgttatcggtaatgcctacgaatatctgatcaaaaactttgctgccagcggtgggcagaaagccggggaattctataccccgccggaagtttcggacctgattgcagaactgctcgatccgcaaccgggtgataccatctgcgatccagcctgtggttccggttcattattgatgaagtgtgggcgtaaaattgtctccgggcatgatagtcgtaactatgcattgttcggtcaggaagcgatcggttctacgtggtcgctggcgaaaatgaatatgttcctgcacggggaagacaaccataaaatcgagtggggcgataccattcgtaacccgaagctgctcgataaaaatggcgacctgatgctgtttgatatcgtgaccgctaacccaccgttcagcctcgataagtggggccatgacgaggccgagaacgataagtttggccgttttcgtcgcggtgtaccgccgaagactaaaggagattacgcttttatctcgcatatgatcgaaaccctgaaaccgggaactggccgtatgggcgtagttgtgccacacggtgtgcttttccgtggctccagcgaaggtaaaattcgccagaaactgatcgacgaaaatttgctggatgcggtaattggtctgccggaaaaactgttctacggtacggggattccggctgcgattctgattttcaaaaagcagaaagttgatgacaaggtgctgtttatcgatgccagccgtgaattcaaggcaggtaaaaaccagaaccagcttagcgaagaaaacattaagaaaatcgtcaagacctaccgtgatggcgataacgtcgagaaatacgcctatctcgccagcctgaaagagattcaggataacgattacaatctcaacatccctcgctatgtcgataccttcgaagaagaggacgagattgacttgctggccgtgcgagcagagcgcgagcaactgaaagcggaactgctgaagctggaaacagagatggcagggtatttaaaggagttgggttatggtgcctaa

SEQ ID NO: 86475 - DNA, 1221 bp, Citrobacter koseri
atggtgcctaagggttggtcacacacaacttttgagaaacacattgattgcttaaccggttatgctttttctagtactgaatattcggctgaagaacacgatatcagattgctaaggggagacaatattgaacctggtaagcttcgatggataaatgctaaacgttggcctcgaaacgtacaagaaaatatggataaatattttcttttggaaggcgattttgttatagctcttgatcgtacatggatatcaggtggcttaaaagttgctgaagtaacttgtgatgatctgccttgcttgcttgtgcaacgagttgctcgaattcgagcaaaaaaaaccttggcgcaagggttactccgccagtatttctcaggatacaaatttgagcgatacgttaagcttactcagacagctacagctgttcctcatatcagccccaacgatattaagcagttttcgttattacttccccctattgcggaacagaaaaaaatcgcccaaatcctgtccacctgggataaggcgatttcggtgacggaaaagctgctcgccaatagtcagcagcagaaaaaagccctgatgcagcaattacttaccgggaagaaacgcttgctggatgagaatggggtgaggtttagtggggagtggtgtacgtgcactttgtctgaagtagcacatattattatgggatcatcacctaaatccgaagcctacaacgataatggcttaggtttgccattaatacagggtaatgccgatataaagtgccgagtttcatgtcccagagtttatacgtctgacattacgaaagaatgtactcctggagatattcttctaagtgtcagggcacctgtaggtactgttgcactttctcaacataaagcatgtatagggcgtggtatatcggctataaaatccaagagaaaaatgagtcaatcatttctttatcaatggtttctttggtttgaaccaaaatggtgttacctatcacaaggtagcacatttgaatcaattaatagtgatgatataaagacattaaaattatcagtgcccaattttgaagaacaacaaaaaattgccgccgttctgtccgcagccgacgttgaaatctccacgctggagaaaaaactcgcctgcctgaaagacgagaaaaaagccctgatgcagcagttactgaccggcaaacgtcgtgttaaggtcgatgaggcggttgccgcatga

SEQ ID NO: 86476 - DNA, 684 bp, Citrobacter koseri
atgaaactgacgaaaagtagtccactgactgaccgggaaatcgactggctggaagaggcgttgctgaaatacggcaatgatgactctgtgctctgtttctctgagctggatggcttcctgacggcggttgtctctggcccgaatatgatcccccctaatacctggcttagtgctatctggggtcgtggtgactaccaccctcactggaccaacgaaaaagagatgacgcgttttgtggggctgtgttttcagcatattaacgatatcgctggctgcctgtatgtggcccctgtacagtttgaaccgattttcaatggacgtgaggtgaaagggaagacatataccatcgtcgaagaatggtgtttcgggtatatgaaaggccggtcgctggatgactggtcagccttgccggaggccttgcatccctcgctggaggcgatagcccttcatggtatcgaaaagaactttactgtggttgagaaaatgtcacctgttcaatttgaacagagtattactctcattcagccggcggcactggcgctttatcagcactggttgtcggtgaaaatgtcagaggcatcatctcagcctgtacccgtgaagggggcagaaaaactgcccggtcgtaatgacccgtgtcagtgtggcagcggtaaaaaatttaaaaggtgctgcctgcactga

SEQ ID NO: 86477 - DNA, 1785 bp, Citrobacter koseri
atggcagtgaacaatctggatcgttcccggtggtacatgggaaaggttctctggttcggaggctacaacagcaaaacggatcggcagaataactttggctttctcttatcagagaatggtaatgagctgttttttcataagaatgagataagccggaactatacacccgctgacaatacaccggtgctgttcagggaaggtataggtaaaaatggtaagcctacggcttttaatgttcacattcttgataaaacagatgaggagacggctgagctccttattgaatatctccgggctattattgaggagggcgttgatttcgctcgttggcgttatcgtgactgcgttattaatttcctcactcagtcctttggcgaaagggctataattcggttagttaccagtgatatagctgctacaaaagtcttgccgctatttttaaaatcacgtaactacgataaccagtttgcactttttgcctctgataagaattttgatgatttgaccgcccaacaaatatctcctgcggtcatgccttcgtcatttatcgataataacattgatcagttagctgtttgggtgaaaagatgttctgcggctacggattgcctgggggcttcaacatcggacatcatcaatgaattactcagccatatatctataagtgctattctctacctggcattttacgattgtataagcagcgagcggattcttgaacatcggcatgatgatatagagaattttgttcgacgtagtttcacgaaaaataaaatggatatacaaccatttgtccgtgatgcctatcaggagaaattctcatcgagagagcaattttataaacattccgtgattagtccttttatcaatacgtatttgattaaacagaagatgttcaggaaagatttcagttttgttaatgatatcgagtcgaatactgaaatttcttctgatcctgaatacttcattctgagtaaattgttaccgttgcttgggcgcaacgatgaacagtccgttctgagtattattctgcatgagatatggcacggagtcttgtcgggtaaaattccggtaaatcatccttctgttttcaaattgttcccacaatgtagttcattacaaattcgtttcccaagtttagaattatcctgtgaggcgtttcactggaatgcaaaacaacctgacggaacgatagagaaaaaattcctttgtcgttcgaaaatctgccatgatccgcaggtactacccgacctcagtcgggattacatcgacttcactatttatgactggcttgcccactatggcatgacctatctgattgcaggcgaaccttctaagcgggatttcccaattaaactggctgggtatttcaatcgtatcagagaattacattcccgcttgcattgccgaagttgtggggtgctgatggttccagatatgaaatatgctcgtgtggaagtcagcgtctgggatacaaagtcgaaaggatttgtgaaaaaacctttccaggccgcgtatcgcctgaccgtctttaaatgtgccagtcattcctgcgaacagtttggtatcgggcattacattaatcactgtattggttacaaatgcagcgaaataattgacgccagagatttgcatgaaaaatgttcagaaggacgatttatttgtgcatcctgtggttcctgctgtacgacgcatcaggagaaatttggtaatgtaaacaagggtgaaacagaacaggccaagtatgatcgcctttaccgggactcgccgttcttttcatcataa

SEQ ID NO: 86478 - DNA, 3396 bp, Citrobacter koseri
atgatcgcctttaccgggactcgccgttcttttcatcataagtcttcgctcatttttgagtatgtccgtacagacatacagtttcacctcttagccaagaaggattaccgggtggataagcactaccaacctaaattccaggaagaatacagcgccaaaatcccggcactgacgttactgaccagcctcggctggacgtttttacccccgaaacagattatgggttatcggggctataaacaggatgaggtggtgctgcgtccggttctgcgtgaggcgttgtcgaagcgttcctttatggcgagcggtaaaacttgccagttatcggaaaaggcactggataacctgatatcgcaggtttgttctccggcgctgaatgaagggctgctgaaagccaatgagcggatgtataaccatctgctttacggaatcgccgtcacggagtttgtcgatggtaagaaggtcaaccccacgattgcactcattgactgggaacatccggaaaataaccagttccattttaccgaagaatttacgatattgcggtcaggcggtgtcgaaacccgcagaccggatattgtgtgttttgtgaatggtatcccgctggccgtcattgaagcgaaaagcccggcgggtcacggcaagaaagggccaaccattgacgaagggatatcccagagtatccgcaatcagctcaacgacgaaatcccacaactgtttgcctacagtcaggtattactgtcgattaacgggcatgacgggcgctacggtacctgccatacgccaatgaaattctgggcagcatggcgcgaagaagatattacttacgcgcagatgtatgctctgcgcaaccatcctttatcgactgaacaaattcatgcgttgtttgatcatcgtccatcagccgatctcaactggtaccaacagttaatcgccgccggtgaactggctgtcagtggacaggacaaactgctcatcagcctgctttcgccggaacgtctgctggagatgacccgcttcttcactctgtttgataaaaaggccgggaaaattgtcgcccgctatcagcatgtgttcggtattaaaagactgctggagcgcatcagtacccgcagacccgatgggggcagggaaggtggtgttatctggcataccaccggctctggcaaatcgtacaccatggtgtttctcagcaaggcgctgattcttcatgacagcctgaagcggtgtcgtatcgtggtggtgacggaccgtatcgatcttgaagaacagctcagcagtacctttgcatccggcggcgagttggccgggaaaaaagacaaagccaatgcaatggcgacatccgggcagatgctggcgaaacagattggctccggtaaagaacgcatcattttcaccctaatccagaaatttaattcagcgacaaaacttcctgaatgcgtcaataccagccccgacatcatcgtactgattgatgaaggacaccgtagccagggtggtgagaaccatgtgcgaatgaaactggccctaccgaatgccgcctttgttgcatttaccggtacgccattgctgaaagaagataagaccaccaataaattcggaccgattgtccacgcttataccatgcagcgagcggtagaagataaagccgttacacctttgctgtatgaagaacgtattcccgaccttgaggttaacgatcgggcaatagatgcctggtttgatcgtattaccgatgggttaagcgaagcgcaaaaagccgaccttaagcgtaaatatgcccgtaaaggtgaggtttatagtgcagatgatcgcatccgtctgatcgcactcgatatcgccacgcacttctcgaagaatattgatgagggactgaaaggccagcttgcctgcgacagcaagatttccgccatcaaatataaaaagtatcttgatgaagccgggttgtttgagtcagctgtagttatcagcccgccggatacccgggaagggaatactgaggtggatgaaagcaaactgccggaagtgacgaaatggtggaaagataacgtcggcacgcaggatgagtctgtgtatacccgcaatatcatcagtcgtttcgataccgatgagaagctcaaattgctgatagtcgttgataaactgctcaccgggtttgatgagccgaagaataccgtgctgtatatcgacaagccgcttaagtcccacaaccttatccaggcgattgcgcgggtgaaccgactgcatccactgaaaaagttcggtctgctgattgattatcgcggtattctggctgagctggacacgactatcggcaaatatcaggacctcgcctcccgaactcagggcggatacgatatcaaagatattgacgggctgtacagcgccatgagctctgaatacaagcgtctaccgcatctgtataaccagctgtgggccatatttgccggtgttaaaaacaaaaatgatactgagcagttacgtgcggtactggtgcctaaaatggaagaacgtgacggagagatggtcgatatccatcagaaaacccgtgatgatttcttcgaggcgttaacggcctttgccggatgcctgaaagtggcactgcagtccgctaccttcttcaccgacaagagctttacggaacaagaccgaaatctctataaagaaaccgtaaaacagatgtccagcctgcgccagtgggcgatgcaggtaagtggagagcaggtcaattatgacgactacgctgagcaggtgaaaaaactgctggataagcatgtcaccggcgttgaggttcgtgaaccggatggcgtgtatgaagtcggtaaaatgggcaagagcgaaaagccctcagagtgggacaacaataaaacccgcaatgaaaccgacatcattaaaacccgcgtgacgaagatgattgagcaggaattgcgtgatgacccgtatgctcaggaggcattttcaaaactcctgcgtatggctatcgaagaggctgaaaaactgtttgaccatccgctgaaacagtaccttttgttccgtgaatttgaagaacaggttgaagcccgtaagctcagcgatatcccggatgcactggcggtaaacaagcatgctcaggcgtattacggtgtatttaaaaaagagctacctgaggtttttgcggtaaacgacgttcaggtgcaggataagtggaccaagctggcttttgaagtggacaacattatcgtcaaagcggtggcagaaaactccctgaacccccaggacattgagaaagtcgttaagacaagtctgctaccactactgtttacggcctgccgggaaattggtgccggaatgaatcaggttaaccgtattgtggaaaccatcatccagatactgcgcgttggtttgatgaaatcatga

SEQ ID NO: 86479 - DNA, 756 bp, Citrobacter koseri
atgagtgaaaaagaatcgccatcaatgaaagcgttacgcattgtctatggtgatgaggtcatcgtcgtacagtgtgttccgcgtcaggtcgtaaagggcagggtgctcatcaaggtgcatccggactgccgggttattgtctctgtacctccagaaacaccggagcacgagctgttgtctgcgctgaaaaaaagaagtcgctggatataccagcaactgcgtgatttcagggagcaacagacgcacattgttccgcgtcagtatgtcagcggagaaagccattattatctcggcaagcagtatcagttgaaagtgacagaagatgcttctgtgcctcaacgagtcaaaatgttgcgaggtcgtctggaagtgacggtcagacacaaatcggctgaaaaagtaaaagcgttgctggccgaatggtatcgggaacgtgccagagatgtctttcaacgcaggcttgattcactaataccgcagaccctttgggtcagtgagcgtcctccgatacgtctgcgggcgatgcaaacgcaatggggaaactgttctgcgaaaggttgtctgaccctgaatccatggctggttaaggcatcctcagaatgtatcgattatgtcttgctacatgagttatgtcatgttgctgagcacaaccatagtgaggagttttaccgcttgatggggcaggttatgccggggtgggaaaaagtcaagaagcgactggatgggatggctgggatgttgttggctgatatgtaa

SEQ ID NO: 86480 - DNA, 1839 bp, Citrobacter koseri
atgagtaagttagataataaaattgaagcacgccatcgtaatttgtttgatgttctaaatgcgcaaaaatataccgttgattactttcagcgcgagtatagctggggtgagaaacatattgaagagttggttacagacttaacatctgcgtttctcaatgaatacaccgtcggtgattctcgggagcagggtgaaaactacaataattattacttaggaccatttgttgtgagtagtaaagatgggaaacggagtattattgatggtcagcaacgactgacttcattaactttatttctaatttacctccataaccttcagaaagaacttaaatatgaagagaaaatagaatcaatgattttctccgagttacgtggcagcaaatcattcaatatagtagttgaagacagaataccttgcatggaagcattgtttaattttggtagctatagtttagttgatggggatgatgagtcaacccataacatggtggagagatatcagaatatcacagatgcttttcctgatgaattaaaaggtcaggcttttcctttttttatcgactggcttaagtataacgttattatggttgagatagttgcctattcagatgaaaacgcatataccatctttgagactatgaatgaccgaggattgaatcttactccgtccgaaatgcttaaaggttttttactttcacgctttcatcagggagataaacgccaaaaggcaaatgaactctggaaaaaagcgatgatggatttaaaaaactatgataaagatgaagaccaacgttttttccagtcatggttgcgtgctcaatatgctgatacaatacgcccgggtaaagctggttcaaaaaatgaagactttgaaaaaataggtacgcgtttccatagctgggttagagataatcttcaggcagtgggattggacccagataatggtgagacattcgaacgatttatacaaaaaaactttttgttttatttgaatgcctatacacaaatactgaatgctgagagagcattaacgcaccaactggaatatgtattttatatccaccattggggtattgcacctactttaagtttccctttgatgttggctccattaaatgtaggtgacagtcctgaggctgtgatagccaaaataaacctggtggcgcgctatattgaaacgtttgttgttcgtcgttctgttaatttccgaaaattctctgccagttctattcgttacacaatgtacagtcttgttaaagagattcgtggtaaaagtattgaagaattaaaagatttgttatctaagaagttatccgaaatgtcagatacttttgcaggaatggaagagtttcgtctccatggtcaaaactatcgttttgtgaagtttttgctttctcgtataactgcgtgggttgagcaacaagccggaatgagtacaaccttcattacatattatcagccagaacacggtaagccatttgaagtcgagcatatttgggccgataaatatgaacgttactctgatgagtttgaacaagagcacgaatttaacaattacagaaatcgcttaggtgatttggttttattacctagaggctcaaaccagtcatatggtgatttgtgttacgatcaaaagcaacctcattacattaaagagaatctcctggctaaatcgttatgcccattggcatatatgaataaccctaatttcaatcagttgagaaatgtattcggattgcctttcaagccacatgattcatttaaaaaacaagatgtcgatgaacgacagtctttgtataaaataatttgtgagaatatttgggctgataatttatag

SEQ ID NO: 86481 - DNA, 1182 bp, Citrobacter koseri
atgatttatcagtgtgatacttgcagtagaacgacttttgagattaattgtccatggtgtagcggcgtttcacctgtaaaaacgtctgcatggggttcagcatcatcgactgcacaagcaatagatatacaacgtatgacgccattgaatccatctttttatcccgagtttcagtatcgttctaagggtatgctgaaagatctgtttgggaaaaagaaagaacaaactcagcttaatcaattgcttgaaaatgttctcgaaaaatactccagtttaaaagatccatattttactaacttcatttacacttccagattctcacataataataaatcggaagcagattactcaacagataatggtacatactccgaattacaacttttccgtgaggtgttggtcagaaaagggttcaatgagcttgagcagttacctgagctattagataaattactccttaccacgtcatttaacgctctttattatggtttcgctaaggaagttaaacggcatattaaatccacacttactgaatccttgaagtcatggattgaggaagcgggtaccacttttcgggcagatctttcattatttctattctatatatggagcaataaaatagatttctcatcagtagaattcaatgaaaaagcggaggccacgcctggtgttcctttggttttattcgatgaagttaaaaaatacttagctgtgtgcgaacgtatttattttgatattctggttgatagattagctacacggcttgagcattttaaccctaacaaattcgtcaccatgtatttagttgacgcaatggacggcttccagtttgaagatttccttgtggaagtattccagactatgggttatgacgtcaaagaaaccaagagaacgcaagatcagggggcagatctcttcgtcactcgatttggtaaggatatggttattcaggcgaaaaattattctggttctgtaggtaactcggcggtgcagcaggtgatctcggctaaaacgttctatggttgtgatgaggcgatggttgtgactaattcctacttcacacgctctgccaaagaattagctgagtcagccttggtacgtctgatcgacagggatgaactgcaaaagtatctggatgattacaatcagaagataatcgaagatttccagtcaaactcgtaa

SEQ ID NO: 86482 - DNA, 462 bp, Citrobacter koseri
atggcaaaaacctattcaaattttgataacagaaacataaaggcactaattagccagtacaagctctataaagatatcccatgtgaagatatcaagaacattatgaaggattcagtagctaaacttaatgtgagagataagattagtgtatatgatgtgtttacagtattgagtaatgaagatgaaatacgaaatgatttactattcagtactatcaattctattaaagtacaacagaataagaaacaagtaaaagaacgtatgatcaggtactacggggcagcgatcacggatgcagcaaaacgaatagagcagtatatgatggagcacccagacgcactaccagcaccagcatatggacaaagaacgctaacgtataaagaggtaggtaagctattagaactacaaaaagaaggtaactttattgatgacatgatcgagtacttaaggagcttgcgttaa

SEQ ID NO: 86483 - DNA, 126 bp, Citrobacter koseri
atggaatggaatggaatggatttcgtatctctatacttagttgccgtattgacggtaaaacgcgggtttcaggggctttttttgcccaattacggcatggagctatgccgcaatatgccgtattaa

SEQ ID NO: 86484 - DNA, 744 bp, Citrobacter koseri
atgaacagaaaacaattcatccagtcgcatggtgctacttgtagtaactggacttggagttggtcatttgtgaatcacgacaagaaaatggtgatctttggtgcttgggatgttcagaaagagcaagaaagatcagtcattctgagggagcggtggaaaaccaaagtagtggatggtagggtaagaaaaaatctgggatacattcaagctattgaacacatccaattgatagcagaaggttatgatcttttcacgtttgatatggaacaggggcgaaacgatgaggatagagatgtagctgttatcaaacgtttcacccctaaacttgagaagcgttaccttcgaaaagaaggaacagtttggtatgcagactttttacctaatccgttccctgacgaaattacctcacctgaaaactatgctgagggtgcaaaaaagcaagttacggtaaactcctacgagcgtgatccaaaagcaagacaggcttgtattgaccatcatggaacttcctgtggctgctgcggttttgattttgagaaagtatatggtgaacacggtaagggatttatacacgttcatcatatcaaacctctacacacagtaggtaaggattatgaggtaaatccaattactgatatggttccactttgtccaaactgtcacgcaatggtacatcgcggtagtgaagtcttaagtgtcgaaagattaaaagaaatgttgtttaaagacagcgatcaaagttga

SEQ ID NO: 86485 - DNA, 597 bp, Citrobacter koseri
ttgcgctcgctggtcagtgagcgaaatatgcaggtatcgcaaaacgggcgcgtttaccccggctatggtggcaatgtcgatggcaccatagccaatgccgccacccggctggcatccagcgccggaaatatcctcggcagcattgcggcgttcccggcgtttgacagcgtacgtcaggcgctaccgatggtacaggcgctactgcaaatggcgctggtgatctgtattccgctggtaacactctgttcggcatgggatgtgaaagtagtgatgacactgacgtttgtgcagtttgcgctgttcttccttaccttctggtgggaactggcgcggtggctcgatagctggctgctggatgtgctctacaacagtgatacccacagtagctggaatctggccgggatccagaatacgcaggatgacgtgatcattaatttggtgatggggtcgatgtttctggttctgccgactttctggatgggggcgatgacgtgggctggggtgagagttggcatagcggtgaatggggcgctggcgggcggggttaaggtggcacaggatagtgggggtaaggctggggggatgcttgggaggtga

SEQ ID NO: 86486 - DNA, 582 bp, Citrobacter koseri
atggcgttactggggtatgcgcgggtatcaaccagccatcaaaagctgacgcatcaaatttcggagctgaaaaatgccggggtgcgggaagatcgtatttttactgacatgatgacaggcgcaactgatgagcgggaaggattacagcggctgctggcccgggcagagaaagacgacgtaatcatctgcacaaaaatggaccggctggggcgtaacactgctgacatgatccgtgtagttgatggctgttacaaaaaggggattgccatccggttcctggagaacggcctcagtacagaggggacgatgggtaaaatgattatccaaatcctggcggccgtagctgaagcggagcgtgagcgtatcctggagcggacaaatgacggtagaatcgcggcacttgctgcaggcgtaaaatttggcaggaagagccatccacgaacgccagcagcgctgacgcttatcttacagggagaagctctgagcagtgtgacagaaaaaacagggatatcccgggcgacgtactttcgattaaaaagaaaaataaaaaacgatgctaaaaatacacctatttctcaataa

SEQ ID NO: 86487 - DNA, 624 bp, Citrobacter koseri
atggaaagctcaaatattcaacttaaaattaaaaaatttctacctaatatagaatattggtcaaggagtgaaaatgctctagcagctaaagaaaaatacatgtcgttttgggtaagcctgagaaaggaatttgatgataataactcttgggttgagcgtgtcaaatcagaaagcgacgatgttcagaaattagaattagctttaaaatatataccactcccgcaagcttttaaacagtctgctattgcattaaggtctttaattaaatcaaaaaagaaagacagcaccccatatattgatgagctgtacttcttatattggctcgcatcaataaaatcatttagtgtaccttactctcaactacttggtgaaccaggatttaatgtgttatcaaggattccggggagtgaaattctggatttgtgcattaactatgatgaaataggttatgaacaccttgatttactaaacaaaggtgatgtaaagctattaattgaaaattttggcgagcccaaaaataacaatgtattatacaatgttcatagtgttctttggcagcactatgaaataaaattaaaggcagaaaaggataaagatctgcgcgactttttttcgagcttatga

SEQ ID NO: 86488 - DNA, 342 bp, Citrobacter koseri
atgatattcgctaaatttcagtcactgacccataagatagacactatggttattcgtgacattaaacgggaaatgccgttgaaatactggtcattcaaagtggcagaatggatcgccagaatcggaacgattggttttgtactcacttttatcacgtattttggattcggcctcatgatgcagtattacggccaaaacctgccggaatcgtttactgagggatgcgctcaagccatcgttgcattgatagctattgccctggtcggtttcctggtcagaggcggattgtacgtcgatctggaaaaaagaatactggataagtggcagagctacgttcagtga

SEQ ID NO: 86489 - DNA, 306 bp, Citrobacter koseri
atgggtaagtttatcggaagatgtttaattgcgttgttaatattagtggctctctattttcacttctcagggggaggagttaagccacaagaacaagtagaagaaacttcatcacgtctaacagatgaagaattgcaggacgtgaaggacttcgcacaggctcttatccagcgtgattacacatgcgataaagtcactacgtttagtaaagcgaatttttcagggcgtatagatgtatggtgtgatgatcagtaccagtatgagattacaaagccaggtggacgctggaaggtagtagcgaagtaa

SEQ ID NO: 86490 - DNA, 1311 bp, Citrobacter koseri
atggaaatcaaatgtattgaaagtgagcaaatatattttgctaagatgaatgggtatagtttcaaactgtcagataagaaatggcaactggataaagaaaactgtgtataccctcataaagttgtagatagaatgcctacaaacatgaaacttagctacttaaaaacattggcttactatgcgtctgaatatagttctttctatattaaaagcattaacaatttattttataagtggtttggtgcgatgactatcgatactattgatgacaaagccatatatcaattgaatgttcatttaggttcagcgagaaactacatgctaaacatagttaaggccttcatcactaaatggaaaaaactcaattaccctggagtagaagcgactgcccttagaatgttggagaaaataaaaatcattccaaaccaaacaggagaggcagttaaaagacgagatccaaataaaggacctttaactgaaacggaactaaattacatccttaaatctgttagcaaactttatcttgagaagaaaattcaacgcttcttatattgttatattcttctgttggcaataacaggaagaaggccattacaattaatctctctaaaagctaaggatctcattaaaaatgagaaagggtactttttaaatgtaccaaaagtaaaacaaaggaaatcattcagaaatgaatttaacatggtaatgatagaaaagttcttatatgacagcttatcaatgctaattaatgaaaatcaggtgtttgtagaagataaattcagtgttgggattaataactatagaggcgaattgccaatcttcatggatttagacaagattacggaaataaaaaggattgagggttttctatctgatttaacaacagattttttccatatgaaaaactcagtcatgtcaaagctattaaaacgctttccttcaaaattcgatgttagatcagaaaggactaacagctatatagagcttaatgccagaagattcagatatacattaggaagtcgactggctaatgaaggagcctcaattgaggtgattgctaaagcgttagatcataaatcagcaaactcttctatgatttatataaaaaataatcccgacagtgtttatgatattgataagaaactaagtgcattttttaaccccttatctaatatacttatgggcgtagagattgaagaaaacaagaacttttttatcaagtatgttttagattcatttttattattagaagatacgaaagaggaatttaaatgtttatcttgtaaaaaattaaacccctggagagcataa

SEQ ID NO: 86491 - DNA, 486 bp, Citrobacter koseri
atgttgtcctgggcggaacgtttggtttctttaactgctcccccgcccagcttcccggcaccaaaagcggcagcaccgatacctacagcggccagcccctgcatggatacggtagcacttgccccggccagtgctgcggctactttagcggagatatacaccagtattgcggcgcagaaaccagcaagacagacttgtgctcctaattctacgatatttgctttacccgcttgtgcggtggcttctgccattctcgacgttaaaaaattgataacaatacgaagagataaagctgaaaatagtattgttaatatcgctgcaaaaatattttgtagccagttgttgaacatcgggcgcaaaaaaccatacatcaggcaaaatatgaaaataggggctgtaatactcagcaatagaatcattacttcagctatcatcgaaacgaaagctgtaataagcattaaaataaacatgccaagccagacatag

SEQ ID NO: 86492 - DNA, 513 bp, Citrobacter koseri
atggctggtgcagccctatatgcagcatggaacgctaataattggtttagaactaaaattaaagaaaacgctttaaataaggtaacgacattctggactaactgcgatgctttctctttggatatgcttaatgcttatagtagtgtccatacccttaataataccgctcctgatactgaacctaaaaattttagtcagttagtttctaagcaaagagagattattgatcaattacagattaaattagcctcattgaaaaatgaacttcaatcacttactttttggaatgtgtctctgaaagatgaacaaatttttaaagattatttcttcaccaatcaaatggcattaggtacatttagagaagccattggcttcaatgtaaatgacatctctgaacgatatcattacaatgtaaattatggtcgcgtactggtaaaaacattttatggattattagaaacacatgaaacattgaaaaaggatatgaacaatttattcactttccctaagtag

SEQ ID NO: 86493 - DNA, 426 bp, Citrobacter koseri
atgattaatattaaagagaacattgaccacattagagtgtattattatagtaatgagcatcttttcaaaagtgaattaatcaaacttgatagttatgaattctatgataaatacctatgtaatctaacaccaagagaacatcttgatttcttacaatttctaattgatgatataagtgagcgaaaaacgataataccagatgaaacaacctctttaattagttatatgctcggcaaagaaattttaacaaaacaggaagataattcatttgctatatctgaaaatatattcacagaaaactatcaagatctgacaaaaaaattcattacattaaataacatacacacggctaaaagagaaaaaaatataatcgaatccaaaatttataacagaaaatttctaagcaaaactaaaaagaggctatag

SEQ ID NO: 86494 - DNA, 468 bp, Citrobacter koseri
atgagcataataacattagcagctaaatataaagatgtattaactataagtttttcagtactttcatttatcatcgcatgtacgtccttgtttttttcaggtaggacagcatggcatgatagatcgagattaaaaataacaggacgagttgtatacgaaccggtttacgaaaaggcttataaaattgaagtgacagttcttaatgttggtagacgtgatgctgtgttggaaggggttctatgccactatgaaagtggtagaatacggcatagctatgaaaaagaaggcattgttattaaagagaagcaaagagaaaaatttcaactagaatatcgtgatttaatcctttcggatgatgacggagaagtctatcagttagaaaatattactatattggatgttgaggggaaggaacatgaaattcctaactcttatgagcttgtatcgaggttttctaaaaacgcataa

SEQ ID NO: 86495 - DNA, 195 bp, Citrobacter koseri
atgaaaaaactattattgtttgttattctggttatggctctagtctcattttttacgttgttattaactgaccaatcttggaaaggaaatagagaattaataaatgtattgtgtggggtttttccctttatctatttattactatttcctttcctgttatctccatttaaggccgaggaggtgaggaaggagtaa

SEQ ID NO: 86496 - DNA, 360 bp, Citrobacter koseri
atgtttttgttagctaaggagtatgataattctctgaatgcagcgaagattatcaatattattgatgcaccaatcaagatactcgaagatatcaacgacaaagaaaggtttttgccatattcgtttaatccgttccaaaaacctgaaaccgatgcggctcgttttgataagtctatgatttctaatggaacatttatattcaaatattcatttaataaaaaaacagaacctccagctaagactaagaaaaaaaacctgacaaaatctgtcgtttcaacctcttttctaagaaccaaagctataattccaattatcgagaatacaggagagaataaagcacccgtttttaaaatgggataa

SEQ ID NO: 86497 - DNA, 210 bp, Citrobacter koseri
atgaaagaaaaaattatagctttatcagcttcattaatatgtattgtcttttttttatttttatcattaataataaaagaaccatggattaaagacggattgtatttcctaactccgatcatggttctaatgattcctataatttgcgtgctaattcttaaaaattatatgaagctaaaaaaacgtgaaagcaataattttattcgttag

SEQ ID NO: 86498 - DNA, 258 bp, Citrobacter koseri
atgaataatgctcagggcttacagccattaaaccattcgctttccggcctgccgcagtgggtgtctgaacgtatattgcagcagataaatcagttaacccactacgagccagtgatcggcattatgggtaaaccggggtgggaaagagcagtctttgcaatgttctgtttgtcggcgaagtatcgccggtcagcgatgtggcagcctgtacccgtgaacctttgcgatttcgcctgcaggtcggagagcgctatatga

SEQ ID NO: 86499 - DNA, 492 bp, Citrobacter koseri
atgacgcgcctggtggaaagcgcggcgggtatcgaaaaagcgcgcggcgatgccttaacgctggatgttctgaccttcacggccccggcagacgatgtcatgccagacctgaaatggtggcaggacccttccatgcagtactggggacagaatggcggaattgggctgctggccttgctgacattgctgtttggcgttcgcccgctggtacagcgctttggacgtcgcgacccgatcacccttgatggcgaggcgacgaagaaagagctggaagcgcctgacaatggggtggtgatgaacgatgacgagttcgccagcctgtcgaaagcggcgttcaacaataatgaagatctgctgccgccgcaaagctccggcctggaagccaaagtggaattcctccagctgttggcccagagcgaaaccgagcgcgtagcagaagtactgaaacaatggatcaacagcaatgaccgaagcaacagtaagccggaatga

SEQ ID NO: 86500 - DNA, 372 bp, Citrobacter koseri
gtgattgccgactacgacatcagcgtttgcattaactgggcgcgttccgccattgaaggacgcaacaccaccctgccactgacccatacgcagcaggtaaaacaggctggcaaactcggcgcgctgatgttctccggtacaacgcaaagcggtgaatacggcgaatggcaggatttacatgcgcctttcgcgcctttctgccctgacagcatgatgacgcaggaacatgcccgtgaattactggcctgcgcaggaacagacgttctgcaattcatgggtattaagttactggaaattaacgctaatgccgacgtcagtcaccgcgtagcgatattacgcgacggcattacggcattaaataacgccaaataa

SEQ ID NO: 86501 - DNA, 453 bp, Citrobacter koseri
atgagcaaaattattaattctgaatcagaaagttatttttacagcgcatccaccggtggattttatcctgttagcctgaaagtcgattatgaaacagcaggctcttggccggttgacgctgtttctgttgcggacgaagatatgatggcgttgcaggcaggacaatcagtaggtaagcagatttcatcaaatgcggaagggtatccagtgctgactgatcccaagcctcttacacctgaacaacttcaacaacaggccaaagtccggcagagtgcgctgatgaatgccgcgggagatgcaatagcgcctttgcaggatgcagttgatctggatgaggcaaccgaagaagaattgttacttctcaaagactggaaaaaatacagagttactttgaacagacttgatttatcaactgcacccgatatcgattggcctgtgataccaggcgaatag

SEQ ID NO: 86502 - DNA, 1119 bp, Citrobacter koseri
atggaaaagcaacatagtaataacggtaccatttatgggttacaatacatgcgtggcattgctgctctgatggttgttttattccatctaaaggaaagactcccgcctcatatcgcaccttttttagataatggccgtggcggtgttgatatattttttatcatcagcggatttataatttatttcattactcaaaatagtgatgaattaaaccctaaaacattcttcgaaaaaagagcataccgaatcctcccgctctattggtctatatttattatttcaaccctcttatttttcgaaagccttgattttaattcaatagctcgggggttctttctcatgcatcgagattatcaatccccatctccagagtttaatattagtgttgttggtgtggcatggactttgacatacgaattctacttctatgcaatttttctcgtatgctcattaatatccaaaagatatagaggtatgcttacatctataactttactatccttacctgtgatcttgcagatttattttaacggtaagttttccttgtcttccaccacatccgctcaagtgcaggggaacgggtttatttcgcagtttatgcatatcttgagtaatacgatgatttatgagttcgttttaggcattgctctttgctcggcatatttgcattttagaaaaaagaatacaccaattatagtgtggagaatgcttttcgtgctcgtcacaattctatccttctctattttctttcatgatgttaagttgtggtttggtatgcatgcaagacacgtcggcaatatatcaaatgcctttgggtttagtggttttatgtatatggcgttaccattcgtgttgatgtttatattttatgaactatcgagattcaaaacaattattacacctctagtttttttaggtgacatttcttattctctctatctgtgccactggtttgttaaccgattatttactgattacataccagatttcaatggcactaatagttttttagtaatccttgcactttctttattaatggcttatgtgtgtcatttatacatcgaaaaaccaggcgtgaaactgatccgacgcaagcataatagaccagctctgagttga

SEQ ID NO: 86503 - DNA, 216 bp, Citrobacter koseri
atgaaaacaggaccgttaaacgaaagcgagctggaatggctggatgatgtactgacaaagtacaataccgatcacgcgattctggatgtgtcagagttggatggtttactgacggctgtactcagttcgccgtatgagattgagccagagcaatggctggtcgcggtatggggggggcgcaatatgttccgcgctggtcctctgaaaaggagatga

SEQ ID NO: 86504 - DNA, 222 bp, Citrobacter koseri
atggatgcgcagggcaaggtcactgtgttcgtacatgccgcgcccgtataccggatcaaatccgcctaccttctcgatcgcactgcgatggtaataaagcatcacgccgcgctgtccggtatacgccacatgcttatcgtcgctataaagcacagcgagatcgttaagttttcgcggtccggcaaggtcgaggaactggtaagccaggtgcgcctcgggtga

SEQ ID NO: 86505 - DNA, 357 bp, Citrobacter koseri
atgaaatatcaggtgagagaatttattactgataaatatgcgaaggctgttaatattttaaaggataaccttaaagaaaactaccatgttttttatggtgtgagattaagtgagattctttttccagccagtgagtatggcactgatgctttctttaaagagtttgaattaattaacagtgtaatacttccattagtaatctttgatttaacacaacgcaagccaatgatgattatcagcttcgataagatacctgatgccagtttgttggaaggaacaaatattgtggttcttgaatgttctaccctcgccgatcttctgacaaatgacaacattggttttttatataaaagctaa

SEQ ID NO: 86506 - DNA, 834 bp, Citrobacter koseri
atggaacaaataaaactacacaaagatagtaatgtttcaataatcgttattccaaatcatttactcaaaaatatcggatgggatgatggtacgttattggatgtggtaaaatcagataatgcacttcatattagaagaaaggaagacgtaccttgcgtggatatgttaacagttacggttaaaaatattaaacctggaaaaattataaagtataatagcaagctgaatgaaagtattaataagctccacgtctcagcaaggagagtcttttttatttgtttgtatctttattttaatggtaggtataactcagatgggtctattttaatcagagctgataagtatgctgaatttattggtatagatcgcacaatggcatacaaacagatgaaagacgcagcagattatttttcttccaatataaaattaatatctctttgtgattatataaaaaatgaagggctgttaagagtagctctttctactgagacaataaattttatttctgctgtagatggtagaaaaaatcaaactacagttgtattgtatcagtctgctgtaaaactcagtggtcgatattcatggaatttatatcagttgataaaatctcggctgttagataaatccggtgcttttagcattaaactggatgaattaatgattgaattgaactctagagtaaatttggaatttaaagattataaaaaatcagttattggtcggtctatagacgaaattgtagaaaaaacagaaattaaaagtattaaatgcgttaatgctgagaggcagggtagaagagtcagcaaagtccgttttgagatcgaaatgaggtaa

SEQ ID NO: 86507 - DNA, 744 bp, Citrobacter koseri
atggcaagcgaaagggaacaggtgattaaagaagcaaaagctatttttgaaaaagatttcgttgtgctcgatacggagactacagggctagacgaaaatgcggagatagttgagatagcgatacttgataaagatggtaaagcattgctggatacattggtaaagccaaaaaataagatacctgctcaggcgagtgacatccacggcatcaccaatcgtgatgttaaagacgccccatcctgggtagatatttattctgtatttcgtgaggtaataaaaaacaaaacggtagtcatctataacagtaaatatgataaccgtattataaagcagacctgttcattgtatgggttgcctaatccaaggcgtaaaagtgaatgcgctatgttgctttacgcaaactacagaaacagcaccaacaattacacaggaaatgcaaaatggcataagctcacagaggctttggatcagtgtggaatccctaagtcagttgcacatcgtgcgcgaggggattgtgaaatgacgttgaatctcctgcgatttatggcagggggatatgatggcccatttgtagacacagacttaaacgatcagaaaaataaacgtaatagaattaatgaaaaaatcgtgagtcatgacgaggttaagacattataccatttgcttataggtatggtggttgctatattgggggttgcctttaaggcaaccttatcaattatcaaaggaattgcaaaaaaatga

SEQ ID NO: 86508 - DNA, 915 bp, Citrobacter koseri
atgaatgaacgtgaactttcccttatcagggctcttggagaggaattttcccttgcgcttggcgagcttcgtgagtctttcagaaaaagcctcagtgactatcagcagacaacggaagagcacctgaccaggctctctcttgaggttgcgtccctgaaggataccccggcacctgactttaccacgctgctggctgatgcagtggcatcccttccggttcctgagactcctgaattgccggatatcggcactatggtcagcgaggcggtggccgccatacccgcaccgcaggacggtaaaagcgtgacggtggatgagattctccctgttctggagaaactggtcagtaaggctgttggtgaaatacctgtgccgaaagacggcaaagactacgatccggcggtactcaggcaggccgttgacgatgccgtcagtgaagccgtagcggaaattcccgcgccggaaccgggcagacccggtgaagatggtcgcgatgcgcttgcgctggaattattgccttttattgatgagtcaaaaagttatccccgtggttcctatgccacccataacggcgggctctggcgggcctatgagaaaactcatggtatgcgtggctgggaatgcgtcgttgatggcgttgctggcgttgatgtcagcatggaggggatgcgtaacttcactgtcaccgttaaccgtgccagtggcgccagcgagaaaaaagctttcggtgtgccggttatggtgtaccggggcgtattcaaatcaggcgatgaatatctgcctggcgacacggttacgtggggcggatctctctggcactgtgacgaacagacacaggataagcctggtgaaacaggttctaaaggctggactctggccgccaaacgcggtcgtgacgggagggataaaacatga

SEQ ID NO: 86509 - DNA, 237 bp, Citrobacter koseri
atgggatatcgatattttgaactcactgaacttactccaatagaagatgagagagagttgcatgcgcaatttgttcatcaccttcaacatgttttgaaggcagagtttattcctggtactaaaggtaaaaatatagttattgaagaaaatgaagggaaatcaataccagagctatttggtggtcactgtgataaatttttgattctttatgatatagacgagtattttaagttctaa

SEQ ID NO: 86510 - DNA, 261 bp, Citrobacter koseri
atgagtgaagcaaacccacaggacggaagtaccgttaagggctaccgcgaactctcttacggtgaaatcggcaagatgaaccagttcaaagaaatcagccgtcagttcatcaagttgttacgtgagcaactggtggataccccaggtggcagccctgaaggttgggaatcccaggattggataagacaggccgaattcgacatgaaacgcgcatgtatggccgcttgtcgcgccgtggcgcgtcctgacgccgattgttag

SEQ ID NO: 86511 - DNA, 222 bp, Citrobacter koseri
atgcacatcaacagcggaaagatacccaaccgtaaacgttacgaacggtggttcgctgaaggaataccgctctttaacaatctgggaattagctctgcaaaccggaaatacattgcgcagcgcgatcgctccctgcgacatcaaggaaaggtgctacaggcgaggaaagacatacgccagcatagcgatcaaagcggagggcataacgatttgcagagctaa

SEQ ID NO: 86512 - DNA, 360 bp, Citrobacter koseri
atgtcagcatgtatggctgtagttcttaacggtaacaccgaaatcaaatatttcccgttccacgactcacgcagcgctgacgacgctgaagctatggcggacgagtggcgctatcaggctattgacgctatcggagctgaagagtcttcccgcttccacctgcgcgtagttcgcccaaaggtcgtttttcagcttccatcaggagctatggtggagtgtgacctcgatgatgtagacatcaacccgctagtctgcgccgatctggattatcacctttgcgcattcgggttcaatcgtggtcttggatatagcggtaactgggacttggacggcgctgaaatcatcgaatacatcgcataa

SEQ ID NO: 86513 - DNA, 831 bp, Citrobacter koseri
atgcaaataaccaaagaacgagtaaaaaactggcatgcatgtactgatggcttccgctggtttctggataaattcccgcagggcggcgcatacgcagatgtacatggtgcccttgttgcggataagcgtttcgatgatgcgcgctggctggtcgataagatgtactccacgttcctggacaatcccgagtttataaaaactgaaacggctgctaccgacaagatggttggcgaacttaccagcatggaattctctggcgaccaggtggatggggaaaacaacagcggttactacgcccgaatcggtagcagcggtgactccgcccaaatcggtagcagcggtgactccgcccaaatcggtagcagcggtgactccgcccgaatcggtagcagcggtgactccgcccaaatcggtagcagcggttactacgcccgaatcggtagcagcggtgactccgcccaaatcggtagcagcggtgactccgcccaaatcggtagcagcggtgactccgcccaaatcggtagcagcggtgactccgcccaaatcggtagcagcggtgactccgcccaaatcggtagcagcggtgactccgcccaaatcggtagcagcggtgactccgcccgaatcacggcatcaggaaagaattcagtagtggcatgtgctggcagtgtgcaccgcattgttcttggtgagggtggttgcgcagttgttccgtggcatgatggagagcgcactcgctttgcggtggcttatgttggtgaaaacggtattgaggctaacgtcccttactgcctgaatgatgaagggcagttcgtcagagttgaggagtga

SEQ ID NO: 86514 - DNA, 225 bp, Citrobacter koseri; identical to SEQ ID NO: 19405

SEQ ID NO: 86515 - DNA, 249 bp, Citrobacter koseri; identical to SEQ ID NO: 13648

SEQ ID NO: 86516 - DNA, 1428 bp, Citrobacter koseri; identical to SEQ ID NO: 13647

SEQ ID NO: 86517 - DNA, 237 bp, Citrobacter koseri; identical to SEQ ID NO: 13646

SEQ ID NO: 86518 - DNA, 780 bp, Citrobacter koseri
atgaagtccaaaattttagcggctaaaaaaaccgctctagccgttgcactcgcaaccggctttatcaccactaccaccgcccctgtgcaagctggtatccccgtcatcgacggcggcaacctggcccagaacatcatgacggccatcgagtcggtggcgcagacgctcaagcagattgagcagtaccagacccagttgcagcagtacgaaaatcagctccagaacacgatggccccagccgcgtatatctgggatcaggcgcagactacgatcaaccggctgattgccgcgcaaaacacgctggcctattacgagaaccagctaggcagcctggatcgttacctggccaagtttcaggacgtggcctattaccgcagctcgccatgcttcaacggcagcggcggatgcacgccggccgaaaaggcagcgatggaagagaaccgccgcctggcgtcagagtcgcaaaagaaggccaacgatgccctgttccagaccgttgccgaccagcaaaaggctttgaaggatgacgcccgtacccgggagcggctgcaaggcgcggcccagggtgcaactggccagctacaggccatcggctacgccaaccagctcgccagccagcaggccaatcagctcttgcagattcgcaccatgttgaccgcccaacacaacgcggaggcagcccggattgcagcagaactcgatgccgaggcgcgaggtgatgccagggccgagcaaatgcgtacctggacgtttcgcccgagtccggcagacaactactag

SEQ ID NO: 86519 - DNA, 189 bp, Citrobacter koseri; identical to SEQ ID NO: 13644

SEQ ID NO: 86520 - DNA, 882 bp, Citrobacter koseri; identical to SEQ ID NO: 13643

SEQ ID NO: 86521 - DNA, 828 bp, Citrobacter koseri; identical to SEQ ID NO: 13642

SEQ ID NO: 86522 - DNA, 222 bp, Citrobacter koseri; identical to SEQ ID NO: 13641

SEQ ID NO: 86523 - DNA, 1203 bp, Citrobacter koseri; identical to SEQ ID NO: 52387

SEQ ID NO: 86524 - DNA, 1068 bp, Citrobacter koseri
  misc_feature (592)..(599): n is a, c, g, or t
atgacatatattgctgctaaagttttaggaaacataggctttggtgagttttcgttattagctactaccattacgatagctttaggggtcggtactttcggtttcgaacatactctggttaagaaaataacagaaaatgttgaaagcgagcaacagtatgaatggttgtttgctggtatatcggtacgcttggcagtagctatttttttgctaatttgtggtcactttgtaataaataataaaacattctacataattttttgtatcgtttgtattttaaatgtgttgaatacctatgaatattacctaatatcccatatgcgtggtgaagtgatattctggggaaggatctgttcttacgcaataacgataattttcctgttttttgtttacttctccgatcatagccgttgggtgtattttgtgttcgtgttagagccgattatatatggctcgtggtgctatctaaatatgcatcgcggcagacgacaggcatattcattagcaagagctatttttgatgttaagaaaatacgcgagttattcaccactagcttcccattcatgctttcttcctttgcaataataatcnnnnnnnncgataaaataaactaccgaaaatttttcgatggcctatttttggcatctatggttgtcctgataccagcaagcattggaggtacgctggttataaaatatttctttggtgccgaatatcaacaatcaattcctctatttatcattttgatgctccaggttattcccgtctttatcgggattggccgggccaaggtactggttttggagaatctgcagagatatattcccttcttcgtcttttctggggttgcgctaaatgctttattgaatctagcgctcatacctcttatgggtactaaaggtgcggcaattgcgactgtgataagtcaattctcgactactttacttattccgttatttatacctcgcgtgcgggatatttccctgttaatgcttaaaagtattattacctgtggtttttctctactgcattcggtttatcaaaggtgtaagaataatgatagttaa

SEQ ID NO: 86525 - DNA, 333 bp, Citrobacter koseri
atggtcgaatccaacatgttcgagctggtagagctcattaaagccgccaagtgcgatccgtctgcaatgacagatgcgatctgggaggcaggttaccgtcagccgaaacgctccgccgaacaggcagcgcaaattaccatcgatacttttttctactgtgagagcttcagtatgcctacggaattctggccgcgcaattatgacagcgttctccagaatgaactgatgaaagcagttattggtgaggatggagagctggcctacgctaccgccagcgaaattgccaaaagcgttatcaacgctggattcagcaaggaggccaacaatgggtga

SEQ ID NO: 86526 - DNA, 171 bp, Citrobacter koseri
atgggtgaaatggtcgatttggatgatgaactggtgcgctcagttgtgaccgttaacgatggccgggactacaccgaccgcatcatctggaaaatgtgctcccggcgcaacatgcgcaacggagtgtctacgccattaccaccagccctcaggttgccgcggtacacgtag

SEQ ID NO: 86527 - DNA, 195 bp, Citrobacter koseri
atgagcagtgaagataatgtgttaggaaaaatagagagagtcgcaacaactcagaaaattgaagaggtgaatcaagctctttctaacgggtggatgataatcagaactagtgaagatgttattccattggatgatggtggtaagacgacctacatcacctatcaccttggcaagccaagaaaaataccgacctaa

SEQ ID NO: 86528 - DNA, 315 bp, Citrobacter koseri
gtggcgcatccatttatcaaaaatctggccgcgctgttcatccggctttttaccgttacccttatccagattgtcgcgctgctcatcgcttttatcatcgatgtatttctgatccatatcgcgcaactcttcttcgcgggcaatacgctcatccagcccttccagctcggttttagccttattccattcagtgcgctgctcatcagtccaggcgttatcgccgatcttttcattcagcgcacgcatttcggtcgcgatggtattgcgcttttgtttcatttcatgaagcttcatggatgtttccttatgcattaa

SEQ ID NO: 86529 - DNA, 273 bp, Citrobacter koseri
atgctgcggatttttatcagtatccaggctgttgcgctgctcctgctcgttttcgtcaacatagttttgatcctgacgacgcaactcttcttcacgggcaattcgctcatcgagcgcttccagctctgcctttgccttgttccattcggtgcgctgctcttcagtccacgcgttatcgccgattttttcattcagcgcgcgcatatcggtcgcaatggtattacgtttctgtttcagttcatgaagtttcatggatgtttccttatgcattaa

SEQ ID NO: 86530 - DNA, 159 bp, Citrobacter koseri; identical to SEQ ID NO: 77442

SEQ ID NO: 86531 - DNA, 168 bp, Citrobacter koseri
atgcagcatcagcaggacggccaaccgcgtcagttcacggccctgatgatatgcctcaatacgttcaagcagttcaggcagccgctccagtggcagggcaggatagtgccgtctgacaggaggtgtggtcacgccgccaagatttgctgccgggttcgtatcgattaa

SEQ ID NO: 86532 - DNA, 306 bp, Citrobacter koseri
gtggcgggcagtggcctgtttgttttcgcagccgcagaaaaagttattccggtgaccatcgcgctggcgaaagacaccccggagattcgtactgccgttaccgcagagcttaattctctgatgctgcgcgacggccagccatccgggaaggtttacgtatcgcgcatcagcgaagccatcagccttgcgactgacgaagtggcccaccagttgcgcgcgccgacggtcgatgttgtgctggggcagactgagctgccggtactcggggatatcacctgggagacctacacggaggcgactgaatag

SEQ ID NO: 86533 - DNA, 159 bp, Citrobacter koseri; identical to SEQ ID NO: 77442

SEQ ID NO: 86534 - DNA, 513 bp, Citrobacter koseri
atgcagaacaaagcatttttacacgttgatttcgagcagccgaaagagctggtgtttaaccgcgcgcgactccggcgggcgtttgtcaccattggtcaggtacatatgcgggatgcccgccgtctggtcatgcgtcggggacgctctgcacctggcgaaaacccggcataccgtacagggaaactggcccgctcaataggttattacgttcctcgcgcatccagacgacgcccaggtttgatggtgaagattgctcccaaccagaagaacggtgaggggaatcgccatatttccgatgccttttatccggcgtttctgttctatggcgtgcgccgtggcgcgaaacgtaaaaaaggccatcatcgcggtgcgtccggtggcagtggctggagaatcgccccacgcaataactatatggcggaggtgctggagcggcgccgcagctggacccgctatgtgctgtcgcgtgagctgcgcaggtccctgcgtccccagagaaggaaaaagaaatga

SEQ ID NO: 86535 - DNA, 306 bp, Citrobacter koseri
gtggcgggcagtggcctgtttgttttcgcagccgcagaaaaagttattccggtgaccattgcgctggcgaaagacaccccggagattcgtactgccgttaccgcagagcttaattctctgatgctgcgcgacggccagccatccgggaaggtttacgtatcgcgcatcagcgaagccatcagccttgcgactgacgaagtggcccaccagttgcgcgcgccgacggtcgatgttgtgctggggcagactgagctgccggtactcggggatatcacctgggagacctacacggaggcgactgaatag

SEQ ID NO: 86536 - DNA, 276 bp, Citrobacter koseri
atgagcggcttcattacatgcgcaccgggagtgcaaggcgatatttcagatacccccttgcgcccaaaagaacccgcgccacacaaggcttcctcaccagttgtccagaccatgacaaaaccgcatccgtggtttaaatgcgtggcactcgatggtaaatggcagttcgtctacgccgaccacatccgctttctgacgaaaaagcgtcatcgcgtcgatggtgttcgggtgcagggttataccgctggcgggctgaaagtggaggtgctgtcatga

SEQ ID NO: 86537 - DNA, 171 bp, Citrobacter koseri
atgcacaacgttaaggtgctcgatgctttcaatgcactgagcaaaattcaggcgctcgctgccgctgccgggtttctcacttccagcgaggaagaagaggaaatctgtttcaggctggttgatctgattgaaaagatcgcccgggaagcggtggaggccgacaatggataa

SEQ ID NO: 86538 - DNA, 951 bp, Citrobacter koseri
atgatttttattaaaaatggcgaaagttttgatcgcgtaaatgactggacagaaattcaagcccgagagagttaccatcccagattggaactaaaggatcagcaactttctgacgtatttggttattatgaagatctaccagaagaaattccttgtggtaaatccagctgtcgaacggggcataaaaaaggttttcttgtactgactgaagatggtctggaaacaaatctgggccatgtttgcggaactaaagtatttggcattgcttttgagaatctagctatcgatttagagaagaaagccaatttccacagataccttacagctctcaaagacgccaagaaaaatatattcactcattatcaatctaaagcaaaacttgaagccagcaaaccatcgttagaatgggtcgcacataaagtacttgatatgagagatcccaaaatcatcgggcgtgctgcatatcaggcattaaaaaaaatggctggctcaggtgacggcagagttattgtctctcgcaggaagtctaaagaagaagaagaccttcaggatgtaatgtctcaaaaaacggttagcgacgatgaaagtgggaaaagctctcaatcgtcaaaaccaaagttcaaggacgaagtgattgggattattcgcaacccagaatctctactcaatgattacaatatcgctttgatttttgaaagagatattcgcctagtgctagatgaactacaaagttgcaacccggatgaattgcccgagaaaaaggttatgtcattcggaataaaggtttttcgtttagaagagcgttttaagtttttagaagaacggtttgaaaaagctaaagtatttgtgagttctgaaaacctaaaaccactaagagaattactaagccaacaaaaatcagttagcaacaaagataaattacttttcaagaaattccttgattcgctatag

SEQ ID NO: 86539 - DNA, 657 bp, Citrobacter koseri
gtgacgctgctgacgctgagtatgccctggccctttctggccatcatttttccggtttgtctgtatgcctttcatctgatggcgcagcaggaccgtgtcatccttgtgacctcggatgaatgggacgggcgttgcacttctctccccccggcgatcatctgggtttatgccgctgctgcaggcattgtgctgctggcacccgtgccggcgatgacgcgtctgctgtcacttttcttctgcctttttctattccggatggcgcttaccgatgcgttgactggattgctgcctcgcgaaatgacggtgagctgcctgattgccggcctgaccgcggcgttcacgatgcacgggttagtggagcatctgctgtcagccaccgctgcgctggttattttcggtggctggcgatatgtcacgtcgaaacttcatggacgggaatgtctggggctcggagatgtctggctggccggggccatcggcgcatggctcagcattcattatatgctttatgcccttctgaccggcgtggtgctttttgttctctggcagttatcggttcgccgtaccactgaagggggcccgatgggaccctggctgggtgccggcgcgatgctggtgacactgctgaaactctatcatcctctcattacatggtga

SEQ ID NO: 86540 - DNA, 480 bp, Citrobacter koseri
atgctgcgccttctcgtctttctgctgctaattctgctcagcccccttgcgggggccttctgctttgatgcagccggcgcaaagtaccatgttgatcccctgctggttaaggcagttgccacgggggaaagcagcctgcggccggggattacgaatatcaatcgggataagaagaccggacgcgcgctcagcacggactacgggctgatgcagattaattcctcccatattccggcacttattgcccagggctatatccgcagcccgcaggatttgctgacccacccctgtctcaacgtgcagattggcacctggatactggcaaagcattttcaggtgtgcggtatcagctggaactgtctggggtcctacaacgccggttttcgtcaggatcgacatgaaacacgcgagtcctatgccaaccggatttatgccatctaccgcaggcttttactgaaagagcggggaataaaactgtga

SEQ ID NO: 86541 - DNA, 597 bp, Citrobacter koseri
atgtcatcacagacattaccgcatcacccgcgccagcctgaccggggctggggtattcttgaacacggcagtatcgcgttgtttacggttattgtcatctgcattgtcggggcgcttgtctggagtctttcaggcaaaaaatctgttgcggttgaagcctcaaatatccagacagttgtgacaaacgcccagcagctcaagcagacccagggggggtataactttaccagcagcacgaccatgaccggcacgcttatccagcaggggggcgcacccaaagctggctggacgattcagggcacggccagctccggtacggcgaccatgtggaacagctacggcgggcaggtcgtcatggcaccggtggccttcgacgggtttaacaacggcttttcagtcacttcgcagaaagtgccacaggcagactgtatctccattgtcacccagctcggttccggcggcgcgttcagtgccatcagcatcaacagcaccgcatacagtgacggcgttgtcagtgcggaggaggcgggtcagagctgcacctcagacacaggcatgacgggtaataacacgcttgttttcacccataacggatga

SEQ ID NO: 86542 - DNA, 1116 bp, Citrobacter koseri
atgtcggttaagacacgtttttctcctgagcgtgatatgtcgctggcggaaaagctgcggtatcgcctggtcagggccacctttaccggccagtaccgccagccgttttacgaaaccctgcgcttcctgctggaaaaccgcaaaccgctgaaagaggcgctgaccctgataggtgaggtgcataccgactttggccagcgatggcacccttatcatgaactggttcaggactgtcttgaaggggtgaaagacaaccgtgaggggcgttccctgcaggatgtgctcggcgcctgggcgccttatgaagaggcggcgctcatcagcgccgggatggaaacaggcaatattcccggcgcgctgatgcaggctgacaaactgattgtcgcccgccggcgcattctcggtcaggtggtttttgcctcagtatttccggccgcgctggccctgctgagcacgggactgttgctggccaacaacctggcactggtgcccaccctgagcaaaatgtctgacccggcacgctggaccggcgcactggggctgatgaacgggggggcgcagtggaccgacaggtgggggctgactgccgcagtcatggcagcaggtctggtggtgctggcgttctggtcactgccccgctggtgcggccgcctgcgccgcctggcggattatctgctgccctggtcggtttacaaagacctgcagggggcagttttcctgatgaatatcggggccctgctgggtgccggcgtgcaggagcttaaagcgctgcaaatcctcaacggcttttccccgccctggctgcaggaacggattgaagcggcaatggagtgcatgagggatggtgactcgctgggccgggcgctgcgtaccagcgcttacgactttccgagccgggaggcggtgaactatctctcgctgctggacaaaggcaacagcgcagcatcactcatcacgaactatgccgaccgctggctggaacaggccctggcacgcgtggcacgccgcgcgaacgtcaccaaactcttttctctcgttctgattatgagtttcttcttactcattctgctgatggtgatgcagattcaggacatgaacaccttcaacatacattaa

SEQ ID NO: 86543 - DNA, 1575 bp, Citrobacter koseri
atgactcccgataaagacattatggattttgtgtttgccgaacggcatccgtccggtggcgtgacgctgcttatcgacggtaaccgccgaaaagaggcgtccatacagcgctgggtgatggatgttacccgcgagtatcctgcggcaaaaaccgagtttgtggcgctgagcgagctgaaccgccggcgcgatgtggcagaacgtcaggggctgagtctgtctcagagcgtcagcgaaagtgacctgaacagccgtgatatcagcgtgtcgcaggacagggtcatcagctatatgaggctgggcaatgagctcagtgcatctgacgttcatatggaaatcagcgctgaccgtaagatcagcatcgtccagttgcgtatccacggcgagctggaagtggtggatgaagtgaaagatgcggaggggatgacgctgtcctcaaccgcctatctttcgatgtgcgacgtgcgcgaacagtcattctttgccggtcgcgagcagtcagggcgcatcgatgcgaagtttgcccgccgtgccggtctgtatggcgcccgctatgaacaccgccccacgcccgacggccttatcgtggtcctgaggctcattcccgatgacggcgataacgttccttcgctgccgcagctgggttttctgccggagcagattaagctcatcatgcaaatcctgcgcctgccggaaggcatgacactgctgaccgggccgaccggttccgggaagagcgcgacgctgcgcgttttcagtgatatctggctgaaactgaccggcgggaaaaagcgcctgctgacgctggaaaacccaccggagggacgtatccccggtgccatccagacgccggtcatgcctgcagataactcgccggaggcaatcagccgcgcctggactaacgccaatgcctccgcgctgcgtctcgatccggatgccattctcaacggcgagatgcgtgacctgtactcccttatcgccgccatttacgccagtgaaaccggccacgcgctgttttccaccctgcacacgcagagccccattggctccctgcgtcgtatggagcacttcggtattgaccgccaccttctggcggatgctgcactcatcaccggcctgataggccagcgtctggtgccgctgctgtgcgaacactgccgggtgccgtgggagaaaaaagccccggcgctggacaacgacacgcgcgtacgtctggaaaaatactgcaccgttgaaggcgtctgtacgcccgataaactctttttccgcaatccggagggctgtgaacactgctgcaggacggtgccgatgaccggtcgcatcgtcagccgcggcgtgaccgggcgcacggccattgccgaagtggtccggaccgatgcccgcctgatgcagttatggctttcacacggcccggccgttgcccgtcagtactgggtaaaccagggcggcatcacccgccgcatgcacctgctgcgttatctcgcggaggggcgcgttgacccgctggaaggcgatcttatctgtccgctggacgaggacgacattatgaagtgtgaggtgccgcatgtcggttaa

SEQ ID NO: 86544 - DNA, 495 bp, Citrobacter koseri
atgcgcagaactaatcccaccccgtcgggactgctgctgtccgttctgctctgcggacctgtgctggcggccacgacaggcgatgctctgccgccgaacgtcacgctcggggagctggaggccgcacaggcccgtaacctgattctggagcagaaggtgcagacggcccgtctggagcaacagcttcgcgaaagtcagtccggtcagagtaccgaccgtaattatctggcgacttcccttcagccgtcagcgcccgtaatgacgcagcctgtccagtcagcgcagaccgccgccacttctgagaaacgtgccggcagcgtacgccttcaggagatttatggtcgtgacaaacagctgcgcgcacgcatcgtgctgccggatggcggtgtgacggaggtggtgaaaggcgatcagatccccggcacctcaaaacgcgtcaccgaggtcacgtccaccctcgtgcgtcttagcgacaattctgaactctccttctga

SEQ ID NO: 86545 - DNA, 1281 bp, Citrobacter koseri
atgtcttccatgaaaaaaacagcacgtcgcaccggcatccgcatcacgcatcagcggcgtgactggatggccggtctcctctgggaaccactgcggggagcccttaccacacggctgcggggcaaaacctcaccggacacgcattatgttgttgccggcaggcggagctcggcgatggctggcgttgtttccccggggcgcgtagcccgcagcctttactcgcttgctgtggcgttccagctgtctgaaggcggtaatgcctgggggatttaccgcctcagccgtgatgaagatctgtgggtgttttttgccgccagtgggggtcagctctccgtgatgggcgatgtcaccggctcacgggcggccattgaaatggcagcacagaactttctgcgtttcaacgatgccgatgcaccgggcctgcgttgtgcggcaactgcggatgacagccgtgatgcctcatcgctgactgacaggctgagccgtgctcagctgaaacgctgtcgcctgcgtaaacgcctgacgccgttgtcactcctgttgtctgctgccctcatcaccactgcggtggcatcaggcgcttactggtatgacgccgtgcaacagaaggctgagcaggcggctgccgctgcggcgtttcgtgcccgcatggctctgacaccggaaaaaccagtggccccggcccgtggacctcacccgtgggcctcacagcctccggtgtcggtgctgctcagcaactgctggctgacgcgggagccggtcttcgcctcggtggccggctggcgttttactgacggtgagtgtgtaacggaaggactgcggctgcgttttgtagccacaccgggttcaacagttgaagacttctcccgccgtgcccgcgaactgctgggccattcggccgttttcaacctgcaggaagggggtaaaaacggtgatgttttcattccctttcgtaaatacagcgtcagtgagtacaccgatgaggcgctgcccggggcggatgcgcagctgatgcgttttatctctcatcttcagcgccgcaacctggacgtgaaattcaccgaggtgaagccgcccgctgtcgcaccgggccaggagaaaaccacgcccgtgcaggactggcgggaatttacgttttccgtcagttcgcgcctgcagcctgagcgcctgctgcagaattttgatgcaacagggcttcgtctgaccagcgtgtccatcaccatgaatccgcaggggcgattcgactacaccatgaaggggagcatttatgcgcagaactaa

SEQ ID NO: 86546 - DNA, 444 bp, Citrobacter koseri
atgggctatgcgctgccagtatttgccttctgcctggtcatcgctctgatggccggcgatgcacagcgacactcatctgaacacgttcgtctggctctgcaacagaccctgcctgacaggctggccactgacatgctgcgctctgcagatgtgctgaataactggcggcacgggcggacggtggctgacggcacggtgtcagctgcgcaggccggcatcgtccccgcgccggacagtcgtattcagactgtgattcagggcggacgcctctgggtctgggtgcctgcaaccgacggtgtgtttgccgctctgcgtgcgcagtccgtgacgtcagcactggtgctgaccgtcagcggcggccgtctgcggatggccgacggcacggatatgaaccttcctctgccgtccggcatagcggagggcagcattgtttatctcaactaa

SEQ ID NO: 86547 - DNA, 1233 bp, Citrobacter koseri
atggctggctgcagcaatacggcctctgacaccgtgtcattaccgaccggccgctatcagcagcccgcccgctttgatgatatttaccgcaaccgtgcgcccgaagtggtgcgctatgaccgttacacgctggtcagcactcacccggatgatgctcagcgtgacccgctcaatcagattgtcgatatcaccatgccggtacagctggtgaatactgtcggtgaaggattccgctatctgctgctggaatccggttattcactgtgttcagccacgtcttccgcattttcggaactcctcagccggccattgccggccgttcagcgggatatcggcccggtcaggctcagcgaagccctgcagattgtggccggccccgcctggagactgaaggtggatgaggttaaccgggaaatctgctttgaattgcgcgaccagtttcgcagcttctccgcgcccttgcgggttccgatcaccccgacgccacagggtgcttcagtaagtcgcccgattgtgactcagcctgttcagcccgcaacggcgaccggcacaggcaatactgctccacgtaatccctttaccggtgaaaccctcagcgtcagcgtcagcgccccggccaccgggcaaaaaccggtactcacgccgcagagtctggctgttccgtctccggtgctgacgacggcgaacgcgccggcagcgcagaagtcccccgctacggctccggtcaaaagcataccggtgtcatcacctgctccggctccgaaagcgtcctcacctcagaacccccctgtttccgcagttcgcccggcggctgtacatcagactacagtgaatgccccccctcagccggcacctgcccgccctgtgacgacgctgccgccggctccgcccgtcagcagccagacttcatcttcttatatgccgggagcaccggtcagtgcacttcctgttggccagacgtggcgcgcagagcctggctccacgctgaaggaaacgctgaccggctgggcctcaaaggcaacgtgcagcaacggcgggaactgggttgtcatctggccggtgtcgctggattaccgtattgatgcgcccctggtgtttcacggcaacttcgaatccgtcctggtacaggtctttgacctctaccgcagagcggaaaaaccgctgtttgccgaagctaaccgcattcagtgcctgatttccgtgagtgatacgcctgctggcgggaaccactga

SEQ ID NO: 86548 - DNA, 432 bp, Citrobacter koseri
atgaacacacgttacgaagctgacattgttgcctgggctcaggagcaggcagctttactccgtgccggtcggttctctgagattgatattgctaatatcgccgaggagatagaagacgtgggcaaaagcgaaaagcgggagctggccagtcgtatggccgttctgctggcgcatcttctcaaatggaagtttcagccgggccgccgtggctcaagctggcagcgaaccatcaaagaacaaagaaaagcactggcactccatattaaaggcacacccagtcttaaaaccgcgcttgctgatgctgactggattgcggcagtctgggccgatgcggtgtcttctgcagcacaggaaacacagctggatgtttttcctgaggattgcatctgggatatgggacagattttgtcgcaggaattttacccggaataa

SEQ ID NO: 86549 - DNA, 549 bp, Citrobacter koseri
atgtccgcacgcggcgttaacaaagtcattcttgtcggtaacttaggccaggatcccgaagtacgctatacgccaaatggtaaagctgtgaccggattaagtctggccacatcagaatcatggcgtgataaacagaccggtgaaaaccgtgaaaataccgaatggcatcgtgtcgtgctgtttggcaaactggctgaggtcgccggtgaatacctgcgtaagggttcacaggtatatatcgaaggtcagttgcgcacccgcaagtggacggataacagtggtactgaccgctggacaaccgaaatcgttgtgggcgttaacggaacgatgcagatgctgggcggtagtcgtaacaacagcaccaacaccagtggaaataatgcgccgtcaggtcagcagagtggctggggtcagcctcagcaacctcagcagagccagtcagcgccacgaaatccgcagaatgagccaccgatggattttgacgatgacataccgtttctggggcacgggtatggcatctgtcggaaagccatttacgcaatttcttaa

SEQ ID NO: 86550 - DNA, 495 bp, Citrobacter koseri
atgactgcaactacgactcaaacctctgcttcaaacggctctgcttctggtactcagaaaaaagagtttttcaaccttaacgtcagtggtatcggttatctcaacacgatacgccgtgtacagggtggtaacggtgagttcacctgcgctgttatcaatgccctcaccggtccgacggacaatgcgtcttacacccgtttcgatgtcaccatctcgggagcggacaccaccaaacttatcaaccgctgtcagaaagccgttgatgaagaagaaaaagtgctgattggcttcgtgctgagcggactgaaagccgatgtgtttaccctgcagacgggtgatcacgccggtgaaagccgcccttccctgaaggcccgcctgattaaggtggagttcatcaagaaaggccaggacgtggtttatcaggcacccaacgcctcccagacgccggattccggttcatctgctccgaaagagtacgatccgaactcattttaa

SEQ ID NO: 86551 - DNA, 2013 bp, Citrobacter koseri
atgcggctttatatctgtgaaaaaccttcccaggggcgtgatcttgccggggttctcggtgccacccgacgcggtgacggctttctggcaggtggtggcgtcactgtcacctgggcagtggggcacctgctggaaaccgccccgccggaagcctacggtcagcagtacggtaaaccctggtcgctctctgcgctgcccatactgccggcaccctggcaggttgttgtcaaaaaagagacgcaggatcagtttaaagtcatcgagcggcttctgcgtcaggttgatgacgtggtcattgccactgatgctgaccgtgagggtgaggtcattgcgcgcgagctgctggattactgccgctgggaaggcccggtacagcggctctggctgtctgcgctggatgaactcagcatccgggcagccctgcaggacctccgccccggtcaggccacactcggaatgtatcacgccggactggggcgcgcccgggccgactggctgataggtatgaacctctcccgcctttataccctgcgtgccgccgaggccggcttcgacggcgtgatttcggtcggccgcgtgcagacgcctaccctggcgctggttgtccgccgggaccgggaaatcgccgctttcgtaccaaagccttactggcaggtgaaagcgctcatttcggccggcggcctcacctttccggcgcagtgggtgccggcgaaggtgtataccgatgaggaaaagcgctgtgttcaccagaacatcgcgcagcaggtggcacagctctgccggcagaccggtcacgccgtggtgacagaatgcgacacaaagcgcgaaaaagccgccgcgccgctggcgttttctctggggtccctgcagcaggcctgtggcaggttgtgggatatgtctccgcagcaggtgctcgataccgcgcagagcctgtatgaaaagcacaaggccaccacctacccccgcaccgacagcggttacctgcccgaatccatgcgggaggagattaccggtgtgctggatgccatcggccgcaccgacccggaatgtgcgccggtactggcacgcctcgacagggcatttacctcgcgcatctggaacgacaaaaaaatcacggcacaccacggtatcatcccgacccgcaacgcgtttcagttgtccgcgctgacggagaccgagcgtaacgtctatctgcttatccggcgtaactatctggcccagttcctccccctgcatgaatctgacattacccggctgcagttcgacatcggcgggcagctgttccgtaccaccgggcgcacggaggtgataaagggctggaaggtcctgtttgacaaatccggtgacgatgaggcacaggaggaggatgaagcaggcgttgccctgccgccgctggcgcagaatgaccggtgcgcggtaaccggtgcagaggtcacgcagctgatgacccgcccgccggcgcactatacctttgccaccctgattggtgccatgatgaacgctgcggcttttgtcaccgacatcgcgctgcgtaaggtgctgaaagacaatgcgggcttgggcactgaagccacccgtgccggcatcgttgaacaactgctgaaccgtcactttatcgtgcgtaaaggcagcaaaatcatggcgaccgaactgggcgcggatgtgattgatgccctgccgccccagttgactgaaccaggcatgacagcgctgtgggaacaggcgctggatgaagtcgcagccggtcgcatgtccctggacgacttcctgcagcggcaggccggctggacgcgcaacctggtcagccagggcgcacagctgcaggtccgtatccgtgttccgcccacgccagcctgccctctttgcggcggtaagacccgtctgcgcaggggagaaaaaggggaattctggagctgccagcgttatccggcgtgcaaaggcgtcatcaacatcgggagcagcaaaaagaaacggccgcgcagggctaagtctcctgaatcaaagaagaattaa

SEQ ID NO: 86552 - DNA, 720 bp, Citrobacter koseri
atggcagaaaagcaaaaacgggccggtgcgctccagtccgaacttcatattgaactccataccaattatgcgatcggtttatgggaaggtagaaaagctgaaaagcgggaggacggtaaaaagggaaagcaacccattatgggaatgccccagttcctttaccgtgccaccctcattaacaaagactcacttcagaatgatccctgggcagatatggccatgctggccctggaggaaaaaattgagtatgccggcaaagaaatgaatacgctgattgaaacgctggacaggcagatgaacttcattccggccggtgtgaccatcagcgatgcccaggccgctgaaccactggacctgaccgtgttcagtggtactccgctggggtatcgctgcgtgtttctgctgatggggtttgatcagtttgctaaaagagttcttcaggcagcgcactatggggttatttcccgtacccatcgctatgatcttctcagtgatggcagccgccttctgcgggaaatttacggatgcgtactcagttatcgtaaaaccggcgcaacccgtctggatgcggttgagaataatgaagtctggcagaaagcctgtcaggaggcgggggagcccgatcgtgccgttctgctcggagaaaagcgctcagcattttcgcctcctgttaatgaagcgagcgtgaacctgctgcgcctgcgatatcaggcagtctga

SEQ ID NO: 86553 - DNA, 1233 bp, Citrobacter koseri
atgaccattccggccgacagcattgtggcgcacacgctcaccagaatgcagcagaatcttgagcggcgcgtcgattccggcgatgtcagccaggagcgaagtggcctgctgtttatggggaacatccacgatgcgtttccgcgcaggttgtttctggatacgcgcctgtcaccactggataaaaccgcctgggtgatgataaggctttacgcgcagcagaatgagggtgccatcttcccgacttacgatgagctgcaggttcagcttgcctccgcgcactcagagaaagcctccagggatacggtgagccgcgttctgctgatgctgcgcctgaccggctggctcagccagtgtaagcgggtacgcgatgaccgtggccgcgtccggggcaacatctacgcccagcatgatgaaccgctgggttaccgtgacgctgaaacctttgacccgggctggctgacccttgttgaagagagctgcatgagccgaaataaagcggtccgcatgaccgcgctggccgtagtgaatgacatccttcaggacccgggaatgcgtcaccgtcacagtcgcctggcccttatcgaaagtcgcctgagcgagccgtccacgcctgagcagatggtccgtcatcggcagtctgtgacccgcagtccggattccggactcagccagaaaaacataaaaaacaccccggattcactgagtccggaaaacggactcagtaccccgtcaccggataaaacactgagtccggaatcaggactcagtctgaaatcaacgagttacaccggagtccgaaatccggactgtaacgtacgttctttcacacagagtgtgaataaaaaaacgtacgtaccgggtggagaacattttctgcctgacgattttgtaaacgggctgaacagcgaggaccgtcagatgctgacaacccagatggcctcactgcctgaaacggtagcgaaaacgctggctgacatgctgcgcgagcaactgcggcttggcaggctcaataacccggtgggctggctgttcacgatgctgcgtcgtgcccgcagcggagagctgaatctgccggaggccgcggcacctgctggttccggcagaaacaatccccggacaaccgacacacgtgctgtaccggcagccaccctgcctgttcagcctgcgaaccggccttctgcggaagaggtcagggcgatgatcgcgagcattcgactgagtgttgccaaataa

SEQ ID NO: 86554 - DNA, 231 bp, Citrobacter koseri
atggaaatgggtgatttttcttcccgccagcaggtgtcaccggcagtgcgccgccgcgcgcagcggctgtttcgggctgcatgtggcggacagaaggtgttccgccgactcaccatgaacggctacctcaagatagacgtgggaccgttctggcgcattctcagtaaggatggtggccggcagtggtggctgatggaccatgagacctataaccgtgaaatacgccggtaa

SEQ ID NO: 86555 - DNA, 600 bp, Citrobacter koseri
gtgagccagcataatctttctcaggccaccacggccattctgtcctcactgctgatggacgtcaaaaacggcaatatccgccgttgtgagtcgctgggtatgtcggttgaggaaatccgcgcgctgagccatctgagtcttgatgaactgcactacctcagccagtcacacgtttccgtgctcgatgtcaccctgaatcatgaaaacttctggctgatgctcaatcaggcccgcaatgagcagaagcgcttcatgatgattgaccgcgcactggagctcggcggctcgatggagctgattgaccggtactttggtctgtctccctcggaagtgagtgcacgccgccgtctgatgggcattgagtcccggcagggacgaactcaggccctgacagagccgcaggatgcggcgctctgggccgagtggaaggcggccggtctgtcatcacccgactcccatcaggcgctggaggcgatgatgctggcggccgagcaactgggtctttccctgacggccgtatggagccgggtctgccagtggtgtcgtgaggcaaatgctgcctcacgcagggctgaacctccggtacgcaaggaggcgtga

SEQ ID NO: 86556 - DNA, 744 bp, Citrobacter koseri
atgtcggataacgcaaaaattaccgcccgtatccggcgcctgatggcgctgggcacccgcaacagcaacccgcatgaagccgcccgcgcggtggcactggctcagcgcctgatgcaacgtcacggcctgacgccggacatgctttccctcagtgacgtcactgaaacagtctgcctcagcctgaccagtgatgcggaaaaggtgccggcctggcttaactcgctggcaacaggggtctgtatcgccacggggtgccgatgctggtttggctggcatgttcatgtcagtacacagggggtggaaagcgtgcgccgttcactgcacttttatggtttcagcgaacggccggaggtggcgctctacatctataccgttctccagcgccagctgcgcgcagcgactgacgagcacatggccggatatcgtacccgccgcattcttctgcgcacacgccgtcgccgggcagaccagttccgtgaaggctgggtatccggcgtctggcaggtgctgcagtcgttcgcgccgtcagagggagagaacgccgtactgcagctctggctgtctctgcgtcatgaaggtaatacgctggccggtctgactgtccgggaggcgggtcactgtcgcggtgacagagcggcccgagtggccggttttctcaccggtcgtgatatcgacctgcatcatggcctcagtggcgcacaggctacccggcagataacggcgggagggcatgcacatgactga

SEQ ID NO: 86557 - DNA, 258 bp, Citrobacter koseri
atgtctgatgacctgaacgatgaaatggcgcaggccagtacggccctgttcacccagcgtggcatcgatgccatccgggcacaggtgcattctgtaaaaccgtcaaaagcgttctgcgaatgctgcggtgcagatattccggttgcccgccagcgggcggttcccggcgtggaactctgtgccggctgccaggacgtgaaagagcggcagggccgtcaccgtgcttctggcggaaggaggatgcgccatgtcggataa

SEQ ID NO: 86558 - DNA, 1725 bp, Citrobacter koseri
atgagcaacgtaaacaacgtgcgtcacattaatctcggtgcggccatgctgcagcggggtaagtcaccgtctcagaccgcggagaccccggaggtgccactgccggtcagcgagatggcaatggtgctcactctcgaccagctgcgcccgaatcctgacaacccccgtaaaggccgcaatccgcgttatgaggaaatcaaagcctccgtgcgtgcacgcgggctggactccatcccaaaagtgacacgcgatccggacggcgaagacgtctatatcttcagtgacggcggcaatacccggtatcagatcctttgcgaattgtggcaggaaaccggcgatgagcgtttttatcgggttcacaccatttttaaaccgtggcccgggcggcttaaatgtcttgtcggccacctggcagaaaatgaggtcaggggagacctgagttatatcgagaaggcctttggcgttcataaggcccgcgtcatttatgaagagcaacttggtcggtctgtgaccctccgggagctttctgatctgctcggccaggaaggctatcccattgataattccagtgtgagccggatggaggatacgcttaattatctgtatccctatatgccaaaccttcttgaaaatggtatgagccgcggtcaggtaacaccgctcctgagccttcgctcctcagccatgaaagtttggaaatcgttcagcagtgacgtcaaacctgactgcgcacttgatgatgtctttggtgcaacgtgccggtgttttgacgagccggacagctatgctcttgatgttttcagggatgagttcatcggccagctggttaaggcgctgccccattcaagcctgaactatgaccgctggctgattgaactggacccccgtgagcagaaacgccgtgagcagtttggtgatccaccgccactgccggctatgacgccaccgccggaaagagcggcaggccgtcaattttctgagcaacaggttactgttctgcctccggatactgcatctgaaacgccgttcacaggtctgcgcagcggtacgctgaccacgcaggggcggcctgaacccgccccggaactgcctgacagtgcccttctgccggacagcccatttgttactgccggcagtgaaccgcgtcgtgaggttcagaatgacctgtttggcggacgtccggttattaccggagagagtggcatctctgctggcagtgctgagagcattgttctgcctgattttgggaacagtgagctcgtttcggcattcggtgagcaggatgaatcctcgtctgctggcgtgaactcagttgccttcgcggcaaccggccttgagccggtcagcgatatctggcacatcccggcactccaggatgatattgagcacctgcaggatatggcctaccggcttgtcttcgaaatcgctgaggcgatgggctgcgcggataatgtgcgtgaggataaacaccctcagtcagctggcttttccgtttctgaaaccggcagtgaattctcgttgtttcttgccggtctgtccggctcgctccccaacagacagttcaacatgttcatgttctgcctgaatttcttcggctctcagtcaccggctgacacagctgtattcgacgatatcaccgtggtgaagaccctgcgtcttatccgcgttatccgccgtctgcgcgagctgcagcgacaggctgcaaaaggaggggacaatgtctga

SEQ ID NO: 86559 - DNA, 1365 bp, Citrobacter koseri
atgtctgacaaccgcagaaatatccctggtctgatttcacctgatgctgagcagtgcgttatcggcggtctcatgctcgataacgatcgctgggatgaagtcgcacttcgtctcagtgctgatgatttttacctcaaagtacacaaagtcatctttcaggaaatgacccgtctggttgctgccggcaaaccgcttgacctcatcacactcgccgaaagtatcgaacgtcgcggcaaagaagcgcttgaacaactggggggattcgcctacctggccgacttatccaaaaatacgccgagtgcggccaatattgtcgcttactgtgacattgtggccagaaacagtcgggcgcggcagctggctgctattggcgctgagataacggaatcagtcagggcacccggcactgttatcgaaagtgtaatggagactgccgagcagaaaattacccgactggcggagcgtggtgaaccggaacagggtgtgacactgcttgatggtatggaaaagctgctgccagagctggagcggcgctgtaatgtgcctgacggtatcaccggaacccctaccggatttgacgagtttgacgccatgaccagcggtctccaggcgggcgatctggttcttatcgcggcccgaccctcaatgggtaaaacggctttgctgataagcattttactcaactcacttcagaaaaaagtgggttcaaaggggcagttttatagcatggagcagcccactgatcagatcctgatgcgtatgctcgcttcgcttggcagcgttgacctcacgcatttaaagagcggcctcatggacgatgaggactgggctcgaacctcaaacgcggcagcattgctgatgggggacctgaacgacagtcttattattgatgataccagctaccttaccccctcattactgcgtatccgtgcacggcgtaatgcccgccgctatggtcatccgtcgatcatcgggcttgattacctgcaactgatgcgctgcccggatcaggaaaaccgcactcaggagattgctgaaatctcacgttcccttaaagcgctggccaaagagatgggatgtccggtagtggcgctgtcacagctgaaccgccaactggaaagccgtgctgataaacgccccaataacggtgatttacgtgattcggggtcacttgagcaggatgctgacgttattgtctttatctatcgtgatgaggtttatcacgaaaataccgaggataaaggtgttgctgaaatcatcatcagcaaacagcggcagggacccacagggacgatccgcctgcggtatgaaggccgccacacccgtttttctgatatcgcggatcggtcagggaggtacgcatga

SEQ ID NO: 86560 - DNA, 423 bp, Citrobacter koseri
atgaatacacatgcacacctgccgtccagcggcgcacatgctcaactgccgtccggcattgatttggtttataacgatgacgtttttgacaatctgagcaaacgtttctgggaagaagcgaagaaagccccgaaagaagaacgtcagatggtctatcgtctgttgtggttgggggagtggctcagcaaaagcaaccagtggaaacagcaattccgaaactgctcgccgaaagatgccctgcactatgcagtaatccgtcgccatcacctgcttcctgcagatgtgtccaaaatgtcctgggccgaactgtcccttgctcttacagatgactggaccgacttcgccggtctgaagcaattgcaaacccgcatcgagagaaaactcgactggctggatacgccttttcgctttgaggctgcgtga

SEQ ID NO: 86561 - DNA, 885 bp, Citrobacter koseri
atgcattcaaaaacgaaagttgtccccgtagtttctaccaaaggtggcgaggggaaatcaacccaggccgctaatctcggcggttttctcgccgatgcaggcataaaaaccctcattattgacggcgaccacgcccagcctactgccagcagtatctatcccctagcatacgaagcaccatgtggcctctatgaactgctcatgcagaccgtagacctctcaaaggccgaaaacattatttcgcgcaccgagatcgataatcttgacgtcatcgtctccaatgatccccgcaaccttttacctacctatatgctcaatgttgctgacggacgcgtgcgtctccgcaatgccttatcaaacccggtcttcagtcagtatgacgtcatcctgattgattcacagggttcacgctcggtgatgtcggaactgattattcttgcagctaccggtgaaatgattggaatggtcaagccggtgctgcctgatgtacgtgaatttatgcgcggcaccgttgctctgatggaagagctgctcccgtacatggcttttggtatcagtcttccacgcatacgtatgctggtgaactgcatggattatacgctgcttgccaaaactacggttgaacaagctgagagcatcatactgagcggtgattacagccagcatgcgaataagatcgtcatcgatatgctccagacacgcatttatgatctggatgtttacaagcaggggcatgcggccggtcagcccgtgcaccgccttgagaagaaaaccagccgtaaaagtgattctgcgtttgattctatgcacaaactcgcctgtgaacttttccctgaatggaaagagaagtttgatgcattagcaaacgctggtgagggggaataa

SEQ ID NO: 86562 - DNA, 267 bp, Citrobacter koseri
atgcgcatacgggtgaagtgggtgataaacgactgcggtagtcaggattttgtgacgttcctcggtaacagggcctccagcctgacagatatgggctcctatggtgggtctcagaattgggcacttgagttgcaaaagccgggacataaagttcggtggatacaatggaagtttgttaaagcgtttatcacgagcaatgaaaatgacgtgatggatgtcgatgcatggcaggggagatgctgcaactgcgcagggaagggatggtga

SEQ ID NO: 86563 - DNA, 195 bp, Citrobacter koseri
atggcaggggagatgctgcaactgcgcagggaagggatggtgaaccgacatattcaacacactgacggagacagcctgctgttctggtttaccgcagcgatgacgtgcagggggccccctggagtcattccatcagaacctggtcttgctcatttacctcccgccggtttatcaaacagtctgtttgtgtcgtaa

SEQ ID NO: 86564 - DNA, 969 bp, Citrobacter koseri
atgagtcagccaaatccactttgtgtgggcattgatgtttccaaagctacactggacatcgctgccagcagtgatattgctcagtttacagtcagcaatgactctgacggctttgacgcggttattaccgggctgagacggcactccgttgctctggttctgatggaggccactggtggactggaggtcgctgtggcctgttcacttcaggccgaaggttttgaggttgccgtggtcaaccccaggcaggcccgtgacttcgcccgtgcaatgggatatcttgcgaagactgaccgaattgatgccagagtcctcgcgcagatggccgaggtcattaatcatcacccggagcggaaacgctttatcagggcactgccggatgctgaacgtcaggcccttgctgcgatggtggttcgcagacgccagttgattgcgatgttgatggctgagcgtaaccgactgcatccatcccatccgcagaacaagaaaagcattaataccatcattaaagcgctggaagatgagcttgtcaggctcgagaaagaaatggacagtcacatccgtaaccactttaaagagattgctgagcgcctgagcagtattaaaggtgtgggcaccatgaccgtttccgcgctgttggcggagattccagaactgggaacgctctcccggcgcgaaatcagtgcgcttataggtgttgctcctgtcaaccgggactcagggactatgcgtggccgacgaaccatttttggcggcagggctggcgtaagatctgcactgtacatggctgcgcttgtggcaacccgctttaatccggtgataaaaacgttttatgtgcgcctgcttgcagccggaaaggccaaaaaagtggcgctggtagcctgtatgcgaaagctgcttactatcctgaacgcaatgctcagaaagaacgaagaatgggatgagtcgtatcaccacgttgctccatga

SEQ ID NO: 86565 - DNA, 342 bp, Citrobacter koseri
atgctgaaaaaacgatggaaaattgaagagaaaaaacaccatgtcgccgcctggcgcgccagtggccttacccggcagcaatatgccgaactgcacgatattcccttcactgcgatgcgagaatggccccaggaagtcgcaaagggcgaacgcaggaaaaatgagtcaggtttgcttcccgtacatatctccacggacttacctgctgaaaatctgccacaggtagttaacgatcccattatgttgtttttacccgggggtatccgtatgagctgccattccacccaactcaccgatgtcttcagggcgctcaaacatgctaacaaaactgccgcgcattga

SEQ ID NO: 86566 - DNA, 528 bp, Citrobacter koseri
atgcgatgtaaatacctcgatccgccagatccggtacgatgtgacagggcggtctgtcacatattcaggctcagtacatacctggattatctgttggcgttcttcagcgctaagatggttggccggcgcgggacgtatcgcatcatggcggcgatcgcggttcaccacaccgccccgacgccagcgttgcagggtgcgaagcgtaatcccagcaacttcacaggcccggtgctgccttgcaccactaagtactgcagtttcaatcagagatactgtttcaagccgctccgggtaaaggcgccgccagttgaacaggagattgtcgttaatgttattttcgcgggcaagctgtgccacgctgacgccaggctgcatcgactgctccaccatggcgattttgaagtcacgggggaaattaggccgacggggccgcttacgggcgacaggaatttcacaggggggccgggtcaggaagaacggacgattttcgggagtcctgacggtaaagtcgtttgtccagatttttag

SEQ ID NO: 86567 - DNA, 522 bp, Citrobacter koseri
atgaccaacaaacctattgatcctgaattaaaagagcgagccatcatgcatcttttgccaccctacaactggtctttgcgccaggtggctgacgatattggtgccggtgtatctaccgtgcatggctggcgtcagcaactggaaatggaggggcttatcgcgcaaaagcaagaccagactgatggtcgatcacctgagcaaattttttccatcctgctggaaactgccacgctgacggaacatgagctggcggaatactgccgtaagaacgggttgtatgcagagcaaatcagactgtggaaacaaaactgtctggcggcgaatatgcctcagcatcgccagttggctgaggtccagaaagctacccgtggagaaaaaacacgtatccgccagttggaaaaagaactccgtcgcaaggagaaggcgctggccgaggtcgcggcactgctggttttgcaggaaaggtataacttgtgggtctggcgtaagtaccgtgcgcttttgcccttccgcggtgcctga

SEQ ID NO: 86568 - DNA, 744 bp, Citrobacter koseri
atgcacaataacctgctggaacagatacgggccctgcgtctggggcatatgagtaacgcgctggaactgcaatggtcacagcccatgacctacacctcgctgagcttcgaggagcgtctggggctcctgctggagcacgaactgctgcagcgggaggtctcgaaggtcaatcgcctgcgacgacagtcgaagctgagtctggatgcgcagccttcacagcttgactaccggccggaacggggactgaaccggcagttgctggtacagctgctgaccggcgcttatgtccaccgtcatgaaaatgtgctgatcaccgggccaacagggtgcgggaaaacgtatgttgcctgtgccctgggtgagcaggcctgccagcagcatatccaggtggtgtactaccggctgacgcgactgcttgatgacctgaatatcggccatgccgacggaagttaccagaaacagctgctacagctgtcgaaaaaggagctgctgatccttgacaactggggtcttgaaaagctgaacacctggcagtcctcagacctgctggaagtgatggaagacagataccagcggggaagcaccatcatcatcagccagctaccggtgagtgaatggtacaaactggtgggtaacccgacggttgcagatgcgctgatggaccgccttctgcataacggacatcgtgttgagctcagaggagagtcaatgcgtaaactggcgcaaaccgatcagacgagttaa

SEQ ID NO: 86569 - DNA, 273 bp, Citrobacter koseri
atgaggaatgtgattcgtcgtctgtgcggacatttgtatcctgccccgtccgtaaaatgtcgcctgaaggctctggccggcaggctcctgcatgaccttgctgtgtactgtctgcaacttcagcgtcagttttgctggctgtggcgggtcatcatctcccgcaggcggcgtatggtgaattcccgggcgctgggaatgctcagcgtcaacggaatacgtctgtggttgttctgtgtattactggcgctgtggatactggtccgtgtttcctga

SEQ ID NO: 86570 - DNA, 174 bp, Citrobacter koseri
atgcgtaaaccggtatcccccgttcaggcgacgcgccggacatcacgtccttcctgttccttatggcgttcgcgtcctgtcagatcgctcagagcgcgacatcttgtgttgtgtacttttgccgctctggtggtggtgatgctgctgcgtatgctgatccggttcggaggatga

SEQ ID NO: 86571 - DNA, 474 bp, Citrobacter koseri
atgagtcctgggttactgagcgcaggggggggcgacctgaccttatacctgatggggggcttttttttactgaccatggtcgtgcatgtctgtgtgtccatcttccctctgagggcggagggaagatgtatttttcgccagtcacgggctgggattgcccgttggtttgccggtgaactctcaccgacactcagtctgttctggggactgttactcactgtggcgacaatgctgtcgggaataatcctgagcgctgttcccgggagagagtgggccatgctggcggggccgttaccgggtgttgcgatcactgttcctgttcttctgacaagcctgcgtcggctccgggggcatggactgaggaaaatctttttctcggcgctgaccagcctgctgttaatgctctttgccggtttgctattgcttctgatttccggggggggacgatggggactgctacttcagacaccctga

SEQ ID NO: 86572 - DNA, 501 bp, Citrobacter koseri
atgaaggtaatttgtttaaccgcagcagaggcggcatgtctcgtactagcatcatttgctgcggcccacgcagccgtcaatgaggatactgtatcgacagccagcacgccccttgcgttcgctgaactatctgcagtgtcccacacgctaaaggcgacgctggacgcattccccactccggtcaacgaaacggtagatttagcgctcggccgaatcaccggcccgcaaggtgcaacgctagcagctcgttggaccccgttaacccctacacagtggtcatccaattgcaacaaaggttacgtaacgggtaacacgacaggttacacaatggagttacatttgaccccaacagaagcacaaactttcaacctgtatgccggtgacggttggtgcactttcacactgaatccggcgaattacagcatcgctacaaatggcatgcagtacgttgcaccggacagttacacaatcagtgttgacgccggaatctggacgaattga

SEQ ID NO: 86573 - DNA, 513 bp, Citrobacter koseri
atgaaaccaattattagaaacgcagcgcaggtggctggtttcgtgttcactatcgttacggcggcacacgcgtcagttgacaatcaaaccgtcacaaccgctagcgacgcgctccagttcgtcgagcaggctacggtcagtcacactctgacccctacctccgacaagttggacaccacactcaccgaccgtactctgttggcgaacggtgcggtcggtaccggcagcgcacgtggattattggcaatccgatggacaccagatttcaccgggcagaccctgcagaacagcggtaacgtcgtcgacgtggtcggcgacaacggcggcaagatcacaatatttttcccgaccgacaactgggaatttatattgggcatcgacgggacgttctggtacagccccttgcacccgttggcgcgtacagccgagtacgaaattgaggcactaggagatcagacagtgataccgggcaggtacacaatcagtatggacgccggtatctggacggaatga

SEQ ID NO: 86574 - DNA, 489 bp, Citrobacter koseri
atgaagacatatatcagaaatacggcacaagtcacagtactcttgttaacagcaattaccgctgcacacgcatcggtcgacaacgccacggtaaccccagcctcggcggcgatctctttcgtcgcacagtcaacagtcacacacgatctgaaggtcgccgccgacattatagaccccaacctcaccggttcccaggtgttagcaacagggacagttaccccgtcgaatcccgcagacaccgtcgcgtggaggtggacacccgggttccccggccaggcggtacacccgatcccgttcgaagccacaatcacgggtgacagcggcggaactgtaaaccttgagatcaacagcggcggcaactcaggcggcgattggctcgtatcgacgaccagtggccagtccatctacactgtgattgctgacggtcaacagaccgtgacaccaggcagttacacaatcagtgttgacgccggtatctggacgaattga

SEQ ID NO: 86575 - DNA, 816 bp, Citrobacter koseri
atgtcatcacctgaacaggcaacatatattcagattctggatgcactgaaaaaacagctggagcttgatcagcaattattgatgaagctttcaaagaagccggatggggcgaccggaccacagcagcaaccttcagaggtagctgcacagcaagccgtaacctcgccggaaacggaggcagaaaagcaggcatatgccagtggtgtcaatctctggcgcgacatcagtaattcgcttgccatgcagcagtctctgggaatacatctggattcaaacctggtgctggcaggtttaacagacagttcgcagggaaacgtgctgagactcagcgaaccggagatatccgccgcaatgaatgctctaaaccaggactacatgagtcgcgatgcacttgcacgcgaacgacagattaagatgggggatgcctatcttgataatttccgtacagaaaaaggtgttttcagcgatgcgggaagctggtatcgcattatcagtgaaggtagtggaaaaaaactttctgcaaacgatctggtgcaaataaaaatcagcggcacattgccggatggtacggtctttgatggtgttggaaatcaggatgaggtccgcaggattaaggttaattcgctattgcctgcggtttctctcggcctgcaaaaagtggcgccgggagggcatataaaaattgtagttccaccggataaaggatacggagatgctggtcttccacctgctataccgggtggcgcgacacttatatttgacattcaggtacagagggtcttgcgggaaaaaggcagtgacttcgcaaaggagtga

SEQ ID NO: 86576 - DNA, 507 bp, Citrobacter koseri
atgattcgtaaaacaattaatgtagcaacagtaactgctattctggcagcaagcgcgggtacggcatttgcggatgttgattcgagcaccattaatgcgcagtcagtaacgctgaacttcggggcagcacagaaggtgcagcatactctgactgcggtttctaacctttccactacccttgcagataaggatgtattggcgaatggccaagttacagctaatgatggaaccagttctgaaacttttgctcttaaatattcaagcttagcatcaattgtcccggatagtacatatcaaaattatgccaccattaccggcgatcaagactcaacacataaacttaatgttctcttccacttcgataatgcaatacgtgaaggcgcaggatggtataaaacgtctgagccggtagctactttggcttatgaggttcttgctgacggggcgcaaaccgttccagtcgatacttatactgtttctatggatgcaggtatctggactgagtaa

SEQ ID NO: 86577 - DNA, 507 bp, Citrobacter koseri
atgattcgtaaagtacttaatattgcaacagtaactgctattctggcagcaagcgcgggtacggcatttgcggatgttgatacgagcaccattaatgcgcagtcagtaacgctgaacttcggggcagcacagaaggtgcagcatactctgactgcggtttctaacctttccactacccttgcagataaggatgtattggcgaatggccaagttacagctaatgatggaaccagttctgaaacttttgctcttaaatattcaagcttagcatcaattgtcccggatagtacatatcaaaattatgccaccattaccggcgatcaagactcaacacataaacttaatgttctcttccacttcgataatgcaatacgtgaaggcgcaggatggtataaaacgtctgagccggtagctactttggcttatgaggttcttgctgacggggcgcaaaccgttccagtcgatacttatactgtttctatggatgcaggtatctggactgagtaa

SEQ ID NO: 86578 - DNA, 918 bp, Citrobacter koseri
atgaaaaagacagtaatgatggaaagtttacaggtgcttttccttgtgggggcaatggttagtggtttgcttccggcagttaaagcacaggctgcggatggtatccggttgactgttgttgatgggggggggcttcgcagcggtgaagtgaaagatggtacccgaatagcgcgtggagttgtatcttcgcgagagaaacattccgggttccatgtctggagcgatgcacaggcatccggaaacaaacctgagcgttatgtactgaccggactgcaggatggaggaaaccatcttcgggtgcggcttgagagtaatagctggtctcctgacactgttgacggaaaggggattaagaaaggcactgatgaggatggtgcatcatttgatatcgtggtggatggtgaccagagagcagcttctgaccgttatcgttttgacctcagggccgatacgatttcagactcatccggtaaggatgataacggcgatgtcactgcccagaccgtttatattaatgtaactcagactgttaagctggttcataaccttgacgcaacccaaagtagttttagtaccagcttgtcggttctaacagacttggccaaaggaactgtatctgcagaggacgggagcgtaaacaaatatgcaattcgatttactgatgggacctgcgataaccccagtggtgctacttacggtattttttgtacgttacggggagaaaactcacctgataatacactctatgtgcagcttaatagtataggtgattttgtttttttatatatggatggttggcttgtggcgcagattgctagagaaaaaattcattatgtcgttgcacccggcaagggaactgataatgtacctgcagacaggtataagttaagtgtggatgcggctatctggctggactga

SEQ ID NO: 86579 - DNA, 2556 bp, Citrobacter koseri
atgagaatttcactgctgacattgtctgtgtgtattgcttgttcatcaggctctgtttatgcccgcagctatacttttgatccgacaatgcttggcctgtccggagataaggttgatatgagtctcattaatcagggggggcagttaccaggcacttacccggttgatgtaatcattaatggggaccgggttgactcacgggatgtgacgtttaaacctcgcaagaacgatgcaggcggtatcgggctggagccatgtctgagcgtggagcagttgtctctttatggcgtcaatgttgagaagtacccggcgttatctgcttcagcgaaggaagggggatgtgcccgcctggcggctatacctgatgcaaaggctgacttccagttttataaccagcaattactgctgagtgttccgcaggtggcgatgcgtccaaaattgtccgggatagcaccgcaacagttatgggatgatggtatccctgctttactgatgggatacaacgccaatatcaaccgtaccgaaaacaggggcaacagtggggggaatgaaagtaataactcttcctatgttcagttgaatcctggcgcaaatctggggccctggcgtctgagaaatcagacgaactggagcaagcagagtaatgacgatgaggggaagtggcagacggtatacacctatgcagaacgtgggttgtatgacatgaaaagccgtctgacccttggtgatcgcagtacgccggatgatgtgtttgacagtgtgccttttcgcggggtgatgctggggtctgatgacaatatggtgccctataaccagcgtgaatatgccccggttatccgagggattgcaagaacacaggctcgtgtggaagtgaagcaaaacggatatacggtatacagccagacggttgcaccggggccgtttgcgctgacagatttaaatgtttcaggtggtgatactggtggcgacctgcaggtgacggtctgggaaaccgatggttctcctcaggtttttacggtgccctttcagagcccggctatcgcccttcatgaagggtacctgaaatacaatgtgatgacggggcgttatcgcccggccagttccggtgttggcgatactgtcggacaggcgactgtgatgtacggtttgccctggaatctgactgtgtacggtggcgcgcaggcagcagaccactatcagtcagccgcactggggctgggattgtcaatgggtgaatggggggctgtttccttggacgggagcggttcacacgggcagcggcagaatcaggatacagaaaatggtgcagcatggcgtatacgttacagcaaagatgtcgctgccacagataccacgctaaccatgaccagttatcagtacgcctctgccggttacaacaccctgtccgatgttctggatacctggggaagtaatgataatgacagcactgagtggtttaccggaaacagtccgtatgaccgacgcaagtcaacaagttcggtgacgctgagccagtctacaagaaactggggatatctgaacctgaatggcagcagaactgactactggaatcgtccggggcatgacgattcctatggtgtaagttatggatttagcgtttacggtgcctctgtgtctctggggctgacaaggaataaacagtataacgacaacggtgaccagcgttcggatacaatatcaagtctttacgtttccgtcccgttggatcgtttgctcagaaccggttcgtcatcattgaatgcgacttaccagatgaactcaagtaaagataccactaataatcaggcaggtctgaccgggtcatcgtttgataatcaacttagctgggatgtcagtcagagtcgcaggacgggagacagcgtgagtgacagtaataacagtgcgatgcatgcaacatggtatgggcgttacgggcagctgggtggcaactacagctatagtcagcatcagcgactgatgggtgccagtgtttctggtggtattgttgcgcatgagaatggcgtcacgctgggtcagtctcttggtgatacgatggcgctgattgaagcacctggcgctgccggggtgcctgtgactggatttcctggaataagcactgactttcgtggatacacgacaaaagcgaatctgacaccttaccaggagaatacaatcagtctggacccgtcagcgttgccaccggatgcagaaatttcgcaaacagatacaaaagtcgttccgactcagggagccatcgttcctgcgaaattcagaactcgtgttggcgggcgtgctctcatgacactgagccgtgcagacggcgagatggtgccattcgggtccgtggttacgttaggtcagggtgataacagcggggctgctgctggcattgtgggtgataaggggctggtatacctgacagggcttcctccggaaggcattttggttgtcagggagggagagcagtcacaatgccgggttgattatgtactgcctgatgacaaaaaagataaaaatgctgctggcctttatacgatggcgggcacctgtaagtga

SEQ ID NO: 86580 - DNA, 777 bp, Citrobacter koseri
atggagctggaaatgaataagcgagcctggagggggatggccatttttctggcgttgggtgtcagttcctttggtgtccatgcggaggggcagaagcagactgttgagaaaaaagaacagcctttcgctgtaaagcttggagcaacgcgagtcatctatagcccggattcaggtggtgcgacgctgactgtcagtaaccctcaggattaccccatgctggtgaagtcgcaggttattgaagaagataaaaagacggcggctccgttcattgtcactcctccattgttccgacttgatggccagcagcagagtcgtctgcgcattatcaatacaggggggggcatgccctccgacagagaaacactacagtggctttgtgtcaccgggataccgccaaaggcagatgatgcctgggcgcaggatggtggcggcaagagtaaacccgaccatgcaacgctgaatgtccagattagcgtgagttcctgtatcaaattgttagtcaggccgtcgaatatcagaggggctccaacagatgtagcatcatctctggtatggacgcgtgagggcgggcagatgaaagtaaataacccgacaccgttttatatgaacctgaaatcagtatccgtcggaggtaaagatgtcgataagctggaatatatacctccgttcagttcaaagatgtttgccctgcctcagggggcttcgggcgagattagctggcagatggtgacagaccttggtggggtcagtaaaacctacaaggctgaactgcagtga

SEQ ID NO: 86581 - DNA, 888 bp, Citrobacter koseri
atgccacttatgcagcgtctgagtggtacacacggggtcgggccggtatgtcgcgaactggatattgccccgtcgacatattactggcatcagcaacgccagctacatcctgagaaatgtagccaacgagaaaagtgcgatgctcaaatcatccaggagataaaacgcgtttacggagaaaattacagtgtctatggggcacgaaaagtctggcgtcagttgctccgcgagggctttagcgtcgcccggtgtactgttgaacgcctgatgaaaataataggtcttcggggcgtactccgtggcaaagtcatcaagaccacgatcggtcgtaaaacagcggcagcagcggatctggtaaaccgccagtttgtggcagaacgtcccaatcagctttggtgtgcagattttacgtacgttagcacctggcatggcttcgcctatgtggcgttcatcatcgatgtgttcgcaggcacgatcgttggctggcgggtctcatcgtcgatggaagcaaggttcgtgctggatgctctggaacaagctctgtgggcacgtcgcccctcaggtacaatccatcactcggacaagggctcccaatacgtgtcactggcgtacacccagcggctgcaggaggcggagctgttggcgtcgacaggcagtacaggcgactcttacgataatgccctggccgagagtatcaatggcctttacaaagcggaagtgatccaccgtaaaagctggaaaaaccacacggaagtggagcttgcgacactggcgtgggtggactggttcaacaatcgaaggttactggaacggctaggacacataccgccggtagaagccgaaaaagcttattatgctaccagtacaaataatgatctggcagcctga

SEQ ID NO: 86582 - DNA, 354 bp, Citrobacter koseri
atgaaatcacaatccgccaaacgctatccccctgaactgcgtgagcgcgctgtcagaatgttgttggaacaccgtgatgagtatgactctgagccggatgccattcgtgccatatcgtcaaaaatcgggtgccattacgacaccctacgagcctggttgcgtcagcataaaaatgatgtccgtggtggtgtcagccccgtcagcactgatgatggtggactgagcaccaatgagcgccagcgtttaaaagaactggagcgtgaaaatcgggagctacgccgcagcaatgatatattgcgccaggcctcagcttattttgctcaggcggagctcgaccgccactggaaaaaataa

SEQ ID NO: 86583 - DNA, 705 bp, Citrobacter koseri
atgagcacacgaaacgatatcatcgacgggaaaaatgcagccagagtgccttatggcctgatttatacgaaagtactcgggtggattgatctcgggcatgcgcagggaacagatatcaggaggctgctgagacatattgaagctggcgaatcatcaggtcagggcagttacagtgtgacctattcacagtcaatggtggatccactcaggacggtgaaaatggggaagtttgttacctggcgtattaaacggggacgttcatacgctgaacgtaaaagcatcgcgctggccatgatgatgtcgctggcacgtaagtttgagggactgcaggcaacattcccgataagcctggtcacagacagtggcttcagcggcgaagatctggtatcagacctgctggggttctaccgtgttgtcactgtccagaatccctttgagatgctgcaacccgtcagcagggaagaggcgctgatgcgctgggactactacggcaaaatcggtatctggaaaaatgaagggttcacccccctgttattccccgatcccgaagccttcccgaatgccagacctcaccggggtgcactgccaaactttatgcagacggtacgtccgtggaatgacttccgttccgggatcgtcagtgtcatcagcgaaaacggcaattacatcgacaaggcaaaaggaggctccctgccctatgcgtaa

SEQ ID NO: 86584 - DNA, 471 bp, Citrobacter koseri
gtgaaaaaacgtataaaaaaaatgcccttagggaaggccctggataagtattatcgtacggtttccgttaacaagcgcgggtacatgcaggagttctaccgcatcagcgtgattaaacgctccgcgctggcagataagtgcatggatgaaatcacctcggtggacattgcggaataccgggatgcacgccttgtcgtggtcagcaagcgcactgggcgggctatcagcccgaatacggtacggcttgaacttggccttctgtctgcgctctataatatcgcccgcattgaatgggggacctgcacgcataaccccgtggagcatgtccgcaagcccccccccatccccgggccgcaaccgtcgcctcacctcaacggaagagcggcgaataacccgcgcactgcgaaaacgcaaccctcagcaactggccatcttccagctggcgctggagaccgccatgcgccagggtga

SEQ ID NO: 86585 - DNA, 159 bp, Citrobacter koseri
atgtggttaaaaaatgtaccgtgctgcggggcgcagcatggtatgaaaaatgaacagttgttaaatccggtaacacagacgcaggagcgggcgtcagtaaaatcggtactggttaaaaaatgtaccgtgctgcggggcgcagcacggtatgaaaaatga

SEQ ID NO: 86586 - DNA, 1722 bp, Citrobacter koseri
atgaataatgtccgtcatatcagcagcctgggtgatgccatgctgcggcgcggaagaacaccgtcggtgcctgcagataatgcgcaggccattcagcccgtcagtgaaatggcgatggtgctgacgctggatcagctgcgccctaaccctgacaacccgcgtaccagccgtaacccccgctatcaggagatcaaggcgtccatcagggcgcgcggtctggattccatacccaaagtgacccgggatccggacggtgacgatgtctatattttcagcgatggcggtaacacccgataccagatcctgacggaactctggcaggagacgggggaagagcgcttctaccgcattcacaccatcttcaagccctggccggggcggctgaaatgtgtcatcggacaccttgctgaaaatgaggttcgtggagatctgaccttcattgaaaaagcgtttggcgtgcacaaggcccgtgcaatccaggaagaacagctggggcgcagcgtgacgctgcgcgaactggaaatgctgcttaaccaggaaggttatcccgtgagcaattccagtatcagtcgtatggaagacaccattaaatatcttttcccctatctggaggagcttctggtcgcagggatgagccgtggacagattattcctttactgaacctgcgaacagctgcggaaaatacctggagtaagttttccatatcaaccgagcctttatacaaatttgagactgtttttggccagacgtgccagggatttaactcacctgacaattattctcttgatatgttcagggacgagtttatcggccagttactgaaggcgctgcctcatcccagcctgaactacgatcgctggctgattgaacttgacccgaaagagcagcgacgccgggagcagtttggcgatccgccgcccacacctgctctcacgcctgttccggaacggacaccttcccgttcgcgttctgactcgcctgtacaggaactgccgcctgacgatacccgggaaaccgccatcacagggctgcgctcaggcacgctgacgacgcaggggcgtccggagccagctcccgggttgcccccggaactgcccggcagcgatctggtcagtgacaacagcccgtcgcgccaggaaatccagatggatttgtatggcggtgcgccggtgctttccggtgtgcgtgacggttcagacacctccgcggcagcctccccgattgcgttttccggcggggcgctggcatccgccttccgggaagacacttcagaagatgaacttccgatcagctctgtggctttcgcggccaccgggctggagccggtgagcgatatctggcatatcccggcgctgctggatgatgtggagcacctgcaggacatggcctaccgtctggcctttgaggtggcggaagccatggggtgcgaagacagcattcaggaggacagagcccctgattcagccggtttttccgcatcagagaacggtaatgaatttgtgcttttcctggccggtttgtccggcaggctgccgaataaacagtgcaatatgttcatgttctgtctcaacttttttggctcacagtcagccggggatacgcccgttttcgctgatacccatgtggtgaaaatgatgcgtcttatccgagttatccgccgcctgcgtgagttacagcgccaggccgctaaaggaggggaaaatgtcgcaggatctcaatga

SEQ ID NO: 86587 - DNA, 1446 bp, Citrobacter koseri
atgtttattaaaaaactgaagatagaaaattttaaagggtatcacggggaagataatgagttggaattcaatatccctgatggagaaacggaaggtagtgggcttaatatctttgtgggtgaaaacaacgccggaaaatccactgtatttgaaattatagattttataaaggacggaaccaaaaagaatattgaggatcttatttgtaaatcagacccggataatatagctgagaagctttcagccgagctaacctttactgggaatttatcagaagtaattgccgctcatgtacaagctaataaagttgctgcattcacctcgcatgtttttgaggacgagggtgttaattattttagagtgaagaggtgtagcgaggtaggggagaagaaaatattattttggaacgggaaagaatttcttaacccaagtggtatagatgccccatttaagaagttttatgataataacttcatttgggctgatacaaacccaagcaatgaagcaaagtttggttctacaactatatgtggttcgcttctaaaagaaatagctttaggccatattgaaacggatgagtatagagcgttttctgagcaatatcatcgcgtattcaatcatcctgaatcagagttgagacaaaaaatatcattagtcgaagatcaagttagaacagttttttcatctcaatttggcatggcagatatttctttcatttttgaggagttgcaggtagagaatttcttcaaaactatttccatcatgattgatgatggggtgaatgtcccaatgggagaaaaggggcatggtatgcaaagggcactagccctatcattacttcaggtgtatgctgacataacgtgtaatgcgcatggcgcggggattagcaaaccattttatcttttcattgatgaacctgaaatatgtcttcatccatcaggccagcaaaagcttttagaagctttaatgattatctccaaaagtagacaggtttttgttacaacgcattcgcctttccttttatcttccccttatcttaaaaatgttggcttgtttgttttcaaaaaagaaaataataagaatgttgtggagagagctgatacatctccttggttcccttggtctccatcttggggtgagattaattttaaagcatacaatttagcaaccgttgaattgcataatgaactatatggttatttgcaggaaaaaagttcctgtacaagtgaaaaagctatggagcaatggctagtttcaaaagggattacgcttgataaactatggactagagaaattaaaggtgtggtgcaacctccagcggatactacattacaaacattcatccgtaatcatatacaccacccagagaatgttacaatgcaatctcatcgttatacacaacaagaattattaacttcaatccaacaaatggttgggcttctataa

SEQ ID NO: 86588 - DNA, 195 bp, Citrobacter koseri
atgaaagtttcaatcaatatccccggcgcacatggccctgtctacgtgtctggcaccgctgaagtaattaaccgtaaggcgctatgtaaagagttggggatctgtaatatcaccctatgccgtctagaggcacaacacgggtttgaatatgctttaagcgtgctattatctaaaaagcgcaagttattaaattaa

SEQ ID NO: 86589 - DNA, 360 bp, Citrobacter koseri
atgcgtacttctgttgcgtttccaaaacgcatgtcggatgtgctggttaacagcgcgtctgaccttttctcccgcacggaaatcaaaggcgtcagccttccggcggatctgttctgtggcgacgtttttaacgctgaaactggtgaacttttcgatcaagctgtggaaggttccccgctgatttgcctggcggatgtctccgcaggtgaccacaagacggttgttgtggttgacagattggcatatgtgaacacgttcaacctccgcgcccgggatgccgactccctgaaggaagcgatcaaacgtctgacggctggcggctctattcgtactggcaacaacaacggcatggaggcttaa

SEQ ID NO: 86590 - DNA, 435 bp, Citrobacter koseri
atgagtacacaaaatccttacaccgatgttaacgacatggtgaaccggattgatcagcgtgacattacacgccggactctggagcagtaccgaagccgttttaaagcgcaaggccgcacgcaagaggttgaagcgattacccaagcgctgaggatgaccagtaacagcgcctccgctgtcttgcgacagtctcagcgcctcgccgggaaaattacagagatggacgcagagaaagccctcgaacttaaagcaaccgttgcgctgtttgcttccaagtctacagacttgcaagcaagccttattctcgcgtttcaaagtctgttctcggctaaaggcgtcccgatggactatgacgaggtgatggccttcattctgttgaatgcggcggatcagtttgagcgtattacgggaagctctccagtaatcgtacattaa

SEQ ID NO: 86591 - DNA, 261 bp, Citrobacter koseri
atgatgcacacctttactgatttgagtgattcccgttggttgagtggttacgtttgccagatgattgaggccattcaggacgatgagacggccccgcacctctacagcgatattcgggaaatgttagaaacggtaagcccggcgcagatggtaaccattggcaacccaggaatcaccaacacagcagcgtggtggcggcagtggttcggcctgggcctcactcatgaggatatcgaagaattacaggagatttatctgtga

SEQ ID NO: 86592 - DNA, 192 bp, Citrobacter koseri
gtgattgataaaaacaaacagttggggatcagctttgacccttacgtcatggagcaacttttcgcgttggcctccacccgtgaacatggcagcgttcacaccattgttaaaaaagccgttagccagtacctgaaaaccgttaattccacctctgttaaggattcccaaaatgacagcagccgcagtaaataa

SEQ ID NO: 86593 - DNA, 666 bp, Citrobacter koseri
atgacagcagccgcagtaaataagtctggttttgtaatgttggaaaataacctcctgaatattgagaaggtcgccgggaaaactttcaccgggaacatgaaaattacttacagcctgatccaaggctttgagaaaaacgggcagatcgcctatttctcccgcgccactctggagcgttatctcggggcctcccgctcaactgtgaagcgacttgtaaacgagatggtagagatcggactgatccaaaaggtggagagaaagcagggcgaaacgatagagtggcgcacctgcccgatcaccccggaaatggtggtaaccccagaagccgccaaacctgaagtaaccaaaccaaccgcagcaccccaaccgaaggagatcgtagagaatgcaggaagtaaccagcctggaattgttaagtgtggatctgacagcgtacatagaggcctcccggcgtcgcctggagcttctcctgtggaccacagcgggggcgctgttcgtcccgcccctgtccctgtgccagtagagcagggggccgcaaacgatgatttacgcaaccctgttattaattttgtggctggctctaatgtgatgatggtcaatggcttgcctgttgaatatctggagccagaagaaagcgtcgttgatcagtttggtgatgctttctaa

SEQ ID NO: 86594 - DNA, 2085 bp, Citrobacter koseri
atgaccgttaatattatcaccagaacgacaaatatcacggattttcagacagataaggcatcatttgaccggactatcagaaagataaaaagcgtcggtgcggcatgggacaaggctaattcccgtgtaaaaggtaagggacaaaagcagcttgataacagtcgggcaattgtccaggccaacaaggcagaagctgcccgccttgcttctcagaacaagctgaacgcatccaaagaaaaagagatcgccattgccaacaaggcagcgactcagcgcaagaaagatacagcggatcagctccgagcggaggctaaactccgacgcgctttggagtcccgattcaagccccgcaaaggtatcacgccgccacctatcccaacggcggcagagattcaacctcatgtgcagggcatcatcaatgcctcttctgtacagtcgaaagccaatgcacagcaggcagcaaagcaggcgatgcgggagcaaatgaaactggcggcagatatggaaaaggcggagaaacgccgcattcagtacgcccgtaaacgttatctgaccatccgatcagaagcatacaaaatccagaatattgagggcctgaccaacgcagaacgcacagagggcatcctcaaaatgcgccgcattgctgatttgcaggctaaagagacattgaacgtacaggaaacacgattcgagttacgcaagattacccaggagctacaaaaacaagcccgtattcgtcgccaggtagccacccaacgcacccacggcgggaactttggcggcgctggtcgtcacgccgggcgcggttccaatggtgtgacggctggcgtgggtgttggccttgcaggagcagcaggagcagcagcggcaggtctgatcgccgtagcaggcgcatcaatagcggcagcctccacactccgggaatcatttgaacgacaaaaggaatacagcggcctccgggagcaaggagtaagcgcaacagacgcagacgcgatcctgttggcagcaaaccagaaaggggcgggaatctccctcgataagctccagcaacaatttgtagactacctcgacaaacaaggggatctgtccctgggagaatggaaggttgacaagaaaaccggggaacgtaactacggtggcggcggtgaactggcagacgtgatcaaccttgtggagaaacgccaggcgggcgcaggagatgaaatcctgaagcgtttgcagtcggtagacttccaaggctatctctcaatgttgcgtgaactggagaagcgttacaagctaacggcgggtgagatgaccctctttggtgaatttgtagatgatggttccaagaccctccgcgctttcgatgagaacgggaagatcagcgccaaatcactggagcgcatccagtcctccgctttgtacttatccgatgcacagcgggagcaagtaaccaaactccaaagcgatatgatgctcttggggcaagcctccaacgggctggcggataacttcactttgggctttgctgaagcgtttgcatcgtcagacgatttgaccaaggcaatggaaaacatcgcgccactgatgaaagggctaggcagtgccgccgcagacgttctaaacggctttgcgaagctgtacaactggctaactaatctccttccaagtgtgggcggtgaccgtaccggggcaggcgttaaggagtcatacaccggatcacgtgacatgaccccggatgcgtccaaacctgagcgcggattctgggagaatctcttcgacttcaactctaagggcttcctcccgcaggagtacggcggtaaagcaccagatgcgcctaaaccgcttaaagtaccggataacctcccggcgctggctccgctccgcgatctgactgtaaccccggcccctgtacctactttcaacccttccagcctcacccaatccgcagtacgaccgcagaaccagaccgttattattgaccaaaagcctgttaaggtggatgtgtctgttaatgatggtaaggttagagacttggttaatgtagcaattgacgagcgggaactccagacccttaacatgatggtgggcggcggtaactaa

SEQ ID NO: 86595 - DNA, 729 bp, Citrobacter koseri
atggatgttaaattgaattatgctctccgaattattgttctaatactttcatctatcacaatattaatatttatcagagcattattttttagtacaaatggatttgaatggggtagtgtttctgactggttaagcacggcttcatctgctggtactttatatattgcctaccttgcttacaagaatgccccatcatggattaataagcgtaaacatgatagtgcttttgaaatcgcaaaaaaactaattattgatgatttacctgaattggaaaatattgttaatacatctgcctctaatacaattgatctagaatggaagtttgacctttttagcaaagaccctaaatacttccttaagcatgacgaatgcagtgatattttaaaaatattagatgagcaaaaacaatttccatttcttataaaaaaagaactacgtagattaagtaagctcggatggaacctcacaaccgaagcggaagttaatatagatgaaatattaaatgcattcgatactttctataaaatgaattatcgtgcatggtcagttctgaaaaattaccttgatgagcgaagctccataactgttgaatatattgagaaaaatagcatggcacgcattaacgcagttaaggaagaaaaagacaaatttgatcaaaattatcaaatctttaatgatatgcattgtgattttgataagtacttcaaaataagcacaaaaaataattag

SEQ ID NO: 86596 - DNA, 732 bp, Citrobacter koseri
atgaacagacttcttgaaataggctttataaaagttggttattgggagttacataatggtaggctatcctactcccttgacgcatcattttccgatgttactaataatctctatgcattcatttgtgatggagaagtaaagtatgttggaaaaacaaccagactcttaaaaaaacgcatgtatcattatgctaatccaggtgaattccaatctactaacattaagaataacgccaaaatactacagcaccttctaaataatgaagctgttgatatttttgttcttcctgataatggtctaatgcactacggtcagttccatcttaatcttgccgcaggacttgaagatgacattatcagagtgatcaaacccgactggaatggttttcaggaacgtacttctattcctgagaagaaagtagagcctaatactttacttagtacagatatatttcaattcaatatgactaatacatactggaatagaggcttttttaatgtctctgttagtaatggtgatagatttggtgaagatggacagataatcacaataactgattcaaaaaatactataaaaataactgcaattataaaccggactgccaatacaaataatacgcctcgtattatgggaggagtagaattaaaaagatactttcaacaacattttaacattggtgatactgttaattatagattactatcaaaaacaagtatggaaatatcttactaa

SEQ ID NO: 86597 - DNA, 1914 bp, Citrobacter koseri
atgaattatacaaatgaatggtatcttgaccataaccaatacatatctgatattgctgatcaaatggatttcagtactggaataacgttactaatagcagacgttggcacaggtaagactgttaacttttctatgcaacccaatgtgtactttatcgccccattggtcagtatcgtggagagtactgaaggtgttgatgttagtacatggaatcggaaagttacgcaggttctaactaatcctgataagtctatttatgccgataagatactggtagttgatgagtgtcacggcttatacatcgactatagctataaaggttcgttaatcaatgatctcgtgaggattttcccttacttcaggtctgttgtgctaatgtccggcactgtaaaacaagaatacctcagttgcgttgaaatagaccgtgtatatcgcgttcacaaggctcaggaagctcgtaaagagctacaccagtacatatgtaccagcaatgcggaggaagttttaaaatcgcttatacaagctaatattaataaacgtaaagcaattgcacttgtaaatgatgtggcgttatgccgtgagatcgctaactcagtacggggatcattagtgacagtcagtaagacaaaacacaatgctgatgttcttgagttctatcactctaagcgtatgacggatgccagccatgattatcgcctgattatcggtactgacagtatacgcgaggggttgagtatcgaggatgaacttgaagaagtagacgtatacatttttggtcatcgtcacccggatgcgatagaacaattctgtaaccgatttcgcaatgtgaaaggggtgaagaaagtacactatatcgtgcctgtaacggactccaggactatgtctgattttgatatagtttcccatactgccgatgcagagcggctccagatggcattgaatggcgtctatgaagcattcgagacagatcacttccgcgaggtttttcgcactcagtataataacgatgtaaaggcaagtgatgtatattacgaccgacttaagcgtactttcgcagtgaacaaggtcagtattgattatgttcatagcgagcaccgccgccgccagtgcaaacacgacccaatgatgttcgaaatgacattaagtgagtatgatttctacattatgccaccgaagcaggttgatggtaatgcagatagggcagagaaacaggaaaactctataagagtaatcaagactatagagaaagaagtacggcttcaggtacttagagatctcaaagaggatttcagtactggcaatttccgacatgtggatcatgaagagtatgatggactacggggaagtattcagaagctaatcaaggtaggcttatcacaggaacaaataccattagttgttgatggctatataaagaatcaggagttcatcaagagagtatgggatgattataattatattgatgatcccgacaatcttagaaattttgtgattcgtgaattcgcaacaacgactgcaaatgactacttagaccggattgaagttcaggtagtagccactatgactgcaaggaaagtgctacgcgaattgtttagtaatgatgttgagttgatgctcaaaaatcgtctatggggtcgtgatttgcgtaaggaaaccgtgtttgaccgtgacacgaacagtttcaaaccatccgtgacagtgaaagatgcaaaggcggctgcccgtatcatcaatcgatacattactgtcgagaatcggcagatccgcaaaggtaataaacgggaaagagtgtatttcatcaagtactacaacctaacagggattgagattgaccgtgacaacgtgcatatccaaccaatacgggcggccagtgagctacagactcgattggagcagctacgcaaagcgggatag

SEQ ID NO: 86598 - DNA, 219 bp, Citrobacter koseri
atgaaaataaaagcaaaaactggaaataatatttcatattttttctacaatggcaaacagatcttcagcatcgcgtgtgatcaagatgattgtactatctatgctcaagaaaacctaaaaaataggtttggacaggagatggaagaaataattggaatgatgagggcttcaggccacggctatgaagtggaactcaaagatgatgaggcaagtgattaa

SEQ ID NO: 86599 - DNA, 153 bp, Citrobacter koseri
atgaaagaaaagaaaacgattagtgtaggagtaaggttaagtcctacacaggaagcatacctacaaaagctaatcaacgaaggcaaggcttcaacaatctcaggtactattcagtacttgattaattcctacgcaatattggataacaaatga

SEQ ID NO: 86600 - DNA, 630 bp, Citrobacter koseri
atgaatcaacaacaatttcagctggcggctggtataagcgtcggcctggccacgcgctggtttccgcatatcgacacggcaatgaaagaattcggcatcactgcgccgctcgatcagtccatgttcatagcgcagatggggcatgagtccggcgggtatgaaaagctggtggaaagtctgaactacgcagccgatcgtcttgttcccgtattcggcaagagccgtatcacggcacagcaggccgccgcgctcggcagaacgacaacgcaaccggcaaatcagaaagcgattgctaacctggtttacggcggcgagtggggtaaaaagaacctgggtaatcaggttgccggtgacgggtggaaatatcgcggtcgcggcctgaagcaaatcaccgggctcagcaactatcgcagctgcggccagacactcaagctggatctggtttcttatcctgaactgcttgaacgagatgaatacgctgcgcgctccgctgcatggttctacgtctcgcacggatgcctgctccattccggcgacgtggagcgcgtcacgctgcttatcaatggcggacgtaacggtctggataaacgccgcgcgctgtttaacctggcgaaatcagtgctggtgtga

SEQ ID NO: 86601 - DNA, 216 bp, Citrobacter koseri
gtgacgaaagacgacatctggaaaacgttgttgatggttcgccaggcctaccaggattcgctggacggaaagagtatttcctttaccggcgtaaacggtcgcgccattaccaaccacgatccgaaagcgctacgcgacgagcttgaatactgggagcggcgctggcgggcggtcaacagccgcggcggttcgtacaaactcgctaactttctgtaa

SEQ ID NO: 86602 - DNA, 1515 bp, Citrobacter koseri
atgggcattcttgaaagaacactgggagctatttcacccgggtgggcagcggcacgcgcacgggaccgtctccggctcaatgcgtatgaagcggcaaacccgtcacggctgcacaaggcgaaaaaacaaagccagtcagcggacacgtcggtatttgccgcaggccagtccctgagggagcaggccagatggctggatgaaaaccatgacctggtgattggccttttcgacaaaatggaagaccgggtaattggtgctcacggtattcatgtagagccacagcctctcgatctggagggcaacctccattccgatttcgccgggcagctctcggcgctctgggcggagtggtccgtacgtcctgaggtgaccggcatgtttacccgaccggaagccgagcgcctgttgctgcgttcagcgctgcgtgatggtgaagtgtttacgcaactggtcagagggaatgtgccgggcctgcagcatgccacccaggtaccgttctctctggaaatgctggaggcggattttgtgccgtttaacctgaacagcaccgctggccagcaggttcgccagggcatcatcgttaacgagtgggggcggcctaccggataccgggtttacaaatatcatccggcaaacatgacgcggttcagcgccgagcttaaaaccgtctctgccgacaacatgcttcacctggcgcaacgcaagcgcctgcaccagctgcgcggtatcagcctgatccacggggttattacccgcctttctgacattaaggattacgaagagagcgaacgcgtagccgcacgtattgccgctgcgctgggcttctacatcaagcgcggcgatgcgcagtcccttggcgatgacggtgagttttcaacgcctggcggccagcgtcactacgatatctcgccgggcataatttacgacgaactccttcccggtgaagaccttggcatggtggagtcaaaccgcccgaacgttcatctctatgaattccgcaacgggcagatgcgggctgtggccgcaggtacacgcggcagctattccagcatagcccgggattacaacggcacctacagctcccagcggcaggagctggtggaaagcttcgaagggtacaacgtcctgcagcagtggtttgtcggtcagcacagtcgcccggtatatcgcgcctggctggcgatggcgctactgagcggcatcaaagtcccgacggatgtggatcccaactccctttataacgcgctctatcttgggccggtgatgccctggattgatccggggaaagaggcgaacgcctggaaagccattgtgcgcggaggtgccggtactgaagcggaatgggcgcgggccagggggaaaaatcctcaggaggttaagcgccagcgactgcgtgaaactgaatttaaccgtaaacacgggctggtgtttgattcagatgccgccaacgacaaaggagctatgcctgatgcaaccgcaaaacaaaccgggcagccgccggaagatgatgattaa

SEQ ID NO: 86603 - DNA, 915 bp, Citrobacter koseri
atgcaatccattaagacaattcaactgatagcatcattacttcaaggtaaatggcttaaacataaaaggtggacagaaaagaaatttcgattgaaatttttttctcgttgcctttcccatccttttgtgacgtacagatactttcagggattgtgctctctggataatgcaaaatatttaatagagacacatcccttgttgcctacgaaactgcaacgcccttatttatataaaggcttaagtatttctgagagggttagttgtcttctgacgcattacagacttgtgcaaaacacagcgtcagaggatataaaaaaggtgtttctgtcgaaggatacaacaaggttagccttgttgtacggtaaaagcggagaagagattgaaattctatgcggtccttgtgaattcgaccgagaaggagaggttaccttaacattcttattcaatggtgaaatgcttgccatgctttcattttcttttattatatattgtaacaaaaaagtcgcttttatagcaggtttgcaaggaccaaagaaaggaaccggaacaaaaccgattcgtgaagcaactaaagcctgtcacggtctatttccaaagagagttctgtatgagtcattctgtttaattatagagtattttgatattaaacatgttgttgcagtcagtgaagatagtcatgtctataaagagtcacgatatttgaaacacaaaaaacattcgtttgttgctagttatagtgagttctggaaatcaataaatggtaataaatctggtgatatgtatatgctgcctgtaaaaactgaacgaaaggaaattgactccattgtaagcaaaaaaagatccgagtatcgaaacagatatatattcctcgatactctgactgaaatgatacgacaggatcatctatcagcatag

SEQ ID NO: 86604 - DNA, 1239 bp, Citrobacter koseri
atggaaattaataatgtttcagaaatgcttaggtgtttcatgatagcagaacgtgatatattgaataattccgatattatccatgctccgactataggggaaatgtatgaaggattgacaaaggatatattaaaaaaagcaataccttcagaattaaatctatctgttgtgaatggttttattcatgatggacatggggggcaatcgcgacaaattgattgtatggtagtacatggtgaaggtgaagtaattaggcacaccaataaaaaaagataccatgtaaaagatgttgtggcaatatttgaagtaaaaaaagagcttttgtctgaacagttgaaggattcgatagatctattaactacgattgatgatatatatttttcttatagaagtaaaacattagatgcacctgcattttctactttttatgctgctaaatcatttgagagaataacgggaaagattgctcctaggtatgatgaaaaggatagtttatctatcttggatagtgcaatttatcactctttagttattgatcaactaactcctgtcagaattgcaattggatataatggttataaaagtgaatataatttcagacagtcattctataactattatagtaatatgagaaaattccgaacattcaaaatacctagtttactgattagtgatggtttttcaatagtaaaacaaaatggttatccatattatttattcttaaagaatagagggtggtgtattgcttcttcatgtaaaaataaccccttgattttaattcttgaagttattttttataaaataaaacaaatgtttgatgttcaaatagaacttgaagaggttgtggaaaatgaaaatatgactccattagtgttattagacaaaaaatcagagaaatgggattttaccttctgtgaatataaccctagtgatcttaaagatagggatgattttttaatatggacacctttgcatttaaaagaagatgagttgtccattataaaagaaatttgggatgcaggctgtttgtcagaaatagatatattagcgttcacagaggaatttccaactttttcagacattcttgtaaagctcttggaagaaaggtttctgatctactctggtgatttgattgctgttaactctgatattttcactcaacaagcagatgaaggatactacttatttccatcaaaagagaaacatgaagcatggaagaagaaatattataacacttaa

SEQ ID NO: 86605 - DNA, 1209 bp, Citrobacter koseri
atgtcaggcgctaatgtgatatctttcctgatttttcaggggagtacgatggcagtcaggaaccggataaaaaaaatgccgctggcaaaggcgctggataaatacttcagcgctgtctctgtccataagcgtgggcatcttcaggagttttaccgcatcaacgtgataaaacgatctccgctggcgttgaagtacatggacgaaattacctccgtggatatcgctgattatcgggatttacgacttaacaccgtcagcgatcgcaccgggcgcactgtcagctccaatacagtcaggcttgaactggcactcctttcgtccctttataacctcgcccgtattgagtggggaacctgttcacacaatcccgtcgagcacgtccggaaaccctccgcgtctcccggccgtacgcggcgtctgacctctactgaagaacgccgtattacgcgcgctctccgccagaaaaatccgcagcttctcgctatttttcatctggcactggaaacggccatgcgacagggtgaaattctgtccctgcgctgggaatttgtggacctgcatctgggaattgcccacctgcctctgactaaaaatggcacagcccgggatgtgcctctttcatggaaagccaggcaggtgcttaaagagtttgcggggccggtgtcagggcctgtttttgactacacctcgaatggattcaaaagcgcctggcgggtgctgctggctgagctggaaattgaagatctccattttcacgatttgcgtcatgaggcggtcagcaggttgtttgagctgggcacgctgaatgtcatggaggtagcggcgatttcaggacataagagtatgaatatgctgaaacgctacacacatctgcgggcaacccaactggtcagtaaacttgatgcacgccgtcgtcaggcccagaagctggccacgctctttgtaccctatccggcggagattatggaatctgacgggatgatctctgtgcgttttacggacctggagcaccctcttattacagcctcaagtcgctgtgaggcaatgaaaaatgctgcatcagaccttttacgcattcaggcgcttgcggcgcgagcgggtaaaaggcttccaccgcccggtgagataaatgtccgtgaccctcaccgtgtacttataaacccttttttgaagggagatgaagtggcggatatgatcagcagaacctga

SEQ ID NO: 86606 - DNA, 852 bp, Citrobacter koseri
atgtcactcagtcatgcctcgcccgacgagctccttccggaaacgcctgaccctcaggaaagtgcccgggaagttctgcccgacgctgcaggtttaccccgaaagcggtttcccttaaacgcgcgtaagtttcttcgtaacggcggtatcgtccttctcaccctgagtctgttcggttccctgatcgcgctgattgtcatgggccgttcgatgtcggatctgaccatccgcgtcaacacgcttgatgccgcatttcgcagcggtcagataggccagctcacctcaaatgtgtcagcgatggaagaacgcctcaaaacgctggaacagcaggtttccacgctcgcatcactccccgcagccctgcagtcggccggtaatgagcagactgccctgaaggcaaccgtcaggcaacttcaggaagccggcaacagcggcaaccaggcggttgctcagttgcagacacgcgtgagttcacttgaacacgacgttcagcagtcttctgttgcgttgggtgagatcaaccgacagctggcgcagaaaaccacagagcctgaaaagccccggaccgcaacagaggccgctaaaacccgaacggcgggcactgcaaaaaagattaaccggtcagtcaggcgagtggtgactcaggttgcaccgtttgtactgaccggcattgaacgccggggtggtcagaccttcgccgtcgtcattccccgtggtgcctcgcagatatcagccatgcgactgctctcaccgggggacaccatgctcggatggacgctgaggtcaacggagggcagccatgcggctctctttgtcgtgaacggcagcgaacaacggctgcagaccgaataa

SEQ ID NO: 86607 - DNA, 714 bp, Citrobacter koseri
atgaaaagaacattactggcagtgctgtgtctggctccgctgatgaccggcgcagccacggttcagacgccgtcagcgcagagcagcatgtcagcacttcaggagtcggcgaccggtgtaataaacccgcagcagcaggcccagcagtggggactgtcagacagcgactggagccgttatcagacactgatgaaaggcgagcgcggcatcatgtcacctgggctcgatccgctgacagcactgggcgtagagaccgataacagtgcggaacgtcgtcgtctggcagagctctgggtcaggcatgaataccagcgcagcgagaaagaactggcctttcagcgggaaatcaatgccgcctggttgcgcctgtatccggagacccttgccgtcaatctgggcagcaatgcggcgggcctcgcacatgacacacaggggcgtctcgccctgtttgtgaaggagaactgctcccggtgcgatgctcgtcttgctgccgtgctggcagataaccggccggttgatatttatctggtcggcggtaacagcgatgaagccgtgaggacctgggctatacatcacaacattccggtggaaaaagtccgcagccgccagataacgctcaaccaggacggaggactctggctgcgttacggacagggccagatgccggtcattctgcagcagggggaaaacggatggcagcttgccgctttctga

SEQ ID NO: 86608 - DNA, 585 bp, Citrobacter koseri
atgatggcctcagcactcctgctggcggccggagtcgcccgggcagctgatttacaggtcattcctgatgcctacaggcagatcgccgcagctgagcgggtgcctgccgagtcgctgtattcgctggcaatggccgaaagcacgcgtaaaaccgcctggggagcgaaaccgtggccgtggacgattaacgtggcgggcaagggataccactatgagacgcgtgaagaggctttcacagcgctactcgggtttatgcagcgctggccgctgaagaacattgatgtcggcgtggcacaggtgaacctgggctggaacgggcattttttcccgacgttccgcgatgcgtttgacccgtacaccaacctccgcgcggctgcccgtatcctgcgggcatgttatgacgcccggcccggcagctggctgcaggcggccggctgctatcaccacccggcggggggacgtcacgccgcgacctacatggccatcgtgcgtcgcaaactcagtcagatagcgaccgcagatacgccgttacgcagcgaacagcccgtcacacttgccacccttacctggattgaaccgcaatga

SEQ ID NO: 86609 - DNA, 531 bp, Citrobacter koseri
atgaaaacacttttccgtcagacactcaccgtcagcattttttcagtcctgttgaccgttgccttcagtgcaggtgccgcgctgatcgtggtcggtgatctcggaggcgaacccgccgctccgttctttgatgctgtaaacgccgatccgggtaaggtgccggccaacactgcagcactgcccccgccgccgctgtccctgtccatatccgatatgctgccggtcagcacaccggatatgtcaccgggtactgtcgccgcccgccccctgaacctgcccggtatgcccccggtgtttgtcgtgggggatgatgcattttcccgtcagtggctgacgcagcacgctacagtgctcagccgcatgcaggcaaccggcatggtcatcagcgtcagggatgagcagggattaaatgccctgcgtcagctggcgcagggtatgccgatggtgcctgtcagcggcggcgatctggcccgccgcctggcgctgacccattaccctttacttatcaccgcaacaggaatatcgcagtga

SEQ ID NO: 86610 - DNA, 645 bp, Citrobacter koseri
atgccggtctcccttatcgctgagctgctgagccagcatcggggactgtttgccctgacactggcggggactgtggcgctgacactcatggtattaagaccgcgcacggtcagccagcgtcggcatcgccgttatcagaaacaggctgcccgggcgctgcttcgactgccacagctgcgtgacgaagcagcccggacagtctggctgcgtaagatgaacccgtatgtgttcgaggagatgctgctgacggcgctctcccggcagggcctgcgtatacagcgtaatgcccgatacagcggtgatggtggcgcagacgggaaagtctggatcaatggccgttgctggctgattcaggccaaacggtacagtaccaccatcagcgcggcgcacgtttcggcatttggactgctgacagagcgcgaggggtatcccgggctgttcgttcacaccggccgtaccggcgaggtcagccgggaggcctttcgccgctatgacggcatcatcctgatcagcgggcagcgcctgctctggctgctggccggtgaccggcgatggatggaggcactggacagaccaccatacagcccggtcatccgacaaagccaccggaaagaaccgacgacatcccccattatccgtgattaa

SEQ ID NO: 86611 - DNA, 375 bp, Citrobacter koseri
atgcgcaacattctgtattccctgaccggacgcatcttcgaccttgtcacctcccaggtggcaaaaacggcctcaatggtcattttcgccctcgtgcaatgtgtgctcagaatatttattctgcgtcctctcattattttctgctgcctggtgctcgcggtactgaccgccgtgcctgttgcggtctttatcagcccgtcgtttaccccggatgtgctggctcagggcatattacgggtgatgcacctgctccccggggcgtataccccgctgtgcgttgccggtgcgctgtttgagctggtttatctgatccgccgttttactgttttgcctgaactctggccggatgacgcggctcagggaaaagggaggtaa

SEQ ID NO: 86612 - DNA, 777 bp, Citrobacter koseri
atgggcgattttctgacgagaacggatgctaacccgccgcactggtcgggggatgttatcggcaaatgggatgaccataagttacgtctgcacagtggttttctgcgcaggcactactggaccgaccagggcagtatcaatgtgttctgcataaaaggcaccgaccatcctgactatcaggggctgacgtggcaggagtttctgcaccgtggtaagcgcatggaccggaacattccgatgctggagcgtaatccgggttactacctggaaacggaacgtaaaaagccttccatgtattacaacagctatgacggcattgactggtatgtcggcgctgacggcaatcaccgcagcggtctggcccggtttctgtttcatgagcgcgaaatggcgtatctgcacggtgtgcatctgaaccattatgaattcaatgaacccctgctgaacgtgtatctggcgctccgtgaagaactgagacagcatgcggcacagggttttcacatggacctgaatgtcaaccgcgtccatcgcggtcgggaggatactgcaggctggaaaaccgatatctattcaacgtcgctgtatttcagtgtggggtcctggtgcagggaacacgctgacaatctggaaatcagcgcactggctgtaccgcgtgaattttcatgcccggatgagggatggcaactgcttgtgtctctgatggcatggcgggataagcgtaccgcagcgaaacgtcccggttttttcagccggctgacctgcagggggcgtgcatga

SEQ ID NO: 86613 - DNA, 762 bp, Citrobacter koseri
atgtcacagcagggcagtgaaaacgggcagcgcagtgcaccggcaagacagcgacagtccggtccgattggtctgctgctctgggattttccggttagccttatcggcatattgctgggatcacttctggtcagtctgttgattgagtatgcctgtatcgcgctgttgtggccggatgagggagcggcccacagctaccaggttatggtggcggaaagccgctggctgtcagaggggtatacccgcagcctgctgatggccgcaccggttgagacagtcagccgctgggtacatgttgcctggcagtggctgtttgtggacagcggattcagcggctggctgcagtcatttaaatccctgagtgataaaggcagcgggcttattccggcgctgaacgggctgggtgcttcactggtgagctggctggatgtgtaccttcaggccactgtctgggtgacgctgattttcttcatccgggtgatgatcctgtttctcagcttgccgctgtttgccctggtcgtgattatgggtgtggtggacgggctggtcaggcgtgacctgcggcgctacggggctggctatgaatcgagctttgtctatcaccacgccaaacgttttatcaaacccgcactgtatggcccctgcatgctctatctggcatggcccactgcagtgtggccaaacctgctgttactgccatctgcattgctggtaggtggtgtgctggccgtggttaccggctcgtttaaaaaatatatctag

SEQ ID NO: 86614 - DNA, 315 bp, Citrobacter koseri
atgaaaaggttaaaccttaacgagctgggttgcttcattaccatctactttggtcaggattacgacctgatcgatgacagcgatgaaatagaaccgaagatagatgcttttttacatgattcacacagggccaacatgtatggcctgcttgctgatatcgatctgctgacagctgaaagcgatgatctggccgctgaattcatggaacgatatggcgatgaatttgatcctgaactttggggtactacgcccgcagatttccttcaacgggtcagggataaggtcagccatgcactccgggccgaaggtaattag

SEQ ID NO: 86615 - DNA, 834 bp, Citrobacter koseri
atggataacgaaaacggaatagcagtggccatgtcgccggtacagatggccgcggtactttcggaccggagcatcagcgaaggggaaaccctcagtaatcgcctgttcggtggactggggctggctggcggtgtggttgaaatgtttggcgccggtgccctgtgcgttgtgcctgagcccacgatgatcacaaaagcaggatgtgtttttgtcggtactcacagcctcgataccatacaggcttctgtccggcagatatggacaggccgtcagaccaatacggacacctataactctgcggtcacgctcgctgaatcactcggcgccgacaaagatactgcgatgaaggtcggtatgactgtcgatctggcgataccgatgggttttgcgcttgcagccggtgcggtacgtgttgctgcgattcgcggggggcgtatacgccttgcagagcacgaatccctgtccggccggactccgggcggccacacgctggagcggcacattggtaaaacgccagaagaactgtttgcgaggctggagcgaagaccctcattaccagcaaccagcagtttcaggaatctgcgcgaagcagaacagcttatatcgaaagtcgtcgccgataaccggaaccagattcagatgtgggtgaaacaccttccgccaggaatgaatgccaaaatggaactcgaaaaagtgttttctggtcagacgggtattctcgtgtcaagaggatcagcacaggtcacggtctgctacagagttcgggttatcttacgctttgagcactggcatggtaagccgtacttcgtccttactgcgtttccaaaggcataa

SEQ ID NO: 86616 - DNA, 318 bp, Citrobacter koseri
atgcgtcaaaccaatcccctcatagcgatgctgattgccttattacccttaacaccgtgtcatgcctcggagaaagacgagctggcgctggtcatgcgtcagctggaccaggtgcaggccgggcttgatcgtgcgcgcgtggttgcgaaccagaaccaggacgcccgcttttatttcgactatcagcaggccacgcacgatatcagcaccatgaagcagggtatctcgacctatcttgaaccctcccgggcgcagcccgcttcgcgtcagtcttctgttacaggtcagtaccgtgctgaggagccgtcatggcgatga

SEQ ID NO: 86617 - DNA, 246 bp, Citrobacter koseri
atggcgatgaatggctcacagctgaatggctggagcgctggcaccggcagcagtctgacaccttcacagctgaacatcctgatccttggcacgcttgcggttgtcattctcctgttcagcgcctgggcactggtacaggcctaccgcggtcttcccacaaaatccgtctcgtttcgtcagtttaccgagcttgccgttcgcctggtggtgctttacctggcaatgctgtttctgtttttccactga

SEQ ID NO: 86618 - DNA, 366 bp, Citrobacter koseri
atgaaatccatgttactcaggctttatcgcgccacattcacccgggcaaaacatctgatgctgagcgggctgtttattaccggtaatgcgctggccgagcttccttccgttgaacaacccactaccggcggcggtggcgggacctataacacctttatgggctacgccaaaatgggtggtctcgcgctcggcctgattatctgcgtgggcgcctttctggccgtggcacatgctgtcatcacgtctttccatgatatccgcaagggcaaaggctcatggacagaatttctgctttacggcgtggtcggcatcattcttatccttattgttatttatctggcgaccaaagcctctgacatcctttaa

SEQ ID NO: 86619 - DNA, 375 bp, Citrobacter koseri
atggccgtcatcgacttcctgcctgacagactgaataacccccccgtggtgtggaaaggattcacctcgggtgaattcctgctggcggccatcatcggcgttattgccggtataccgctggcggtgccgttggcactggtgccctttatcggctggctggcctttcccacctctatgctgctgatgccgttgtttgtcatcttcttcggcggcggctggatcgccggttataagcggggcaggccggagaattatatctggcagcgactggaagaaattcgctgtcgtgcccgcctgtcccgaaccatgatcctcgaaagtcgggcatgggagatgaaacgcaccacagcgatgaaacgcggagggcagtcatga

SEQ ID NO: 86620 - DNA, 645 bp, Citrobacter koseri
atgagtcgctttcgtaacggtatgaccgcacgagacaaccacattttttccctgcgtattgcctgcgtactgctctttgccggcatgctgattaccggtactggctggatgcgcgcgccatccgaactcaccattcataacccaccggatttgcgctccggtagcacgcgtaaatggtgggaggtgccgccttccaccgtttacagttttgccttctacatctttcagcagcttaattcctggcccagaaatggcgaggtggattacccggcgaagattgcacagatgagtccttacctgacaccgtcctgccaggattttcttaataaagacgcagagatgcgtaaaaacagcgacgaactgagggaccgcgtgcgcgttgtgtacgagatcccccgccggggatacagcagtcggagcgtcaccattctcgatcaggaccattgggtagcgcagctcgacctggtggcagatgagtattaccacaccgagccggtaaaacgtgcgctggtccgctatcccctgaaagtggtgcgctgggagggcgatccggagcgcaatcccttcggactcgctctggattgctatgcggccacgccgcagcggctggaggctgtcaccttgcctgagtcggagaagaagtga

SEQ ID NO: 86621 - DNA, 897 bp, Citrobacter koseri
atgaaaaaatattgtctggttcttctcatcgctctgaccattccggggatggcaggtgcggttgagctgatgaagtgggagcgcatcccgctgcaggtgcccctgaccgtagggcaggaacgcatcgtatttgtggaaaaaaacgtgcgcgtcggttttccgtcctcgctgaacaacaaactgcgcgttcagagtaccggtggtgtggtttacctcaatgccggcgaagcatttccggtgacgcgacttgagctgcagaacaaagaaaatggtgaaattatcctgctggatgtctcagccgcagcgggtaaaaccacgcgtgaaccggtcaaaattgtctatgacggcgaagtgaccaccgccaccgccagcgataaacagtccgtcagcagcggcggagacagtacaggccgtaatgctcaacaggctgatgcggaaaccacaaagccggaccggaagcccgcgaaactgaatgcgccgctaccggttgtcctgacccggtatgcggcacagaacatgtacggcccgctgcgtacggttgaaccggtgccgggtatcagcccggtatccctgaaaatgccatcgtccatcaccacgctgctgccagctgaacctgtcaccgtcacaccgatggcggcctggagccttcagggcaacagtgtggttgcgctgcaggtgcgtaaccgttctgccggcaaagtcattctcgatccacgtgcactcgaaggtcagtttattacggcctcctttcagcaccgttggctggggagtgcgggaacgccggaggatacgacagttctttatctggttacgtccgagcgcccggaaggggcctttattgccgaaccgccgtcgctgcagcccgctgacgggcataaacggagagtgaaaaaatga

SEQ ID NO: 86622 - DNA, 1521 bp, Citrobacter koseri
atgaaggcgccatcctcgaatcttctcgtgaaagttgccgttccggtggtgcttgccggtgccgtagtggtgggcgtgaaatcctgctcagggggcggaaatcagacgacggcaccacacacagcctctggggccacgctgaaggacctgtctccggaagacctcaaggcgctgggcattgaaggtgacacgccacaggacacgctgcgcacggttgtggggaacttccgcaaagtccaggaccggcttgatgcgctcgatgatgacaataaaaaacttcgtgacgaaaacaaagccctgacgaccaccaacagcaatgtggacacgcaaattaatcaggcggtgagcaatgcacgaaccgaggaggcgcagaagcgtcagcagctcagcgcccaggtcaccgacctcagcgcgcaggttaagcggctgatggatcagctacagaacggcggtgccggaacggaatcaggaaaaagcagcagtgccggcagtgatattcctgtcgggctgggctacgacaacggactgaacaccggcacccccggcgcatcgtcctccccggatggcctgcagtgggttgagccaaaagacggtattgccgtggacgccagcggccggccggtgaccgacagtaataagagtaacgccaccggcttctcctttgccacttcatttggtgatgccggagatacaggcaggcaggccgcagggaaagcgacagcggcggtgcagactcagcttaccgatgctcagaaagcgactgacccggtgtatacgcttcccgagaattcaacgcttgtcgggagtcgcgccatgaccgcgctgctggggcgtatccccattgatggcaaagtgacagacccctatcccttcaaagtgatgattggcaaagacaacctgacggcaaacggcatcgagctgcccgacgtgcagggagccattgtttccggtacggcgacgggggactggacgctgtcgtgcgtgcgcgggtccatcacgagtatcacctttgtctttaccgacggcacggtgaggacactcccgtcgccggatggtcagaacagtggaggcaaccagaacagcggtaacgcgaacggcaataacagcagtataggctggctctcagatgataacggtattccctgcatctccgggacgcgcaaaagcaatgcctcgacgtacctgcctactatcgccggactggccgccgcaggtgccgcaggggatgcctttgcccagaaccagagtaccacccagaccaatggttatggaggcgtgacctctacgctgaccggtgatgccggtcaggccgtgctgggtaaagcgctctccggtggcatgcgggaaacgatcgactgggtgaaggcccgctacggccagacgtttgatgccatctatgtgccaccgggtcagaccgttgcactgcacatcacgcgccagctggccatcgattacgaagaaaaaggccgcaaagttaaatacgacttcagccttgccggcagcggcacggggatggactga

SEQ ID NO: 86623 - DNA, 261 bp, Citrobacter koseri
atgcaaaacactaatcttgaataccgggtggggtatgcccctctcggtgggcggctgtatgccggctttgtcagaaaagacaacgggaaatgggagggccagcctcacgatgtgacggactgggccatgtactccgtcgggcaaaaacttgcccgagaaaacaacgatatgctttttccgttacctgacgggcgcattctgcgtctgtcagcatatattactgatcctgaaggggaggaggtgtctgatgcgcagcggtag

SEQ ID NO: 86624 - DNA, 417 bp, Citrobacter koseri
atgcgcagcggtagcagcctttctgtcctgttttcagtcaccgctttggttctgctgctgaccggttgcagcacgtcaaaagatgagatgctgccgcccggcgacagcaccatgctggagctgtggaacgatggagcctccgcaacccatgcaaccggcgagagccggaccaccctgcgccgcccggtcactgacagcgaacgggttatttcacagcagacgcgggacagctacagtcgcacccaggagaacgaaatccagcagacgtttccgcgcctgcccaatcccgatatggtgatgtacgtgttcccgcatctggccgatggcaatacgccggtgccgggctacagcacggttttcccattctacagccaggtgcagtatgcgttgcccggtgagcgcacggaggatttgtga

SEQ ID NO: 86625 - DNA, 2799 bp, Citrobacter koseri
atggctttttctcttttccgtcgcagggccgaagcgaaggcaacgcaccagtacggtgacgggccgttttccgttaacggccatgagccgctcacacgcgagggtcgactgacccgtggtgatgaagcgaagctgtatgatacggccccgtccattatcgatcatatcccgtggggagagtatcttccggaacatcagtgcattctgctcgatgacggcgtctctgtcggggccgtttacgaaattattccggtgggcaccgaggggcgtccggattcacggctcgatgaaatccgcgatgtggtggaaaacgccctgcaggacagcctgccggagctcgacgcccatcagtgggtggtgcagttctactgtcaggacgagtcagacctgaccgcgtatatggataaaatccgcggatatgtgaaaccacgggcgcagggaaccacctttacggaagcctggcttaaggagcaggctcgtcaccttgataatgtggcgactgaaaaagggctgtttcttgatgatgccgtcaccggtgcgccgtggcgcggtcagatacgacgtacgcgcatggtcatataccgctgggttgaatcaccgtatcgtgacccgatggcacctgaagtgctgcttaaacaggtatgcgatcgccttacggccgcgatgagcggagctggtatacagagccagcggcagaacggcgaacagatccacagctggctgctgcgctggttcaacccggaaccagagtgggtggataaggccactctctatcgctgtgccagacatacggatgattccccgggcgaactgccgttactgaatgatttcagtgagagcctttggtttacacggccccggagcgatgctgaaaaaggcgtatggtggtttgatgatgtggcacataaggccgtgccggtggcccgcctgcgtaacgcaccctcaaccggacacctgaccggtgaggtgaaacgcggcgataatatcaatgccatcatggacctgttgccggagggcaccgtactcaccctgacgctggttatccatcctcaggataagctggaggaaaattttgcccgtctgagccgcgactcaatgggcgagaatgtggattcgctgcgtgcccgggaggatgcggcaacggcgcgaacctacctcggtaacaagcataaactgtaccgtgctgccattaccctgctgattaaagcccgtgatctgccttcactggacagacgctatctcgatctcagcagcaagcttctcaactgcggtcttgagtcggtcaaccctgagcatgatatcgggccactcagtacctatatgcgcgctctgccgatgtgctttaacccggcgcaggacagacaccagtggtacacgcggctgatgtttgtgcagcattttgcctgcctggcaccggtgtacgggcgtgataccggcaccggcaatccgggctttacgttctttaaccgcggcggtggcccgctgtccgtcgatcccctgaataaaaatgaccgtacgcagaacgcacacaaactgctgtttggccccaccggcgccggtaaatcagccacagcactctgtgagctggcacagatgatggccatctaccggccacgtatttttctgcttgaagccggtaacagcttcgggctgttcggcgattactgcagctcgctcgggctgtccgtgcatcgcgtcagcatcaaacccggtaaggccatctcgctggcgccgtttggcgattcgcatctgctgatgcaggcaaaaccggatgaactcatcatcagtgaagatgcgcttcccgatattgatgacgatgaggataaagatgaagagcgtgacgtgctgggtgagatggagattgcggctcgcctgatgataacaggtggcgaatcggctgaggagcagaggatgacacgcgccgaccgcgggatgatacgcgaggccatcatgatcgccgcccgtaccgcttttgaggctgatcgacagatgctgccggaagacctgatgtttgcgctgcagaatattgcgcgggatatcagtctgggtgaggatggtcgtgaaaaacgcactcccgcccgccgggcccgtgcggaggagatgtcggaagcgttgcggatgtttactgaagggtttgagggggatctctttaaccggcctggtacgccgtggccggaggctgacgtgaccattgttgacctcggcacactggcccgtgaaggctatgaggcacagatggcggttgctgtgatttcgctgcttaataccattaataatatcgccgagcgggagcagtacagcgatcgggatattatcgttccgattgatgaggcacatattgtgacagcgaactctctgctgggtccttacgcgactaaaatagtgaagatgtggcgtaagctcggtgcctggctctggctgttcactcagaacctcgctgacttcccggatacggccaaaaaaatgctcaatatggcggagtggtggatttgtctggtgatgcctcctgacgaagtggaacagattgcgcgcttcaaaacgctgacggatgagcagaagacgatgctgatgtctgccaccaaactccctaaaaaatatacagagggtgtgattctgtcgcgtaaggtccaggccctgtttcgcgccgttcctccgagtctgtatctcgccttaggtatgacagaaaaagaggaaaaagctgaacgacggctgcttatggatgaattacagtgcagtgaacttgaggctgcgtttcatgttgcgcaccggcttgatgaaaatcgcggactgagtatctga

SEQ ID NO: 86626 - DNA, 405 bp, Citrobacter koseri
atgaaaaaactgactatggcgccgccagtggttgttccggacaaagcactgattgcttctgtcatttttaccgtacctccgcagggtacagcctccatcggccagtctgacagtgtatcgctggagatactgcagcgcgaaattatgaaacgccttgagaagccggtactgttttctgtatacccgcaccggattggccgtcgcagctgcgtggccgtgcacctgactgatgtgaatgaaaaaaaactggatattctgattaccgtgacgggtaacaccctgtggccaggtgaggctgaattcagaaatagcctgcgctggaatatctgtgtatccgatgccaccgacctgctgtgggtgctgaaagagattgacagagtcaccggcggggaaatctgcagttaa

SEQ ID NO: 86627 - DNA, 972 bp, Citrobacter koseri
atggccagagcagatttagtgctgaatttagtcgaaacggggataaagggtgacctgccgcgtttcaaaattaccgcagaagcgatagctgcggaggccacggcacgccaccagtatcaactggcagacaagctaaaaaatattcttaccagttcagtctcaggtgagacgcgtctctacacctacgataatgatcttcaaaatgcgttctatgaaattcaaccgcgcaaaattttggatgacttgattgttcctgaatcagttataacccagtttttggagcttatcgaagagcacgcacgccgcgatattctgcggtcctataatcttgaaccccggcataaacttcttctgtctggccccccgggcaacggtaaaacctccattgctgaggcgcttgcaaatcatctttctctgccgttcttcacggttaaatacgaaggcatcattaatcgttaccttggcgagacagcgcagcagattgataaattatttgagtttgtgaaaactcaacgctgcgttctcttctttgatgaatttgacgccatcggaaaagagcgcgaagatgctaatgacaacggtgaaatgaagcgtgtagtgaactcactgcttaagcaaatcgatctattgcctagtcatgttgtggtcgtaggggccacaaaccatgaatcaatgctcgataaagccatctggcgcagatttcagttacagataacagttcctgctccaacacagcttatggcaacaaaatggtttgaagagtttgaaaaacgtgttggtcactctctgggactggcaccttcgactctcgccagaaaactgtcaggactgagctttgccgaactcgaagaatttgctctcgacgtgcaacgtaaatacgtgcttggacttcctgcaagtaaaaataagctgaaggatatttccgctcattgccttaaatactggacggagagataccgacaggaaaattaa

SEQ ID NO: 86628 - DNA, 2601 bp, Citrobacter koseri
atggcgaagaaccctctactaatatttaccgcaccgaaagcagttaatgagagggacgaccttaagccttttgtatcatcgatacaatcaccgcccttcaatattcaagccgatcgggtaatacccaaagttgagaggcttgaacgtaaatttgcggaatacattgagcttgcagatactgccgaagggttcttgccagaaaaagtgctcgttctggaggttgcgggtgaaattcagggcgttgctaatgcgctcgcccgcgttaaaggttttgaatatctctcctcagccctgctcgagaagtcttttgacagcgaagattattatacgctgagcaacaacaaacgtacccctacctccaaaaacgcttatctcaccatgagcaaccaagccgggctcagtcgcctcttggcgttgtggcgcgaatatcagagaacccgtaccgttgagcgcggctatggtcctctgaaagatgtattcaacagactgattgatatcaggttctgggatactcgagacaggctggaggcaacgttggtagtggagaactggaaggttcttatagaggatgctgcggccggatatgatgctctggtgccctttgaaatcgaactttggtaccgggctttgcccgcagagcaggtcagagcggaaacgcggataagacgccttattgcccaagccggtggagacattaccggcggatgtcttcatgtggggatcagctatcacgcacttgttggtcagctgcctgtcagcaaggttcagcaggtactggtcgatggagccgaagttctggaactcatgcgctgtgacgatgttatgtatttcagaccactcggacagtgcgcgatccccgtgaacagccaggatatggttgccagtgaggggctgccgttcggccatcaatccatgcctgatccctacgccagtccagtaattgctttactagacgggcttccgctcgagaatcatcaggcgctaagagggagactcgaaattgatgacccggatgactttgagtcactctatgattcaccttcccatcaaagccacgggacttcaatggcttctttgattgtgcacggtgatttgtcagatcccgaagagcccccgcttcgacgccgtgttcacgtcaggcccatcatggcacctggtagcgcaggatttaacggaagcgtcagagaacagataccgactcactatctgccggctgacctgatccaccgagctgtagtcagaatgaaaagaggggaaaacggtcagccccctactgcgccggatgtttcgatcattaacctttccgtgggcgatcccagcagaatgtttgatgcgcatatgagcccatgggcgcgtatgcttgactggctttctgtcgagtttaaagtgctttttgtcgtcagcgcaggtaatttcgggatgcagctggttctggataatgttgcaggggacgattttggtgcactaacgcccgatgaactggaagaacatgcccttaaggctattgcaatgcagcgtccgctgcgacgcctactgtcgccagcagagtcaatcaacgctctgaccgttggcgctacgcatcacgatggctataccggagtaatcccggctaatcaggtagacatttttagaacacagggaatgttttcccccatcaacaccgttgcgctgggcagacgcaaatcggtcaaacccgaaattcatatgcctggcggcagacagacttacattaataaaaccattacagcccgtgatccggttaggctggttatttctcagactcctcgcttcgggcctggtcttcagtctgctatgcctggagctacaggggccgttaaccagtatgggtttacatctggcacaagtaatgcagcggcgctggcaacccgaagacttgccatgcttcatgaaacgcttcaggaaatgaaagaacttgggtatggggaggcgctctctaaagcccctgacgcgctgattcttaaggccatgataatccatggcgctgaacacaatgtactatcaaaacagcttatcagccgccatcttgatgtaaatggcagccggacgttcaagtcagacctgaatcagtatctgggttttggcagtgtcaatgaaagccgtattcatttctgtcatgacaaccaagctacgctactgtacaccaacgtcatcgagggtgaaaaggcacaggatttcttcctgccacttccccccagcttggccgcgcggaccatcaaccgtcgcctcattgtgacggtggcttggttctcaccggtaaatcatggtcataaagactaccgtggtgctcaattgtgggccagccctgcttttggcgctatcgatctggatgagttcgataactacccctcccacctcaagaatggcaccgtttatcacgaggttcgcagaggaaatcgtgcatcggcatttactagaggcgatcagcttgccatccgtattaactgctatggccgtgcaggtatcagaaaactcagggtcccttatgtcgtgatcgcgacgctggatacgccgggcgtctcactacccatctatgaagaggtccgggcggcgttgcagattgcgacgcaacagaacgcgtga

SEQ ID NO: 86629 - DNA, 234 bp, Citrobacter koseri
atggaactgaaagacagcattgctgaattactggaaagccggggacagtggcgccgtgccgcacgccgctggcttgctgtgatggatctgacggacgacgaggccgaaagagaagccattgcacgccgtcgggaacactgcgttgatatgagcgcgaacataccactggacaggcgacggagtgaaacacggcgcctgtataaaattcagagccgttacgatgcaggctactga

SEQ ID NO: 86630 - DNA, 2412 bp, Citrobacter koseri
atgcgctatccctttgaacttgatccgcagattatccaccacatcatctacagccaggccggctccatcggcaaggccgtcattgaactcatcatgaacagcgtcgatgccggtgctggcgcggtgatcatcgatattaccccggaaggcttctgctgccgggatgatggccgcggttttgcatcatacgacgatgttaagcgctactttggccggttcggcaccccgcaccaggagggagatgccatttacggccgtttccggcttggacgaggccagattatggcccatgccagaaccctctggcgctctcagcgatggcagatgtccgtcgatacgcgcgaaatggggtatcactatgatctggaatatctctctgattcggaacagggatgcgtcatcagcggtgaatggtatgacccgctcaccagccaggagcggatgtcgtgtctccaggaaatccgtgatctggtgcgctatacgcccgtcacggtgcacctcaacggcaccatcattacccgtaatccggcgctggaaacgtgggatgcagaggacgatgtggcctggtatcgtctccgggaagacggcgctgtgtcggtttacaatcaaggcgtcctggtacgccacgacccgggtcacatctggggcgtgggcggccttatcgtcagtaaaaagccgatcgcactgaacgtctcacgcaccgaaattctgcgcaagacctgccctgtctggaaatcgattgctgcccgttttggtgagcttgccgcatccttttctgacaatcagggtaagcaccgtaaaacggaagcccgacgggagaaaacggcccgggcgctgctgtcgggtgagggggatatgcagagtcttttcaacggcgaagaagtgataaccctgctgccgggaaagcagcacgtcacgcttgagcatttcatccgtaaatgttgccattatccttctgccgtggataaaaactgctttaccctcgcacggtatgcccgccatgtcccgcggggagaaatcattgcccgcgccggtatcgcacctgtggtgcatccggtcacgctcacccgctttggttgtcatgaaccggaagaattcatggagggccttaaccgcatacgagccaacttggtcgcgtaccgggagcagctctccggtgagcggctgtggggtggtggctggagagatgagctggctctgatcgactttgaaaccctgagtgcaaactttattgaccgaacacagatggtcagcgaacggctgctggataaggaaacccgacgggcctggacggcgctgcgctggtgcctggccgaatacgctgttgtctgctcgggcggcgaggcgggttatcagtcgcgtgcgtacggtggcattcgctttcagatcctgctgggtgagtccacgtcggcggatgcctggacagacggtgaaacctatatcgcttacaacattgatattgttcgcaggctgaagtctgatgcgctgtgcaccgccagcctgctgttcagcctgacggagcacgaggtggcacaccagggcgacagcctggactgtggccacgacgaagccttttaccagcggtttcatgatatcagcaccctgtgtgcccccgaccgtcagcgctatatgcacgtctggctgatgaagtacaccaccagtctggaggcggagggaaaacgtgccaccggtacggcctggcgggagcggtggctggccgagcgcgccagcaccggccgggagaaaaaaggactcccgggcgtcatcagccatgaaggcattgaggccgtgctcagcgcaccgccagagccggaagatgcgtcgcggctcagctttctcaaccagcagctgaacggtgcgggcactgcagcaccggcggaaactgactggaacagcgtggtggcggaaggaattgagcaggctctgaaaaaaaaggctgcatggcttcttcatcagcaggaacgggaaaatgaactgcgcaacagggagccggaggcagacggtgaagaatacgaagacatgttacaggaacatgaagaaatggtacgtgaacagcgggcgcgttatctgacgctcctgcccggtgcgaccagtgagctgctgaccgatgcgatagtctgctacctgtatttcgacacgcgttcagaagaagaggagctcgatgcctgggcacgacgaacctgggagaaaggttcgtattacccggttaaccgctgtgaagataccacgcctgaggcctttttcctcggtgcagaggaagaagacagagagataccggcatcgtggcaaccgctgatgcaggaaggcgagacgcgatggagcatcagacgtaatgcagctgcggccggatttatcaatgagatggattatctggaatggcgtagcgacagcgccgccggcgagccctcctga

SEQ ID NO: 86631 - DNA, 408 bp, Citrobacter koseri
atgaaattacccgtctgctgcctcgcagcattattccttaccgccggcgttcgtgccggcaccgttatttacaccgacagcgcccatccggtcacaggcaatcccggtcctgacgtgaccgtcattctgctggatgcgcctgaccggctgcaggctgagctgttcggcccgctgccggctgacccggcacaggctgagcaacaggcgcgcgcagttatcagctcacccggttttcagcagcgtcagaaggaccttgctgcaacgtatgccggccttacgcacgcctggtctctcggtcttgagaaataccccgccgtggtgtttgacgataaatgggtggtctatggcaccaccgacaccggcatggccacgcagcgtctgagcgcatggaaggagattgcacagtga

SEQ ID NO: 86632 - DNA, 972 bp, Citrobacter koseri
gtgaacatggcactctcccgtccgcgccggctggcgctcgccacgttactggcctgcacgggcacaatggccagcgtcaataccgcgagcctgctctccagtgctgccagtcccgactgtatcagctggcgcatcagtggtatctgttactggcttttatgcaccccgttcggctgctcggtgaaaacctccgtgaaggtcacccattttatcccggaggccgtggtctcggcctacctcagcccgggcgccaatccctggacggagatgtcggccgtcagcagcctggccgacggcacggaaagtgcgctgctcggcggtgctgcaggtgtggccaccggcggtggccgtcaggagatgaaagctcccggcgagcgcaagcagaatctgcacttttactatggcgatgcgtatggccatccggccactaaactcatcggcggcatggtgccggggtattcgtgcgacagtgccgccacgccttttgtgccgtactttaccagcagcctcgatgcgctggtctggcgcaccggcgtgccggaatcactctacccggaggcgctgatacccgggcagcgtgaaatcggcagcaccacttccggcgatatgtggggcaacgtctacccccgcagcggttttgtcacccagaccgacagctacaaatcggcggccatcgtggtgcagcgcgtggccgacattatcacccgtcaggggcaactgcatgtctataacccgctgaccggccagcgttcccccgggtactggccgcccgacccggtacaggaaaacaccggtacaaaaaatcacaagtggcagcgactgtctccgcagctgacgcagagctgcgcggtattcccggataccggcggtcagattgctgaggacggcaactatgcctgggcactgtggcagccctacagctgctgtaagcgtcgcggccagaccttcctgtacagcaccgacttctcctga

SEQ ID NO: 86633 - DNA, 1425 bp, Citrobacter koseri
atgaaacagcagcatctgcggcgactgcgccgccccctggcggcgttcgcgcttctctccgttctctccctgccggcactcgcggtggatacgtcgctctcgtcagacggcgcctcggtgagtggcgccattaatgacgggcttttttactcgatcgggggcggctcggtgatttcaccgccgccgagccgcagcaacatgtcgcgcctcgggctgaacggcggctggagcagcgacctcatgtgcggcaatttcgacctgaaaaccaccgtgggcaatcagcttaacggtatcaccagcgggtttaaggacctgatgggcaacgtgattcagggcgcgaccggcgcagtgatgagcatgccggcgatggccatccagcgcgccaatccggggctgtatgaaatgctgaccaacggggtgcttcaggcaggcctcagttacgataaagcgttgctgaactgccagaacatgtcaaaaaaactcgccgattacaccctgggcagcaagtggcagcaggcggccgtatccgaagagtataaagatatcgtggcttccagcggcggcgatgctgtctccagtgaccagcagctgcagaaagccaccggtgaagaaggcgtgacctggataggggggcagaagcgcgggggtaagggacaggaggccatccagcccacccgggacctggcgaaggccggctacaacatgatgaacagcctgcccgcgacaagcagcagcagcgtgagttcatccggctgtaccggcaccgcctgccagcgctggccgtcgtccgacgatgcggccgcggccgtggtaaaagtgctgggcgaccgctccatccgtacctgccgtgaaaccagcgaatgcaccagcggcggcacggataatcagccgggcagcgccgttgccggcaccggcttctcccccgtactggaagacgccaccaaaaccaatctggagcagctggataagctggtcggtggccagctccagccgaccgcggataatctggcggcgcttaaaaccggcagtctggttgtgacgcgtggcgtcatacagtcgctgcgagatgacccggacaaagccgcgctggtacagcgtctggccggtgagctggcgatggccgacaccgtggagaccgcgctcacgatgcgccgcctgctcaccaccggtgaatctgaacccaatgctgccgaacagactgaggccattgcagaaggtgaccgccgtatcgatgcgcttgatcgcgaactgaatgccctgcgtaacgagatggagctgcgcaagtccatcagcaacaacagcctgctgactacgctggcgcgtcagggcgcccgtaatcaggataaccagctgcagcagaaagtgggcaaccaggaccagggcttcagccagatgaaccagacgcaatcctccggagcagagtga

SEQ ID NO: 86634 - DNA, 339 bp, Citrobacter koseri
atgaaacgtaatttcctccgcggccgcaccggtcgcttgttgcttgtgatcctctcattgctgctggtcaccgtggtcatgttcgcgctggcctctgtttttatggcgtacgacccggatggtcacctgacccgccgctggctgcatgacaaccgccgggggctgtttgcctggcggctggtgatgtatgccggcattgcggcggcctggctgatgaaggtccggccgcagatgctgaagcactggccggaggtccgcgcccgtctgccacgcacggaactgctctgtgtgcttttcattctggccactgaatgtgtggcctgggctggcgtggcgtga

SEQ ID NO: 86635 - DNA, 1542 bp, Citrobacter koseri
atgaccgcaaacagttttcttgaatattttctggtcctgttcggctgggtgctgaacaactcaatgtggaccatcctcggcaataccgggctttttgccctgccactggtctttaaggtcatgggcgtctggctgaaggtccgggaggaaggtgcggatgaaggcaacaaaggcctcctggcactgccccgtatcgagcatgccatatacgtgtcgttcgtggtgatgctgttctgctgcattccgctgctgccggttgatatcagcaccattaaattcgacagttcccgggcaaaagagtgcggtatcagtgttcccacgccgcagaactccggttacagcggactagtgaacgattttgacggccggacggcagaagtacccatctggtggtatctgctgcatatgatgtcgaagggcaccacgcaggcgatgattgcgtccattccctgcgggacgcagctgcggcagatgcggtttgacgtgcagaatacgaagctgcgtgacccggtgctgctgcaggaggtgcaggattttgccagccagtgttactcccgggcctatttccgtctcaagaacagcaacagtcagctcagcgatgccaccattaactccgtgggctggattgggagtgactattttctcaacacgtccggttattatgactactacaccgccaccacaccgagaagtcagtggccgtatgacagcacgcgtgacagtggctacccggataccggtcagggaggttacccaacctgcaaaacgtggtggtcagatgattcatccgggctgcgtaaacgcgtgctgaccagctttggtgacaacacacgtaaagagatgcagcggtcatttccggggacgcagtgggaagaagttgccctgcgctggctggtcagcccccgaaatgcgggtctgtcaggtgacggaacgacatatgccgtagggagttctgataacgttacgggtgtggtagggaatgttacgcggctgacatccactatcgggcttggtcttaaacaggcagaggcactgccgggttttgatgctctgaagcaggcactccctatgattcaggcgctgctgcagatgatgattatcacggtgatccctgtgctgatgatgttcagtgcctacgagcccaaaacggtagtgaccatctcatttgcgctgtttgcgctgcagttcatcaccttctggtgggaacttgccggctggctcgatgaccgcctgatcaccatcctttacgataatatggcacaacaggggctcgccagcagttctgtcccgtttgcgaacttcatcagctcaaccaacgacggctggatcatgaatctggtactgggaatgatgtatttggtattcccaacgttctgggttgggatgctaagttgggttgggataaatttaggaaccatagtccagacagggttggaaaaggcaggatctccacctcaagatgctggagctaaagcgggccgagacgcacaaggacttgttacggataaaatacaaggggggattaaaggtgggttaaagtaa

SEQ ID NO: 86636 - DNA, 282 bp, Citrobacter koseri
atgagtgaaagtggattcgatgctgacgacttaagccttaccttggcccgtttcgccaacaaacgtcgtaacatcgtttatgacgaagtaaaactgaaacgtaaagcgccagaacctgttgtgttctccagtgcgacgcacgattgcggctctgctgtccttaaaggaatagcaactatcctgactgaaactcctcagcaaaaaaaacgtaatgatgaatgggcagagttaaaaagaaaggaagacgaagagaggtacaattcatactattactataaataa

SEQ ID NO: 86637 - DNA, 315 bp, Citrobacter koseri
atgagcaagagcgcaaaaaataccgtcaagctaacgcttgacctgaacaaaccgccggttgttacagccgagcaaaaagcacgactggcgaagctggccgccatgccggacgaccagatcgattacagtgatgcaccgccaatgcctgaagccgtgtgggcaaaagcggataaacttcctgagcccaaacagcaggtcacactgcggatcgatgctgacgttctggagtacttcaagcacagcggcagccgttaccagacgcgaattaacgccgtgctgcgcgcctacgtcgaggcgcacaaggcgcacggttga

SEQ ID NO: 86638 - DNA, 444 bp, Citrobacter koseri
atggctgttgttgatacgactaagttagcgcgttcgcttgcggttcagggaggacaagcaaatcaaactggcagtctgaccacactttgcactttgcactttgcactttgcactttgcatagaaaaattgatgtaactacgaaatgtaactacaatggaagtgtaatggaacttgaatgggatgccgacaaagcggcacggaatctgaaaaaacacggtgtggcgttcgaagatgctgcgcttgttttccacgacacacagcggcttgaggtctatgacgaccgggaggactacggcgaagaccgatgggcaacgataggctatgccgaccccgccttactgttcgtggtctacaccgtccggcacgaagacaccatccgcctgatctcagcgaggaaagccaatgagcaagagcgcaaaaaataccgtcaagctaacgcttga

SEQ ID NO: 86639 - DNA, 186 bp, Citrobacter koseri
gtggccatcctgaaactcggtaagccttcgttctactgtgtgcctgaggaactttatgtggcaatgctggatgccattgaagattgtgagctggctaatatcgtccgtagccgcgaggatgcagttgatatcaactgggagaacctcttattgtccggcactcacaacctgaagttgaggctgtaa

SEQ ID NO: 86640 - DNA, 792 bp, Citrobacter koseri
atgtctatttcggaccccgttaaatcactctctccttttcgtatatctggaaaaagactggctcaccaggaagatgaatatggagatgttattgttattgaaagtcgcactcatttaaatttaacctttgatatgatttatgaacaaagtaagatgctgaaagtttcaccatctatgccagttcatcattacatccgggcgatgttaatgtctctctcttttacccctgttgaaaaggtacttgttttagggctcggaggtggctgtctggttcgtgctattaacgtcagtaatgataaaatcgcacaggacgtggtggaaattcgcgaagcggtaatacacgttgcgaaaaaatacttttcattacctgataactcgctaactaattaccatgttcaggatgcgggtgatttcatgaaccgcaagaatgaggacaagtatgatattatattctcagacctttattcagaagatgccatgattccgctacaatcaaagcggagctttttagtgtcctgttcagaccgtcttaacgacaacggatggctggtcataaattatcacatcccccctgatgtttactctcttttttcatatacattacattcgatttttaaaactgttctttactgcactgtgcccagtggtaacactattatttatgccagaaaaacagatcttcaaatccctctttcaaaataccaggaatggggtgattccgtcggaaagatgttcagctgtgacgtcagtacattatcccgaaggttatcattctggccaaaaccgttttaa

SEQ ID NO: 86641 - DNA, 921 bp, Citrobacter koseri
atgaagcagaaaagcacgcgttcaaagatcgaaggattcagaaaggactttatttctcttgccaggaaaggggccggaggatatgcgaccatcgctgatcgtcagagggttgcccgctactttcttaatcaccttaaagacaccggtatcaaacttcgcagcgttgacgcgctgaaggttcgttacgtcgaaagttatattgcatatcgtaaaacgcaaaacatcagccatcgaacactccagaatgaaatgtctgtattccggggaattttcagtgcagcagggaaacaccggcttgctgacccggataatgaaagattgagtaataaagcgctcggtatttcgggggttaaccgggatggcactaaaacagctttgacacgcgaagagttttcgaaagcatttaatgaaattgaaaaacaggatcgcggcgtagctgcaacgatgaggcttgccttcgttttcgggttaagaaccaaagaagctgttgaggcctgtaaatcaatatccacatggaaacgggcgattgaaaatggtgataaatcgatacgtgttgtatttggaaccaaaggaggacgccccagagataccacaattattgatcgcgatgaagcacgtcacgcaataatttacgctgaaaaggaagccagggagcgtaatggacgctttattgataaaccgggaattcatcaggcaattaatcgttatcggtattttgtccgtaaagccggactgacaggagaaaaagcgccgcacagtatgcgatataatttcgcccgtgagctttcatcttttcataaaaaacagggattcaatgaaaatgaggtcatggcaatgatctcgatggatcttggtcatggggatggtcgtggccgttatatcagacaggtatattaccgtaaccatcaggagagtgaataa

SEQ ID NO: 86642 - DNA, 432 bp, Citrobacter koseri
atgttctacactttaaaaccgcatgtcataaaatatctggttttttccgcaaacgacatttcagcctttcatttaattaagctcatttcagatatcgaaggtgagttacagtcagtcaggagtgaattattattggattccattttcctaaaatatggtttttcataccctgaaaactatttgcgggacactgaaaattatattcaacgttatgtctttctcatgaccgaacggatgtctgaggctgaggagttaggacttattcctgatgaaaggattaaatatcttgatgacctttttcatctgttcagtacgatcaccagcgatgactggtgtaatcaggcccgggcaacagacgtcacaaacgcgcgatatgttttgtccgactatgcgttctggtgccatgaaaatcatgaatgcgactttctgtag

SEQ ID NO: 86643 - DNA, 420 bp, Citrobacter koseri
atgcgtttactcggtttaattcattatttttccatcgttgctgaacgcacactgcgttcatgtgcaccccgttcgcaactgtcagagtggttttactggttcagagctgacgcagaggcgttgtgccttattgctgatcagctgaagcgtgccagagcctttattctgctcgaagatgaagcggaagcaaagatgttcactgagtgcagcgtttacgatgccgcttatttcttcggagaccgtcagtatcacggtatgaagaaacgctggccccgtgtattactcacgtatttaaccagaaccggactggagcttgatgccacccagtggcaggaaggatgccataacggtttcctggaagcgcggcagtctcagtcaggtacgtttgtaccctgctcatcaacctttgattacgtctga

SEQ ID NO: 86644 - DNA, 366 bp, Citrobacter koseri
atgcacttatcacactcgttgtctgattattacgaatctcaccatgccagcgagcagatcgctcacaaaatcacgctggcgaaggcggaaggtaagctgctgagtgtagcagcgcttcgccgccttgaccttaataccgggacagatgaagacggctttccgttttacgtctgggatatggctgctgttgcacaagaccttgctacgttgtctgtacgcaatcttatccctgaagcctggcactctttctttgaaggcctctgcaatatggccagagagattgatgaagctgcctggacgtattttttcgggcgcgcagtcacagatgaagagagcctgattaacgaagagcgctggatggactga

SEQ ID NO: 86645 - DNA, 369 bp, Citrobacter koseri
atgaaagacgcatttacccgggaagaactgttccacatttttgcaaacgagcgcacttctcatctcatcgcactggccagagtggaaggtgacctcatgatgatcgatgcccttcagcgtcttggtcttgttgacgaatcgggcgatgacagtttccggaacacagactggaaactgggctatgtggcagcacagctcgcagagctgtcagtgcgcggcgagattccgccttcatggcaggagatgtttgaccgtctctgtgagaggggacggaaacttaacgaagccgtctggacgtacttttatgaccgggccgttgaagacgaagcgtgcttaatcaagatggaaaacagcgaagctgctttctga

SEQ ID NO: 86646 - DNA, 612 bp, Citrobacter koseri
atgatccgttttacttctgatgaacttcgtccgcttttcacacagaacctgggtatgcagcgcccgctgctacttgaaaagaacctggggatttatcttcgtgtaccagatgataaacatccgggtgagtggctgaaagcctgcgccgcaggctgcaatccgtcaaaggatgccgactggactgcgcttgccgacacactgatacccgaacgggaattttcctttcagacctttatggcacagagcatgtttgatgctgtgctgaatgaccatcatgacctgctcatgaagcccgttatcagtaacctgaataacgcgctgacgcttcacaaggaaacgagaccaccactgaaagtatatgtgccagtgggcgaatatcgtgaccggatacagtggctttatgaccagtcgttacgccacttccatgcgtgtgtgggtgatgctgaacgtctcagctggcgctcacaggcattgcgtgtgctggaccaggtgatacgcctggactcaaaacgggcaaagcccgccgaccgggagatgtttgatcgtgcggtcgcgagcgtacgtgaccgtatccgttcggtgatgtccgacggctccttacgtttttactga

SEQ ID NO: 86647 - DNA, 984 bp, Citrobacter koseri
atgaagaataccaccggccggcgtaaagcagcggcagttaatactccagacctgtatcagcaggtcaccgataaaatcattcttgcgttcgaaaacggcgtgccgccctggcggcgtccgtggcgtgcagctcagaacgtgcacggcagcagcctgccggtcaatgccgtcaccggccgcgcttacagtggcattaacgtgccgctgctgtggatggccgcagaagaacacgggtatacgtccgaccgctggctgaccttccggcaggcgaaagccgccggaggttacgtcaggaagaatgagaccagcgcgctggccatcatttacaaaccgttcgagaaacaggcccgtgacagcagcgataacctgctgttccgggacggtgaaccggtcatggagcagctggccatgctgaagcatctgcagctgttcaacgttgcccagtgtgaagggctggctgaacctgtcagaggggaagccgctgattctgttccggctgcacagccgaccgtactcagcgcgacgcagttgcagcaggtacagcagatactaagcgccactggcgtcggctgcgaccatcgccggcaggaccgcgcgttttaccggaccggtgccgatcgcatcgtgatgccgacggtatcacagttccggacggaggcggactactggtccacgctgctgcacgaactggtgcatgccaccggccacggcaaccgcctgaaccgggaaggtattacctcgtcatcacggcagttcggtgatccggtgtacgctttcgaggagctgatagctgaaaccggaagtgcttttctctgcgcagagctcggtatcaccggcgacgtgcaacacgaaagctatctggccggctggctgagagtccttcgtgaagacaaaagagcgattttccgtgcctgccgtttcgcccgggaagcctcggaatatttacttgagcccctgaaccggaatacggaacaggcggcataa

SEQ ID NO: 86648 - DNA, 951 bp, Citrobacter koseri
atgttttcatggtgccataaccgtctggagatcaccggtaaatcagtctgccttgatgtgatgcagccctggattgccggcacggaaaaaccgctttaccggcacgccatccggcaggcaataaagctgttcctggccggctgtgccggcatactgaagcccgtccgggcggtggagtacgcaccgtatccgatgctgactgcatccggtacgggcgcgcagacctctccaaatcaggcatttcagcactttctggagctgctggaacaggatgcgtggcttgataccaaaacagtctcccgtatggagaaaatctggctgaagtccggcatcgatgcgctgaaatgggaagccattcccttttcagcgcggcagataatggcgcagctgatggtaatgcactatgccgactggtttggcgttgccggtgccggtggtcagtttgacccgcaggaacgctgggagtggctcagcatcatgccggagacgacctgtccctgtgacaagctgatggtgatgccgtcacgtctggccaccgagcttaacggcgaaaatggtctcttcaccgggctttgcacatcctctgaactttatatgcagctctttggcacggagttcccggcaggtcatcaggccagctggagccgcgatgaagtgggttcacttacgctgagctttgcgtctccctggtatccgccgtcaggtgaggtcatgggcgagatgtcgcagctgttcgactgtgaaatccggcactactggatttcacctgacgcaggcacatcgggctacaactgctttgaccggggcgaccacgttgacagcggcccgtacccgacagaagaactgctgcagtcagcatccggcggcggggcccgtatgtacctggtgacgccggaaacggctgctgtacccgctgcaaccgcagcgcactacggcagtattcgcgcataa

SEQ ID NO: 86649 - DNA, 279 bp, Citrobacter koseri
atgaaacaagtcataaaccacgaaaaaccctttctttcactcttcagccagacggcacgttaccaccgccagcaccaggtgtttgaggatttcatcagctgcagcgtcatcgtactggaaaatcgccttcacttctgcgaaaagcgcgagcagaagtatctgcgcttcgtgtcacggtatgaaaagactgacgtggagaacatggcacatttgcttgcccatgtggtaaacgggcttgaggaggagccgggggattttcttggccgggtctttatgtag

SEQ ID NO: 86650 - DNA, 639 bp, Citrobacter koseri
atgaacgctaaaagcaaggtaagcgctgccaccgcaggtgaaagcaaacacaaaggccgcacccggttgtcgatcggtgcagttcgcagcccggagagtaccgaggctatcctgacggctgcagctgacatactcgaagagaatggttacaaagctttcaccctcgacgcagtagttgctcgtgcaggtgccagtaaacctaccatctatcgttggtggggcagtaaggccgcgcttatccgggatgtatatgaacgttccggcgaggcatcattggttatacccaacaccggaagcctggagcaggatctcaatattcatcttggttcactgtggaagtggtggcgatctacccgttcaggtgaagccctgcgtagtttcattacggaaatccagctcaacccggaatcgctggaagagtttcgcaagattttcctgccgaggcgggaacgatcaatgcgccgtatttttgaccatgcgctcgcacgtggtgagattaaagatgctgcagcaatagaagcggctgcatcaatgctgacaggtatgtcctggctgcacttgctcacaggcaatctgggagcaacgcaacagattgagcaggcagtaaaaattgtgacaacagggcttcgagcgccttaa

SEQ ID NO: 86651 - DNA, 1461 bp, Citrobacter koseri
atgaatcactactctccccgcggtctacctcaaatagctgtagccctggttgccatgctgatactgacgggatgtgtaccgggagacttaaagacttcttcggtagcctctaatccaaccagcctgacatccagcaaagcgcttgagggaatccctgtgtcaaaagcgaactggccgcatgaaaaatggtggcacgcgtttggcgacacgcaactgaatcagctcattgatgaagcgctggtcagtagcccaaccttgcgcggtgcagctgcacgagttcgtcaggctgacgcaattcaggggatggcacaggcacaacaattaccacaactggatgccaatatcgtcagcacccgccagcgttatagcgagaatggcacgacaccggcggtgatggcaggcacctggcagacagttaaccaggacacactgaatgtcagctatgagctggacttctggagcaagaaccgcgctgccgtagaggcggcagtgggccgaaccaaagcgatggaagttgatcgttatgctacccaattgatgctgtcctcggcaatcgtccagacttacatcggattgcaggagagttaccagcagctggctatcgaacagcagatgcttaatcaccaggaaaaggtcctggcgcttacccaacaacgcttttccgctgagctggattcgcaaatagacatcaaacaatctcaggccgcgattcccgcgacccgtgcccgcatcgctgccctgaatgaatcactggagctgagccgcaacaaactggctgccttgctgggtaaaggcccggatcgtggacgcaccatcgtagcaccgaaacttaagcactccgacacggtgactattcccagcgtattgccagccgaattgctggggcatcgcccagacgtggtcgcccagcgctggcgtgtagaggctgccagtcatgatatcgagggcgctaaggctcgtttctatcccaacatcaatctttccgcctatgcgggctatcagagtcttggctttgaccagttcgccgcagcaggcagccgcatccttggcattggaccagctatcagcctgccgatcttcgaaggcggccgacttcgtgccaacctggcggcgcagaacgccacttacgatattgcagtggaaaactacaaccagacgctgattgatgcactgcacgatatttctgaccaactcacgtcgatccgctggttgcacgaacgtattgaacagcagcaacaagcagtgcaaaccgcagatgacgccgcgaacttagttgaccagcgctacggtgccggactggcaacctacattcaggtacttaccacagaaaacgaagcacttgcacagcgccgccagcttgccctgctccagtctcgcgggctggcgctggaagcaaacttaagccgcgccctgggcggcggctacgttcccgatttgcctgccgatgctaccaataattaa

SEQ ID NO: 86652 - DNA, 1197 bp, Citrobacter koseri
atgaatcagagtacacaacccaatcaaccaaatatttctgccacgagtgaggacaagagtagggcaacacgtggcctgctggtcacggctgtagtcgccttattgctgatcgccgggggagcatggtttttcctgcaacacaacgtagagcgaaccgaagatgcttacgtagacggtaatattgtacaggtaacctcccagattagcggcacggtaacgtcgatagccgccgacaacaccgatcatgtgaaggcaggagcaacactgattacgcttaacccggtcgaccaggaagtccgattcgagcgcgccaggaccgagctggcaaaggcaacgaggatggcccgcacccagtattcgcaggttcagcagttgcaggcagaagtggcgcagcgacaaaacgatgtccagaaagcaagaacagacctggcccggcgtagtgggcttgctgccagcggagcggtttcacgcgaagaaatcagccatgctgaagatgtttttaagaacgcccaagacgcgctgaatgcagtaaaacagtcactgcaacaacgccttgcgatggtcgatggcacccatttacgcacccacccggatgtactggccgcagcgaccaacctgcgcgatgcatatatcgctcgcgcacgtacagccattccatcacccgtagaaggcactgtggcaaaacgcagtgtgcaactgggacaacggatcaatcctggggtggcactgatgtccgtcattccgcttaaccagctctgggttaatgccaatttcaaagagtctcagcttgaacatttacgcattggccaaccagccgaactgaccaccgacgtctatggccgcaacgttgtatatcacggcaagattatcggtctggacgccggtactggcagtgcttttgccctgctacccgcgcagaatgcgacgggtaactggattaaggtgactcagcgagtgccggtcagaattgctttggatccgcaggaaatcgcccgccaaccgttacgcattgggctttcaatgcatgtttcggtgaatacacaggatcgcagcggcgaaaccatcagggaagatattgcgcctgggttcgtctacaaaacggaggtctacaaccatgaactgaaggatgctaacgctattgtagaaacggtaatccgcgataatgaaggacagccgcagactgcggccgcgcaatag

SEQ ID NO: 86653 - DNA, 1521 bp, Citrobacter koseri
atgtacagaaaacacgccgcgcttctgctgacggtctgtctgttgtgtggtctcgagtttctccagaccggcatgatagccttcgcttctgttcccatccgtggtgagatcgacgccagccctgaggaatatagcctggtcgctgcgctatatgcctgcgttgcggtggtggtgatcgccaatcaacgctggttgaccgagcggctgggctggcgctcttacatgatcggctccatcgtggtttacgttatcggggcgctgttatgcagcctgagtcatgatctctacacctttgctatcggtcgggtggtcatggcaatgggtggtgcctcattcatgacaacatcacgcattctcgttaaccatattccccccggtcctggccgcttcgtcggtattaaggttttcgcagtcggactggccagtggcactgcggcagccccgatggttgcctctctggccgtcactcacgacacctggcaggcgatgttctgggtgctgattgcttttgcactactggctgctggactctcagtacgcttcctgcccaaagatcctcacccagttgaggagcgcacacggaccagcccggcacgtctgctactgctggctgttggttcattttttcttctgtacgttttgcagcgttcttattacgacttttacgacgacaccggcatcatgctggtcttcgcggggctggctgttttcgcgctttacagctatttccatgtcgagcataaccatgaacgcccgctgctgaaaatcagagaattgatgacccctcgctatctgttaggcgtaggcatcttttcttttagctatctgatattgggttctaataactacatcctgccattctttctccagaacggcctcgggtattcctgggaaactattggcagattccaggcattggggctgtcggcggcgctgctgacatggctggtgatgatgcgtgtgctgcctaaatatccgtccccgaagaagttcttcgtgctgggttttatttcactggcaacgttcggctggctgctgtcttcactgacgcctgctgccgatatgtggctgcacatcctgccagcgctcgcgctgaacggctgttttgtcatgctggtactggcgaccactgcaatgcaaaccttccgggacgtgggtcatgaagacacgctatttgcccatgcacagcaagtaaaaaacatgctgggtcagatagccatggcagcaggaaccagcatcgccaccatcttcatgcaatggcgcagcacggtgcagtacggggccttgaacattcgactgaccaatgaagaccctatctttgcgcaacagctacagcaattcagtcagttcttttcgctgtcacatgaagcgagtcaggctaaccagatggcaatggcacaagtcgcccaacagatcagccagcaagcatccctgctggcagggatcgagtttttctgggtagtgatttgggtcgccatcactgccgcagtgctttccgttttacagaaggtgttccgatga

SEQ ID NO: 86654 - DNA, 1164 bp, Citrobacter koseri
atgagaagattgaatttgccgatccttgcgctgaccactggtgcttttggtattggcgtcaccgagtttgcgccaatggggatgcttccgctgattgcgcacgatctcgatatctctattcctacggcaggcatcctgatcagcgcctatgccctcggagtgatgattggtgcaccatttatggcactgaccaccagccgcatccccaggcgcacactgttgattgggttggtcgcaatcttcacattaggtaacctgctttctgcagtttccagtagttatgacatgttgctgatatcaagggtgattacctcacttaatcacggtgctttcttcggtattggttctgttgttgcggccagtctcgcacagccacatcggcgagcggcggccatttcagcgatgtttatggggctgacaattgcgaatgtagtgggtgtgcctctcgcgacctggacaggtgaagtgatgggctggcgggccgcattctggggcatcagcgggattggcgtattcaccatggctgcgctctggaaaacgctgccagttatcacggctccagccagaaaaaacgttgccgcagaattacgcgtgttaatcagtcgcccggttgtggctgcgctcgggctgacggtgttgagttccggcgcgatgttcacggtgtttacctatatcgttcccatgctgcggattgaaacacatgcttcaaccacctttgtaacgagcatgctcgtcacctacggtgttggccttactgtcgggaactggatcgggggaaaattcacggaccgctaccctgatcgcaccctggcattatccctcgccacattggttataacactgctgctatttgcctttttattgccctatgcgctgccaaccgcagtactggtattcctgtggggtgtcgccagttttgctgtaatgcctcccctgcagatgcgcgtaatggccgccgcgcaacacgcgcctaacctggcatcatcggtcaacatcggtgcttttaacctcggtaatgcggttggtgcggcactgggtggcgcggtaataactgccggactcacttatccattcgttgccgtagcgggtgcggtgacagctgggctgggtctactcgtactgttgatattgaacaaatcttcttctgctccaacaagtcactga

SEQ ID NO: 86655 - DNA, 1158 bp, Citrobacter koseri
atgaacactgaatcaataaaacccaatactggggaaatcactattgtcggcggttcgctggcgggactgacactggcactcgcctgtgctaccaggggaattgctgtacaggttatcgagcggtcaacaggacatgttctgggtggcgacagcctgagtatcgatctctctgtggtggctgcgaccgtgggaaatgacccgcgtgaacatcctgttttacccgtggtacctgcttatcgtgaattaaccacctggcctgcgctctacgggtggctacgagaacgggcactggccacacccggtatcaacctcattgaaggtaaaaccatctcttcggtcaatgactatgatgaccatgcgagcattacctttatcgatggcagcgaacaaatcactggcgtggttatcggtgccgacggttatcgcagtatcgttcgtcaggcgatcacgccggagaatccgttcgctcattacgccggttatctggtgtggcgtgggctggtagaggaacggacgctgaaacaacccgttgcatggcctacagatggcgggctgtggattgactttgtcgatggctatcggctggtcgctgcaacgcttcccggtcgtgatggatccgttgcggtcggacagcgtcagattactttcgcatggttcgacttacatcgggatgaattgctgcgtcagaaaggttgcctgacagccgaaggccatattgtaggaacactaactcgcgcaaccatcgatgaaaaagtcagagaagaactggccagcctcgcgccaaagctttggcccgctatctgggctgaggcggtagtggccggtgtacgttccaccgaaatattaagcggtgcccccatcgctgagttcaaaccactacggcttacacgtggaacattagcgatgataggcgatgcagctcatgtggtttcccccatgaccggacgcggctatttgaccggggtggaggatgcaatggtgctggctcaggaacttgccaaacgcaaaccagatgaacctttatctttagtactggcacgctacgagaaaatccgcctgccttatgttcaggcgctggtagatcattcaggaagaatcagtgctgaataccgacgctatgctgaatctgccggtgtggatttttccgtggaaatataa

SEQ ID NO: 86656 - DNA, 606 bp, Citrobacter koseri
atggctcaagaaagattcacggctgaaaactctgcattactgttgattgaccaccaggtcggtacgatgcagttaatcaaaaatattgatacgcagcttgcggctaagcagtcaatcgcactagccaagatggcgaaaattctgaacttgccaacagtgatcacctccagtcaggaaactaatgctcaggggccgattctgccagaaatagcgcaaattctacctgatgagcatgccgcacgcattaagcgtccaggcgtggtcaatgcctgggcataccctgaattccgcgatgcggtgctcgcaaccgggcgtaagaatctgatcatggctggtgtgactaccgatgtgtgcctaatcttcccggcaattgatgctgcacttgaaggttttgccgtgcaggcggtcatggatgcatcaggctcaccaagtgacctgtctgaagagttttctcgccagcgcatgcatgatgcaggcgtagtgctgacggcgacgaataccctgatggcagaaattgcccaggactggtctacaccgcagggccagcagctgattgggctgttattcagcgacgtgttcccagcgctgggtgccggtatttcctga

SEQ ID NO: 86657 - DNA, 741 bp, Citrobacter koseri
atgtctgttgttatcgcaagactcaattatgccaatcacgatagtcgtttccgcagttacggactgagggcggggggcaggtcagcgcagttttcgccattcatcggtgttgatcattactggatgggggcaccgaccttcccgccacataagcattcagggatgtcggccgtgtcttacctgttacgtgattctgaaaccggtatgaacaaccgtgattctattggcacccagaatctgatcaaacccggcggcctgcactggacaacggcgggcagaggtgtcgtccatgaggaagttccggctgaacagggcaagacagttcatggattgcagatcttcgtggcccttgcaccagaaaagcaggacattgctccctttccattaatgcttgaaccggagaatgtgccggccattcaactgccggggtgcacgatacatgttccgttaggaagttatgctgacatgcattcccccctgaccccgccgaccgaagtgacgctactggatatcgctctggaagagaatgctgaggtaaaggtgccagttcctgccgggcatttactctttgctatgccaatctccggcaatgtcgagattcaagggcagaacttcactctcgatgaccagaaattgccgttattcccggcaaataacgctccgcgcgaaatcacgttaagagcaccaatcggaagcgtaaacgtcgtgctgtttagtgcactttcgctacacttaaactga

SEQ ID NO: 86658 - DNA, 423 bp, Citrobacter koseri
atgaattttactgatcagcaattattggctctattacgcgacgatgcgcgtatgtcgataacagaattagccagtcggatgaaagtctcgcgcacgacggtgcaaaagcgcatagaagcactggaactggagggcatcattactggctataccgtaaaggtgaagcctggagtggaacaaaaccgtattcgtgcctggatgagtgtggcggttgaaggcacaaaagcattggctattgttcagcaattgcggttggatccggcggtttatacgttacatagcaccaatggaaagtgggatttattggtcgaattacgttctgacaccctggaaaattttgaccgaacactcgggcgaatccgccgtattgaaggtatttataatactgaaaccagcattctgctctccacacataaagcctga

SEQ ID NO: 86659 - DNA, 1023 bp, Citrobacter koseri
atgacacgcttcattgatataaaagatatgcgcagattggttgggctgtctggcgtagcaagatttattagtcagttagtggattacattgaacaggatttcattcgctgggccgaatttgataagactccacgtattgcctgccattccgacattggcgttatcgagctgatgccaaccgctgatgccaatctgtacgggtttaaatacgtcaatggccaccctcagaatgctttacataaccaactgacagtaatggcgtttggcgcactggcgaaaaccgcgaccggttatcctctgctgctgagtgagtttactctggctaccgcactgcgtaccgcggctacctcagtgctggctgcaaaatatctgatgcgcaagaatgcccgtcacatggcggttatcggcaacggtgcgcaaagtgagtttcaaataatcggcttccatgaagtgctcggtgtaactgatttctggctatatgacgttgacgccactgccactgaaaaattaatgggtaacctgaattcatatcttggtatcagtctgcacttttgccgttcggttgatgaagctgttgcaaaagcagacatcatcaccaccattactgcagacaaaaccaatgccaccattgtcaatactgcacagatcaaaccaggagttcatatcaacgcagtaggcggcgactgtcccggcaagactgaactggaagctgacatcctgaactatgccgacgtatttgttgaattcactccccagtcacgcattgagggggaaattcagcaaatgcctgctgactttgctgttaccgaactgtgggaagtgattaccggtcaacaaactggtcgatgcagtgatgaagcagtaaccgtcttcgattcagttgggtttgccatcgaagatttctcggcactacgcctgattaacgatatagccacctgtcacaacatcggcagccatattgagctggtcccgtctccagctaatccccgcgatctttacagcttgctggtcagcccggagtaa

SEQ ID NO: 86660 - DNA, 927 bp, Citrobacter koseri
atgcaaactgctcaaacggtaatgatggtgcgccctgccgccttcagagcaaatcctgaaactcttacaagcaatgcatttcaaaagccattatcggcagttgaagatgttgcagaacaggcgcgtgctgccttcgacggctatgttgcggctctgcgcaatgccggtgtggacgtacttgttatcgatgacaatgccaaaagtgaaactcctgattcactgtttcccaataattggattgccatgctggaagatggcactatttatacttttccgatggaagcgcataaccgccgtcgcgaacgccggatggatattatcgctgatctgacacgtgattttgtggtatcgcgccgtgttgatctttcaggttttgaaacacgcaacctctatctggaaggtaccggctcgcttatcctcgatcatgacaaccacattgcttatgcttgccgttcatcgcgcagttcctgggaagcaggacaggaattcgaacggctgtccggctaccacatccattggttcaacgcctgtgatcgtcatcttcagtctatctatcacaccaacgtcatgatgagtgtgggagcgcaatttgctatcgtctgcctgcaatccctcacctcaaaactggaacgcctgcgcttggtcacactgcttgaacgcacagggaaaaccatcattgacgtcacctacgcacagatggaagcctttgcctgcaacgtgcttgaactgagaaatcattttggtcagccagtctatgccatgtctacgcgcgcctgggaatcatttacgccagaacaacaggcgttaatttccggttatgccagcctggcattggcaccgattaatataatcgaagatctcggcggaggtggtgcacgttgtatggtggccgaaattttccttgaaaaaaaacgggtattcatctga

SEQ ID NO: 86661 - DNA, 1425 bp, Citrobacter koseri
atgcagaataataaaaccccgggtagcctgaatcaggccccagttgcagaccgaaagctctcaaaacagttagataatcggcacattcaattaattgctataggcggtgctattgggaccggcctgtttatggggtcagggaaaaccatcaatctgtccggctcctctatcatttttacctacctcattattggcttcttcctgttcttcgttatgcgcgcattgggagagcttctgttgtccagtacgcattttaattcctttgccgactttgctagtgaatatctcggcccttgggcaagtttctttattgggtggacctactggttgagttgggtagtagcctgtatcggtgatgtagtagtgatcggaggctacatgcaattctggtttccacatctggacttgtggattcctgcttttagtgctctgggattgatgctggtaatgaatatgctgtcagtgcggatttttggtgaaatggagttttggtttgccattattaaagtaatggcaattatcggactgcttctgacaggttttttaatggtgatgtcaggttatacctcaccggatggcgtaaaagcctctttcagccatttgacgcaaagtggtacgatatttcctcacggtattactggctttattgctgggttccagattgccctattctcttttgtcggcattgaattaatcggcgtggcagccgccgaaaccaaaaaccccgaggtcaatctgccaaaagctatcaacgccatcccgatcagaattctgttattttatgtcctttctctggtatgcattatttccgtctcttcctggcaaaatatttccgcaaacaaaagtccctttgtgggtcttttttcgctagctggtttgccagctgctgctgcagtggtcaattttgtcgtgctcacatctgcgctttcttccgcaaacagtggtgtattctctaccagccggatgctatttggtctggctaaagaaaatgcggcaccgcaatcactgggaaaactatctgcacttaatattccgatgcatggcctgttgctgtcagggttctgtatgttcagtggcgctgcattactgttcatcgtccccagcgtgatgggcgtttttacactgctatctacactctctgccattctactgattttcatctggagcattattcttttctcctggctggcttaccggaagcagaggcccgacctgcatgttaaaagccgttaccggttgcccggtggtgctgtgatggcatggagttgtctggtatttttcctgttaatgctgtgcgccctggcattaagggaagacacaagaatcggtctgatgatcgcaccgttttggtttatctggctggcgattgcctggcgaagcaggataggagataaccgactcgaaatgaataatcagtcagattag

SEQ ID NO: 86662 - DNA, 717 bp, Citrobacter koseri
atgagtgacaacaaaaacacgcgtccagtcgcagtggttgccggtgcgggagctggaaatgggcaggcactggcgaaacgattttctgatgcaggatatgcggttgccttgttggctcgcaatttgaaacaaacccgcgctttagcgaatgaacttagcaatgccagagcctatgcatgtgatgttggggacagtgatgccgtatcggctactttcactgctatccagaacgagcttggcgctgttgaagtgttgctgtttaacgcggggtcaggggtgtttgctgatgtagagtcaatcacgcctgaacagtttgaatcagcatggcgggtgaatgcgttcggggcgttgctgtgtgcacagcaggttatccctgcaatgaaagccagacaaaaaggcaatattatctttgttggggcaacagcttcgcgtcggggtggtgctaacacagctgcctttgccccagccaaagcggcacaatatagtctggcagaatcgatggcacgcaaactctggcctgaaggtatccatgtctctgtcgtgataatcgacggcattgtcgatttacccaaaacccgcgaaagtctgcctgacagaacggaagatgagtttgtcgctcctgaagctgtggctgaggctgcctggttcatgacaacccagccacgtaaaggatggagtttcgaaacggaagtcagaccctggcgcgagaagtggtaa

SEQ ID NO: 86663 - DNA, 876 bp, Citrobacter koseri
atggaactgcttaaccacatgtcttacttcgttgaagtcgtcaaagcgaaaagttttcgtggcgcagctgaagcgctaggcatgcctaactcgactctgtcacgcaaaattggagaactggaaaaaaccattggtcttcgtctgttgcatcggaccacacgtaaaattgagctgactgaggctgggcagatttattacgatcgttgccgccgaatcgttgatgaagcccggttagcacatgagcaactgggcaccatgctggcgaatcctgaaggtttgctgaggatttcacttcctgccgatcttgccatcgtggtcctgtcgccgatcatctgtcagttctcagagcgttatcctgggattagttttgattttgatttgacgccgagaaacgttgatttggtttcggaaccttttgacctggcaatacgcatgggggtcctgcctgattccggtctgattgcccggaaactaggttccctgccgcgttatctttatgcttctccgcactaccttgcgacaaaaggcgtacctgacagtcctgaagaactcactgagcatgagtgccttgtaatgcgtccagaaaaaaccacgacctggcatctgcataacgatgaagagcgagtcagtatcaaagcctcaggtcgatttcagatgaatagcatcggcatgatgcgccgccttgcagcgatgggaatgggcgtggcaatactgccagaattaattgtcgaggaagatataaagagtaacgctcttataagggtattggctccttttgaagctgacgccgtaacgatctatgcactgaccgaaacgagactgctaccggcaaaagttcaggtattcattgaatttatacgtgaacatttgaagtga

SEQ ID NO: 86664 - DNA, 582 bp, Citrobacter koseri
atgagctttgaaaaattcaccgcagacaattccgcaatgcttctgatcgaccatcaggtcggcactatgggttgggcgaagtcaatgccttttgaagaactgaaacgtaatgcgctgatgctggccaaatccgctgccattcttggaatgccggttgtactgacatccagcatggaagaatatgcccaggggccactgctggatgagttgaaatcaattctgcccaaagagtttgagacccgcattaaacgcttcggcatcgtcaatgctatggacgatgaaaactttgctgctgcggtaaaagcaacgggcagaaagaaactgatcatcgctggcgtaaccaatgacgtctgtactgtttacccggccctttcgctggcagcggatggcttcgacattcaggtcgtcgctgatgcgggtgcatcaccgaccaaaatggccgatgacattgcattacgccgtatggacaaaaatggcattacactgaccaccaccaaccagctgattgccgagctggcggggagctgggcaacacctgaaggtgaaaaactggttcatgttgtgatggaatccttccagtaa

SEQ ID NO: 86665 - DNA, 807 bp, Citrobacter koseri
atgaaatatatcgacgttaccgaaaactcacttaattctctgatttcactgaaaggacgtactgccgtagtaactggcggtgcggtcgggattggccaggccatttgtaaaaggctagctgaggccggtgccaatctcatcattggcgatttgaacgttgaaaaagcaaaagcaactgcaactgaactggaacagtatggcggcaaacatctcggtgcagaactggatgttaataatcatgcttccgtggctgcgctggctgaactggcactttcaaccacgggacgcctggatatctgggtgaacaatgcgggaatctatccttctcgtcaggtactggaaattagcgataccgagtgggatcgcgtttttgacctcaatacccgtggaacattttttggtgcccgtgaagcggcactgagaatggaacctaataaaggtgtcattatcaatatcgtttccactgccgcatttaattccagtaacggcgctaacccagcccactatgttgcatccaaacacgcggtcgccggtttaaccaaaagcctggctgtagaattgggaccaaaaggtattcgcaccgtaggtatttcaccaacactgacggaaacccccggcgtcaatagtaaacgagcagaaggagatgcggttacagaagcactcgtagcttatgcgaaaggtttgccgttaggacgccttggtgttcctgatgatatagctcgcgtggtgttatttgccgcttctgacctgggtgcctttgtaaccggtagtattattcctgttgatggtggcgacctcgcccgataa

SEQ ID NO: 86666 - DNA, 753 bp, Citrobacter koseri
atgagtgacatgttaaaaatatttcgtagtgataaacaccgtcatggttctgggggatttggtattgaaatcctctggccaggaatggttcagaaatctgatgacagcggcatcggcgcaattggtcgtattgaccatgcgaacatcaaaccgggtacagttattccaatgcacccacataaagacgatgaaattcttacttatatgcgtaagggaagaatgcaacatctcgatacagtaggcaacgaggaagagatttccaatactcgtctgatgttgatgaatgccggccatactttccagcatgaagaaagagttccaggtaataaagacgggttgatgcagtgcctgcaaatattcgtccgtcctgctgagaccgatcttaaaccgcaggtacagtttcacgattttggtgttcccaatagcgaaaatgcgtggcgtctgatcgccggaccatctgaagcgcccctgatttttcgttcacaggcatggttgcatgacacgcgcctgcacgcaggcaatgagataaccttacctgaagtgcctgttagtggggtatcaagaattctctatgtattcgaaggcactgcaaaaataagtaattatcaactcgaaagcggcgaaagtgtcattatcaatgataatgaagcacatatcgtgacagcacaggatgataccgatttggttcttttcaccaccgaccctaacgctaaagtgttcaaaggcggaatgtttagcggtaatatgcgataa

SEQ ID NO: 86667 - DNA, 879 bp, Citrobacter koseri
atgcctaatgaacaagccttaacaacatcagaagttaaaatcacgcaccatactgcagtcgtgaacggtgttcgtctgcattatgcgttggcaggttcaggcgagccactggttctcctgcatggctggccacagacttggcgcgagtggtacgcgatgatccccgaacttgcaaaaaaattcacagttattgcacctgatatgagaggttttggcgattccgataaaccggggagtggctacgacaaacgcactgtggcggaagatatctatcaattggtgaaccatctcgggtacgacgaaattaatctggtcggtcacgatatcggtatgatggttgcctatgagtatgcgtcagcgcatccaacaaaagtccgtaaacttgcggtgcttgaagccggtcttcctggcttagggctggagatgctgatggatggtgcgaaattcccgcagttctatcatttttcattcttcatagcaccaggacttgcagaaacgctggtcgccggtcgtgaaaaaatgttcataacccattttattcgtcatctggcctacgatacttatgccctcagtgatgatgacctgaatgaatatgctgatcgtctgagtgcacctggcgcattgcgtgccagcttcgaacattatcgtgccttccctgtagatgcggttaacaatcaggaaaacgccaggactaaacttactatgccggtgcttgccgtgggtggtgaatactgcatgaacgaccaggttggccacatcatgaatccgctggctgataacgttcagacagttgttattgagcgtagtggccactggcttacggaagaacaacctgaagagttaactgccgcattgttagcgtttttcacagcagtgtaa

SEQ ID NO: 86668 - DNA, 477 bp, Citrobacter koseri
atgagtgcacgaatcctgaaacccggtgaaggtcaaatgactggcgtagccggggacatctacaccattaaagccagcagccgcgatactggtggcgcatacaccatcatggaagcaattattccggcgcagaagggaccgccgccacatagacactcaagggaagaggaatctttctttattctggatggtgaactggagtttttttgtgatggagaaagaagtgttgcagggccaggaacttccgttactgttccgatcggttcgcttcattatttcagaaatctcggagatacaccggccagaatgctgataatggctgtaccggcaggattggatgattattttgttgaagtcagtcaaccctcaggaacattttctgaagcaaatcctccggcgatggatgaggcacagattaagaaaatgattgagaaagcgcctgattacggcattgaaattatacctcctgaacattaa

SEQ ID NO: 86669 - DNA, 1059 bp, Citrobacter koseri
atgagtaacatttttacccctgccaaaatgggtcgatatactttgtcaaaccatctcgtcatggctccgatgactcgcagccgtgccaattatgatggtacgccgggtgacctcgttgttgagtattacaaacagcgcgccagtattggtttaatcattgcagaaggcacgcaaccttcggatgacggtcagggttacctgatgacgccgggtatttataccgaggcccagattgcgggttggaagaaagtaacgaatgcagtccatagcaagggcggccatatcttcattcagttaatgcatgcaggtcgtatgtcacatccagataatacaccgcatcataggcagggcgtcgctccctcagcgattgcaccagccaccccgatctttactccaaccggaatgcaggacattcctttaccacgtgcactgtctactgaggaagttcgcaacaccgttaatgacttccgcattgccgcacgtgctgcgattgatgcaggagctgatggcgttgagattcatggtgctaatgcatatctgatccagcaattctttgcaccaagcgcaaatacccgcacggatgagtacggtggttcagtagaaaatcgtgcacgttttgccattgaagttgcggcggctattactgaagagattggtgctgacagaacaggcatacgtctttctccgggtaccgcaatgtgggggattgatgaaggggaacaaggaccagagctgtatcgttacctggttgcagagctgaataaactcgggctggcttacgtgcatattatgcacctgggtaacgaagagctgctgggagatatccgtcggctctggtctcagacattgattgtgaatcgtccggggcaggaccgagtgaaaattggtaatgatattgctgcaggtcttgcagatctggaatcatatggtcagatggtgctggcaaaccctgactttgttgagcgtctgcaatctaaagccgaaatgaatactgccgatcacacgacttattttggcggtaccgaggttggatacactgattatccgagtctggcataa

SEQ ID NO: 86670 - DNA, 1047 bp, Citrobacter koseri
atgtcgagaacaaaagcacagtccctgagcagaatgggtattgatatcggtaaaaatacatttcatgtagtagggatagacgatgcaggaaacgtcctgattcggcgatgttttacccgcgataaattgattgagtatctggcccgctcaccccagacgacaattggaatggaggcttgtccgggatgccactggctggccaaaaaagctaagtcatttgggcatacaccctgcattgtcccggcacaatttgtgaagcctttcgttaaatcaaacaagaatgacctgattgatgctgaagcaatagctgaagctatttctcgtccaacaatgcgaacagtgataccgaaaacaacggcacaactcgatctacaggcattgcatcggatcagagaacgtattgtgtctcataaaacagcggtggttaatcaggccagggcatttctccttgaatacgggctgactattcacagtgggattgcgaaattcacacatgatatgccttcactgctagctgacgagcaaaacgggttgagtccatcgatgagggatatagtcactgagctctggcaggaataccgcgcccttgaagaaaagcttttgcacttacgtcaccggattgaatctatcgcagatgccgatggaacagctaaaagactgacatctattcccggcgtaggaaaattgacagcgacagcaatgacggcgtttgtcggcaatggtcagcaatttaaatcagggcgaaatttagcagcctggcttggtctggtcccccgggaatactcgacaggaggcaaacaacgtttattagggatgagtaagcgtggtaatgcatacctgagaaaattgcttatccatggtgcgcgaacctgtgttctgcatttaaacagaacaacaaattttctggggcaatggatacaaattatggaagagcgcggggtgcaccgcaataaagttgttgtcgcactggcgaacaaaattgcccgaattatctgggctgtcatgacacgaccgggcgctttttatgtacaacaacgagatgtctga

SEQ ID NO: 86671 - DNA, 561 bp, Citrobacter koseri
atgcagcaagcctttgttttctctgttctccttctttggatgggattgtcaggggcaatgagtctgagttttaccgctggcagcacccacatcaggttttatctgatctgggcgctgctgttctgtcttcctttcctgctgcgtccgtttgcccgggcagagcggcagttcaggccggcgatgacgctggttagccaccgccgcagacgggcatgggtgcatcttgcgccctggcagcccaccacagacctcacgtcggagcgagttcatcagttctggcagagtgtgaacagttcaacccgccaggcactggaaaaacaccgtaccgttatcatttcctcgcaccttctgaccggcattcgtgcccgtcgggtgctggtctgtatcgcagaaagcggaatagccgtccacagccggacttaccgtactcccttcacaccggcaaagagagcgctgatgcaactggaaatcctcttcaggcagtggcgctggcgcacggacttccgcagtgactggtccgtgctggtcctgcgaagtaaatctcccgaaccggaaaaataa

SEQ ID NO: 86672 - DNA, 1575 bp, Citrobacter koseri
gtgcgtggacttaactggttaacaggacggggcaggcaggaaagccgggtcgaagagagtctgtcgcagggcgttacaccgccccgggctgttgcggacgatgcctgtcgtcccgtgcagacaggaaggtccctgctgcagacagacgaacaccgccgccttatccgggggctgacagaaaacagtccgctgtcacagcaggtcacggaagcctggtggttgcgcccgcttgaggagatggcggcgcgggtgcaggcgtgcccggcggcctggtcaggtccgttctctggtccgggagggtttaccggacaaagtctgaacgtggccacgcgtgcagtgaggctggttcgcggcatgatgctgccaccaggggctacgcctgaagagcaggcagagcagacgccgggctgggtctgtgccgcgtactgggcggggctgttccatcacctgccctggttgatgcgggtggagggggcactgaaaagcgggcgggtctggtatccggggctgagtgtgcccggggaatcatggcgggtcaggccagccagtgagccatcaggtgagatgagcagcgtatttgtggcgttcaggctcctgcctgaggccgccctgctgtggcttcagcgctggcctgcgctgtcagatatgctgctgctgtttctgtcggggcgccgtgccgaagctgggatactgaacagtattgtgaacgatgcgctgcgcagcagtggcgtcgctgatacggtcattatgtccggcctgacttccggtcagatccctctggcgccggcagagcctgcgactggtcataccccccctaaattatatgaaggtgagactggcttattgtccagtctcgataattctccggacccttctgtgccaattaaaaccggagacctgacctacaatgagagtcaggacagggagaactcgccagtcgacacactgcagccggttccttctctggcgctggagtcagctctctcttctggggtgctgctgcattctgaagaaaatgatgtcagtaccggcggagatggtgagacgcaggtatccacggggaacctcctgtcaatgctggacctgatggcggaagggaaagtgcctcaggcaacggaaaacgcacccgcggacaacaaaccagctgcatttcccccggacgaaatggccccttcctctgaagtgaatacagacccgggaaagcaggccggtgagttatttctgcagtgggttagggacagcgttgaggatggcacgctcagcgttaatgaaaaggacagtatcctgcacgttctggctcagtttgtattcctcgtttcaccggcctgtttttaccgtcacagctcgacggcgggaagtgacggggctgataaggacaggctgcagaaaagttttgaggcactgaacgtacaccattcacgaaatggtaaggggttattccattaccatcaatacgacacgccggacagaagcggtcgttttaccaaagtgtcaggctacatgatcaacgctgacattattttcaaaaaagggagctgtcctgcggacagtatttggctttcagcgaaaaaataa

SEQ ID NO: 86673 - DNA, 966 bp, Citrobacter koseri
atgacaggcattattacgtttgaagatattcttgataactatttcctcaataaatttcttcgtgaggctacagagtggagttacagcaaagtggtgaaaaccttcatggaatttatgggagaaaatattctgccggaagatgtcacgcatatggatgttctcaaatggcgtcgatacgttcttatcgaacagacatccagcaagcggacatggaataataaggttgcccatatgcgggcactcttcaaccatgccatagcgaataaacttatctcagccagagagaatccgtttaaccgggtgattgttaaacccgatattaaacgaaaaaaaacactctccggtgaacagatgaagaaaattgatttaatcatggaaaggaaaattgaacttgagcagatgggtgttcacgatccccggccaaatgcccttgaacccgcctggttctggatgaccgtcattgagacacttaagttcaccggtatgcgtcagaatcagttgttgcacatacggctgtgtgatgtggatctgaagctgggcgtcattgaattacaggctgaaggctctaaaaatcaccgggagcatcgtgtgccgattaccgcccggctgagaccgcggcttgaacatctgtatattatgtctgtacagaagggagccaaaaaaggggagcagttatttaacatcaaccggtttacaccgaaaaagaaaagaattatcagggcaaaaaacatggataacctcccgatgagggcttttttcagaaggctctccagggagtgccagtgtgatgtgagcccgcaccggttcagacataccatagccactgacctgatgaaacggccggagagaagcctgaatgatgtacagatgctgctcggtcattccagcgttgcggtgaccctggaatatgtcgaagcaaacatggataacctgaggcgcaaccttgaagccgcgtatgcagcttag

SEQ ID NO: 86674 - DNA, 750 bp, Citrobacter koseri
ttggctagattgacattagctaccttcgtttcaggacaaatcattcaattcagcggttctttggcagatattgtcgcggatgcaattgccactgctattggtgcaccacgttatcacgtatggagaattccagttggtattatttccgacatagatgctttcgattttatagagactatagctgaatcatctcgctgtctcattttgaaaggagccaatctttcagcatttgagatttatggcgcagcaattagagatatagttgttcaacggcaaatatatccaacaaattatgaccatctggcattgatagctacttggaaacaaggccctgctacattccctgatggaggaatgttggccgagttagggccagttattgatactgatacattaaaaatgcgtggtttatctgctattttaccccaattgaaacctggttgttttgtaaaggataaatgggcaaatattgatgggctacagcttgaaagtgttgatgattatgtagatgaattaagagaattactggacgaagctggatttgatgggggaagtttgtggaagagaatggtccatattttttatacttcccttataaggattcctaatggaaattatgtttatgatctttattctgtcttgtctttctatactcttacatgggcaaaaattaaaggtggacccgttaaaaagatagaggatattgccaatcgtgaattaaaaaatcatagtgcaaaaatatctgcttga

SEQ ID NO: 86675 - DNA, 474 bp, Citrobacter koseri
atgaaagccatttctgtacgccagccatgggcctggctcatcgtcaacgggtacaagggtattgagaaccgaagtcgtgagacgaactatcgaggcccggtgctgattcatgcttctgctcaccgtccaacacaggctgaaatccacgaagcccggctgattctggaaaaaacacacggcgcggtagcggcgcttcgtttgccccgtacggcagagcacttccatctgggaggcattaccggcatggcgaccatcacaggaaccagtcgtaacagtgactcgacctggttctctggcccggtaggctggattcttcaggacgcacagctcgtcaccttccggcctctcaggggaagactgtcgttcttcgagaccggatatcgtaaacacaggcttttcgggttcaccgttcctgataattacacggatgccacagaggctaccatggccggtagcctgcctgttgcgccgtaa

SEQ ID NO: 86676 - DNA, 576 bp, Citrobacter koseri
atgcttatcgtcactcagggtgatatcaccctcttcaacgttgatgcgattgttaatgccgccagcactcatctgcaccgcggagggggcgtagggggagcgatacacagagccgccggtcctgcgttattgacagcctgcaggacatatatcaggcaacacggtcgtatccgaacgggggatgccgttcttactcctgcgggccatctcccctgccgttatgtgattcatacagtcggcccccactggctgttcgggctgagagcccgtcatcaggataagttgcttgcaaaggcctactatcaggccctgatgcttgcccgtgaaaatgtactacaacgtatcgcctttccctgcatcagtaccgggcattacttttacccgcacgagcgcgcggccaggattgctatcaacacgatcatcgactttctggcagaaaacggcgctgacatggacgtgttgtgcgtctgctacaacaaacgtgattttcgtatttaccagcgcctcctggcgcaggcacataaaccggggttagtcatgagccccccagagatccgcagaccaatggacatgtaa

SEQ ID NO: 86677 - DNA, 135 bp, Citrobacter koseri
atgttgatatcccccgcagttctgctgaccttacaggacctcatcgtgctgcgtatcgaccaaggtaacgtcatcgccggttgcctgctggcgctgatcagacatgcctcaggaggtcaggatgagcagcgctaa

SEQ ID NO: 86678 - DNA, 618 bp, Citrobacter koseri
atggtcgatcgctatcctaaatggtggtttttctatcttgttgcaaagtcattattctatgtcgctggaatactaagtcttatcttttatggtattgtatatatcaccgtagccaatagttatgatgaatatataattggttttggctgctgggtcctgcttgttgcgccgtttgctgtaaattattttatagcgaaaaaacgtaaacagaagatccagtcagctttagctgaaatcaaggccactggccatttcaacccaacgaaagagtctgaagcatggttcttctggaaaaacacctatcttggctttgactaccacaagggcacgatcgtgtacatccggatctacccaggcaatgtcatggacgttataggctttgatgcttacagcctcacccgcacagaggttgagggctctaagctacgcctgtacacgaagttagcatcactgccaatgatccccattgatacttatgcagcttcaaacctggctaaccacatccatgcgatgaacaataaaggctactcatacaacttcaacttcccggagatcgtgaagcaaaaacgtcagaaactcgaatcgcttgccggaatgcctgttccggatttaatatag

SEQ ID NO: 86679 - DNA, 408 bp, Citrobacter koseri
atgtcaaacactcttcagccccgcagggcgcgggcgtcctactcaatggactttaagctggctctcgtcgaaaagtcatatcagcctggagcctgtgttgcccggttggcgcgggataatggaattaatgacaatctgctgtttacctggcgccagcgttacagacatcttctgcccgatgaaatacaacggtcaatcagagagcaagactctgttatccccgttgtcttgcctgatatggtcctgtcacaccatgctgagccgcactatgaatccgccgctccagcctgccgcgaggccatgacatgcgaggtgactgtcggcggtgccagcctgcgtctgtccggggatttatcacctgcacttctgaaaacgctgatccgcgagctgagcgggaggagccgatga

SEQ ID NO: 86680 - DNA, 492 bp, Citrobacter koseri
ttgacgcttacgtattatgtttccacccacggttttgacctctcccgacgccctgacgttaccatcacccagtctcaggttgacgccctgcagaaagtaaaggaaatgccggaaaccggccagtcccgcgatctggaacccggcgtggtggcccgtttcggttataacggccgtattttccagcaatgtggccgctacctcgacgctgttgatgtcgtggaatggatagcggtacaacagcgtcccgccatttttatcagcattccgtctgactacagcagtgagcggaagatgcacattgacaggatcagacgtgaacttcttgattaccacgacatcatcaccgcataccgctgggtgacaacagacacggtcgttatggccatcagccaccatgacgcaggtatacatgcccgggatcaagtacagaatccctggtggctcctccgggctttcaaccgtcccaactccctggtatttggcaggagctga

SEQ ID NO: 86681 - DNA, 336 bp, Citrobacter koseri
atgaaatctaacagacgtgaagtttgctcagaggaactccggtggctgatccatctggaaagtgagctggttatgaccgccgcatatcttcgggtattcggttcacttccggaaggtcagaacagtaccatcattgcgtactgggctggctatgaattcactgtccatgggctggagcaccgtgagtggaattcagaaaattatgcggatgtggccgcgtcagtacgcgctatgggtgccagcgttaatgagcaggactggacggacggatgtcagcaggctgagtatgaactgagtcagctaacgtcctcacggtacgcttttctcaaaaggtga

SEQ ID NO: 86682 - DNA, 303 bp, Citrobacter koseri
atgccccattatatccagtcagtcccctgcaataaaaaactgttccacggtatccgggtaattaccggttttatgctggctgttgttttcaggagcattacgcatctgccagcggcgctgctggccaccgtatcggtaatcacactgctgaccggcaatgagcgtctgttatccgtacccgctgaattatcatcagcctccccggacgccatcattatcatgctgaagaacctgctgttgtcagcatggtcacttgccattctgttaacgttggtggagcgcctgtacggtttgcataactga

SEQ ID NO: 86683 - DNA, 132 bp, Citrobacter koseri
atgccggttgactggtttgtctggccagtgtgtggtgttttctgcctgccggtgataatacgtttcctgttcctgttcctgttcctgttcctgttcctgcttatgattatgctccctgtctggtttcgctga

SEQ ID NO: 86684 - DNA, 159 bp, Citrobacter koseri
atgtggacaagcctcacaattaagttggggtatttcccacataaagggataacactcttatccggcaagcgtgcgtacgagctcattcaaacattagctatctttcgcttcctcaaacacatccgaaaaaaaacggatgtgttctgcggcgagcgctga

SEQ ID NO: 86685 - DNA, 1353 bp, Citrobacter koseri
atggcaatgaaacttgtccgcaagaaagccccccggggcggtctcatccgctggctggacgacgacgaagaaacggccatcaggaacgtgtccgggcggcgggtttccggcgggcgtgagcaatacctgctggctgaaaaggtactgcgggaaatgcgccagcgggaagcctggctgcagtgtgactgtgttcctggcgattcgccggcgatgaacagcgctaggcttatgcaggataccggtactctttttctggccgggtttaatcatgaacacgcaccgaactgcccgatgtaccgtcccttcagcggcgatgccggtgctaccaccaccggcacgaggaaaaccgccggcagccggcgcatcagttaccgggattttctgccgcctgacgacaccgacacccggattaaggcaccgggacgcccggtcaccccggcagatgaccgcacacgccgtacgcgccgttcgcggattgcccgcctgctgctttcacttattgaggacgcgggtcttaaccggctagccacgctgcatccccttccctcccggggtgtcatggaatccatcggcgcactgcggaccgtcgcggaaaacaccgagtttatccgcggacgtcagctgtcagagattgtgcgtttttcaccggcgatgagtgagaacggcagggtgaagctgatgcaggagctggagcgtccgaacacgcactggccagccggcaagacccggatgttctttcaggtttttatgtccgatcaggtcactcgtgatgaagtcctgttccgctggccgggcggcgagttgccgttccgtccggaacgaggattgagcattaacggggaagcacagggcggcgcgcggccgccctactgggtcattctggccttccgccggggaatggacggcacgattatctgcagcgaagggtatgcgcatgccctcttccgacgtggctgtccggtaccggtcgacagtggtcttgaacgtgccaccctcgaaagtctgtccgaagtggccggatggcttgcacggaagccggaggcgccgatattgagtgtggataaaccgctgtttgatatcgaggtcagtaccgacggtgagaaagggtttgtcctacctgatttcatcctcaatgccaggacaaacgcaggacagcattaccgctttattatcgaaacaatggggtataccgatgaagagtattgcgagcgaaaaacagagcagcatcgcggaatgaaaacgttaggttacctgttaacagacccaccgagatggccgggggattcagacaccagtttaagcagatacctgtggggttatttcaaccatctggactcaataacgcctttgtaa

SEQ ID NO: 86686 - DNA, 252 bp, Citrobacter koseri
atgcctaacatcattcttaccgacacaagcgccagcgtaagcgagcttaagaaaaacccgatggctacggtcagcgcgggtgatggctacccggtagctattctgaaccgcaaccagccagccttttactgtgtacccgcagagctgtacgaaaagatgctcgatgccctggacgatcaggaactggttaagctggtcgctgaacgcagcaaccagcaactgcacgacgtggatctggatagctacctatga

SEQ ID NO: 86687 - DNA, 288 bp, Citrobacter koseri
atgacttacacagtcaaattcagggaagatgcgctgaaagagtggcagaggctggataaagccattcagcagcagtttgctaaaaagctgaagaagtgcagtgaaaatcctcatattccctcagccaggctgcgcgggataaaggactgctacaaaataaaattacgttcgtctggttttcgcctagtctatcaggtgattgacgatcaattaattatcgctgtagtggcggtaggtaaacgtgaacgtagtaacgtttataaccttgccagcgaaagaatgagataa

SEQ ID NO: 86688 - DNA, 198 bp, Citrobacter koseri
atggataatttttataactttatcttgtcaacatacccatttatttttttattcatggtggctatttcactcttaattaggggaataacgctgccaccaatatttatgttaataattagactcatgtactcaatattattgataatcgttattgtgagcctttcagttacttggtggcatgtttataaacgggcgtga

SEQ ID NO: 86689 - DNA, 192 bp, Citrobacter koseri
atgagacatatgcagaatatcgacaaagttaaaaacgtgcttaaaaatgacattaagaccgttctggaatctctatcaaaggatgaatacaacgctgcaattaacgcctgttcttttggtcatctaagccccataactccctcttactcaggtataacggagcaggtggaaagattattaagaatttgttaa

SEQ ID NO: 86690 - DNA, 165 bp, Citrobacter koseri
atgttaataacagatggaatgcttagagcttttatctacatcgttgcaaccttgatcattgttcctctcattcttaccaagagtgccttgtgggtaggggttttattcttaattgctgcgattgatctgatttatattatgcgacaacccaaaaaagttgcgtga

SEQ ID NO: 86691 - DNA, 735 bp, Citrobacter koseri
atgccggacaacatgattgaggggctggcgaatgcggccgcacttccggtgacggtccaggtaattaatcaggggcctggaatctggggaaacgtggccacgggattgatcaccgccggggctgctattgtagcggtgatactgacgcaccggtacacgcactggcgtgagaaacaggcggcagtgaaacaacttaaacgagagcagctctttatcgcgacagagcttatttttttgctggagcagtttgctgaaggatgcgcagaagttgccacggatcatggagaaccggatttacagggagagtattctgttagtgtaaagagccctgagttcaaaacagacgatgttaccggagactggagaacccttcctgcccggataatgtacagaactcgtgaactgcccattcttcaaaaagaagccgacagaagaattttaaacgtttcagaatatgactgggcaccttattacaaagacagttttgaagaacggcagtatcagtacgccaggctgggattgaaagcactgatactggctattcgcctgcgtaaaatgaccggtcttccacccacgcgccttaatacagccgattggtccgcacagccgcaaatgtggagcgtctggcgacgtgggcgtgaaaaccggacgcgactctgccgggaaagggctgaaggagtcataactaatcaactttccagccagcaaccaggacattccggagagcagacatga

SEQ ID NO: 86692 - DNA, 360 bp, Citrobacter koseri
atggcacgttcaataccggtgaagattggtcagaaggaatttaaatccaaaaaagccgctgtggactatttcatggatcagcgtgaagcagtcaaagcagtgagcccgctgaaagagggagagttgtttgatgaattgcgcgacctttatctgcgttactgcgaaatcacagactatccactgggcaaccgggagatttacgcattcagcgtaaattatgaaactcgtcataccgaccagaactacggtacgtatttgtgctactgggtacatttttcaccgaaagatacggatggattgtccttttcggttaaacaagcagtggatgcgatcgccaacgctgcggctgaacaaccctga

SEQ ID NO: 86693 - DNA, 975 bp, Citrobacter koseri
atgcaggcacccggtataccggagaatgaagaacagaggctgaagtccctgtatattaccggccttcttgatacccgtgacgatgagcgttttgaacgcctgacgcggctggcccgcaaagcctttcaggtcccggtggccctgataagcctgctggatcgcgagcgccagtggctcctcgcctgccagggcgtcggcgtgcgcgaaaccccgcgtaacatctcgttctgcgggcatgccattctgcaggaggggcccttcattgttcacgacgcagctgctgatgagcggttccgtgacaatcccctggtcaccggtgagccccacatccggttctacgccggccagccggtgagcctgcccgacggcacggtggccggcacgctgtgcctgatccacaccgttccccgcgccttcacggatgatgacattgcgtccctccgggatctggcctgtatcgtggaagacgaattcgaggccatcagcatggccatgacggacagcctgacgggcattcccaaccggcgcgggttttaccgcgccggcgaaaaactcttccgcgcgatgaaccggcaggatgcgtcgttcagcctcatctatttcgatctggacaggttcaagccggtgaacgatctctggggacacgcagagggagacgaggtgctgaaggtttttgccggctttttacatcagcacctcgaaccgggcgaaatagcaggccgcctcggcggggatgagtttgccgccctgatccggcgaaacgggaacacgagttcttttctgcaagcgctgagtgccagtttggatcattacaatgacacctcgggtaagccctacaacatcaattattcctttggcgaactgatcaataacgcagaccagtacgcgacgctggcggaaatgatcggcaaatgtgacgaagtgatgtacctgaagaaaaaacgaaagaccctctcccggaaagcagaaccgtga

SEQ ID NO: 86694 - DNA, 909 bp, Citrobacter koseri
atgattgaaaaaatatgtgaagtaattgatggtgaatacgtctgtgatatagatattagcgttgaagaatggaagattttattaagggataaaaaagtttttgatgacaaaagtattgcagcgttaaaaaaatggttcattgagccagaccattcctgtacatgtttcgatatcggcaagaagtacgacctgcacagtatgagtgctaatggtgtaatcaatgggttgggtggaagagttcagaagcagcttggccgattcgaggttaaaggagtcggaaagattgcttccgggacaaaattcattacagtcatgaaaagtagagaaattaaaggaaacccaaagcgaaatttatggactatccgtgaagaacttgttcaggcaataaaagaactagatttttttagtacgaacgaaagctcaagcattgatttttactcagataatgatttgatcactgctctagaagaaagtaatcactttgacgttactcagacatttgagtatagcgaaaaagcgaaacctaagaaagctgcaatagaagtcaaaaatggactctcatacccaagaagtaaatctgtttcaaaaaatgcgcttaacaaagctgattataaatgtgaaattaattgcgaccatccaacgttcagaaggcgaaactctcctctaaattacacagaacctcatcacattgtcccgatgtcaaagcaagactattttgagaattcactggatgtggaagagaatatcatatcactatgttgcaactgccataaacaaattcatcttggcaaggggtttgaagatatgttgaggaaaatatatgccgagcggaaagatgtattaaaaaaagctggaatcgagatattattagaggatttgattcttttttacaagatggaaggtaattaa

SEQ ID NO: 86695 - DNA, 240 bp, Citrobacter koseri
atggcatgtgatgagacgatgacacatgggggaagactctcataccaggccttattccattgtgattctggcggccccgaatccgatcagccaggtgaaatattcctggcgatctgtacaaaagtccagcgactccacaatcagtatggaaccgtcagaattgggctggggttaacgtctgatcctggcaacttatgttgggcggggattggtgaaacagctagtatatcctgcagataa

SEQ ID NO: 86696 - DNA, 606 bp, Citrobacter koseri
gtgacagagacgaccacacagacatccagatccggtcgaatggcctggtgtgccctggtcgcccttcatttcgcccgcaaggacggcgtggtaaacggtgaatcccaggaaagcctgttcctgacccgctggcttgccaccgccctgaaacagaaacgtttcccgcgtgaagtggcgccggatatcgagtggctgctgaaacagggacgcctctacggcgtcagggcgaagctgaccagcaagctggaatacctctggcactcctgtacgggtgaaatttcggcacagagcgacctgttccgcctgacctacgccattgaaacagcgaaaagcatgcaatggacataccgcctgctctccgatctcgaatggagtggccgccatggcgtgccggtgaaccctgagctcaactgtctttatctggcaaaatcctctctcgatgccgcgtttgacgacgatggcaggcttaaaggcgaactgctggccagaatcaccggtaatatcgccggtttatcgacgctgctctcgcgttgtggctgggaggcggtggcggcagaaaatgtcggctctgaccccctttaccgtctgtgtgttactgcagtctga

SEQ ID NO: 86697 - DNA, 264 bp, Citrobacter koseri
atgttatcacctaaaatgattgaagcagttcagcgactctttcctgatttgtctactaaacaggtcgaagttatgactttacatgctttcggcagaagttatgacgagattgctgatgcttgcaatatttctacagaaactgtccgttcaaatctgaaacgaacaacaaaggagttgaaactggaaaatattgccgctcttcgttctgttttccttacgcgaatcttcggtttcctgctttcatattgcatggacattaaataa

SEQ ID NO: 86698 - DNA, 576 bp, Citrobacter koseri
atgtataaaaaactcccctggctgttgcttatactgccggccttctctgccatgtctgaacccgtaataacctgtgagccggagagtgtatttcgcacgtatctttttccgtttctcggttattgtgttctgttaattgtcttcgtatcaataacagctttcttgtttgatgacgcttctactttcagaaccggtaaaaaaccgtggttattcgtcatcgctgtgaattctgtcgttaccgtactgggtatactgctgaccagctatacccttcatcttgttcccgagaaaaaagcggtcgttaacgaagccgtcctgatgtcagcccccgatgtgaataaaggcctccattaccagaacgactgcattatggtcagcagaaatgacactgccgtgacgctgaactgccgcccggatagccgaactgaaatcgttccccttgccgactatgctcgcgcgaccagtgctctggaggatgccacagcgtatctgtggaaactgaagagcaaagtcagccgaaataacatctgtcgcccggacaaaacgtcattttttgacgatctgttttcccgttag

SEQ ID NO: 86699 - DNA, 534 bp, Citrobacter koseri
atgaaaacactgatatccgtccttctcccgctgctgctgagcggttgcgccgtggcgcattcgtccttcactgagagcacacctcgcctcacggccacagtggtgcccgcgtcgtcacatgatcctgccggaggcaacatcgttctcccggtgaatgcccgtgtcggggaggtgacaaccctgcgcagtacccggtcagtaccttacacccgggaaactgtcttcacgaatgacaggaaaacgcaggaaatacgcgatcgtgtggagtccggcaccgtcatcacggcgaccgtcactcagacagacggtggccgacagacattaacactgcgcgttcagcatacctgcccgccgcagatgaagaccttcacaccggacagcaatcctgacgccaagattgatttgccgtccctccggtcattctccctgcaaaaaatactggcggtgcaggaaggtgaaattgtccggatccgcagcgaggggctaacggcagactgcgcttttcctcgtatcgatgttcaccccactgcataa

SEQ ID NO: 86700 - DNA, 1221 bp, Citrobacter koseri
atgaaaaaacatgaccgcggctgggccatggccgagtttgctttagtactgctcatttttatgctgatagcgggttatgcgtcaggatactggcaggactatatccaggccaaaaactggcgaacagaagccgcccgcaccggaacctatgcggcggcggcccggagctatattggccggaattacgcgacgcttcttggcgcaagctccacgacggcaccgaccgtcatcaccacaacgatgctgaaaaataccggatttctgccgtccggcttcacggagaccaacacacgcggccagaagatgcagacaaatgtcatcaggaatacacagaaccctgaacttctccaggccatggttatctcaagtggcggcacgccttatgagctaaaggcactggtgacgatggcaaaagacatcaggcccggatttggcggctatattgatgacggaaagacggccaccggtgcactgcgggcatggaaaataccgctgagtgcctacggtgcttcgtccggtaacgggcatattgctgtattgctttccacggatgaactcaccggtgcaatggaagacagcgatcgcctgtatcgtttccaggtaaatggccgtccggatttaaataaaatgcacacgtcgatcgacatgggtgccaataacatcaataacgccggaaatgtaaatggcacgaacggtatttttaccagtgaagttcgcggggcgaacggtaatttcagcgtcaacgtaacggcagctggtcaggtaaaaggaaatacagtacgggcagacagtgatatatcggccggacggaatattgccgcgagcggaaatatctcagccagcggaaatattactgccagcggacaggtcaccggcggtacagtacggtcgaacaaaaacctctcggtgggcggcatcattacccttgatgaaatccacacagcgaacaccgcctgtccggtaaacggagcggtaagccgcgatgcgtcaggcgccatactttcctgtcaatccggtctgtgggttggaggggtaaaagtcaatgagtctgcgtgtaagtgggtggtgtctcctgatgcctgggtagatccagggcagcgtcaattttataaaacagcattatgtccgacaggttatgtgcagactggtagtcgttttatgctctggcctaagggccttgatgacgaacatgtcgacgtttattgctgccctttcagctaa

SEQ ID NO: 86701 - DNA, 222 bp, Citrobacter koseri
atggccatatcgctgaatgccatccacccggatgaatatttaacggatatgctgcttaagcctcatgaggtgatcggcgctctggccgatgaaggcgaccagctgaacaacgccaccccggtttatttcttcccggataccggcgtctacgcagcggccgtcagtgaaacccgggtgctcgatgcctggctttgctggccatgctacccggcgaactggtaa

SEQ ID NO: 86702 - DNA, 273 bp, Citrobacter koseri
gtggactggctgatcgccgagcgccccggcaaggtaagaaccttgaaacagcatccacgcaagaacaaaacggccatcaacatcgaatacatgaaagccagcatccgggccagggtggagcacccatttcgcatcatcaagcgacagttcggcttcgtgaaagccagatacaaggggttgctgaaaaacgataaccaactggcgatgttattcacgctggccaacctgtttcgggcggaccaaatgatacgtcagtgggagagatctcactaa

SEQ ID NO: 86703 - DNA, 1668 bp, Citrobacter koseri
atgcgtaaaatcaagttagtgattgtcggtggtgtggccgggggggcttcggctgcggtaagggcccggcgtttatcggaaacggccgagattattctgttagagcgtggtgcctatgtgtcttttgccaactgtggcctgccttatcacatcggaggcgagatccccgaacgccagcaattgcttttgaaaacaccgcaggattttcttcaacgtttcaacattgatgtccgtattgagcatcaggtgttgcagatcgaggcggacaagaaagtggtccacatcaggaatgagcagacgggggaggtttaccacgagagctatgaccaactcctgctcagcaccgggggaaaccctattcgtcctcccctgccaggcgttgacctcccaggtgtctttaccctgcgtacgctgccggatatggataacattctggcgcatatccaccaacaccggctaacacatgccacggtcgtcgggggcgggtttatcgggttggaaatggtggaggcactggtcaatctggggatcagggtgacattgttggagttgggtgcccaagtgatggccccggttgatgccgagatggctgccgtattacaccaggtactccggcagaagggcgtcgatttgcgtttgcaatcgggcttggcagcgattacgcaggtgggtgatacccaggatttacagctcagtttgaatacgggtgaggtgttggcgacggggatggtgttgttggctatcggtgtaaaaccagatacgcaattagccagtagtgccgagttggcgctggggccccatggtgggatcctggttgatccgtttatgcggacatcagactcgtgtatctatgcggtgggggatgtggtagaaacggcggaatgggtcactggcaatgcgatgtcggtgccgctggtggggccggccaaccggcagggacgcattgctgcggagaacatgctcggtgggactcatcgttatcagcgcagtcaggcaaccgccatctgtaaagtatttgaccatgccatagccagcgtcggcttgaatgaaaaaaccgtgcagcggttgaacatgaactatgaaaaagtgtatgtccatgcagctcaccatgccagctattacccgggaagttcccctgtgtcgctaaaactgctgttttcccccgatactggcgatattttgggggctcaagccgtgggtaaagccggcatcgacaagtgtattgatgtgctggcggtggcgcagcgggccaagctgaaggtgcaggatctggaagatcttgaactgtgttacgccccgccattcaacagtgcccgtgatgtggtcaatcaggttggtatgctggcgaccaatgtgatcaatggtgatacccggatatgccatgtggccgacattctgaatattaacccatcgcaacaatgcctgctggatgtccgtacgtcgaacgagttggaaatgctgggccggtatcctgaggcgttacatatcccggtggatgaattacgttcgcgtcttaatgagttaccgaaagacaaagaaatcctgattggctgtcagtcaggcttacgcgggcatgttgcctaccgattattgaagcagcagggttttcgggcaagaaatctctccgggggctataaaacctatcagttgtctctcgcagaattgtag

SEQ ID NO: 86704 - DNA, 861 bp, Citrobacter koseri
atgacaccacttatcgaaggtttttacgatccggctaccggtactgtcagctacgtgttggccgataggattgggggagttgcagccattattgatccggttctggactatgacccgaaatccggccggactcagacaacctccgccgatcggttgatggattacgtgaaaaagcagcaacttaccgtcaattggctactggaaactcacgcccatgccgatcatctttcggcagcccattatttgcgtgagagggtcggtggcaacatcgccatcagcgaaaaaattgtcgaggttcagcggatattcaagcgcgtttttaaccttgagcacacctttgcactggatggttcacagtttgaccatctgctgactgacggtgaaacctttgaactgggggccttgaccgtgcaggcgttgcacgttcctggtcatacgccagccgatatggctttccaggttgctgatgcgattttccttggcgataccctgtttatgcctgatgtgggcaccgcgcgttgtgatttcccgggtggggatgcacagcagctttatcattccatccgcaagatcctcagttttccggctgagacccgtttatatgtgtgccatgactatcctcctgcaggccggggtccccaatggaagagcagcgtagccgaacagcgggcggctaatattcatgtccatgatgggaacgatctggccacctttgtggcgcttcggcaggcacgggataaaaccctggccgccccggtactcctgttaccgtccattcagatcaatatccgggccggtgaattcccgccagcggaagataatggtgtctgttatttgaaaatccctctaaatcatctgtaa

SEQ ID NO: 86705 - DNA, 342 bp, Citrobacter koseri
atgagtaacgcacttattgaccaaaaaaaaatgcgtgatgccgccagtgcagccgccgccgtattgcgtgccctggcgaatgacgaccggctgctgctgctgtgtcatctcagtcagggagaagcttctgtggggcaaatggaaagtgctctagggattggtcagccgacattgtcacagcagttgggggtgatgcgacgcctgcaactcgtggcgacacgccgcgaggggaaacagattttctaccgcattgatgatccgaatgtgttgatattgctcaataccctctatcaactttactgtccgaaagatgacgcagaaggtgttaaccatgaccattaa

SEQ ID NO: 86706 - DNA, 429 bp, Citrobacter koseri
atgaccattaatctggtgcaattcactccgttcctgagtttcttagggggagtattgatcggctgtgcggcctggatattgatcctgttctgcggacgtattgcagggatcagcggcataatcggcggtgtgctctcacgaggcactcctgatcgtggctggcgtctggcttttctcgtgggcattatcatatcccccctcttgtatgctctcgtttacccgcttcctgcgatcgaggtttctgccccctggcctatcctgatcatcgctgggctgctggtcgggataggaactcgttatggttcggggtgtaccagcgggcacggagtttgcggtctatcgcgtttatccccccgttctctggtggccacactgacgtttatgggggttgcgtttatcaccgtctggctaatgggtttgcggatttag

SEQ ID NO: 86707 - DNA, 432 bp, Citrobacter koseri
atgaatctgtttttttcgctgttggcaggggtgatatttggcgttggattactgatcagcggcatggcaaaccccgcgaaggtgattggttttctggatattacccgcgtctgggacccttcactggcttttgtcatgggcggggccatcagcgtgggtttcttcgccttccgctcagtgaaacggcgcacccactcgctgtgcggtggcacgataaacctgccaaccagcaaacaggtcgataagcgtttgatcgggggcgctatcctgtttggtattggctgggggcttgcaggtatttgccctggcccaggactggtattactcggtgccggcgtgagcaaaggtatcgtctttgttggcgcaatggtcgctggcatgctgctttttgaacagcttgaacgtaaacgagcgaagcgtcaggcaccgtaa

SEQ ID NO: 86708 - DNA, 798 bp, Citrobacter koseri
atggtcatctcgttactgttaggtctgctcgtgggggcagtgctcggcatcacaggagcgggtggtggaatttttgccattcccaccctggttataggcatgggatgggcaccacagcaggccgctccgatggctctggtcgccgttgcaggaagtgcggctctgggtgccatcgatgcctggcgcaatggactggtgcgctaccgcgccgctatcgtgataacactggcgggcgtgcccattacgagcgtagggttatgggttgcccagcgttcttcccctatattgctgatcctgctgtttgcgggggtgatgctaaccgtcgcatgccgattggttcgtgcgcccgagatggcggccacgcacgcttatcctgtcacactggatgaacacaccggacgatttgtctggactgtaaacacatggctgctgtttctcactgtcggggcggtgtccggttttatgaccggactattggctgtgggcggaggatttattatcgtcccgttactgcggcaatttacgcccctgcccattcacagttgcatcgcgacctccctgatgattgtcgcattggtaggtatgggcgggattgctacggcagtgatgcagggtgccactctgcccatgccttttaccctctggtttgtactgagtgttgtgacagggatgtttattggccggaggctaagccatcatttacctgaacatatcgtgcagaaggggtttgccgggctactgatcgttgttgctctggggatggtatttaatgccgttatgatgaagtccatcagctaa

SEQ ID NO: 86709 - DNA, 1479 bp, Citrobacter koseri
atgttaaaaatggaagaaaacaaaattaatatcaaccgaattcacttcctttatgaagcgttggccaagaggcatgcttctcctgaagagacctaccatgctatcctaaataaagggctaaaagcctttaacctgtccctgggtattatcagtcagatagagggggatcgttactctctactttcagtttcaccaacaggaggagatatttcagcgggcatggtttttgagttaaaaaatacctattgtcaacgagtggtcaacgaaaataggataataagcgttgaacatgcaggagagcacccagattttaatactcatcccgtctacattggcatgcagcttgaaagttatatctcggcaccaatatgggtgagagagaaattatggggcacatttaatttctcttccactcaggtaagagcaatgtcgttctctgaggatgactatgaattcattagtttaatggctgagggtgttggctcgttaatcgagatgaacttattaatcagtgaaaatgaaatggttatttcagcgctacgaaaaaacaacgacattctcgaagatatttttaaaaactcaaccatcgggatggcgctggtagccccttcaggcctatggataaaagttaacagctcactgaccagtatgctggggtatactgaagagcatctgctttccatcaactttcaaaatatcacccaccctgatgatttaagcacggatttaaaacaactagaggcactttctcgaggagatattcctttctaccaattggaaaagcgatacctggcggcgtcaggccattatatatggatccttctgagtgtctctctagtacgtgaggataacggtaatgtcaaatattacattgctcaaattcaaagtgttgatgagcgaaaaaggatggaggtggagctaaaaaaacaaaaagaggaactgcacaaggtcaatattattttggagcgcatggccacggaggacagtctgacagagattgccaatcgccgaaagttcatgctctggtttgagagtgaaatgaccagagtggcgcgccatcccgttcctgtatcacttgccattgccgatatcgatttttttaaatcgtataacgactcctatggccaccaggaaggtgactttgccctaaagaatatcgccagagaactcagctataccctgcgaagccaggataaagtcgcgcggtttggcggggaagaatttatcatgcttttccctgaaacggatgaaaaaggctgctttttggcttgcgaaagattacgaaaaagcgttgaaaacctgacatctctcagaagaacggtcacgatcagtattggtgcagtgacattccatccgaaagaaggggagcttgttcactttgatgatttattgaaagtagcggactcaaagctctatgaagcgaaaaggtctgggagaaatcaggtcaaagtggtctacttagataaccctctgaagtaa

SEQ ID NO: 86710 - DNA, 396 bp, Citrobacter koseri
atggaccgtcttggccgcaatactgcggatatgatcactatcgtagatacctgctataaaaagggtatcgctattcgatttcttgaaaatggcctaagcaccgaggggacgatgggcaagatggtcattcaaatactggctgctgtggctgaggcggaacgggagcgcattctggagcggactaatgaaggtcgaatagcggccatggcatctggagtgaaattcggacgtaaaccacaccgtcagtctgacatggtgcgggagttaatcacacaagatgcaccagagaaaactatactggaaaaaacgggcgtatcgcgggcgaccttttaccgaatgaagaaaaggactcggatagagcaaatcggggttatacgtgaaaagacgaaaagataa

SEQ ID NO: 86711 - DNA, 468 bp, Citrobacter koseri
atgagaacccatttcgagtatcagaaccggaaacgccagcaacaaccccagccagaagcgtcttgtcatgtcgcgaagttcatcactcggccccgtggatgccgtagctacgagcggctccagtgccattccacagacaggacagcttccgggaccactgcggcgtatctccggatgcatcggacatgtccacacaccttcagaaatctctttctccgcctggcggtgagactgttttatcttatcagggctgacttcatggtggtcgtggtgatggtgatgttcactggcatcttcggtaaaataatgatcgggatgggctttaaatttgctctcacagctggcggagcagaaataaagctgatggtcctggtatcgaatgctgctgtgcgccttgtcaggcaggatgaccatcccgcacacgggatctctcaccttatgcaatgcgtgactctcgtccggggatga

SEQ ID NO: 86712 - DNA, 996 bp, Citrobacter koseri
atgaaacatgaaattgcggtgagtgtaataatccccgtttacaacgcagaaaaaaccatcaaatccttgatcgaagatatcttgatagaagacaggatcaacattgaagttattatcgttaacgatggctcctcagacaacacgtcaacgataattaactccataaaggatggcagggttcaagtgattgaacaaaataataaaggtgtatacgcggccagaaataatggattagacaagcataaaggccagtgggtcatgtttctggatgccgatgacgatgtgtctgaaggattcatttataacaggtatatccaggcttccagccataatgctgatgtgcttttgtccaatgcctggaagctttggcatgaaggcgataataaaaaacccgtgcatactaaccagccttatgatgaggttttatccggcaatgcgtggatgagtcacgcagtaaaagtcagggaatggccacattacctttggttacagatagttagatctgactatatcaggaataacaatctgtcatttcatgatggccggagtcataaagatattttatggacgatggaattggcgttggcaaatgggcgtttctacatatcaaaagatatggactacacctacaagtacaataatgaatccatcacaaatcgcggtgattatttcgacgtccgagcagaatgctatattgatgtaatatctaaaaccatcggtcacgcaaagtcgataaaaaataatgatttgagcgtatcgctgtttaggcatgccctgtatgaggctagacactttctaggtttatatagaaaaaaggtgagggacaaagaaaaaatcaggcggttatttgttagagaaatagcatataaagatttaataaaaggtgtatatagccttagtgatattttctttttactgaaagttttcgtaaaaacaaaaaaattcactggtgctagcccgaaattaaaatggataattatattgctattggcttaa

SEQ ID NO: 86713 - DNA, 828 bp, Citrobacter koseri
atgaataataccgttattgcctgcgttgacggttcgccgtcgacccgagcggtttgtgaatacgcggcatgggccgctgctctgctggattcacctctgtcgctgctgcacgtactggagaaagatgcgcatcctgccgtgtcagatttgaccggaagcatcggcattgatagccaggctcatctcaccgaagagctggtgaaagttgaaggagagcgtagtcggttattaatggcgcagggcaaagccatactggctggctgtgcggagttgctgaatgatgccggtcatgctgatgttcaattactgcaaaaacatggcgcgttggatgaaatcctggctgatttaggggatgttcgcctgatggtgctgggccgccgtggaacgcagaacccggttggcagccacctagaaagaattattcggctgcagaaaaaaccggtacttatcgtgccggaggcttattctacaccgaccaaagttatgttcgcctatgatggcagcgatgagagtcgcaaaaacctgacgcgcctgacacttagcccgctactcaatggtctggtttgccacatcgtgatggttaagggggatacacgaaccttgcaggaagcacagaatgtgctgcaagaggctggcattacgaccgaaagccacatactggaaggtacatccgttgctgatgcgctctgccgttacgctaatgaaaacggcattaacctgattgtgatgggtgcctatggccattcgccattgcggcgattctttatcggcagcaacaccaccgccatgttggaaaaaacacaaattccactcttaatgctgaggtga

SEQ ID NO: 86714 - DNA, 1479 bp, Citrobacter koseri
atgttgctgtcctcgacgcgtaaggactggctgggtaacgtccgtggtgacgtactggccggtattgttgtcgcgcttgcgcttattcctgaagcgatcgccttttccatcatcgccggcgttgacccgcaagtcgggctctactctgcgttttgtatcccgctgataatcgctatctgcggtgggcgtccaggaatgatttcttcgtcaaccggcgcgatggcactgctgatggtgacgctggtgaaagaccacggcctacagtatctattggccgctactgtgcttactggtgtgattcagcttattgctggttatttaaagcttggcagtctgatgcgttatgtttcgcgctcggtggttaccggttttgtcaatgccttggcgatcctgattttcatggcgcagttgccggagttgaccaacgtcacctggcacgtttacgccatgacggcggccggtctaggcattatttatctgttcccgtacctcaataaaaccatcccctcgccgctggtctgtatcgtcgtgctgaccgggatctccatgtggctgcatctggacgtacgcaccgtcggcgacatgggcaagttgccggacagtctgccggtcttcctgttacccgatgtgccgcttaatttcgataccctatcaatcattctgccttattccgccggccttgctgtggtggggctgcttgagtcgatgatgaccgcgaccattgtggatgacatgaccgatacgccgagcgataaaaaccgggagtgtaaggctcaaggggttgccaacattggcgctgcatttattggcggtatggccggatgcgcgatgatcggccagtcggtgatcaacgtgaaatccggggggcgtgggcgtctctccgcactctccgcaggcgtcgtcctgctttgtatggtggtcttcctgcgtgactgggtttcgcagatcccaatggcggccctggtagcggtgatgatcatggtttctattggcaccttctcctggcgctctattaccaacttgcgcagccacccactgtcaaccagcgtcgtcatgctggctaccgtagtcgtggtggtagcaacgcataatctggcgtatggcgtattgactggtgtgctgatcgcctcactgaactttgccagcaaagtgtcccgttttatggcggtgtcatccgaactcaaagcgtcaacgcggacatacgccgtaaccggccaggtgtttttcgcctctgccgatcggtttatgagccacttcgatttccgtgaagcggtggagcatgtgatcattgacgtctcgcacgcccacttctgggatattacgtcggtcagcgcactcgacagagtggtcattaagttccgccgtgaaggtacggatgtagaaatccgtggcatgaatcaggctacccgcaccattattgaccgctttggggtgcatgacaaacccgaagaagtggaaaaattaatgggcggccattaa

SEQ ID NO: 86715 - DNA, 258 bp, Citrobacter koseri
atgcaattgatgatctgcctgacgtccccgaaatttaccggctaccttggctttcgctatcccttcctcttggcgccggcgacgatcctgatagtctttgcgagctatggcggccagcatatcaagcatcattccgttaatagccttaagcattgcaagggtaaaatcatcgccagcatgtgttgcaagagccatatggctcgtcgggaggtcaagactgacaaccacaaggtgtttttcctggataagatgctttaa

SEQ ID NO: 86716 - DNA, 2985 bp, Citrobacter koseri
atgccacggcgacagatactgagtagtgatgaaaaagaacgcttactggttgtgccggatgatgacatcctgctaaccaggatgtgttttttaagtgagcaggatctggttctcatcaacaaacaccggagacccgctaaccgcctgggctttgccattttactctgttatctgcggggaccgggttttactccagacaaaaacagtctccctcacgatggcgttatgtccagggtggcagagagattgaaacttcaacctgatttatggcgagagtacgcagcgagggaggaaacccgttgggagcatcttgccgaactctatcgctacttgcgattagcgcctttcagcaggtcactgcaaaaaacatgcatccgccatttatatccgcatgccatgcggaccgacaaaggcctgattcttgctgaagagatgctcgcctggttgcacaacaacaacgttattttcccttccgttgatgtgatggagcgaacccttgctgaagccgcaacacttgccgacagagccgtattttctacactgacgacgcaactggaacaacgacataaaacagcactggataatctgcttgcatcaggtgatgagcaactttcccgtcttgcctggatgcttcagcccccgggtaaaattaacggtaaaaacgtgctgcaacatattgatcggttgaatgccattgaggggttggcactgccggaaggtattacgctttccgttcaccagaaccgactgctgaaactggcacgcgaaggtcggaaaatgagtagcagggacttggcaaaattctcaggcacacgtcgttatgccatgctggtttgtattatctcagaagcaagggccacgcttaccgatgaaatcatcgaactacacgaacgtatcctgggcagcttgttcagcagggcaaagcgcacacaagccgaacggcttcagaaaacaggaaaactcatccagagtaagttaaggcaatatcttactgttggccaggcgctgctaaacgcacgggagtcaggagaagatccctgggcggcgatagaagacgtacttccctggccggaatttatcaccagtctggaggaaacacagtttctggctcgaaaggataattttgatccacttcatttgctcaccgaaaaatacagcacgctgcgtaaatatgcgccccgtatgttgtctgcattgcagttcagtgcagctccttcagcactgccactcggtaatgcgctggataccgtcagagaaatgtaccgcaaacaactccgcaaggttccgtcaacagcgccagtaaagtttatccctgagagctggaaaaagttggtaataacgccatcgggtatcgatcgccggtattatgaattctgtgtactgaatgagctgaaaggcgcattgcgatctggtgatatctgggttagaggatcacgacgctacaggaattttgacgattacctcattcctcctgctgattttgaaaaatcactcaaagagaaacagttacagcttgccattccgacagactgccaggaataccttcactcccgtatgacactgctggcgtcgcgactggaagaggtcaatgcgatggcgattgccggtgatttgcctgatgttgatatatcggacaaaggtgtgaaggtcacgcctcttgataacaacgttccttcgactgtatcaccgtttgccaacctggtttacggcatgctgccgcacccaaaaattaccgagatattagatgaggtggacagttggacgggatttacccgccactttactcacctcaaaaataatcacgtcagaccaaaagacaaaaagctgttactgaccaccatcctggcagatggtatcaacctgggactgactaaaatggcagaatcctgcccaggaaccacaaaagcgtcgctggaaggcattcaggcatggtacatcagggatgaaacgtatgcagccgcgcttgccgaactggtgaatgcacaaaaaaagtgcccactggcagcatcatggggggacggtacaacgtcatcctccgacggccagaattttcgagtcggaagtcatggccgctatgccggacaggtgaatttaaagtacggtcaggaacccggcgtgcaggtttatacacatatatcagaccaatacagcccattttataccaaagtgatcagccgggtcagggactctacccatgtgctggatgggttgctctatcacgaaagcgacctggaaattacggagcattacaccgatacagcgggtttcactgaacatgtttttgcgctaatgcatctacttgggtttgcatttgcaccaaggatccgggatctccatgacaaacggctattcattcatggaaaggcggaaaaatattctgggcttcagtcgatcatatccacgaccagtctgaatctcaaagaaattgagacacactggaatgaggtactgcgcctggcgacctcgatcaagcagggcacggtaaccgcctcgctgatgttaaaaaagttggccagctaccccaaacaaaacggcctggcaaaagcgttacgggaaattggccgtatcgagcgaacgttgtttatgctggactggtttcgcgatccggccctgcgtcgtcgtgtgcaagccggtttaaataagggtgaagcccgcaatgcgcttgcgcgggccgtttttatgcaccggttgggtgaaataagagacagggggctggaaaatcaaagctatcgcgccagtgggctgacgctgttgactgcggcgatcacgttgtggaacacggtgtatatagaaagggccatcgaatcactaaaacgaaaggggctccagattaatgagccgttggtttctcacctgtcccctctgggctgggagcatatcaacctgagcggagattacatctggcgtaataatcttaagctgggatccggtaaatatcgaccgttacgcacagttgatgtcagtctgtacaaaaaacaggcttag

SEQ ID NO: 86717 - DNA, 345 bp, Citrobacter koseri
atgggcgatgttattgattttgcggaaaagcaaaaaggcagaaggaagaaaaaggcattttccattccgcccattttaagaaaattccgtgtccatgctatcaggttactcgccagcatcatcaaatccggctcttattcagttgcttatatcgttaagaaaattacaggaaagttaatcaagttgttcgcaatgttaacgattttcgtttttattgtcgaatatatcgcaggcgatataggttacaaatctatttataactctgcgttattattaatattacttaccgttatcaacattctggcgggtgtatatctgaacaaactgttaaggacaaaacaatga

SEQ ID NO: 86718 - DNA, 315 bp, Citrobacter koseri; identical to SEQ ID NO: 16857

SEQ ID NO: 86719 - DNA, 312 bp, Citrobacter koseri
gtgaaaaaaattatattaagtgcattagcctgtacagctctcttaactggttgcgtcagccaagataaaggtaatgcgatgcagagccagatgaataaccagcaacgccagattaacgaattatccgttcgtttgcagtctgcggagtcccggctatcaaagcaggaagaaaagctgcgcaacgaactgctgcaatccagcggctattgctatctgaatggcgcccgctactcgaccggcaccgtactttacgggcggatttgccaaaatcagtcaggcagcgcttcgtggcaggtttacagccgtcgctaa

SEQ ID NO: 86720 - DNA, 642 bp, Citrobacter koseri; identical to SEQ ID NO: 16859

SEQ ID NO: 86721 - DNA, 267 bp, Citrobacter koseri
ttggccacgctggagcgtcttctgggcctgctgtcggcctttgaggtcgtggtatggatgacggatggctggccgctgtatgaatcacgcctgaagggaaagctgcacgttatcagcaagcgttacactcagcgcattgagcgacataacctgaatctgagacaacatctggcaaggctgggacggaagtcactgtcgttctcaaaatcggtggagctgcattacaaggtcatcgggcattatctgaacataaaacactatcagtaa

SEQ ID NO: 86722 - DNA, 549 bp, Citrobacter koseri
atgaccggactactgattttcacagcagcattttcactgttgttagcgctgttgcgcccggtaaatttaatcctgtcgaggttttcccgccgtgctggtcggggattttacaccgtcgaaacaacacacaaaggaaagcactggcgcaccattcacctgacttcttatgacccggtgggcagtcttagccgtatgcaggcgttgcatttccatcagtgttttctggccgcattggtgaacgcactgcgcggttttcgcgagcctatttattttcgttcacacctcatgcgcccggttcacctgcgtagcatggaaaaatgcctggccgcttttccggaacggcgctggcgtaaaaagcgagtgagtatctcgcgggcagagtactggggtatacgcctgcagacactgtttaacgaatggcgctggattaccccgcaggaccagggttacctgattgtcattggcccgccgggaaccggagacagacgcatacccaaaagcgattcggagcgaatacacaaacgtattcgatctgacagatcgaaataa

SEQ ID NO: 86723 - DNA, 399 bp, Citrobacter koseri
gtggtcaaagttctggatggagacacgattgaagttctgcagtctaccagcgagcgcagcaggatcaggttaagtggcatcgatgcccctgaaaaaaatcaggcgttcggacagcgttcacgccagtttctgagcagtcggctggcacagcagcttgttacgatcagcggcaatgagactgaccggtacgggcggctactgggaacggtgtggctgaatggacaggatgtgaatgccttgcaggtacagaacggtatggcctgggcgtaccgctatcagggtaaagcgtcaaattcagcttatttggcgatggaacaggaagcccggaagcagaaaaaggggctatggacagatccagatcccgttgaaccgtggaagtggcgcatgaaaaatcgctga

SEQ ID NO: 86724 - DNA, 636 bp, Citrobacter koseri
atgaacctaaatcaaattaagaaaaaataccgtacagatattgatggcctcagggctattgcggtttctgttgttattttatttcacctcggcatcggatacttcccttcaggctttatcggtgttgatattttctttgttatctcaggttacctgataactggagttattctatcatcactcaaagaaggtactttcagttactctgatttttttgttcgtcgactctggcgcatacagcctgcattaatattggttggcattgtgacgttacttgcctcaagtgttctttttgtttctccggattatctggactatcttaaaagcgcaaaatataacaccttattaattgcaaatcagtatttctcgcgtcagtcagtagcatatgcaacacctgaaagtgatatatttcctttgttacatacatggtcgcttgccgtcgaatggcaatggtatatattccttcctttgttcatcgcgataaccatttttcttaaaaaaagagtcccggcaactaaaaatgttaatatcagtgataattttattctagtattatggtctgtcattaccgttgtatccgcagcattagggaaggtgcgaataagcaggtcatttcttcccaagctgactcgctga

SEQ ID NO: 86725 - DNA, 981 bp, Citrobacter koseri
atgagccatcaactcaccttcgccgatagtgaattcagcactaagcgccgtcagacccgaaaagagattttcctctcccgcatggagcagattctgccatggcagaatatgaccgctgtcatcgagccgttttatcccaaggcgggcaatggccgacggccctatccgctggagaccatgctgcgtattcactgcatgcagcattggtacaacctgagcgacggtgccatggaagatgccctgtacgaaatcgcctccatgcgcctgtttgcccgattatccctggatagcgccctgccggatcgcaccaccatcatgaatttccgccacctgctcgagcagcatcaactggcccgtcaattgttcaagaccatcaatcgctggctggccgaagcaggcgtcatgatgacccaaggcactttggtggatgccaccatcattgaggcacccagctctaccaagaacaaagagcagcaacgcgatccggagatgcatcagaccaagaaaggcaatcagtggcactttggcatgaaggcccacattggtgtcgatgccaagagtggcctgacccacagcctggtcaccaccgcggccaacgagcatgacctcaatcagctgggtaatctgcttcatggagaggagcaatttgtctcagccgatgccggctaccaaggagcgccacagcgcgaggagctggccgaggtggatgtggactggctgatcgccgagcgtcccggcagggtaaaaaccttgaagcagcatccgcgcaagaacaaaacggccatcaacatcgaatacatgaaagccagcatccgtgccagggtggagcacccgtttcgcatcatcaagcggcagttcggcttcgtgaaagccagatacaaggggctgctgaaaaacgataaccaactggcgatgttattcaccctggccaacctgtttcgggtggaccaaatgatacgtcagagggagagatctcagtaa

SEQ ID NO: 86726 - DNA, 705 bp, Citrobacter koseri
atggggggattacgagtctgggtcgaatatcacggtgacttgtttaaatctacctggggctggaatttgactgtcaatccggtcgctggaagtcagggcaggttaagttcaatactcaggtatataacatcggacaaaacgtcaaagatcagtacatcgggatacacgcgtactgctcctggacatatcttttcagcgccccgttgggaggaactcaaaaggtctatagcgacgggaacaatggctggagagttaccaatactccctataacggctaccaaactggctctacagtttcagttacctgtcttaacctccctggagccggaatttaactgtcaatccggtctgtgggttcacgtcggatcacttgaaggaagctacgctactgttggttctttcaaaggtacttattcaggtatcaatacaacaggaaagcaatatagattgtatgtttggggtggtaaccctcctaacaggaaaatcaactatggtgattcggataactgcgtcaatacatattcattgatagctactgtaggcggacttacagtagcaagggattataacggcaattcaacgtggcaaaaaactggcaatataaatttcgatgtcccgaatggctcaaccttttccattgtttcaaatggtatgatgtcatacggctgtgactacggcagcttcacagttttacgtttccaataa

SEQ ID NO: 86727 - DNA, 258 bp, Citrobacter koseri
atgactgtttatgcccagggaggtaactccatagtttcacgctcagtaaaagatggggcgtgtgtaaacacctggaatttatcgggaatcgttaatggagcaacagtgtcttacggtaacgataataaccctgaatggtcaaaatctggctcgataacttttgaagttcctgcgaacacagcttacacaatattatccacccctctgccatcagaggggtgctcaccgggtcgttttggtgttaatcaatatcagtga

SEQ ID NO: 86728 - DNA, 243 bp, Citrobacter koseri
atgactcaacaaaaacatgaacggtcaacaaaagatttaatcagagccgccgtatccggttggctgggaaccgcccttgaatttatggatttccagttatattctctgggcgctgcattagttttccatgaaatatttttcccggaacagtccgccgcaatggcgcttattctggcgatgggaacctacggcgcagttaggcgccggggcggagatctccggggcgggaacgatgctggctga

SEQ ID NO: 86729 - DNA, 192 bp, Citrobacter koseri
ttgacgaagcgagtgcatcagattttccctgttgccaaggttaaggtgaaaccgatgcaggctaacggcttgaataccgatgccagcaaaagcgatcgggagaagctgaaccgtatgctggaggatatgtttgaagaggccgatatgtggctggtatctgaattcccgacagttcgccaggttggtttgtga

SEQ ID NO: 86730 - DNA, 447 bp, Citrobacter koseri
atgagcaaaattaatagttctgaattaccaagctatttttatagtgcgtctacaggtggattttatcctgttagcctgaaagaggattatgaaacggcaggttcctggccgggagatgctgtttctgtgactgacgaggatatgattgctttacaggcagggcattctgcgggtaagcagattacgtcgaatgctgaagggtatccagttctgaccgaccccaagccacttacacctgaacaacttcaacaacaggccaaagctcagcagagtgcgctgatgaatgctgcgggtgatgcaatagcacctttgcaggatgcagttgatctggatgaggcgacggaagcggagcttgctcttctcaaggaatggaagcagtaccgagtttcgttaaacaggcttgatttatcaacggcaccggatatcgagtggcctacgcagccttaa

SEQ ID NO: 86731 - DNA, 645 bp, Citrobacter koseri
gtgatccgcgttgacatgccgccgaaggcccgccagcagtaccgcgaaatggaaaaagaaatgttcctcgaactgaacggcgaaggcatcgaagcgccgaacgccgcggcaaagacggtgaagtgtctgcaaattgccagcggcgcggtgtacacagacgacgccggaagctggtcagaactgcacgacgcgaagctgcaggcgctggacagtattctcaccgaagcagctggcgcgccggtactggtggcctaccactggaaacacgaccttgagcgtttgcttaaagcattccctcgcggtcgccacctcgaccaggatccacagacccttcgcgactggaacgccgggaaaataccggtcctgttcgcacacccggccagcgcaggccacggcctgaatatgcaggacggcggcaacatactggtgtttttctcgcactggtgggatctggagcagtaccagcaaattatcgaacgcatcggaccaacccggcagattcaggccggacacaaccgcccggtgtttattcaccacattatcgccgccgacactatggacgaaatggtgatggaacggcgcaactccaaacgaacagtgcaggacatcctgctcgatgccatgaaaaagagaggtatagcatga

SEQ ID NO: 86732 - DNA, 189 bp, Citrobacter koseri
atgacaccggttatctctgacactgacctgattaacatcaaagaagttgagcgctctgttggcctgaaaaaatccagcatttacgagcgcatcagtaataacgagtttccgaagccgaagaaactcggaagccggacctcccgctgggtacgcggtgaggtcgaagagtggaaaaaacagtttctttaa

SEQ ID NO: 86733 - DNA, 1173 bp, Citrobacter koseri
atgaaactaaacgcacgacaggtagagacggcaaagccaggcgagaaagactacaagctgccagacggtaacgggcttattctacttgtgaaaaccagcggggcaaaatactggcgctatcgctataccttcgccggtaaagaaaagatgctggcgctcggtgtatacccggctgtttcgttggccgccgctcgcgagaaacgggacgaagcccggcggaacgttgccgcaggtgttgacccggtaaaggtcaaaagccatgttgcagctgccgcagcaaagacgatcacgtttaaagatattgccgcagaatggcacgaattcaagaagccgcgctggtcgcctggttatgcttctgacattctcgaagcgttcaataaagatattttcccggctgttggtaagttgccggttgctgagatcgagcccgtccagatgttgacggcgctgcgtaaaattgagaatcgtggcgcaactgagaaagcagccaaaacgcgccggtggtgcggtgaggtatttagctatgcagtagcgaccggtcgcgcaaagtataatcctgtcagcgaactcaacagcgcaatgaccggacataaaggggaatcctttccgttcctgacggcggaagagctacccgattttctggcggcgcttgagagctacaaggggagtccgctcccccggttgggcttgcagattatgatgctggcgggcctgcgtacttacgaactgcggcactcaaaatgggaatgggtagatttcgataatcggctgtgggagatacccgccgaatttatgaagatggaccgcccgcacctggtaccgctttccgatcagcttgtggtcttgctgaaagagttgcacggtctgacaggtcgatacgtgaatatgttccccggcaggaatgacccgtcaaaggtcatgagcgagaacacaataaacaggatgatccacacgctggggtataaggggagggtagtagggcatggcttccggcatacgttcagcaccatactgaacgataagggattcaactctgattgggttgaactccagatcgctcacgtggataagaataatattcgcggtgtttataaccatgccctgtatatggaagggcgtcgggaaatgatgcagtggtatgcggattatattgaccagctgcgtttgatttaa

SEQ ID NO: 86734 - DNA, 570 bp, Citrobacter koseri
gtgagtaaaaagaaaaaaggaagcaaattttcaggtgatccacgtaaacgagctgccgctgctgcactcaaaaaccagccgaaacaggagcgggtattaaaacttaaagacttcatcgatatggataacccggaagatgtttcaggattaagaaaggtggctatagagctaaaatctgacgatatcaatgatgattttttatcctggtatcaggataaaatggaggttgatgatgggtcgctttttgacctgagctaccacagtttccccttcttcgatgctcttctggataaaggggagaaagatgatgatacgggtgtagttaacatagataaaatagtcgcttttcttagagatccgacgaataccccaccaggcgaaccagcacgatgggatgaagatacttatttgaatattatcggttttctgtctgaatatctttcactacgtgggtaccttgaaaacttcgacgagtttaaaaatatcgagtcttataaagagaaagcacttgaagatgaatatagcttttacggtaatgaacctgccgttttctccttccctaggcagtaa

SEQ ID NO: 86735 - DNA, 783 bp, Citrobacter koseri
atgtccgatatcaaacccgcaattaaggcatacagtgagcttcaacaggcttatgactggttcaatctttccctctttgataaggctctgccggatctgctgattacgttacagcgcggtcgtaacacctttggttatttcgcgcctgaacgcttcacaggggaatccagcgtatcggagctggcgatgaatcccgattacttcggtggccgttcgctggccgataccctgtcaactctggtgcatgaaatggtgcacgtgtggcagcattacgcccccgttaaaaaatgccggggcggctatcatgatcgtgtatggggcgcgaagatggaggaagtcgggcttatgccatcaaataccggcttacctggcgggaaaaagaacgggcagcagatgacgcactacattatccgtggtggccgctttcagaaagccgtgtatgacctgcttaaaaatggcttctctatctcctggtatgaccgctggtctgacggagcaatcgttacctcaaagattaacagcgatatcctcgatgactggctggccgtcaccgatgaaaacgatactgaccttatcaatcggctatcactgaccgtcagcaaatcccgcccggaactcattccagacgatgacgatctcagcgtaatgatcaaaccgccagtaaagggtactggcacccgcatgaaatttacctgcccggaatgtgggctgaacgcatgggcgaaaccctccgctgtattgctttgcggtgagtgtcgatgtgagcttatggcggcagaataa

SEQ ID NO: 86736 - DNA, 549 bp, Citrobacter koseri
atgaaaattaaactgaacaacgtccgcctggccttccctgctctgttcgaagcaaaaaccgtgaacggcgaaggcgacccgcgcttctctgctgttttcctgatggacccgaagcacccacaactggatgaagtccgcaaagcgctgaaacaggtagcgaaggaaaaatggggcgagaagtgggaaaccatttacggccagctggagaaaaaactcaacctctgtctgcacgacggtgacgagaaagccgaatacgagggcttcccgggcaacttcttcctgaacgctgccaacaaagcgcgtccggcagtcatcgatcgcgaccgttcgccactcatccaggctgatggccgtccttatgctggctgctacgtcaacgcggtaatcgacatctgggcgcaggacaacaacttcggcaaacgcgttaacgcatcactgggtggcgtccagttcctgcgcgacggtgacgcgttcgctggcggcggtgttgccgcaccggacgacttcgacgatatcagcgaaggcgcagacgccgacaccctgatttaa

SEQ ID NO: 86737 - DNA, 363 bp, Citrobacter koseri
atggccagcgcgtttaacgccctgcagggcgctgtccagagcgtcgatctgcacaacgcgcttatcgccttcggcgtcgcggtaatcaacaacacgctggatcatcgtttcgctgagctcctgcggctcagggtagaaagcagccagggcgataatgtcgctgaactccagatcgtccagtgtaaccttacggataacggtattttccgctttggtttccggtaccgtttcgcggtattcctgcacctgcgccacagtgtccgggcgaagagcgacgccagaggccagcgcggtgataaggcgttccagcaattcgttgttacgggttaccagctggttattaagttccagatttgtttctaa

SEQ ID NO: 86738 - DNA, 348 bp, Citrobacter koseri
atgtccagcgcgtttaacaccctgcagggcgctgtccagcgcatcgatctgcacaacgcgcttatcgccttcggcgtcgcggtaatcgatcgcgcgctgcaacatggtcagattgatggcctgtggttcgggatagaatccggccaacgcaattacgtcgctgaatgtcagatcatccagagtaggagaaccgcctcctgtctccggtaccgtttcgcgatattcctgcacctgcgccacggtgtccgcgcgaagaggtacgccagaggcgagcgcggtgataaggcgttccagcagttcgttgttacgggttaccagctggttattaagttccagatttgtttctaa

SEQ ID NO: 86739 - DNA, 423 bp, Citrobacter koseri
atggccagacagcgcgaatgggagcagaaacagcagcaggccagtatccggaaagcactgaactcggcgcagacgccccgcaactggagttacaccaaatatccgggcacaggcagcttcaacattgttcctgattttgcttacgacgatggtcgctttacgttcgtgggcttctccccgtcgaagtccatcccttccgtcaccaaagagctgaacggcaaagagcatgtggttaacagcagtatccagaagaaaggcgacttcaccgtactggtgattcaggaggtgacgccccgcctggtactgcgttccggtaatactgttgtgggtctggaaaacagcggatttggcagggtacacgccaccgatggttccaccgtatcccgacaggtggaaagagtggaaaaaccggaatccaggtaa

SEQ ID NO: 86740 - DNA, 225 bp, Citrobacter koseri
atgccaccagctctgcgctttggcatttgcaaagaaatccttattcagccgagcagtccgggcgttatcccccggtacagcttctccatctggatcaaacaccgctccgctaccgcggaacggcgttgcgagaatagctgggcggcgatttgttctgcgctgttcgttaataacgcgggcatcaccgcgcgcgccagccccgagaccatcttcatcgaaacgtag

SEQ ID NO: 86741 - DNA, 258 bp, Citrobacter koseri
gtgggcttctccccgtctaagtccattccttccgtcaccaaagagctgaacggtaaagagcatgtggttaacagcagtatccagaaaaaaggcaacttcaccgtactggtgattcaggaagtgacgccacgcctggtactgcgttccggctataccgttgtgggtctggaaaatagcggatttggcaaggtacacgccgccgatggttccaccgtatcccggcaggtggaaagagtggaaaaaccggaacccaattaa

SEQ ID NO: 86742 - DNA, 324 bp, Citrobacter koseri
gtggatctgcagctcgttgccagcgatgattaccccgtcggcggtaccaaaggactcgtctacgcccacgatgtgagagaagtcgacacgctgctcgaccagcagctcattgccctgcgacaacgcccagatggtgtcgacgtagcggccaacggcttcgaccatttcctcatctacccgcgggccggaagtatcatccgggtgctcagcaagggggtaggagccgaggaacatcgcgacattgcaacccgcataatgctccgggtgactctggcggttgcgcagcaccttttcggcaagtgcatgcgccgcagtgccttctaa

SEQ ID NO: 86743 - DNA, 333 bp, Citrobacter koseri
gtggatctgcagctcgttgcccgcgatgattacgccgtcggcggtaccaaaggactcttctacgcccacgatatgggagaagtcgacacgctgctcgaccagcagttcattgccctgcgacagcgcccagacggtgtcgacgtaacggccaacggattcgaccatctcctcatctacctgcgggccggaggtatcatccgggtgctcagcaagaggataggagccgaggaacattgcgacgttgcaacctgcatagtgttccgggtgattctggcggttgcgcagcaccttttcggcaagcgcatgcgctgcggtaccttcttctgcgaatga

SEQ ID NO: 86744 - DNA, 438 bp, Citrobacter koseri
gtgaccgacattgcccagactatccggggtaataaagggcagggaacggcgacctacgggacgacctctgtcacggtaccggacacatacggcaatccacacgtgatcagtttttcgcgctcgactgatgtcccgattttcgggcatatcaccctgaaagcctttacgggctacacgtcgcaaattggcgtacagattcagcaggccgtcgcggattacatcaacgggctgacgatcggtgattctgttctgctgagccgcatttactccccggccaacctcggcgtggtgagtggtggcagtgcacgctattacgacattcaggagctgctgattggcaaatctgccggaacggtagcggcggcgaatatcaatatcgcctacaacgaatcagcatcctgtaagccggaaaatattgtcttaacggtgacgtcatga

SEQ ID NO: 86745 - DNA, 498 bp, Citrobacter koseri
atggcgggaacagactttttattaccaatggtggcgggagccgcgcttagctgggccagctatagtgtggtcgctcacgtcacatcaaaacggcagatcagcacgctacgtgcaattgcatgggggactctgggcactctctcattagtgctgggcgtatgcgccttttctgctgtaggtgctgagcatcagacagcacgaaaagatatcgtatgtgcagatgacaacccggaatgctatgcgaaaacgcaccataacccggtcagggagtgcaagcaggtaatggacaagaaagcgacgtttcgccatgtgtggcaggaaagtgaagcgcagccggtattcaacacctacctctggcatgacgagaacaaacgaactattcaaatgttcggacaacaagctaaggcgattaacagtcttgggatgcaaataccgcttcagtatttttgtgttttcaacgccaataccggggaagtcatcgcggcttcgtttgagtga

SEQ ID NO: 86746 - DNA, 897 bp, Citrobacter koseri
atgagacggattgaggtaatactgggggaactcgaacggctgacgcgcgggctgaatcttgccgatctggcgcaggagacggcatttacggcggaagccattggctttaacctcgggctggcgcgcaactcggtcagtaaagatctcaatcaactctgcaatgatggtctggcgattaaaagccggggccgcccggtgtttttcctgcaccgtcaggcgctggaaacgctgctggggcgtaagctggatgacgccgaacgtgaagtacgtacgattgccgatctgttgccgcgtcaggaagggcacacaatcgacgatccctttaccggtctgattggctacgatcgcagcctgcgcgatgcagtagaaaaaggccgcgccgcagtgctttacccccacgggttgcatgtgttgctgaccggaccttccggcgttggtaaaaccttctttgctgaactgatgcaccgttttgcctgcgagcacgccgcaggctccctgccgccgctggtctattttaactgtgcggaatatgcccataacccggaactgctctcttcgcacctgtttggtcatcgacagggggcgtttaccggagcgagcgagaataaacctggcctggtggagcaggcggacggcggctatctgctgctggatgaggtacaccgtctgccatatgaagggcaggaaaagctgttctccattctcgataaaggtgaataccgtccgctgggggcaagcagcaaggcgcgttcgatatcggtacgcctgatttgcgcgacgacagaaccggtaagttcggcgttgttgcgtacttttcagcggcgtattcaggtctgtatcgatctgccgggcattcgccaaacaggtggagctgattgtcggctttttgcaacgtga

SEQ ID NO: 86747 - DNA, 132 bp, Citrobacter koseri; identical to SEQ ID NO: 76263

SEQ ID NO: 86748 - DNA, 150 bp, Citrobacter koseri
gtgaaaacctccctcaccgatgcccgccgccaggcgctacgttcagcctcacactggtatgccgttttaagcggggagcgcgtgagcccccagcaggaagcgcgctggcagcagtggtatgaacaagatcaggataatcaatgggcctag

SEQ ID NO: 86749 - DNA, 498 bp, Citrobacter koseri
atgctattaaaagatctcaatcattactggttcagcgcccatcctgttcagcaacttgtgcttgagctgacggaacgggatgccttactggacgtcgattatcggctgatgcgtgaacttcaccgcaaaggggtgaagctcgccattgatgactttggcaccggcaacagttcgctgtcatggctggagaaattgcgcccggacgtgctgaagatcgacaaatcatttaccgcggcgatcggtactgatgcggtgaactccacggtgaccgatatcatcatcgcgctggggcaaagactgaatattgaactggtggcggaaggcgttgaaacgcgagagcaggcgcaatatttgcggggacacggcgttcaggcgttgcagggatttctgttcgcaaggcctatgccgcttcacgattttcctcagtggctggcgggtagcgcaccgccgcccgcccggcataacggacacatgacgcccgttatgccgtttcattag

SEQ ID NO: 86750 - DNA, 1287 bp, Citrobacter koseri
gtgaataacttgctttatgagttagatgaacaagcaatactatgcagagatcctatttctaaaaaatatttagttgaagcgatttcttgctataaaactggagcattcagatctgcaattgtaacaatatggatagctatcgtttttgaccttatcaacaaaacaagagagttaagtatagcgggagataaagcagcagaagaaataataaataaatttgatgatctaagagagaagaacgatataagctcatctttaaagtttgaaagagatattctttctttagctaaagagagattggagataatatcacatatagaatacattgatttagagcgtatacaacaagatagaaacaggtgtgcgcatccctcaatgttaaatgataatgatatttttagcccatcaggtgagttagttcgtaatcatatagtagtggctgtccagtacctactgcgatatccaccagcacaaggaaaagcagctttatctaaaatattgtcagaaatagattccgattatttccctgaaaagcctgaagaaataaaaaccactttaaataaaacaccattatttcgggcgcgagaaacattaattaaaagtgtcattattgtattgattaaaaatacactaaaagatgaaaaaaacattaaatataataataaaataaaaaatgtattactctctatacaagagcaacattacaaattatactcaagcacattgaatgataaaatatctgatattacacgacatttaccaaagccagaaaatagttacataaagatcctaagattcattcctaattcgtgggattttttagaagaagatttgaagttaaaatttaaaaactacataaaagacattccatcagaaaatataagcgagctagacgagtttattaattttaaatttttaaaagatgaaagcatatataggataaataggataacaagaaaagagtctatagttcatggtttcttttttccaaatgaaataattttgaacaaacttattgacatatacataaaatctagagactttgcagaagcaaatgagttttatcctgtcgttgaagatcatataggactatatagcattgaacaattgagaactttacttaaaggatctttatctaacagtcaagtatacaacagcaataaatttccaattttacttagatcactatataactcagattttgaaaattataaagatacaattaaggcatgtttaggtgaagaaggaaggcatgacatcctgcctatagcctttgaaaaaggttaa

SEQ ID NO: 86751 - DNA, 141 bp, Citrobacter koseri
atgccggatggcgacgtaaacgtcttatccggcctaggtgtggggcgttgtaggcctgataagcatagcgccatcaggaaacgaaaaatgccggatggcgacgtgaacgtcttatccggcctacgagtggggctgttgtag

SEQ ID NO: 86752 - DNA, 246 bp, Citrobacter koseri
atggggtttatatctcaggaatccggtgcatataaaaaaattaggcttttaagaatgtctgatgttatttcattaactggcctgccgaaatcgactatttatttaaagatcaaaaataaagaatttcctaatcaggttcctattggtacgaggtctgttgcatgggtagaagcagaaatcaatgattggatagagaaaaacattcaaaacagaaaagaaaaatgccaatgggaaaatgtgaaatga

SEQ ID NO: 86753 - DNA, 852 bp, Citrobacter koseri
atgactaacactaaattaatttcattcaagaatgaaagcacttctattcttaatagttatcagataagtatttttaaagaacaatatggtgattctgcatgtataataagaatcatcgagatctctatgttaaataaactgcgtcataaaggcgagaaattacggtctttaaccgggctagcaatccccgatacagaagcgactgccgatgaaatcaatctcttaatgagtcgatttgaggtgctatgtcaccgtgaagaagaagagttatccttccgacaaaaagatgttagctctgccgagtacgcattaaaaaatgcagggttgaatgttaactccagaacagtttctgaagtaaaaaacaaaaatgccgtgaaaggggcgcgtgatgcttatgaacgacagtaccattctgcattgttacggcagaaagagcagcaaacgcgggtaagtctcttcagaggattcggaagtttgttacttgaagaagctgaacatatcgggaagaacgttagtaaaaaatatcttaactcgttttccagaccgttaacttctcccgctgagtttattaatgttttaaacgatgcgactttagttcgggatgtgagatttatcttggatgctctatgcgcactggataatgcagttgagcacattcttaaatgttgtgcatacccaattgatcgttacgaactggaaagaggtgggataagtcgaactatggcctatcgggagtactaccgcgctgaaaatgccattcttcgctccgtagtaagcgatcgtgagtatgcagaacatgctgtgaaatataatcatctctctgaacacaagaaaaaaatatttcgtaaataa

SEQ ID NO: 86754 - DNA, 1005 bp, Citrobacter koseri
atgtacgcattcaaagccgaaaggccggacgctgcacaccgttatcacagtaaattcgtatctggtacaaattaccaggaatcttcaaacagaagatttgcattaagtaaaccaacggaaaatattttgcgaagctcaattcttgagtctggttggttaatcaataatatcactttgcgtgacgttaatgctgtttcaggtaatgccattaatattggagccagcgagttacatacaggacgagttcacggtggcagattccgtaagatgttagcgataaatggcactgaattttttctgtccgaaactgacacgtgtgcacgaatcagctatttagatatgtcacatatttatcatacaggtgcccagggcgaatttgataaatcggtcagtgcgttttttagtcaggcttatgcacttgatatgttgcgggttggttttaatggagaatctattgccgatactactgatcctgagatcaataaaaaaggtgaggacgtaaatatcggatggcatgcgctagcaaaagactatcagggtggacagcaggttttaagcacccctataacacttggagataccggggaatggaaaaacctcgatctgctcgctaatcacctcatcaccgagctgattgcagagccttatcgggaagatccgcgtctggtggttctcgtgggggccgagcttgctgctaaacagcgtcttaagctcttcaacgcggctgatcgcccggctgatgtggacgctgcgcaaatggcagtcagttcgattgccggacggtttgcttttatcccgccgttcatgcctggaaaacgtcttgcggtcactacgctggataatctgcacatttatacccagtcccgaacacgatcatttcgcgctgagtttgatgatgagaaaagtgaatacgttaattcttatctgcggaatgaaggatatgcgcttggtgaaccagagctttatgcggctgttgatgagagtgcagtgactttttctgactga

SEQ ID NO: 86755 - DNA, 591 bp, Citrobacter koseri
atgcctgggtttatctttatgttcaacaaacaaaattcggttataaaattcttgcgccatgctaattgctcgggctatattcgcagcgttgccgcaaaatcggcaaccgggcgtaggaacccgagtaatctaacggcgacaccacacgcgccaggcgtgtttttttgtgtcgtagctttgactcacccttattttatggtgtggtggttaaccgtatctattcgttatttacaccacatcatccaaattatggtagtccaggcggggcagctttcgggctggccggtatccgttagagccggtattcctacccccgtctgggctaccacccatgagcgtaggaactccggtggtagcgttacccgctatctaacggagattgccgccatggctacgatccctgctttgtctcacccccaatatacctttgtatttctcgctgttcgccgtactgattatgccgcgcgtccattcgctgtgcgtactgttgcaacctgcgagcgtgctgcccgcatgaaactcgttgccgattttgtactgagcttcgccgcacgtattccgatgaacaatctcggggaggtgagcgcatga

SEQ ID NO: 86756 - DNA, 240 bp, Citrobacter koseri
atgagtcatttacccatccctaaccacggttgcaccttgactgaagcaggcgagaaccgtcttttacgggctgcgctggcgagcgagttcttggccgaagttctgtcatttcctgcgatgagtgggcagagaacagtttctgctgagggagccgcagcaatcatggcctgtattgcagaacagctggagggtgtggtgagagaaaccagtaccattaaaggagaaaagcatgaacgctaa

SEQ ID NO: 86757 - DNA, 411 bp, Citrobacter koseri
atgaacgctaatctcgtagtccattcacctgagtttcgggcggcatttctgcgttcctgcattgctgacgcctatatctccctgatgctgcggattaatggggacgctgtgtatatcgaggatggcgagcgtatcgagctgacacctgagcgtgtggccatgaatattctttatcacattgaagcaccctggattaacgaattcggccaggaagaggggcatcgcctggcgtgtgacgttctggagcgaatgctgtcacccggttacatggctgaaaatattcgcctttccgcatttggtgtttctgagctacgcgaagtgtaccgggacatcgttttcggtgcgcccgatggagaagtacctcctggtttcagcattgccactgcgggagtcggggaggtactgttatga

SEQ ID NO: 86758 - DNA, 2688 bp, Citrobacter koseri
atgaaagttcagtctgtatctgcggtttcgggggcagcaaacgggcgatggccacacatcctttccgcgttagggattaatgttccttccgctcgacgccacggtgcctgtccggcctgcggcggaaaagatcgcttccgtcttgatgacaaagaggggcgcggaacatggttctgtaatcagtgcggcaatggcgatggccttgatttagtccgtctggtgacagggcgctcagtgaaggaggtcgcgggaatggtctctgaggttctggcattacctgaagtacaggataaacccgctatgccagccaggaaaaaggtggcgggaaaagagaccggagcagaccgctatcagaaacttaaaaagttgtctcaaaacggtgaatcagcctatctgaccggaaagggattgcagggttactctttaccgcttcttactgctgccataaatctggcggggatgacttttccagctgggtcgctgctgctgcctttaactgacatcaccgggaatgttacaggcggtcagcttattaactctgatggtgataaaagtcttttacccggcagtcagctgtcaggcgcgtttattgccgtggctgatgttccgtctgatgctccagaacaggtcattatcactgaaggatatgccactgcgttgacggtcagcctcctggctgacggttggatcgttgctgccattgcggccacaaatttggtgaaggttgcggagcaaatccgcattcgatggccggacacccggattatcctggctggagataacgatcttgttgacgggaaagagaacactggccgggtatgggctgaaaaagccgcgaaagccgtagatggttgggtaacgcttcctccggtacgtcataaagccgactgggatgattatcgtcaggaaaccgggaaggaaagggcgcgtgaagccttccgggaggaaatgacgttgcacggaaaagggcaaaccagattaccgcaggggttcaggctcacgaaagaatatttgtggtatgacaagctggtgaataaatcagatggtgatactgagatccgtaatatcaagatttgcagtccgctgcgtgtgactgctatcaccagcgatgctgacggcagtaattatggccgtctgctggaatgggaggacaccaacggcattagccgaaaatgggcaatgccgatggaaatgctgggtggtagcggagaggaactgcggcgcgtactgctggtcaatgggctttcttatatcaatatcaacgggatggccagagcgcacctgatggaatacatctccctgtgcaagcccgacagaaaagtgacctgcgtgaataaaacaggctggcatggcggcgtttatgttcttcaggatgaagtgatcggcagagagtcacagtctgtcatcctccagacttccagcgttcaggggcgtgattttcgtgttacgggcaccacggaagaatggcgggaaaatataggccgctattgcgtcaataatgcccgactggcctttgccgtaagcctggcattcgccgcgccgcttctgaagctggttggtataggtggcggcggttatcacctgaaaggtgaatctacagacggtaaaaccacgaccatgaaagtggctgcttcggtgtgtggtggtacggatttctggcatacatggcgtgctaccgggaacgcgctggaaggaacggccagccgccgcaatgatgccacactgatgcttgatgaaatccgcgaggtggatggcagagaggcggggaatattgcctacatgctggcgaacgggcagggcaaagcccgcgcccgaactgatggttcggtacgggaaacaaaccgctggaatttgttgtttctttccacgggagagctgtcactggtcgagcatgccgccaatgccggagagcgaacctacgccggggttgaagtacgcatgatccagatcccgagtgattcgggcaagcatggggtatttgaggagctgcacggctttagtggtggtaaagcgctggcggagcatctggaacacgccgttattcattatcatggctcacccttccgcgactggctgcattgtctgacagccgatctccaggaaatgaccagccaggcgaaagcgttgctgaaggactacacccgcaggctgaccccagcggatgcaggaaaccaagttgggcgtgccgttacccgttttgcgctggttgctatggctggagaacttgccacacaagccgggataaccggatggcctgaaggtgaggcgttcagggctgctgagtgttgtcttgcctcatggatggctgatcgtgggcataccgcgaaccaggaggataaaaccgcactggagcaggtcagggattatatgacacgtaaccagttcagccgctttgctgactggcacgacgacaggaaccgcccactgtcgatgatggggttcaggaaagtggacaagggcgacaacgtgacagaatccactgtgaccttctacgtattgccatctggctggaaagaaatttgtaaagggttcgattcacgaaaggtggccagattgtgtgttgaggcgggctggctgaaagccggggaggacgggagaacgcaaaacagcattcgcctgccagaaatagggcttaagcgtgtgtaccagtttaatacgcaagtattgggtagctccgatcccgaatag

SEQ ID NO: 86759 - DNA, 273 bp, Citrobacter koseri
atgcgagtgatgaaaatttactgcccggagtgtatgtctgcggcaacggtgaggaaaacaaaccgaaagcaccccaaattatcagatgtgtactgttattgctcaaatgtagaatgtgggcatacgtttgtgatgaacgtttccttctcacatacgattagtcccagcgctttgagcggtcaaggacggattaaagagctaatggatgccctgccaccggacgagcgacaaaaagcattagaactcctgttggcagccaaagagagccagtga

SEQ ID NO: 86760 - DNA, 882 bp, Citrobacter koseri
atgagtcataataaaaaggaatatgctaaatttttccgtcgccccattttttcatccttagcaaaaggtaaggatgtttcggatttatttgggaattttgattcttactgctatgaaacactattttcaaacaatgataataatgaacatgagatttcactaagggatttatttacatcattatatgattttttgcgtctgaattatagaaatgaatatgtttataagacagcacttgtcaataaaataatattcggtaagcacagcccaaaaacaagttcgtcgtccatagagttaccaattaaaaactctatagtggatgttgcagtgtttaatggtacgtctacagcttacgagattaagacagagtatgattcaccaaaaaggttgattactcaagcccctgattatttggatgtttttgataaggtgtatatagttacacatccagagtatgcaagtaaatattgtgctttaaatctccctagagtgggagttatggttttgaataaaaaagatcaattgagcgtcattaaggaggcagattcaaatattgattatattaaaagtgatagcttattttcagttcttagaaaggaagagttcttagctataatagaagattacacttcaactaaaataaatatgcctaacggattggtttatgaatattgtaaagagatattcatgcagatgccattaaacatagcaaataaatactttatctctgctatgaaaaaaagatgtaacgacaaagtttttttggattatatttattctcttccagcatgtttacgtgttttaggttatgcaacaccattatcaagaaagcaaaaagaattcatcatgaatttgatggatgtaaaaattaaaatttgttga

SEQ ID NO: 86761 - DNA, 951 bp, Citrobacter koseri
atgtatagcccatatttgtatgcgagaagtacagagttattatgccttagggacctcgttgcgaagggagttagcccaaatggtctgctaccaattttagaaccaattaacgtcaatacgagaaatttattaacatgtttaaatgtttggaattctgacataattgttatccttaatccttatcaggaagatttttcttcacacaataacgtcttaactttaaatcaaaatttatcaagtgtattaacaaataaaaataatattatctctggatatcttattcagcccaatacaacgattaatgatattaataattggttgaatgctaacttaaatagacgagttgcacttctatatgataatccatcattatccaactctgatattcagttgttggcgacaaatcaattgattagttatcatgttgttttaaataataaaatgcttcctaatcagtgcgctcttcttcctttgtcgaagttaattattattagcgataactttagaaagttagcaaaaaatgctgattataatgggccggaacttttcacacacgcacatcaattcgtgggacaaaattacttaggatttggcgattatacaattactggccaggtactagatcttggaggtggtcaaccttctgctgttgccgcacatttggtgttcaagaatttacaagcgaatacagtttggattcgtcattttgtatcaagcaacacgcaacgaggaagttcaaatgttactgcaaaatttttagatgtttcagatcaaattacaaatcttgttccccaacatccaacccagtttggcagaaacattggtcttaactattattattacaatagtcaaccagctgtaaggcatttccctgggttgccaaaaaacaaacagtatcaaattactcaccatatttgtttcatgctggatttaatagcaggtcgtatttaa

SEQ ID NO: 86762 - DNA, 213 bp, Citrobacter koseri
atggtggcctcctgtactcagtgcgatggtgcatggttgtggttcggtgtgcataaacaactctcctgtcaggtatcgttggttaatgcgtcctgccactcacagcgcgggtcgttatgtcccggagttgtcggttgttgtcatggggtgaagcggtttacggggttcacgtttgttactggaattgaggtaacggccgggccagatttctga

SEQ ID NO: 86763 - DNA, 180 bp, Citrobacter koseri
atggaaaccgctgcacgtatcgctgatgtgctgaatgtccccctaccatggctgttcgcttcggatgagaatcttgctgaactgattctcaacttcgcggttctctctcctgattcgcaactccagttactggaaacatcccgtcagatgataaatatctctcctgaagatgacgtttaa

SEQ ID NO: 86764 - DNA, 360 bp, Citrobacter koseri
atgaaatacaccatcctgatacttctgtttttactggccgggtgcagcacctcgcaggaggaactgatgccggtcgatcctgatgccagcatgctcaccctgtggcagcagcaaagcggtggtaacgcggtcctgctggatgcccgcgctcggtcgcgccgcccgccggatggtccggtggtgcaacctgaagcagacaccattcgcagccagtttccgcgcctgcacaacccggatatggtgttgtacgttttcccgcaccttaacggcaacacgccggtgccgggttacagcaccgtcttccccttctacacccgcccgcagtattcattgccgggcgaacacctgacgccaccataa

SEQ ID NO: 86765 - DNA, 300 bp, Citrobacter koseri
atgagccgctttcaccatgctctggctgagcgcgataaccatatcctgacgctgcgggcggtgattattctgctgtgcctgtgtctggcgggcgttggctacggctggtacagcgccccgcaaaagctcactctctggttcccgccggacctacgcagcggcagtacccgcccgtggtgggaagtgccacccgccagcgtttacgccttcaccttttatatctccagcagcttaaccgctggccggataacggcgaggaggactattcccgcaacctccgctcgctgcgcgcctacctga

SEQ ID NO: 86766 - DNA, 309 bp, Citrobacter koseri
atgcgacatagctcattatttctattattgattttactcacagagttgaaggcttgggcctctccggaatccacccagctcgccctcgcgctgaagcaactcgagggcgtaaaaacctcgctggagcgcgcccggagcagcgccagcagcgatccacagtcgcgctatttcttcgactatttacaggcgcagcaggatatcaccgccgttgaacagggcatccgtctctaccttagcccggcaagagcgcagccgcgtgccgtacagcccctgagcgccagctatcagcgggagaaccccgatgactga

SEQ ID NO: 86767 - DNA, 1350 bp, Citrobacter koseri
atgcataatgaaattaatcccttagattatttaaatgaaaatttaggatcctacgatcctttttcattgagaattatgatcaataaaacatatagcgaaaatattgaagaatcttctggattggactcatttaacaaaagagattttgcaacacttttccatgaatttacccatcaacttcaaaacacatcatcgatcgttggctttcaacaatttaatgcaatagtttcaatttggcataatacaagaaatatatcatacgaccccaacgataaagaaagcgctattctacggcaggaatcgcagagaatattacaagattatccttgtaataaaaaagacgaaccacaaaaacgaggattattagatataatttcaattgaaaatttagaagacattctaaaacagaaatatacaaagaaaaaattgaaaataacttattcatataacaaatcaagtttcgaattgtcatttggcattggtgagttttatgaaagttgtgctgaaattttagaacgctttttttgcaaaaaaattaaattatatgacaatttctttgaatcaaattccattccttataaaatcggtgagagcatagctaaaaaattctatccggaatgcagtgactactgtttgattgttttaatgttaacagctttacaacatgcaagccctcatcaaatatttatttttttagttcatgcttatggtgttttaaaattggatgagaaaactgtaagagaacaatgtaaagaccatgtagaaacacttattaaaataaataaagaatggatcaacaaaactggcgatgtaattgaaaatggttttccttttgatgatccttacttgggtgacgtaataaaattttttaacctaaccatcaaaaacaatcttaaaaaaagaatagaacatccatttttagaactggatttcttaatgacaatagacgaatataattataaggaaaaaatagaatcaattattaaaaattcaggagggagtataatttatgccaaagatcaatcaggtaactctttatgtgatgtagagaagatagtaatcggtgactatacttcaatttaccacaatcagaaagcatggttaacatttattatatctatatttctcacaatgcgaaactcaaagacaataagcattaccgaaactgatcactttgaaagatataaatgcccggcgtttctatattgcaatcataaaaataaaactattaatgctgccttttgtgaggtaacaccttataaatatcccgtcgcaatagaaggtgcagataattgcgctcatcagttagcattatacaaaacagacttaagaaataataataacaaataa

SEQ ID NO: 86768 - DNA, 405 bp, Citrobacter koseri
gtgaggctgcaggagaactgggcaacactcgcacttaaggtcgaacataaaacagaaagcctgattctgcgggaatacataacgaacctggcttatactctggtcagttttatgctgcgcctaacgtggctgctcgccacgttccccctgctctgtctgtgcgtgttaaccgggctgacagagggtctggtgtggcgagatctgaggcggtttggctccgggctggaatcggtttttctccaccgctacgtcatcaggtctggcagttcagtcgcctccacgctgtgggtgtgttatctggcgcagccgctatttctgcccgcaatgctgattttactgccttcggccttatggtttgggataacgatatggatggcggcgggcagcttcaaacgctggttatag

SEQ ID NO: 86769 - DNA, 426 bp, Citrobacter koseri
atgcgtgacgcggtctctgaagagggacgtattctgtcgatctttgaaaaagagggcgtgatcaaactgaagccgggcgtggataaggtcagcgcgcgcatcagcgacatcgtggataacccgaaaaaactgaagttcctgccgaacgtggaagcggcgctgttaccacagatgtacaacaacgatgaaggcgatgcggtggtgattaacgccaactacgctatcgacgcaggtctggacccggttaacgatccgatcgccgttgagagcggagaaaacaatccgtacgccaacatcattaccgtacatcgtggcgacgagaagaaaaaagacatcgtggcgctggttgacgttctgcactcaaaagagattcaggactggatccgcacgaagtacaaaggcgcggtgattccggtcaataactaa

SEQ ID NO: 86770 - DNA, 345 bp, Citrobacter koseri
atgaaaaaatcactgacattactcgccgcagcaaccttaagcgccctgagcttcgcctcctgggcggatacgctgaccgttggcgcctctaacgtaccgcatgcggaaatccttgagcaggcgaaaccgattctggcgaaacaggggatcgatctggagattaaacctttccaggattacattctgccgaataccgcgctggccggtcgtgaaattgacgccaactacttccagcatatcccgtacctgaatagcgtgctgaaagatcatgcgggtgataaaacctatgatttcgtcagcgccggggcgattcatattgagccgatcggcatctactctaaataa

SEQ ID NO: 86771 - DNA, 5730 bp, Citrobacter koseri
atggcgattaaaaacagcgcaatcatttatgcaggctatgattatcagacactccaaggtgtcaggctactggcggattggctcaatacaccaactaaatataaccgaatagcatttgaggctgatgcgaaacaagttgatgccccacaaggcattgatgatattgtctgcgaacgtcaggatggtaaaacagatttttggcaagttaagtttacgccagataccgacaaagaagacaaccaactatcatgggaatggttacttaaacgtagtggtcatcgtattcgatctcgttccatcctgcaaaaaatagctgatgctgttgataaagttcctgcggaaagaaggggagatattactcttttgaccaataaaatacctaatcgtgagatagcaacttgcttgcgaaataaaaaaataggttggagtcaggttccaattgctaagcagcaaaacattattcttcagttaggtaatcaggaaagagcaaagcaatttttcgatatattacaaatatgtcatagtgatcaaagttatacgcgattaaatagtattgtcccagaactacttcgcaaacataccaatgaggagggggtatatcgcctgattgaacgagctaaacgttgggctatccagcgtaattcaccttcggatggtggatggatatgtcttaaacatattcgtgcagtgatttcaactaatagacctgaacctattccgcagacttttgtcttgccagataactatattgttcctgatgcagatttccacgataaattcattgactcactttttaatcctgctaatcgattagttgtcttaactggtgctccaggaaagggtaaaagtacttacatcagccatatttgtcagatattacaaactcgcgagtttccttatattcgtcatcattattttcttgggttagatgatcgtacgacagatagattaagtcccagaatcgttgctgaagacttgatgtgtcaggtcaaaacattttgctcacaaatcgaaatgaagaattatcatgcagagcacctacataaagtgctggctgaatgtgggcagatatataaagaagaaggtaaacgatttttcatcattattgatggtttggatcatgtctggcgtgataacggcaaagataaatctccactggatgagctattttgccaattgttaccgttgcctgataatgtaacattattggttggtactcaaccagtagatgatgagctattgccatcaagattgttacagaacagtccaagagaagaatggttgcacctgccaaatatgtcaggcgatgctattcgtaaatatctatcgggacaagttgaaagtggccgtattgtatttaactttcatcaaatccagtatgaagaagttttatcacagtgtgctgagttgttgactactaaaactcagggatatcctcttcatgttatctactcatgtgaaaaattacatgttgaaggtaaagggttatcgcactgggaaatagaaaacctgcctcgctgcgaaggtggaaacattacaaattattataatgaattatggagaatattaacttacgagcaacgcgatattcttcatctctgttgtgcttttccttttttatggcctgccacatcattttctgagattttttctgagaggactgaaactacaccgaatgttaaggctgtaatccatttgctttatgagtccattgctggattaagaccgtttcatgaaagcttgatcgtttttacccgtagcacaactgaacatgagaatagaataaaattattattgccagagctaatttcatggctggagaaaagtgcacccaaaccgataaaaaattgttggtactggtcatgtcttgcttacaatggtgatccatatcctttaagaaatggcttaactagagactggatattggagcggttagctgaagggtatcgacaggatgagtttattcgattactcactcaggctgaaacttctgctttagccgaagggcattttagtgaggcctatcagcatcgttcacgcaagacccgactacttaatgctaggttgcaaatctgggatatgtcgacgttgggcgtttgcagtatgattaatgcttctgaagcattgcttaaacaatatcaatctacccagaatgtgagttcaccaaagatactggcaactttggctatcgctttatggtttcgtaatcatttcgatgaagcaaagcacattacaaggttggcgttacaacgctactcaaatgaatcatccgtatataccaataagaatagcgatgagtcgcgtgctgacattcgtttattaatcaaagctgctgttttgactgagtgtttcgatgaaaaatggttggcaaccggttcagtacacaagtggagtgatagcaatattaatctgcttatcgaatgtgcggaatataaatcagatataggattactattttcattacatgatgtttttaagcaagctgtaataaaaaataaaatagtaaatgcaattgtcagggttgggattgttgaacaaatagatttagaatactggccacatttttctggtcttgactccgctctgctgcggttatacagtcatttatccactgcacatccatgttcacttataacagaacaaggtgaaagtgaaatcggtagatatcatgttcatccagaagtatcctgcgatgaatggttctatgacagccttttttatcgtcttaatgccagtggagattattgttggctaccggttagcacgggggaaggacaggaggaaatcagcagtcattttcaccatttaaatgatttctcagatattattgctgaaagtatggctctaaatattcaacaaagcttcagcgatttttgttcacttattgctttggtatcagatcttaaagatcatcaaatgcaaatccaacagaagcgaatgttttttaaaactgattgggtaagcattgctttaaatttacacttaatcatgcattgcaagcaggttaatacggaagaaattgatattattcttaattctgagcatacagccctgtatcggttgcataaaactattcttaactttcatagtagagccttcgaatctgatgcaatagcaaactttctggtatttgaggatgggagacagaaggaaaaactacaagagacaaatgaatatttggcgaataatcttgagttgtcagagattgcgcttcattatgatctcaatcaatcaattttttttgagcgagtcaagttatgttgggattatggtctgggatacgggcatcataaagatatagctctgaatcaggcgctgactgcagtaaaaaatattgcaactgttgagcctaaatatgcattaacacagcttgagcgtgtgagtccattggttcataatatttgtgacttcacagatggtgaccatactcaacattctgtaacggaattgtctgcgctatatgctcgtctttctccccttaccttaagtagcatctatgacagttatgttagcgagggtgagtggtatgatgcggataatgcattaacacaatacttaaaacatgctgatctatcatcacctttcgttgagagtttatgccggacattactagatgatgggcaaattgaaataatacaaaatcgtgctaaagacaattccatattgactacgttttggccggaaatattaccacgaaaaatggattatagtagtagcgcaaaacatccattagggttagctgaaaaatttgatccagcaaaaatcggtcctgctgatgtaaacaatttgctcaatgttcggtcgggttatgaaaatattcctaggtggtatcattattggaaaaaccaaggaaaggttacagaagtaattaacgtattgctgccaatcattaataatggcttgccagaatatagtgaatttcgttatatattatctgatttatttgaagatacattgcgtttgaaaggtaaaaaatatgcttttcccattttagtgcaggatcatattcagcgaaatggttggggtgaatggggggagtctgatgatcaaacatatgctcggttagataaagttatcagattgtatccggataaaattgatgactttctttacaagacgactcgacttcatcactataaaactaaagaagagaacttggtaattcccgggaataagctaacatatctattagtaaatgtaggccgagtggatgaggcgaaaagtctatgtgaagcgatgatttcggaggtagaggcagaaactcagaatcttccattgtgcaaacctcaatggcaatgggagggagaattagataacgatatgatcaccgttaaattcatcattcgtcgtcttttttggcctgatcaatgtgtaaaacatcttgtcgctgatcaattgtctcatctcttaattaatggtcaatgtgctgaagaaattgaaaatttacttgtagttgagatgggaaatcgtcaactggagtcagaggtggtagatattttaactgtactctggttagctagcttgaaaggctataaggttcagaataatatatcttcctttatttatgctcgtagcttcctttcagatgcattgctggaggctatcgatccaaatttaccaaacctcagtcgctatcaagtactgtataaacatcctgataatgatagtaatcactatggttttgaaaaaacacttggcaatgaacttccccatatattttgggatgaaataaaaaggcttgaggagagatctggagttccggctaaaatattaatgaaaaaagaatggaatgatatttgttataatcatgttcaacgatgggagagggttgattatttcttcggttcagagcgtgatagttttactatgagtttttccacaaggaatacacgatttggtatatctgcatacttgagaaccattaaccgacttatcaacgaatttagaatgccaaagcattacgcagaacattattcgatttgtttaatgtcagccaatccattattttattccgtatctaatcaacgacctggttggttacctttatggcaatatggggatattaccacaaaggaaaatataaaaacatatgttgaggaatgcctgaatgcattcaataatgaacagggatattcaatattaggagcattgtcattacctgtacgcatcgatgaaaataattggttagatattacggctgttgtggggatacaaacagaagaacatgcctcttttaagatacaatatgccgactgtggtcatagtgtagatagtttacttcaagctcatagaaatattaaattttcatttgcaaaatgggctgaatatcaaaattgtgtaccactattaggaagtacacgcgaattcctgagaatagcacggtgggatataatgtacgaatttcgtgggcttttctcattcgattgccaggaacaggttactgcctacccggctaaaaatcgcattaacttcgattatcagggtaaaaccatcggctatagtgacttctggcaagcaataccattatcaatttatcctaaggacatacgctctcctgttgctacttacactgcttatgataaggacctagcctgtaactggaaaaatcatagcgtactgaaaaagcctaatatcatgttatgtgattgtaaggtactaaagagagaaaatagttacagtccttttgaaatatcagacattcgttttcactttgaatctgagctgttatag

SEQ ID NO: 86772 - DNA, 1074 bp, Citrobacter koseri
atggattcttcaaggttttattctttagatgataatctgaaggaattacttcttaaatcgaatttaaatgaaggtaatgtggtatctaaaaatagtggaatgtgtggcgatatttatatatttgatcgtggttctaacacaacccctcaatattcatgtgcaaagatccctaaattgatagatggagtatctgataagaaaatctatgctcggtttgttaacgaacttgaaaaccaattaaagtactaccaccatcaatatgtccactgggcatatgatttcaaagaggtaatgggagttccggtagcgctctttcgatactggggaagtgacctcagaaagattatcaagtcttcctccagttctgatattaacaaaatatccattatggcatatttatgtgctgggcttagacattgctacagcaaaggacttgtttctcatcaagatttaaaaccagaaaatatatttattcgaaacatgagaaatgatttcagtattcaagtggaacaggatgtatataactttccgttggtaggtgattttggcttggctaatgcatccgtggattctgatttttttgatggggcacgaccctatatggcccctgaacaatgggaaaggaggccgttatcttctaagactgatgtgtttgctttgggggttattttatttgagatgatgtcaggaggattccatcctgcagggatcaaactgagtgatttttggcctaaaccgattgagggaaatactaaaaaatggactaaggctgaaccatggaggaagtgggcatcaaatggaggagctatctcaacagatgttgaagttctcgttgatggagaaattctagaacttgttaacaaaatgctttcatcaaatcctgatgagaggcctgacattagcttaatgattgatgacttactacaactcttaaggtcacgagatatgagtagctttatacaagtatcgcacttgattagtcattatgattctcaggcctcacaagtaagtcttgaggaatcctggccatatctatctcagcgttggaagatgtttaaggcaaagtttgggtga

SEQ ID NO: 86773 - DNA, 921 bp, Citrobacter koseri
atgaaaacgaagagttcaacgattggagcagtaagtactttcattgaaaggattatggattttagttttgaaaatacttcacccactgcatttagagggcataagaatgatacgtggaaggcgatcccttctatctttagagatgagtataccgatgcttataataatgaaaactctatagttcgtgatattgtttcggctcatcctgccgagtttgagtcagacaaaactatgtttgatcgactcgttagaatgcaacattattcattgcccacgagacttttggatgtgactattaatcctttagttgctttatggtttgccactgaagagagtgaagataaagtatatttgtctaatggtaggataagaaataaaaaaatggatggaaaggttttcatctactttgtgcctgataatcggaagagatattatgacagtgatacggttacttgtttatctaacctctccaatttaaaaaagaaacaaaaagatgatttcctggcgagagcttttaatttttctaatcgacatgatgaaatggttaatataataaaagatttcaatgatgaagatgatagtgttgatcaactttattaccatgcagggatggagaagtctcattttagaaaagttattaaccccaaacatttcattagcccagtttatgtcaaaccaaaaatgagtaataaaagaattatcgctcaatcaggagcatttttactttatcctcatcacccagaactaacaaaaaaccatcagggtaacgttctagatattcatgtggaaacattgattgtacaggcaagagctaaagccaaaattcgtgggcaactggctaagttgggaattcatgctggttcaattttcccggaaatggataaagcatcagaatacatacttgctcaatataataaataa

SEQ ID NO: 86774 - DNA, 225 bp, Citrobacter koseri
atgttgcgccatacgtttgcgagtcattttatgatgaatggtgggaagatacttgtgttacaaagaataataggacactctaatataagagaaacaatgcgttactcacattcttctcctgagcatctgaaagatgccgtattgtttaaccctcttgccaattatcatgggaatattgatgaaaacgaagagttcaacgattggagcagtaagtactttcattga

SEQ ID NO: 86775 - DNA, 570 bp, Citrobacter koseri
atggctgactcaggacacgataaacctgctgcgttgtcattaaatatcggcagtaaaataagacgattgcggcagtcacgagggatttcgttaaacgacctatctaaattgtcaggggtttcaaagggagcgttatccaaactggagtcaggatcttccagcccccgtgttgatacgctggacgctatcgccaccgctttacgtttaccggttggcgatttgctgagcggcggcagcaggatgtatccccgctttgaaaagcatcgcccagtgccggacgagtattcacaaatgatgaaattccgcatcggccccggcaatacctccgagatatggttgctgcaaatggagccgcaggtcaccatccacagtcccgggcattcagacggggcgcatgaacatattctggtgcacagtgggactctgcgcctgcgctttagccagtatgaagtcatcaccctggaacccggggatttttatgctttctccgcgcaagtggcgcacacgtacagcgcaacggaaacggcggttagcgcaacggtggtgatgactcacctcgagcccggttaa

SEQ ID NO: 86776 - DNA, 363 bp, Citrobacter koseri
atgcgtaaagttaatttaaaagaaagttttgctcttttcagcgattactggaatccgaaaattgtcggcgaaatgaataacgaatatgtcaaactggctaaattatccggaaagtttgactggcatcatcatgaacatgaggacgagctttttcttgttatcagcggacgcttgcggatggggttaagaacgggcgatatcgtgcttgatgcaggtgagtttatcattgtgccgaaaggaaccgagcattgtcctgaagcgttaaccgaagagtgctgcgtcgttttactggagccaaaatcgaccctgaatacgggcaatatcgtcaacgaacgtacggtacatgagctggataaactgtaa

SEQ ID NO: 86777 - DNA, 864 bp, Citrobacter koseri
atgtcgcgactggcacaggatatgaaaaaactggcgcaccgcgcaggtggcagccacaaaaccgtccacgaccgcgaacagatggcgcagcgttttgctcgtcatttgctggcgcagaatattcaggtcaccagcaccagccagctcaaagccagacacatcgcgggatatatccatgaacggctggcgcagggtatttctctgcgaacgctacagaatgagatggcgatggtgcgctctattctggctgaagccggacgcacacacctcagccagtcagaattaatcagcaaccagtcgctcggtatcagtggtgccagccgtgacgggacgcaccgggccattccggatgcactttaccatcaggtactggaccgggttcatcatatcgacgcaggcctcgcagccagcctgcaactggcgcgggtgatgggcctgcgtggtcaggaagcggtacagtgctgccagtcgctgaaaacctgggacaaactgctggaaaaaggcgctgaacgtctgccggtgatcttcggcaccaaaggcggacgaccgcgcatgacgcaggtgacggaccgggaagcagttcgccaggcggtgaaagcggcacttgagattgccggggagcgtaacgggcatctcattgacaaaccggatctgaaatccgcgatggactactggcacaaccatctccgcgatgccgggctgacgggggaatactctcctcactccctgcgctatgcctgggcacaggacgcgatccggtattatgaagagcaggggctgagccacaaagaggcgctggcggtgacttcaacggatctgggccatggtgattatattgagcaggtatacgggcatggtaaataa

SEQ ID NO: 86778 - DNA, 207 bp, Citrobacter koseri
atggaaactgagcatgaagctatcaatatttcattaaccattgaaaatggtgttgttaccaatgttcgccagattcgaaaagatgaacatatagcctccctggacacttttctatggatggtaaagcgcgctggctatgaagttgttgcgcctcaagaaagcactcaagatccagaaaatatcaaggttctcgctgaagtcgaataa

SEQ ID NO: 86779 - DNA, 930 bp, Citrobacter koseri
gtgctggtcgccatctgcgacaccgacacagaacgctgcgacgacctcaccatgtcatacggcatcatgggctatacccggctggaaacgctgctggaagaggaagctatcgacgtggtctcggtggcgacaccagacccgtatcacaccgagtccatcctcaccgccctgctccacggcaagcatgtactggcggaaaagcccctcgctacctcggtacgcgagtgtgagcttatcgtggagatggcgcagcagcgggacctgctggtcggcgtcgatttccacaagcgctgggacccggcggtaatgcgcatcaaagctgaactggagaagccggaagccgggcgcatcctgcgcgggcatatcagtatggatgacgtcatcagcgtgccgacggagtggctgaactgggcgggcgcaagctccccggtgtggtttctcggctcccactgctttgacctggtgcgccacctttctggtcaggaggtggtgtcggtgtatgccgtcgggcagaagcggctgatggtcgaatgcggcctcgacaccttcgacagcgtgcagagcctgctgacgatgaccgacagcagttcgtgggtggtggaaaactcgtgggtgctgccggagggctttccgaaggacaacgacgggcgtatcgatatcctctgcgaggcaacctatatccgcagcacttcgcagcatcgcgggctggaaatcaccacgccgggcatgacgctcacgcccaacagctatttcatcaactaccgcaacggcgttgccagcggttttggtatcgacccgattaatgactttgtgcgggcggtcaggaaccggtctccgtacccggtgacggcagaggacgggctggcggtaagccggatttgcgaagcggtgcatcgcagtctgaagagcggaaagcctgaaaaaatttga

SEQ ID NO: 86780 - DNA, 444 bp, Citrobacter koseri
gtgtcggtatatgccgtcggacaaaagcaactgctggatgtcggagggattgacacccacgacagcgtgcagagcctgctgacgatggccgacggcagttcatgggtggtggaaaattcgtgggtattgccggaaggcttcccgaaggacaacgacgggcgtatcgatattctctgcgaggcaacctatatccgcagcacctcgcagcatcgcgggctggaaatcaccacgccgggcatgacgctcacgcccaacagctatttcatcaactaccgcaacggcgtcgccagcggcttcggtatcgaccccatcaatgactttgtgcgggcggtcaggaacaggtcaccgtacccggtcaccgcagttgacgggctggcggtaagccggatctgcgaggcggtgcatcagagtctcgaaagtcaaaaaccagtgtcattaaaatag

SEQ ID NO: 86781 - DNA, 147 bp, Citrobacter koseri
atgagagcgctttgcctggtcttactgtttttcgcctggatttgcgtggcggcagacgactacagcttccgcaagcgaggcgcggttgacgacctgctttactatcagattgccgcctccggtacgccgcagcccctcgccgcttag

SEQ ID NO: 86782 - DNA, 654 bp, Citrobacter koseri
atgaagaagaaactgccagaccttataccaagggaatgtattattgcagctatgcgtgcctatgatgagggaatcactcatccgtttagtgagtctcggttatatgacgtggtatttgaaggccggggctacccaccgaaagcaataataggcattgcggtgttaaatattaccggtgttatgcttaaacccgaaaattttaatggcggtctaaattctaagtgctttaggttactaattgatcaagggtttgagattgttcagaaagaagaagataatgaacagcctgccatcagcatttttcctgatgaactgccgccgcagagcgtatttactgaaggtacagctacgcaggtaacggttaaccgctatgaacgcgaccgtaaggcccgacaggccgcattagcctggcacggttgtctgtgcaaagtatgtggtattgatatgatgaaggtatatggcgagatagcgaaaggttttatccatatacatcacctgattccgctatcagacatcaaagagaattactctctggatcccaaaaaagatcttattcccgtctgccctaattgccacgccatgttgcatcggcgtaatccgcctttttcgcctgaagaattgaaatcaattattgaatatcatgcggctctttag

SEQ ID NO: 86783 - DNA, 864 bp, Citrobacter koseri
atgaataaaattaagcgacctaagttttgtgactcaacagcaatcacggctctgacatctaatagagcattagcctatcatagtactttcaatggttgcttaccatcattaaaagcagcctataaagaatatgttttaactgctggtgttcctaataaaagtaattatacgcagttgactgtaaatcaaggtgaagcactaaaatattattatgcgcatccaccattaagtcatagcgcaattaataatattcgaagagacagtagcaactccttatgccctatgtgcggatctatgcatagaggtacacttgaccacgtattacctaaagaaagttatccagaattcgcagttttctcaagaaacttggttccggcctgtaaatgtaatattgtaaaaggaaaaactaccgcgaataggtttggtgcacgaatacttcatccttactatgacaagattttatcgaagagacttatttctgcaaaatttagtttgctaggtgttagtccaacaatagatctaaaaatacttttacctaggaatcatgtgctatatccttcagtgatgtttcatgttgatgaagtggttaaaaaaaacgatatacttggatatctttctgaacaatgggagtcattttatctacatccagaatcggtaatccgtggccttactccaagattaactgatattgttagttatttcagtcttctaagaaaagagttgtatcttctggataaaaaacataagggaaaaaataactggaactcggtatttgtttctggtttgtacagtagacatgttggttcatggatcttgacagaacttcaatctccacatcgtgatactgatggaatgttaatatga

SEQ ID NO: 86784 - DNA, 1635 bp, Citrobacter koseri
atgaacaaaaatgataactacgagataatatttggcagttctgcttatgtggtaaatatcaataaatcatctaagtatattaatatttacccagataaaaataacttcaatgatttcggacttgatagtaaggtttttatagacattgtagataaagaaataaataaaaacatatctctccccgggtttataggattcattgaagattataaagatttaaatggaaagtatgccctcgatgctatcagtaaaaatattgaaaagttatctcttttaaatgaaaaaccatatttcttctttacaatgcttagagagttaaaagattatagggaattggttgaaaattatgatgttgaagaagcgaataaaattctattcgctataaatgatattacactaactgtacgtgattctgagtctcaacgatataaaaatgttgcgctaggtactgatatttttaacaaatcctttatcagaaactctgagtcatattttgcttataaaaactcatcgtccgtgttaaaaggactaaattatgagagcgtggggcttttatctaaaaatattactctttcatctaaagaagttcaacatccaatcttaagctttaattttgaccatcatagtgagttacctaaaagagtcagtattctaattggtgaaaacggagttggtaaaagccagttgttaagaaagattgccttagctgctattaaagggactgatgaaatttcagagtgcgatgaggcagagaatacaattaatagggttttgataaatcggttgcttgcattttctcctacaaatgaaagtaagtcagttttcccttccgacaaaataataaaatcaaaaatatggtatagacgtttttctttgaatagaacaccaagcagaaggaatgatattaataccaatgatataataattgaattagccagaagcaatgaaaatattagagagttaagtcgttttgaaatatttgaaaaagcaatttcaaatttaagaaattatttcgaattggctttacctttaaaggattctaatcgacaaccattatatatcagagatctaaacgattatagtgaagagcgaagattacaaaattttcgagctgttgatctttcaaaggatccagtgagatatattcagggaaaatcacatcctttaagtagtggtgaaatttcatttataagattttgctcacaaatttgtgcaaatatcgaaaatggtaccttagtactcttagatgaacctgaaactcatttgcatccggcttttataaataaattctttgctatattggataccttattgagtttaactggctcttccgcaattattgctactcactctgtatattttattcgtgaagtgtttaaggagcaggtaacagttctgagaaagggagaaaatggcattttacaattggagaaacccagactcagtacatttggagccaatattggtaatatatcttattttgttttcggggaaagtgaaccaacagatgttttgctgagggttaaacgaaagatattaaaagagaaaatatcatggtctgaggtttataataaatataaagatgatttttctataaatgtattaactcagttgagaaatgaaatagaaggataa

SEQ ID NO: 86785 - DNA, 408 bp, Citrobacter koseri
atgagcttccaggagcgcaatgaccggcagctagaggaactgaaagccagaatactggccgactcggaatggctgacagcgtctgagttatcggcaaaagcgggtttccgttctgccgatcctgaggctggcccgaaaggctggaaagccgccgggaagatattctcgctgaaggtcgatggtgaggatttgtatccggattatgttctggatgagaaaatgcggcccctcaaggttgtcaggctgattctctcgctgttcaaagaacgtaagaccccgtgggggttggctatctggttcggctcggcaaaccgcaggttgagaggtgggaagccgaaagatttgctggtgtcaaagtcagagttggttctgctggcggctcaggatgaggttgagtcgggggagtag

SEQ ID NO: 86786 - DNA, 207 bp, Citrobacter koseri
atgcgggtaatgaaggtcacatgtccggaatgtggtgaaaaggccgtaatcagtaaagttaccccaagagaccgcctggctaccgatatttattgtgcctgtacgaatgtggagtgtggtcacacctatgttgttaatctgacgttttcccactcacttagccccagccagaagcagggggaagcgtcattatctggcataacttag

SEQ ID NO: 86787 - DNA, 879 bp, Citrobacter koseri
atgctcggtaaattccagcgtaaagagtgggatccagccgcacaagtcgataggcgcacactgaacgatatcagggaattatggtggcgctaccatggccagacgctaaaaaatggggaaactgaaaataaacacatcctcaagactatcacggcgctggataatcccctggtcagcgaagttaataagcggatgctgatagatcaccgctgccgcaggctcgcacagggaatcagcgcatcaaccattaatcgtgacgtttaccgcctttcaggtatgttcagcgccctgattaagctggatgaatttgagggtgaaaacccggtacgtgggttgcctccgcttaaagaaaaaaatcccggtatgacttaccttaccaaaacggaaatagccagcctgcttgactctctgaaaggagattatcgattgattgccttgctgtgtctcagcactggtggacgctggggagaagtcagcacgctgacggaatcgcagattatgcatggccgtgtcgtctttttggaaaccaagaatggcaaaaagcgcgtggttcccatatctgccgaactggaagaagaagtcatgaccaacgccagcgcgacactgttccatgtggactatgaaaatttctgccggatgctgcgtaaggtcaaacccaacctgccgcgcggacaggctacccatatcctgcgccatactttcgccagccactttatgatgaacggcggaaacattatcgcactacagcagattctggggcatgccagcattcagcagacaatggcgtatgcgcatctggcaccagactatctccagaacgcaatcacgctgaacccgattaacggtcagttccgtatagctgcctctccgcaagcctaa

SEQ ID NO: 86788 - DNA, 2685 bp, Citrobacter koseri
atgaatatcgcaaacaatatcactatttccgatttaatcaaacaggctaatggcgaatggagcaatattcttttccgtcttaatgtgaccgttcctgaaaatggcaaacatggagcttgtccacactgtggcggtaaagaccggttccgctttgacgataaaaacgggcgcggaacgtggttttgtaataactgcggccatggtgacggtttagacctggtgaaaaaggtgctggccgtggatacgatggaggcggcaacccgtatccgggaagtgtattcattcgatgcccgttcatcgtcgaataagcccatgcccgccaggaaagaagcccccgaaaagccgcctgagtggtgggctaaccagttccgcaacactgaacagggggaaagtgcttatctcagcgccaaagggctgacaggctatgtatcttccctgacgcgccggataaccaaagccgggggaatggaatttcctgctggttcactgctgcttcccattactgacgttgacggccacacaaccggcgctcagattatcagcccggacaaacaaaaaagcctgttaccggggagtaaagcggccgggcgttttgttgcggccgggaagccacaggaaagcgcacccgaacgaattgttatcaccgaaggatacgccacggcattaagcgcttccctgctgaccgatggctggtgcgtggcggcattgtccaagaccaacatgaagaacgtggccaccgcattacgtcagaagtggccggacgcacaaatcattctggccggagataatgactttgctgacggcaagcccaacgaggggcgcgaatgcgccattaaagcggcgctggccgttaaaggctgggtgactgtccctcccggacgttttaaggctgactgggacgattatcgccgtgaattcggcgttcagcgtgcgcgtgatgcgtttgcggaagaaatgatgaaccctgcggataccgaaactcgcctaccgcatggattcaggctgacaaaggattacctctggtttgaccgcccggcctctgatggtgcggataacgggcaggtcaggcaggttaaaatttgcagccccctgcgcgtcagcgccattacctgcgatgctgacggcgggaagttcgggcggttgctgtcgtgggaggattccaacggaatgcggcatgagtgggcgatgccgatgaccgttcttgccggaagcggtcaggagctgcgtgaggtgctgctcgataacgggcttcactttatcagcgttaacggctccgcgcgtggctatctgatggaatacatctcgacgtgtcgccccgtgcgcaaagttacctgcgtggataaaacgggctggcacggcggagcttacgtgctacaggatgaagttatcggcagtgatgccgatggtgtcattctccagtcctcctcgtcgtcaaaaaacgactttcgtatcagcggcaccacgcaggaatggatacagcacatcggaacttactgtgccggcaattcccgcctggtattttgcgtcagtctggcgcttgccgcccccctcctcagcctgatgggcgtgggcggcggcggctatcatctcaagggcgaatccacggacggcaaaaccaccacaatgaaagttgctgcgtcggtatgcgggggcgctgacttctggaagacgtggagggcgacggggaacgcgctggaaggtattgccctgcgccgtaatgatgctgcgctgatgctggacgagattagcgaggttgacggtaaggaggccagccgtatcgcctatatgctgggaaacgggcagggtaaggcgcgtggccgtgttgatggtagcgtgcgtgacccggcgacgtggacactgctttacctttccaccggagaggtttccatcatcgagcacgccgccgaagccggagaaaaacgcaccggggcgggtgtgggtgtccgtatggtgcaaatccccagcgacaccgggaagcatggcgcatttgagaacctgcacggatttgagggcggcaaggaatttgcggaatatcttgagcagtccagccgtcagtttcatggcgcaccgttccgcgactggctgcgctggatttcaggaaacctttccggcgtgactgcaagggcaaaggccatgaaaaaagagtacgagcgcaccctgctccccgcggattccggtaatcaggttgggcgtatcgtcgatcgcttcgcactgctggccgtggccggagaactggcgacggaggcaggtattacaggctggaagcccggcgaggcatacaatgcagcaagagcctgcctcgatgcgtggttaaaggatcgcggtcatgcggccaatcaggaagaagttgacgcactggagaaagtccggcgcttcatcacggccaatcagtacacccgctttgctgactggcacgacgaaaaaaaccgcccggctaacatggttggcttccggcgcgtggacaggggaagcaacggcacagagccggacaccacgttttatattttgccgagtggatggaaagaaatttgcggcacgtccgatacggccaaaactgcgcggctctgtcatgatgccggatggctcgataccgacaccaaaaaccgtggattacagaaaacggtgaggctaccggagattggagccaaaaaggtctacgtattcaggagtgaggttatcgggtga

SEQ ID NO: 86789 - DNA, 369 bp, Citrobacter koseri
atgtctcaaaataatattaatgaaaataagtctgtcgattcttctgaatggtctttgcataaagattatttctgctttatgtcagaggacagtaaaaacagacttgatactgtttctgatgtaatacttttaatgagagattatctaaattacgtgagtgatgatgaacatacatgtactaaagcacgaggtatagaggctatatgtattctcattagtggggaacttgaaaatctaaaatcagaactcaattaccctggtgggcttttttccgaatttcaggctatgcacggaattggtttaattaagaaatacggaataaaaaaactaactaaagcactcgaacagctatcagacgacggtcgttaa

SEQ ID NO: 86790 - DNA, 606 bp, Citrobacter koseri
atgacaggtattatgcatatgttcaagtgcggaggcttcgtaataaagctcttgcgctgctcccattgggcggggtatatttccagcgttgcccctcaatgggtaaccgggattagcagcccgtgtatgttatcggcgacgacagacgcgccatgcgtctttttttacgtcgcaaccaacgccacagtgcgccattttatggcgtggtgttacgtatctggtacaggtttgaatcgctctttcctgcgcctttcgttacactatgccgccttgtcaatggtagctcaggcggggcagctttcgggctggccggtttccgataacgccggtactgctaaccccgtctgggctatcgccatcatgaagattagcagcttcggcgatagcaacgattacgctgttatcggaggttgccttatggcttcgatccccacccaaactaacccgcaatatacctggcttttcctggccgttcgtcgtgctgatttgcaggacaaaccacaccgaaagcagatcactgcacccgattatccctctgcgcgacgacttatcgcacgggaatacgttgctgcctatgccgggcgactgccccttatccagcactaa

SEQ ID NO: 86791 - DNA, 993 bp, Citrobacter koseri
atgttaaccatcaataagccaaaggccgcagaagattttcataagcattttacacagtctgcccgttatttacccggtagtcgttcatttagcatgtccagtgaacgggaaaacatcattcgtctggccgtgctggaatcagcctggatgatgggggaaatcaccgtgctggacgtcactgccccggacggtcaggccatcgatatcggtaacagttccctgcacaccgggcgcgtttcaggtggccgcttccgtaagcacatggcggtgaacggtacggaatttacccttagtgaaacggactccagcgcaagcatttcatttgctgaaatgtctgcgcttgccagtatcggccagcagggattgtttgaagaaagcatgggcgactttttcgcgcaggcgtacgcgctggatatgctgcgtattggcttgaacggcaaggccattgcggagaccactgacccggaagcctacaaaaaaggtgaggacgtgaatatcggctggcatgcgctcgccagccagttcagcgacgggaaacaggttatcagcaagccgctgaaaatcggcgagtccggcgactggaagaacatcgacgcgctggcaaaccaccttattactgaacttatcgcggagccgtaccgggaagatccacgccttgtggtgatggtaggcgctgaacttgcggctaatcagcgcctgaaactctttaataccgcagaccgtcccgccgatgtgaacgccgcacagatggcgacaagctcggtagctgggcgctttgcttttatcccgccgtttatgcccggtaaacgtctggccgtcaccacgctgaaaaacctgcaaatctacacgcaggagaatacccgctacttccgcgccgaatttgacgaggagaggaaggaatacactcatgcttatctgcgtaatgaagggtacgcgctggggaacccggaactgtatgccgccgtcgatgaaaccgctgtgagctttgtctga

SEQ ID NO: 86792 - DNA, 912 bp, Citrobacter koseri
atgtttattccgactattccggaagggatgagtttatccctgccaccgttcaatgacattaatatgcggattattctttcttacaccatagcgaaatttactgaggataaaaatgattccggattgatggcgcggctggcagaaattttcttgctgggtcagatgcgaccgttagcggaaaaattgaatacattgactggtgtcagtctgcccctgccggatacctcgccagaagaaattaatatgttattggatcgttgctctgccatttataaccgcgagacggatgaatatgatcgctgtgaacgcgaatccagcagagccgagcatgctttgatggcattgaaacagcccgttcaatctgtcgctgattcccgcaggcgtaacaaatcgacagtacacgatgcgcaaagtgattcagaaagaacggcagttaacctcatgaatcagggtgagagggttaattatatgcgcggtttagccgggctactttatgacgaagcgagactctttaatgagattgtggataccaaacgatgtctgccccgtgcttatcgtattcctgaaattttcacccgccgcaatgagtttttatttattgcagccgctgatacctgcaatgctatacgctcattgcgtcttgcagcggaagatattatcaggaaatgcacgccaccaacggataaatatgaaatcaacaatggcggcgtaattaaagcgcaggcgtatcgccattattatcatactggcaacgacctgttgcgggcaattatcagcgcagacgactacgcaaaatatattgcggagtttggatggtttatgaaggaaagtcgtgaagcgctcatgtcagaagaacaactgaatgagtggaagaaaatgaataaggaaaatgaaaatgttaaccatcaataa

SEQ ID NO: 86793 - DNA, 234 bp, Citrobacter koseri
atggatttcgttgatgtggttaaaaataaacatcgtcttatcaagactaaagatgtgttgacgcgtgttcagcgtagtaaggcgtggctttataaacagcttaaagcaggtacgtttcctaaacctgtacgaattggctcgcgctccatctcatttgttgaaagtgaagtcaactattggattgaagagcgaatttctgcttctcgcgataacattaaaaaacgagcgtcgtaa

SEQ ID NO: 86794 - DNA, 633 bp, Citrobacter koseri
atgaacagtttcgaaatgtttatcagactgaattacataaccgcccgcgaaatggcttttgtattaatgggtttggattatgagaccttacaatcaagtctcatggttgaacagtctgctgtccaccaaagaattagtcgcgccatttcaaggaatgttaattattatgagaaaagtgaaaggaaacaaaatgtaagtaaggtgactaatgctgagcatgttttagcagccgcgtacccatttattattgaagaggtgacgccacatctaattattaaacatattgataaagcaattatgaaaatcacccgtgaatcaggatggaaggataagcttgaaatgttaggtggtgaatctcttcttaatagaggaaaaactctccacacaggagggcgaggcgattataagaaaaatgacgaggttaaaggcaactataaaatgattgccgtgttaattagaatgcttgctgaaaatgggaaggcaaagtatggctcattctcaaaacctttagttagtgaaatttacagtgaccttgctgaactctgttcccgtcatggagttgatttgaaggggcttgctgaatcaaccttttataaaaaggtgaaagaagcaaacagttttctaaatgagtaa

SEQ ID NO: 86795 - DNA, 1215 bp, Citrobacter koseri
atggctgacggcggcgggttgtaccttgaggtatccccaaaaggttcaaaatactggcgtatgaaatatcgccgtccatctgataagaaagaggatcggcttgcttttggtgtttacccaacaacaacactcgcagaagccagagcaaagcgtgatacagcgaagaagttactgtcacaaggaatagatccaaaagttgaacagaagggggcaaaagctgaaaccgagggggcatatttatttgaaaccatcgccagacagtggcacgcaagtaatctcacatggagtgaagaccatcgcagtcgtgtactgttgacactggagcagtatattttcccttcgattggccagcttgatgcccgaacgttgagaaccagccagctacttatgcccattaaagctgtagatgccgctggtaaacatgacgttgcacagcgacttcaacagcgtgtgacggcaattatgcgttttggtgtccagaatgacctcttacaatctaaccccgccaatgatatggctggagcgcttttaagcgttaaaacaactcatcatccagcattaccaccaaaaagaatacctgaacttcttgaacgactatcaaactataaaggccggttaatcacgcgccttgcagttgaattaacattgcttacttttattcgttcaagtgagatgcggtttgcccggtggaatgaaattaattttgatcgcagtgaatggactatacccggcatccgtaagcccatacccggcgtaaagcattctgaacgtggaatgaaaatgaagactgaacatatcgttcctctcagtaagcaggctttaaatgtatttcaacagttatatatattgagtggcaatggtgaagtgatatttcctagcgaccatgaccctaaaaaagtaatgagcgagaacactataaatagtgctttacgtgttatggggtatgacaccaaaactgaagtttgcggacatggatttagaacgatggcgcgaggcgctttaagtgaatcaaagctgtggaatgatgatgctattgaaagacaattaagccacgttgaacgtaagcatgttaaaggttcgtacatgcatacatctgaatacatagaagaaagaaaattaatgcttcaatggtgggctgattatattgatgccaacaaagaaaaaaccatctctccttatgagtttgcgtgcatccataatattactaccccttaa

SEQ ID NO: 86796 - DNA, 984 bp, Citrobacter koseri
atggcgattaagaagctcgatgatggacgttatgaactggacacaagaacgggcggacgaaccagtaagcggatccgcaaaatattcaacagacgggctgatgctgtcgcgtatgaacgctacatactgggtaagtttcagcgcaaggaatgggatccgtccgcacggattgacaggcgcacgctggacgatatcagggaactctggtggctctaccacggccagacgcagaagaacggtgagattgaaaacaggcatctcatcaaaaccattaccgcgctggataatccgcaggttggtgaggttaacaaacgaatgctgatagtccaccgcagccgcaggctggcgcagggaataagcgcgtccacaatcaaccgcgacatttaccggttgtccggcatgttcagcgccctgattaagctggatgaatttgagggggaaaacccgctgcgcggcctgcctcccctgaaagagaaaaatcccggcatgaccttcctcacaaaaccggaaataagccgcctgctggacgcgctgacgggcgattaccggttgatagcgttgctgtgtctcagcacaggcggacgctggggagaagtcagcacgctgacggaatcacagattatgcacggccgtgtcgtctttctggaaacaaagaacggcaaaaagcgcgtggttcccatctctgccgaactggaagaagaagttatggccaacgccagcgcggggctgttccgggtggactatgaaaacttctgccggaagctgcggaaggtcaaaccagacctgccgcgcggtcaggccacccacattctgcgccacacgttcgccagccactttatgatgaacggcgggaatataattgctcttcagcagatacttggccacgccagcattcagcagacaatggcgtacgcgcatctggcaccggattatctccagaacgcgatcacactgaatccactgaaaggagggctgggggtctga

SEQ ID NO: 86797 - DNA, 270 bp, Citrobacter koseri
atgaaccttgatgatttgcttatcaagtacccgctcgaaggggtgacaactgagaagttcgcggagctgttgggtaagtctaaaaacgccgtggatatgatggttaaagcggacaaaattccttttattgaaattcaggatccagagaagcctggggcgcgtacggagaaactgatttgcattgaggaatttaataaaggcatccggcttgcatttgcaaaaaaaccaaaagcacaacgcgatgcgtggctaatgtggttagggctttaa

SEQ ID NO: 86798 - DNA, 336 bp, Citrobacter koseri
atgaaaactaaatatgcgaccctgattcgtagcctgctgcaaaattaccatgcacaggcaaacgctattgaaaaagaaacattctctgtccatagcgatggtttacagttaatggaattgaatatacagctggcaaaatgtcttgagggaataacctctacggctcgttttaataacgataatgatgattttgaagaacttcacaaaatcacgcttatggtgtttggcgggaatataccagctgaaaataatatttccgggcttatgtcgctcgcgacttccgcattgaaaagtaataactcgcatcttaaatctgttgcagtctcccaacgttaa

SEQ ID NO: 86799 - DNA, 570 bp, Citrobacter koseri
atgaaacatttaatgattgacctcgaaactatggataataaacctacagcggccattacttctatcggtgctgtattttttaaccctgaaactggtgaaatgggtgcaacattttatcgtaatattatgctggagagcagtgttgcacatggctgtactgtaggtgctgagaccgttctttggtggatgcggcaagaaccggaggcgagtcgtgcatggctttatggtggatgccaggatttgcgtgatgtaattgaggatttgcttacatttatcaataataattgtgacacgcatactctacaggtgtggggtaagggaccaagttttgataatgtcattcttcgacatgcaatcgagaaatgtggttatagatttacattctggaatttctggaatgaccgtgatgtaagaaccattgaacaattggcaaaagacttgggtctgaatatcaataaagttatcaggtttgaaggtattcctcaccatgccctggatgacgccattcatcaggtgaagattgtctcttatgtctggatgtatctcgtcaaaatagccagtgtgaaataa

SEQ ID NO: 86800 - DNA, 276 bp, Citrobacter koseri
atgtgtgattgcttaaagcatgtcggtaatgcagttaaaactcgtctgcttgaaaaagtgcctgaaggagcggaagtatctgagggattcgggacgggttgggataattcagtgttttatctttctagtggtcgtactcatgtaaatatgcgctataagatggcattcagggcgaaaaagaagaatggtgatatggcaaagaaccttactcatctggattgcagtgttgcaatggcgtattgcccgttttgtggtgagaaaagggacgcctcatga

SEQ ID NO: 86801 - DNA, 252 bp, Citrobacter koseri
atgaaacaggattatttttcgtatgaagagttgctgatgggaatttttaatatcagtgatgaactgtatgaaacgactgattttgatgaactgacaatggagcactttgatgtaagttttgagcaatttgctaacgttgttgatgttttgttgccgttcgctgctgtggttcgttctcctttgagcgggaaaaactatcacgcatttcttaaagatggcattgcctttattaagactgaagtcagtacgtaa

SEQ ID NO: 86802 - DNA, 192 bp, Citrobacter koseri
atgtcgtttaagcatgaattagggcaggttgttgaagtttccattagcggtgaagaggggcatatcaaagcccgcgcggaatataccaacagctgcaaccagtatctgatccactaccagactgctgacggccgcgcatctgatgcgtggtttgaagaaggcgagattcaggccgcaaaacgcggcgcataa

SEQ ID NO: 86803 - DNA, 297 bp, Citrobacter koseri
atggacaagaaactgtttgagcgtctgaaagaaagcatgacgcagatgaatgaaatcgtcgaaggctcccgcgagccttcccgtgaaaatactgttactgcggttaaggtcaaggccatcagaaccgctacaggcctttcacaaagcggcttcgctaaactgatttcagtaaacgttgatacgctgaagaactgggaacaaggacgacgcgagccaaccgggccagctaaagcgctgttgagggccatcgagcgcgatccgcagcatgtaatccccgcactttcacctaagcactaa

SEQ ID NO: 86804 - DNA, 312 bp, Citrobacter koseri
atgttatttattgaaacccatatcttcaccgaagatgtaaaggaactactgaacgatgatgaatatcgtgagtttcagcagttcatggcagataaccccgactggggtgatgtaatccagaacactggtggcctgcgcaaagttcgttgggcggccaaaggcaaaggtaagcgtggcggcgttagggtgatttactaccacaaggtatctgaatcacaaatcaggctgctgctgatctacaaaaaaggcgtccaggatgatttatccgaggatgaaaaacgccagttaagggcgttgaatgagggctggtaa

SEQ ID NO: 86805 - DNA, 2037 bp, Citrobacter koseri
atgaaatttgaacttgatcaacaacaagttgaagtcgaaaaaaatgtcgagattgagctttttaaactgatagaaaaatctgagtctttctattttatttctggagctggatccgggaaaacacatgctctcattacaagtgttaataaatttataaatgataattacacgcaacttatattaaatggtcaaaaacttctatgtattacatatacaaataacgcagcagatgaaattaaacatagattaggcgataatgatttagtaataacctctacaatccattcttacatctgggatcttgttaaattccatatggatttattacttgatgagcatgttattttcttgaatgaagaaatagaaagaatttacagtgagatttatgaactacaaacagataatgcaactttattgaaagtgagaagtttgaaagaacctcaactagatgcaataatagactatattcttgtagataaaaatgatttttatgagtctcttaaatcagcctctaagttttggacgtatttaaaaggaattactgatgaagaggtgtttaagcatctaaaaggtaattatcagcaattatcaactgtttttaagaaattagtaaaatctcaagaattcaaacgatgtatatgtaatattgagaaaaaagaagaacagtacactacaataaaatacttcaatactaaaaatattgaagttttatataaaaacattatcgggcataatacgttgttaatatatgcatccagattgattcaaaaatatactttgctttcaaaatgcatcatagatgctcatccccttatttttattgacgaatatcaggatacggatgaaaatgttatcaatttatttttaagtgtagataatattgcaaaaggaggaaataagaaaatgtgcttaggtttctttggggatcctatgcagacaatttataaacatagcatgcataaagaatcgcatagcttaaagaaattggtgaaaaacattaataggagatcgcatcagaatattgttgagtgcattaataaaattagaggtgataatcaagatgttaaacaaaaaccaataaaaatatacgcagagcaatgctgcccgtcgttgattatcgaaagtgaaaaaaattatacgaataactatttatcttccataattcagaggcataaaagcgaatggagcataaatgaaaattccaaacttgcctgccttgttctcaaaaatgaaatgctgtctcagctccttggatttgaaggtcttttttctactatgctagatatctaccaaactgagcatgcaaaaggatttgagatgattggttcggaatttttatttagagaaataaggtatgccggttccttaccatctattctgcatgatttattgatgccactttatctcttgaaaagaaaagcgaacttttcggtttcagattttttcaatataaagccaatttcaaatcataacttgtcagatgttttagattctataaaaataattgagtcattaaaagttaaatgcttaagtgattttgtacatgaaatatctaaaatatatgttgggcaggaagcggaaattcaaagtctgattagctataactttcatcttgttatcgatggcttagaaagtgcgaaagagaaaattattgataagtgcaggtttaaggatacggaaaagattcctcaattattggatgaattatttaagattgatatggaacagtttttcctatggctggattttatttatcagacttatccagaaaatttagtttcatacttgacttgccatgcctcaaaaggtctggagtttgataatgtcataatttttctttcggattctttcaatagaaaagaagggtatttttctaatctcttaaactctgatataaattccattttggaacctcaacttgagtcagcaagaagattactttatgtttcaagttcaagggctgtaaagaatttaaaaatttatctttttacaaataaagaaattgataaatctaaagttgattatttatttacctga

SEQ ID NO: 86806 - DNA, 2181 bp, Citrobacter koseri
gtgtatatatcttttctaaaaataaacaacttcagaaagtttggagagaatgaaaacattatcggttttgttcaatcgcatagtgattcgccacaaaaggatttagtcgcgtcatcaacaacactagtgattggaaagaataactcaggaaaaacaactgtaacaaaagcattggaacttctgctctctgactcagaaaaaatcacagggcacgattttaattataattattcaaaaatgatacttaagcaaaactttgataacaagccgcacattacaccaaaactatcttttgaaatagaaattattttagatgacatgacgaatgatctcatcggtgattttcaaccgtttattgatgtaagaaaatcattaaatgaagatgtgcgaaaagcaaatatcattattgagtatgaagttaaaataaaagcagactatatagctaaaattgaagcactcaaagaagattgttccagtgggaaccataagccagaagcaatttttaggaaatatctcgatatattgtctaaaacacaattcagaagaaggataaaaaattatcaagatataaatgttgatactttaaccccaaaaaacatcatcgatttacgagttatctcggcagcaaaaaatattcatgataaaagattactcacaaaatcattcaataaaataataaaatatatgtatgaatgtgatgagatagaatataaagggatactaagtttagttgatggaaataatgaaaatctaacccaaaacattaaaataaaacatcaatcaggtgttgagagaattttagcaaagataatatcggataaagatattgggatagaactcagatccgaattgacatttgataaactaatgtcggacttgataacttatgagcataaagatggagagtttcttgttcctgagagtcaattcggtttaggttatgcgagcttagttagtattatcggtgaaataattgactatacaaatcaaagtttgaaggaaacaagtcaaagcaggattaggcttttatgtattgaagaaccagaagtctttatgcacccacagatgcaaatcaatttcatcagacatatccaagaagcattgaatgagattttatcatctcatcttgaaacactgacgtctcttaaaagtcaaatactcatcactacacattcatctcatattttaaacagtgtcatacatagtagtaatacttttgatgatattaattatatttatctcaaagatgggaatgctgcgagcgttttactaaaggatagagatattgcaaatactaaagagaaatcattacaatttgaatttattaagaaacacataaaacatcaaacaccagatttatttttctctgatgctataatatttgttgagggtattacagaagagcgagttttgaattcatatattgaagatgatcccgtcctaaatcgaatgcatatttcagttttcagaattgatggtgcacatgcaaaagtttacgaaaagttaattaataaaattcaaattccctccttgatcattactgatattgatttcaaaaaagaagttaagagaaccgataacagtatagttgaacatattaaaagtaatgataatagttgtgacgttgatgacgttgatgacgttgatgacgttgatgacgttgatgacgttgatgaaagtgacaagattgttgaacaaatatctgttctttctgaagacttaataactacaaacgcaactctacgtcatttttatagaaacagaaaagttgcagcattaaaagattattatgtaaaagataatttgatggttgtttttcagaaggatggcattggtataccaacagaatgtccacaaaaaacttattatgccactagtttcgaggaggcactaattttaaagaactataacaatgatttgctattagacgtccttctaaaagttataaaaaaagaaataataaaaacacttggtagtccaagaaatgtttgtaatctagctcataactcaagacaactacagaagcaactggctcggaaaaaaagtgaattttctaataatcttattttctctttggttacaacagaacaacataaacctgagcttcctgattacattttgaagggattagaatggctcacgttaaaattaaaaagggatggtgtaatctatgaaatttga

SEQ ID NO: 86807 - DNA, 837 bp, Citrobacter koseri
gtgagcgccaaagaaacactcaaacaactaaaggcaaatgaaaaagatctcttcatcattcattattcgtgtgagaatttgaatgataacaatgaaaactactcacctagaattacatctattgctgtgttacatgttggtagtgctaccatgcatagtttttcaattcatttagtcgctgaagtaaataaaattgaaagaaatctgataaatgaacattacgatgctcttgaaggggagatgttaaggcaattttttgagtttgtatcggataatataaacggctattggcttcactggaatatgacaaatataaattatggttttgaggctttgtctcaccgatataaagtattaactcagaatgaatccaaaagaatacctgattctagaaaatataatctatcagctttaattttatccgtatatggaaagaattgtgttgaacaccccagaatggcaagttttatgaagcttaatgatggagaacatagggataatttaacaggaaaagaagaagtagaagcatttgctgcaaaggaatatgtgagattgcacaaatctactatgtcaaaggtttactggtttcaacacatgtattttttattgcagcaaaacaaaattaaagttcataacaaaaatttatcatataaagtcaatgtttttgttgaaagaccagtagttaaaatattaggtgtgattgctgttatgttttctgtttttcaattgctccagtttagttggcaatcatggacatcatataatgaaaagtcacctaccgtaattgatagtaaaacaactggcgttgatatgaaaaataaagaaactaaaagttag

SEQ ID NO: 86808 - DNA, 213 bp, Citrobacter koseri
atggcggcctcctgtactcagtgcgatggtgttggtttgtggttcggtgtgcataaacaactctcctgtcaggtgtcgttggttaatgcgtcctgccactcacagcgcgggtcgttatgtcccggagttgtcggttgttgtcatggggtgaagcggtttacggggttcacgtttgttactggagttgaggtaacggccgggccagatctctga

SEQ ID NO: 86809 - DNA, 837 bp, Citrobacter koseri
atgaaaatcttaaatgctagaatcttatatattaaatccctcgatttattggtttgctttatgaaattaaaaaaaccatctgggcgccgtaatttacataatggaataaaaactttcatatccctatctatatctcactttataacattcccagttttatcatttcttttattgttaaattacatgagagataagagttcatttgacttcgacatggttggtgaactatatagtgcaaacagtatttttgtaatgactgagataagtacattaatctttatttcaatgtctttttttggtgtgatatttataattaaattaccaaagaaaattaagaaagagcaaaaaattgggtttgagtcaacatttataatatcagtagtgaatttattcatgttgtttttgtttatagtttcaagttttaatgcactaaaaagcatgggatttgaacaaataaaacaatccttacaagtggtagccatgatgattggaatagttatttacttaactagcctactaagaacaacactaaaaacaaagttaatatatcagctcgctatagtcatgacagttggtttgttctgtattttcccgaatcaatttctatccagattatatggtaaaggacttgctgagtttaatgtcggaggtgaaattctcgcatcggtaatgcatgaaaaaaattattatagtgaagatgtttttatagtattacaaactcccaaaatgctccattacaaaaaaatcaaaaaaaatgaccaacaatcctcaccaaaagaaacatatggggtaataccgcttagtcggatatataaaatagaatacattaataaatag

SEQ ID NO: 86810 - DNA, 225 bp, Citrobacter koseri
atggtcggaatgcccttctgcgggtacaggccgcagcgcagggacccggcgcagttaatcaccacgcaaaggatgtcgttatccggcgggatatcggcgaagccgttgacgatttccgattcggtgagtgcgccgatttctatcgcaaccggatggatttcccgcccggtcagtgacagcacctttttgccactggcgacgggcagccacagccctttaccgtaa

SEQ ID NO: 86811 - DNA, 225 bp, Citrobacter koseri
atggtcggaatgcccttctgcgggtacaggccgcagcgcagggacccggcgcagttaattaccacgcacaggatgtcgttatccggcgggatatcggcgaagccgttcaccacttccgattcagtgagtgcgccgatttcgatggcgacgggatggatttcgcgcccggtgagtgacagcaccttcttgccactggcgacgggcagccacagccccttaccgtag

SEQ ID NO: 86812 - DNA, 225 bp, Citrobacter koseri
atggtcggaatgcccttctgcgggtacaggccgcagcgcagggacccggcgcagttaattaccacgcacaggatgtcgttatccggcgggatatcggcgaagccgttcaccacttccgattcagtgagtgcgccgatttcgatggcgacgggatggatttcgcgcccggtcagtgacagcacctttttgccactggcgacgggcagccacagccctttaccgtaa

SEQ ID NO: 86813 - DNA, 222 bp, Citrobacter koseri
atgatactccccggcgaccgcctgatgctggcggggcacgactatctggtgactgccgtcggcaaaggagcacagcaggcgctgtttgaactcggccacctgacgctggtgttcaacggcgacctgaatccctgccacgtcggcgcggttcatctctccggcccggtgccgaaactccatgacctgcatggcaatctggtgattgaggagggacgcccatga

SEQ ID NO: 86814 - DNA, 450 bp, Citrobacter koseri
gtggacgtgtcgctgcgcaacgttatcccgtttatggcctttgtctcgctgctgatagctctggtgcaggagaccgcactcggcagcctgattgcccaggccctgacgccgctggcgaactcgctgtgggggctggtgctgctgtcgctcatctgtggcattccgttcctctccccggtgctcgggccgggcgcggccatctcgcaggtgattggcgtgatgattggcacccagattggcgcaggggccatctctccggccttcgccctgcccgccctgtttgccattaacgtacaggtcggctgcgacttcgtgcctgttggcctttcgatgcaggaggcgaagccggagaccatcgcaaaaggtgtacccgcctttctgctgtcgagacaactgaccggaccgctggccgtcatcatcggctggctgttttccctgggcttattctga

SEQ ID NO: 86815 - DNA, 219 bp, Citrobacter koseri; identical to SEQ ID NO: 84920

SEQ ID NO: 86816 - DNA, 804 bp, Citrobacter koseri
atgattgaacagtcagatgttgattttctgtataaaacatttcaagactccttagaaaatgacgaggagttactgctagagaaatttagtgagagatttcaattggcagtcgcaatggaagtggcgtttttgaatggtaaatcagaaatatataatagagtacatgctaagacaataaaactttctgagttgtggtattgctttgaattattcaagacagtcatagattatggatttggcaaaaaaaagactaagtcaagtgaacaatctaacaaggaatgggctaatgctgggcgattttcttcattcggtactattgatgtagagaaggttcgaaagcaaaacctatttcataacatagactttacatacagcccatttggaaatgcaagcttgcttgatgaatcatacttttcgaataaatggtttaatgatatttatggtaacatattatttggtttttgtttaactcctaagcatgaacagttgatctcaaatgatttgataagaatgtcattgtcgaattacttggatgatttgcaatcaattgcacagggtgaacaaaggttattcttggtgcgaggttacaattcgttaatgggtacaagttctgagatgattaaatctgaagaaatattgttatttatttatgcgctgagatgtaattacgtacaccaaggtgagcttcctaatagcaatgaaatgcctgttgaatataaagagtttattgttgatgagtgtatcaaattcctcgtgagctattgttctgttgcgtatctgactgttattgatgaattgtattaa

SEQ ID NO: 86817 - DNA, 522 bp, Citrobacter koseri
atgacaattctggaagaaattgaaaatgaggtttggtttattttagtctcgatttacacacatcaggaactgatgagttctctaacaacgagccagactagatatgaacttggcaatcagtttgttacacttaatgcattaacagaattattaatcttacgcattgctcgccttgcagacagaaccaagggggttcggtctatcgcaatgctgttgaaacgtggtactttccaggcatcaacagcagatatgcagttagtggcagataaattttatgcatatgcagcctctgtagttaagattagacatgaacaaattgcgcatatgaaacccggcacacttagcatctacggacccagagaaataccaactgccgttttaagggggactgaaattcttgtagagctcattgacctcgccaaaggaagtcttcaatcgtatatctacacagtgggttcacaagagtctgatgttgatttgagagcttcagtaatggctaacaagagaatttttgtcaattaa

SEQ ID NO: 86818 - DNA, 2226 bp, Citrobacter koseri
atggccaaccacattggaaatgaaaaccctgtcgcggatgccgaggaggatcgatatggttatgatgaactggctgccggtcttgcccggcgactcttggctctggagaagaagtccggtacggtgattggcattgaggggaaatggggatctggaaaaactagtctcctgaatctcctgttgaaacatttggagttggagcacggtgaagatacacatattctgcctgtctacccgtggctgagcccgcccggcactccgatgacgcactctttgttgttaccggtggcggcgatattggatgaactagattctcgttcctattcagctctgaggagaaaattacaaagggttcggaaaatccctgcctcgcctttggcgaaatcgttgctcgactatactcaacaggcgtccggtcgtctggccccgctggcagagtttggcggtaatttcatccctggactaggcatagtatcgcagggcatgaaaaccgtatcaaaacttgatctgacggcgcacagggacactacagaacagttgagacgacgtatcgaagaaggtatttcaaaatcaggcctccgttttattgtcattattgacgatcttgaccggttggaaccttctcaggccgttgacgtgctgcgtatggtacgggcagtggctgatttctctggattccactatatcctgtgttacgacccgggtgttttgtcccatgctgttgagcaggagcttaaagttgataacggtcgcctttttctgcagaaaataatcccactatctttctcactcccacatcatgaatctttcgatctacagcgcgagttgcttcggggcgcacttgagttgtacgaacaggtaaacaacgatacgccgggcaggactgagcatgccgatttacgcaaagctgcactaatctatgggcaggaacttacaactccgcgcgaagtcagtctggttctcagttccctagcatttcgttatgccgatataagggattatgtgtacttccctgatttgtgccttctgcaacttgttcgcgtgactaacccgggactctatgactggattgaacagtatttgacaaagtatttcgtccacgtttccggggaactcagttttacagatgcagagcaagacagattgaaaatagagctcaaaaacacccttactcaatatatttctccagaaccagcttcacttgatgagcttggtggctgggtgccgggaatcgttgagctagccggtgaactatatctctttaatcgtgatgcagaagtcagcaatgaatcacggttgaatcataaacgcctcggcagcagtgcctattggcgctactattttgcgttctcggctccgcaaaatgttctacccccgcattggatagatgagttactttttgggttcggaatcccagagaagcgggaggcactcgcgattgagctactaagcagcatccgagagattagtctcgctcaggttacctggtatgaacatattcttagtcagctgacggctcgcaagactgcgaccctgagctttagacaatgtgaggggctgttgtggttcttcttcaatttcagtgataaggccaacgaattactaagggcgaaagatcgacatgaatccggtaacgtgttgggattacaggaaatctgtcaccttcttattcgtatactttcactgcatcgtcaaagagggatatggctgctcagaaaactgtttctacagggagatgcgagggcttggttagtgcaatgtatgcgtgatctgctttgggctcatgggagcaggggcaaccgtccatgggagaaagaagatcagtttttatctagcactgagattgatggtgtgcgggaagctctcgcagttcgtatgagtacagaagatatgctgaataccgtcttcagccagcaagatctgtgcggttacctttatgcttggcgtgaaattgattcagaacctcgggtctctgcttggatcacccaagctaccctcagtgatgatggatttgttaatctgctctatggtctaaggggatatgcatggaactcagtaataaaaagctaccggtcacttaacacagataatatcgagcccttactgggaccaattacaacggttattagccgtctaaagatgctgtgctcagaaccacgactgtcggacatgtctgagagtctacttataacactgcgaagatcaaaccgtggcttggttatttaa

SEQ ID NO: 86819 - DNA, 1503 bp, Citrobacter koseri
atgaaaaatgaaattatagaattgaaattagatttcacgaagtttcctgttttcttacagaccctcataaagtggattcagatgagaacaggggcagctgttgagatgattttatcgacagcattaggggtcatggccttagcttgtcaggacaggtttgatgtcaaacctgagggcaggccagggcatccaatatcactctttatcttggttctcgcaggttcgggaaaagggaaatcaacagtatttagattactaatgcgggcagttactcgcctggagacaaggctggaggaagaatatcgactactgctgatacagtacaaaaaggatattaccagctggaaaattgaacataaaaatgctgagaaaaggtacaggcaagtttgtgatctctctcctgataaccctttacggcttgagaccttggaaatcttaaatgcatgtactggccgtgaaccggaaaaacccataagaaagcgttttacaatcagtgatacaacaagtgaagcactgaggaaagaacttggcctcgagtacccgaacctcgtgattgcttctgatgaagcagggggacaattcgagagtaatttgtatcgccaaacaccgtggattaattccctctggagcggagatagaattgcagctatcagagcatccagtaagtgttatgccatcgaggatgcccgactgggtatcctggggatgattcagccccaattattcggaaattttatgatgcgacagggtaaaactgcccgactgtcgggatttttgccacgttgccagatgatggatttggatcttaatccatatccctgtgatatcagtagatatccggaaccccacagcgctgtgctggatgattttgaagcgattgtcaccgagcatttactggcaggtatcagtcgtcgggaaaaaaaagaacaacgcccatgtattacatttaccccggatgcgcaactagaatgggataaatgtgatagcgcgataaaaaagctgatggagccaggcaatatcctcgaaatctacaatgatgccgctgcaagatttatggaacaggtaacacgaactgcagctgtactgcagatgttcatcacaccaaactcagccatcattacgagggatacgctgctctcggcgatacatatagcaaactggtatcttgatcatttcattgccaaggtggaccaattcagaacgccaacggatgctgaaaaaatagagcgttttatggaaaaacagcttattaaaaacgagtctttcacttttgttcgtcgtgaaattcgtatcaatgggcctgtcagagattcagaacggctagaatctgcgcttgaggtgctcagctcgcaaggaaaggtacagttgcttaaaaagcacaacactaattatgtcagatttattggctcaaagacctctccgcaagaattgtgttcgcggctacatattccgacagaattgtggggggctatggtgttaagtaagttacctgagcctgaataa

SEQ ID NO: 86820 - DNA, 222 bp, Citrobacter koseri
atgtcaacgatatgtgaactaaaaaatcagccactgcgcatcctgcgcatgcctgaactgacgatgatactcgggatatctcgctcgagtatttacgaaaagctgaatcccaaatcccgatattacgatgctgaattccccagacctgtcaggcttggagctgcatccgtgggctggccgtcaacggacgtagaagcgtggattacctctcgttccgtttga

SEQ ID NO: 86821 - DNA, 2031 bp, Citrobacter koseri
atgtcttttgagttagtatcacttaaaataactgttaatacaattgatgggccatatggagttcacattccattctcaaacggactttttcttttgcgcgttgagaactcgcatggtaagtcaacctgtatgaatgctatcgcatatgctcttggaatggaaaaggcattaggtttaggggggacaaaaataccatttcctccatctttgactagagcgctgacgaataaagaaggtaaagaagttaaagtaattaaatcatttgttgagctgactattaaaaacaaatggaacaaatttgcaacgttgaaaagaaatatagcaggttttgaaagtgataatattattgtcataaaagagtttgatgtcgaaggtgagagtaataatggaacatattttttacatcttgaaggagatactaaaagggagttagggttttatttttggttatctaaattccttgattggagcattcctcaagtaccaaaccataatggtaaagatactccattatacccatcggtacttttccctggatggtttgttgagcaaaaaaaaggatggtcttcaatacttgctacaataccttcgcaatttggtataaaagaatgtaaaaaaagggtgttggagtttttactttccttagatgttaatgataatctcttagagagaagtgcgattaaaaatgaaatcgataatatttcgtttaaatggaaattaatcaggcataatgcagaaattgtagcagcaaaaatctcaggtattgtctcaggcatccctgaacaacctgaagtgaaatttgatacatacaaaattgatttagtattaaaagagcaagagtctatcatttctgcaattgactatcgcaagaatttagagtctcagttgaaagattttaataatgaaactataaatcctcaagataacgaaaaagtacagatagagttagttagagtcattagctctaaattagatgagattaactcccaagagttatctttgcaaaaggttagcgatcataaaagttatataacacatcaaatatcatctacaaaagacaggctgaataatcttttggatgataaaaggaaatatgaagatctgaagaaaatcgcagcttcttctgtatttgaaaatacgcatttgaatagtaatgagtgcccaacatgcggggcgacatatagtgataatttattagatctttcatcacaagaaaatctaatgacctatgagagtagtttaagttttatcaaagatcagattaaagcctttgagtttgttttgcatgattgtgaaaaacagtatcaatataaaatttcggagcagagaaaaattgaggagcgtatcgcttctttaaaagttgatatcgataggttgagaaaaagagataattcatctgtagccttacaggaagaaatgttacgcaaaaaaataaacctagaaaattcaattgaaagtatagatgatgcgtatgtttctttggctgaaattaaacttgaattaaatgcaattcattcaaattatattaagctccttacgaaaagaaaggcgttacctcaaagtgctctttccattaaagatcaagataaactgcaatcgttgagagttggtttggtcagtaggcttaagaagtataatttttctagttttgatgcggacttaattaacatttctgaagaaacttatctgccaacgagggagggttatgatattgggtttgatacttctgcaagtgatggtattcgtattatttggggatatttgattagcttgttttctgtcggtaaagagtattcaacaaaccatcctggggtagttgtcttcgatgaacctcggcagcaagaggcgaacaaggttagtttcgctgagttgcttagagatgcagctaaatctgcttcaaacggtggacaaataatctttgcaacttctgaagaggaaaatgttcttgttgaagcgttaagagatcatgactatagaatagtatcatttgataaaaatgatgggaaattactaaggaaattagatagctga

SEQ ID NO: 86822 - DNA, 213 bp, Citrobacter koseri
atggatccaacccttgatagggctattgaacttttactggctgagaaatttatcacccatgaaaatggtaaatatagtcttactgataaaggaaatcaatcatcattagagttgctctctatgaatgtatttaaaaaggagtcaggcatcctattaaaaaataaaaaaggcctgactgaagctaatattacaaaactatttcaggtaggatga

SEQ ID NO: 86823 - DNA, 909 bp, Citrobacter koseri
atgtttactgaccctaacagcgacccaaaagcatgggagcaatattttaagagtattgtccgtttgcattataaaccggcaaatttctgtgacatgcccgattcgcaaaatggtgatttcggtattgaatgttacaccttgtcggggcatgtgtttcaatgttacttaccggaacaatcaagtgatgtcgaaaaattagtaaaatctcaacgccgtaaaataaatacagatattttaaagtttacaacaaaatatagagaagatctcgaactgctctttggcgatacaaaaattagtcggtggatcttagcaacaccatatagtaaatcatcgaaattaacacaatactgtactcagaaatctttacgggtacgtgctcttggtttgccctatgtttctaatgattttcaaatattagttaagacagatagcgattatattacagaaagagcattgcttcgtagaacaaatttccagctaaatttggaactagataattcaacagttgagaatgcagtttcatttataaatgaacatgttgattttcttgataaattaaatttaaaacttcctaaaattgacccctcagaatcggcacaagaaagttatcggcattttttaatacaaaaatatcttgattatcaaaaccttttggatgaattaaagcagaactgggttgatatttatcaagttgtttataaatgtatacaacaaagagaaacgaatttagtcggactctctatgttgagctcttcaggtacacaaccaggggagaaaatgctaaaacaaatggaagcattgaagagtgatattgaaaaagaaatacctacttttaaagggtcagatttagaaaagattaactggggtgttatttctgactggttaattagatgtccgttggatttttga

SEQ ID NO: 86824 - DNA, 876 bp, Citrobacter koseri
atgcaaaaatataacggccttcaggcccttgagaaacctctggcttcactgccacaccagattcgcaacctcatccttgaacgtctgcgtagcattacgcagtacgaacctgtgataggtattatgggcaaaacaggggctggtaagtcgtcactctgtaatgctctctttcagggagaggtaacacctgtcagtaatgttgactcttgcacccgtgatgttctgcgctttcggctccgcaatggcgatcacagcctgatgattattgatttgccgggggtgggtgaaagcgatcaaagagataaagaatacgctgcactctatcgtcacatccttcccgaagtagatttggtactctgggttatcaaagccgatgatcgcgctctgtcggtggatgaacacttctatcgcaaggtgatgatggcgtatcagcgccgggtgctgtttgttgttaatcaggctgacaaggccgagccctgccatcagtggagtgttgccgataacctaccttccccggctcagatgtcgacaattaaggcgaagcaaaatgccgtacaaaagcagttcctgtcgcatcatccggtttgtgtggtatcagcccgaaccggctggggaatggatgctctggtggagagcatgatgtgcagcctgcctgaccgggccaccagcccactcacaacacaactgcatggaaggctctgcaccgaaccggtaaaaaagcaggcacgagagtgctttggtcatgcagtagatgaaattattggcactgtggagtcatcatcttttctgccagcgcctgtaagggctgtgattcgaaccgtgcgggaagccgtagtgaccgttgcccgttccgtctgggactggattttcttctga

SEQ ID NO: 86825 - DNA, 231 bp, Citrobacter koseri
gtgcatgagctcattgaattgcctgttggaccgtttacgcgccagcaggcagaggcggttgcgtctcaatattccaacgttgtaatagaagacgaccaggggacacatttccgtctggttatccgtcatgagtgttgcatggtctggcgggcctggaactttgagccagatggcggttactggctgaaccggtatatcgctcgttatggcatccgcaaattccctgcataa

SEQ ID NO: 86826 - DNA, 444 bp, Citrobacter koseri
atgaatacacaaaaccttgagtttgctgagcaggctgcaattaccacctcagtggtccctgacgagttacgcatcggcttctggccacagcactttggctccatcccgcaatggataacctttgagccccgaatctttgtctggatggaccgcctgtgtaccgattatcacggcggtatctggcgcttttcgacgctcagtaacggcggcgcttttatggctcccgagtcagagaacgatgagaagtggtcattgttcaacagcatgaacggcaacggcgcggaacttactggcgaagcggcagggatagtctcctgcctgatggcatacagccaacacgcctgtcgtaccgaatgtgacgcaatgactgagcactattatcacttacgtgacttcgcgctgaaccatccagagcgcggcgccattatgcatctcatcgactga

SEQ ID NO: 86827 - DNA, 234 bp, Citrobacter koseri
atgaaaatcatcagtaagcgccagccatggctttgtaccggcaacatcctggctcccgactgtttcgcttctgtaccggcaaatataaatggtctggcagtatctgccattatgctggccgggaagttcaggacatacgcggcgttctggccgtatttgctgaacgtcgtcaggaccgcaatggtccctatgtcattcttcgaagtgtcactctcaattaatctttccctttaa

SEQ ID NO: 86828 - DNA, 330 bp, Citrobacter koseri
atgcaaaaaatatcatcacacccgacacgggcgaatcagccctgcctgtcacccattgaaatctggcagcgactgctgacttatctgttatcgcagcactacggcctgacgctgaatgacacaccgttcaataatgaaaccattattcatgagcacattgatgccggtatcactctggctgacgctatgaattttctggtagaaaaatacgggcttgtccgtatcgaccggaagggattttcgtggcaagaacaaaccccgtatatttccgtagtggatattctgcgagcaaggcgctctaccggcttgctaaaaactaacgtgaaataa

SEQ ID NO: 86829 - DNA, 690 bp, Citrobacter koseri
atgacaactcaaaatcccacttctattttctctttcgaatcggtctgtaatatccgcatgtttatgatcgacggtgaaccttggtttgttactaaagatgtatgtgatgcattgaacattgatgtcacacaggctagaaagcttgataaacgcggttggaacaaaaaggggctgtattcaatacagacccctggcggcaagcaagaactgtcagttgtttcagagtcagggctatacatcatcatgcttcgttgtaaagaagcaatgactgaagggacccgagctttcagatttcttgagtgggtcaccggtgaagtgctgccgcagatccgccgaaccgggcgctacgttcgcgaagagttatctccagcggataaagcgcagaaggttgtagccagcttcatgcccgccatcctggaagcaatgaaggctgaaggtaagcaggaatacagcgccccactcaaaccaggctaccgcgacatgattcactcgccggaaggtgttgttggactggcggatcgttcactgctgatgaacctgctgaaccagatgcaggatgacggccacgacgtatccggcgcagcggcggagttcaccacgatgatcagttacatcgtcggtgccagtaaatgcctgcgcgatattcgcacgcacgcgcagtacatcaacagccaggctggagagttctga

SEQ ID NO: 86830 - DNA, 201 bp, Citrobacter koseri
atggaacttaacatcatcacattaatgaaagcgcttattggtggtgccggtagtggctttgctctttctggcgggctgtctatgatcatacctgctttcactgtgacgacgggcgttgcctacctttttgccattaccggaggcctggttatggcgggcacctacatttttaaaaaaatgagtgccggtagtgcagcctga

SEQ ID NO: 86831 - DNA, 477 bp, Citrobacter koseri
atgaaaaaattattagtcttttcttttatattgttgcttgctggatgcgcttccaccaagaatgttgatgtcgtcgcaactgaaaaggcgcaaggtaaacgaattgttgccattaattctgcaagagcaccatgggtttatgagatcgaaaagcgattgaagcagaaaggatttaccgtgcttagaagtgcgagccagcaggtaacagtagaaaaacaatccaatagcactactggcatatataacgaagctacagcaaggtatgttcttaacttaaatggctttgctccaaataacgccatgacgagatgctacggcggaggatatgattttgattatattgatgctgagttgatagatgtgaaaaacaatcagacgatgttccattactctaactcagggttctcggagaactgtccgccgatgtcaggaacgatttttactgacatcactaatcttgtttcggattcatggtga

SEQ ID NO: 86832 - DNA, 2517 bp, Citrobacter koseri
atgccagtcgtaccaaccacatcagggcgtcaggttcaaagtagaggtgtgcagactagtggatttaccgttagggcaaatccagaggcttttggcgctggcttatctaatgtaatagacaaatatgctggtgtttatgcagaggctaaacaacgcgctaatgttgcgatggcgcaggacgcatcactgagcttaagccagattagcagcgatctgctaaataaccctgatacaggattacttaacctgaaggggaaaaatgcgatcggcaaagggcaggagtacacgcagcaatttgattcgcaggtcgaacaactggcgatgacgctgcctgatgaacaggctcacaatgcgtttatgcaacaggctcagcagcagcgtattcagttcaccacacaggccgggcggcatgaaatagggcaaatcaatgcgtatgaagaaggccagttccaggcaactttgctgaacaacggaaagaatgcggcagcaatgtacggcgataatgctgcttatgtgtctgcaaaccagcagacctttcagcagatcgatgaatatggcgcagcgcatggctggagcgatgagcagattcaggccaagaaagtcgagttcaaagaaaaggtagctaaagccactgctcagaatgcagttggcgctaattaccttgaagtaagacaaagaaatggcgagctaagcgatactgttaccggttcccgccgtgcggtatcagaaggtggttctggtgatagcgcccgtggcattcgtaacaacaacccaggaaacctcgaatacagcaaaagtaatccgtgggttgggcagactggagacgatggccgttttgctaaattcgaaacgccggagcacgggatccgcgctctcggtcgtaacctgatgtcatatcagcggcaggggattgatactgtcaatgagatcattaatcgctgggcgccgccgactgacaacaatgacacaacctcctatatcaaagcggtgtgcgaacagttgggcgtttcggctgatgaacctcttgatccatcaaatcctgatacgctgaaggcgctttgcgctgcgatcattcatcatgagaacggtagtcagccatacagcgatgagcagttaaccagcggcgtcagcgcggcgcttggactgtcatcattgcctacaagttctaagcgttacactggcacagcatggtttgatgccctgaatgaatctgatcaggcttcggttctgcgacagacagatgcgctggctaaacagcagcagtcagaatacaaggctgttatagattcacgagtgcgtgatgcaacagcggcatatatgcgcggcgttgagtttccaaatccgcctgatgaggctgctttcatggctgcttatggcgtccgtgagggtaacattcggtacaccgaatttaaaaatacgcagatcgccggacagtacatcggttcgttccgcaacatgccgaccagcagcatcaccgcatatgtcgatcagttacgtcctgataccggtgaaactggcgaaggatacgcgtcacgcgccgcgctttatgacaatgtggttaccgctgcaaatcaggtaataaaacagcgacaggctgaccccgtgcagttctctttggcagccggacagacgaagccgatcgacatgaacaaccaggcaaactttggacagagtatcgcactgcgtgctgcacaggttaacgatctggcaaaagcatacggcacgccgctgacgttcttctctaaagaagaagcgaataagatcggtactttcttccgtgatgcgccggtttctcagcagtctgcgtacctggacactatccggcagagtaccggtggtggtcaggtgtacatgtcagcacttcagcaaatcagcgccaatgcaccatcggcagccgttgccggaattctgatggataagccaggaatgcttcttgctcagaaaaatacttttaatccagatatttcggtatctccagctgacgcatctcaattaattctatcgggttcggctgcgagaagaggaacgaaagacgttaaaggaatgcccatgcctaaagactcggacatgagatctgatttcgtcgatacggttaaagatgcgtttgctggtgattcagaaggcgcatcaatggcctacgagatcgcaaaggattattacgctggcgtgatggcgaagaagggagcatttgataccgaactggataccgacgtatggacgcaggcaatcaacgtggcaacaggtggaatatatgactataacggtcagggaagcgtgctattgccatggggtatgtctactaaaacgtttgataagcaggttaatgacgcatggaaatctcaggttgttgatgcagggattaaagcaccaccaggccagtacggtctgcaaagctacggtgacagccagtacctggtgaaactcggcaccggctatttgttgaaagatgacggtacacctgtcgttatcgatctcacacagcagcgtcagcgcttctcaggagatatcccgcaatga

SEQ ID NO: 86833 - DNA, 396 bp, Citrobacter koseri
atggacgataacagcgataacgtcatccctctcgttcaacctgggagagatgaagctaaattactcaacgtcaccgtaagcgaccgaaaggagtatagccagcagcgatgcaagcacagagctattgaagtctgcgaaacagatcgtgttattcgctgcgcaaggtgcggatgcgttgttgatgcattcgatcacatcctgcaggtcgctaccgacgccgagcacatcgtcacagagattgagcaacttcaccgctgccgcgacgagttgcgcgagtccgtagccaatctcgagcgcgaagagaagaacgccaaagcccggttacgctctgccagaacgtcaatcctctttgcggagaatgacctgaaaaatgctgagcagggagttaaacagtaa

SEQ ID NO: 86834 - DNA, 282 bp, Citrobacter koseri
atgagcaagttaacaatcgatttactcgtaatggatgatgcttgcgaaccgtatatttgcggcgttcgaggcggctgcaccattagtgacttgcaggctattgagaaagaaatcatcgaaaaccgatatgaccatctgccaacagatggaacctacaccatcgaggcaagtttttttaaagggcagtacggtgaatatggtcgctgcgaacttgctccagggtgggagtgggaaatcgttgagttttcaccttttgattttggtgaggaggccgcccaatga

SEQ ID NO: 86835 - DNA, 570 bp, Citrobacter koseri
atggacagcaatatcattgagttagtgaagttagggcatgagcgggccaacgagctgaaagcatcatgcggtgctgtcgacgtgcgcagcgtggcgcaactgattagcgatctggcatcgcaacttgaagttcagtatgtgcgtgccgaagagtcacagcgtgagttccgctctgctgatatcacaatgcagaatctggaggctaagtgcgaaaagctggctgcggagaatgcggtgctgaaggcgtttggcgacaagctatacagtatgtacaaaggtctggagacttcaggcggtggcttccatgacgagcagtcaattccctatcagcaagcagcattggatgcagcaatgtcggcatttgaggaaatagaaaccccggcgaccgacgctttcctggctgaagtgcgggccagcgctattgatagaatcgtggacatcaagactaagcagcttgctgatatgcaccctgacacacacgcattcggcgcaacagccatgtctatccgcagccagattaacgaactgcaatcgttcgccgcccaacttcgcaaaggagtgcagtcatga

SEQ ID NO: 86836 - DNA, 888 bp, Citrobacter koseri
atgtcacacctgacgacctgcgaggattcacgcagtgccactttttcgccgggattggcgtctggtcccattccctccgcctcgccggatggcctgacgacaaaccagtctggaccggttcctgcccgtgccagcctttcagcgcggcaggcaaaggagatgggtttgctgacgagcggcacctatggccccacttcttccacctcatcagcgagcgcagacctcagcatgtccttggcgaacaggttgcaagcggtaacgcaaacacatggttcgaccttgtacaagcagacctggaaggagtgggatacgccttcgggcttgtgccgtttacgtcagcgagcatcggtgcgccgcacatcagagagcgagcttactgggtggcccacgccggtagccaatacgaatccacagccggagacgaagcgcggattgcaacatgtctccggagcagcacgattaacgggctggcagacaccagttgcgaacgactcgaccggatcaacccattgttacagcgggaagaatccagacggaacgccgaagatatgcctgaaacttcccggctccgtgttgctggcgggatgggtaactccaacctcgcgggactggaaggatacatcagggatgacagctcagcgggacggcaaagagagactggatcaactacctcgacaggcttacacggcaggccccttgaggttaacggtttttggcgagatgcggactggctcttatgtcgagatggcaaatggcgtccagttgaacccggcacattcccgctggttgatggggctgccgcgcgcctgggacgagtcgagtccggggtggcaagagtggcaagcagcaaccgcgtcggcagactcaaaggttacggtaacgccataa

SEQ ID NO: 86837 - DNA, 150 bp, Citrobacter koseri
atgcagtggaaaatcattaacggttggtactgcgttacagcttgcgggctgatgagctggaagtttcgcacgcttcaggaaggcatcaaatgggcgttcaccaacaaggtagcccatgaagtcgccaacgataacgggatatgggggtga

SEQ ID NO: 86838 - DNA, 342 bp, Citrobacter koseri
atgaagtcgccaacgataacgggatatgggggtgagaaagtgaacacacaacagattaacaaactgaacaatatcgcgaccatgttcagcaacgactaccagatgtcatcagagctgtatgaccgccacgttgaactgattgatgcagtcagcggcgccgagatggatgagacgttcgagcgttcgcttcttcgtgctggcgttcgccgtgaaattatggaagcggcaaaagaaagttgcgagtacgaagaactgatgtcgagcttcaagcgcgagcttaccggcgtcatcgcccgccttgacatggctgaccagatcgacagcgcgaggacagcagcatga

SEQ ID NO: 86839 - DNA, 882 bp, Citrobacter koseri
atgagcaacgatatcgcaatcacatcacagccaggcgctaccgtcggcactgctgctgcaatcttcagccctgaaggcatgaatcaactggtgcgttttgcagagttgatggcgcagagcaaggccaccgtgcctcaacaccttgctggcaagcctgctgactgcctggcggtaaccatgcaggcggcgcagtggggcatgaacccgttcgcagtcgcgcagaaaacccatgtggttaacggaacgcttggttatgaagcacaactggttaacgcggtcgtgtcttcatccaacctgctgacctcgcgcctgaattatcgctgggacggcgactggtcgaaagtgaatggcaagacagataaatcaccatcgctgactgtaacagtgtcggcagtaatcaagggtgaagctgagcctcgtgagttaaccatcagcatggcgcaggcaggggtgcgtaactctccactgtgggaacaggatccgcgtcagcaactggcttacctgtgcgtcaagcgctgggcgcgtctgcatgctcctgatgtccttcttggtgtgtatacccctgacgaattgcaggaggctgcacctcgcgtagagcgtgacattacgccactagcagcgacggcatcaggtatgaacagcctgattaacgcgaagactgagcaaaagcaggaagagcaaaccaggaaggcagacgaccgggatcctgatgaaatcctggctgcgtttaccggtgcagcgatgaactacaacaccatttctgacctggacaaagcgtacaaatacgttgctcagaaactggctggtgatgatgaccttctgtcaaaagcaactgacgtttacaccatccgctgtgacgaactgaacgaagtaccgatgtaa

SEQ ID NO: 86840 - DNA, 177 bp, Citrobacter koseri
atgacaatgttcaatgaggcggagttaatccgccaactggaagagcagcgcgctgtgattgtattgcgtgatagcgagatttcacgattgcagggagaagttgaaatgctggcggaggcattaaaaaatacaccgccagcgcagacagaacgtgattatcttggcagaaagaaatag

SEQ ID NO: 86841 - DNA, 804 bp, Enterobacter aerogenes
atgagcagtaacttcagacatcatttattgagtctgtcgttactggttggcatagcggccccctgggccgcttttgctcaggcgccaatcagtagtgtcggctcaggctcggtcgaagaccgcgtcactcaacttgagcgtatttccaatgctcacagccagcttttaacccaactccagcagcaactctccgataaccaaagcgatattgattccctgcgcggtcagattcaggaaaatcagtatcagctcaatcagattgtcgaacgccagaagcagattctgcaacagatcgacgggctgacgagcggtggcggagcagcagcggcaggcgcgcaggcgcaggctccgtcgtcttccggcgatcaaagctcggctgccgccagtacggcgccagcggcgtcttccggggcgcctgcgatgaccggggatgccaacaccgattacaacgcggctattgcgctggttaaagattcgtcccgccaggatgacgcaatggtggcgtttcagaacttcgtcaagaagtacccggattcaacttatcagccgaacgccaactactggctcggacagttgaactacaataaggggaaaaaagacgatgcggcatattattttgcctcagtggtgaaaaactatccgaaatccccgaaagcgccggatgcgatgtttaaagtcggcgttatcatgcaggacaaaggcgacaccgcgaaagcgaaagcggtttaccagcaggtagtcagcaaattccctggcaccgatggtgcgaaacaagcgcaaaaacgccttaacgccctgggttga

SEQ ID NO: 86842 - DNA, 525 bp, Enterobacter aerogenes
atgcaactgaacaaagtgctgaaagggctgatgatcgctctgccggttatggcaatcgcggcgtgttcttccaacaagaacgccagcaacgaccagagcggtgaaggcatgctgggtgccggcactggtatggacgctaacgctaacggcggcaacatgtcttccgaagagcaagctcgtctgcagatgcagcagctgcagcagaacaacatcgtttacttcgatctggacaagtacgatatccgttctgacttcgctgcaatgctggatgcgcacgctaacttcctgcgtagcaacccgtcctacaaagtgaccgtagaaggtcacgcggatgagcgcggtactccggaatacaacatcgctctgggtgagcgtcgtgctaacgccgttaagatgtatctgcagggcaaaggtgtttctgctgaccagatttccatcgtttcttacggtaaagaaaaacctgcagtactgggtcatgacgaagcggcatatgccaaaaaccgtcgcgccgtactggtttactaa

SEQ ID NO: 86843 - DNA, 1293 bp, Enterobacter aerogenes
atgaagcaggcattacgagtagcatttggttttttgatgctgtgggcggcggtgctgcacgcagaagtacgcatcgagatcacccagggggtggactcggcgcgccccatcggtgtggtgccattccagtgggctggcccaggcgctgcgcctgaagatattggcggcgtggtagcggctgacctgcgtaacagcggcaagtttaacccgctggatcgctcgcgcctgcctcagcagccgggtagcgctcaggaagtgcaacctgcagcatggtccgcgctgggcgttgacgccgtggtcgtaggccaggtgacgccaaaccctgacggttcttaccaggttgcctatcagttggttgataccggcggtgcgccgggtaccatcctgtcgcaaggctctttcaaagtgaccaagcagtacctgcgttatgccggacatactgccagtgacgcggtattcgaaaagctgaccggaattaaaggcgctttccgtacccgtatcgcttacgtggttcgcaccaacggcggtcagttcccgtatgagctgcgcgtctctgactacgacggctacaaccagttcctggttcaccgttcatcacagccgctgatgtcgccggcatggtctccggacggttctaaactggcctatgtgaccttcgaaagcggccgctccgcgctggtagttcagacgttggcgaatggcgcagtccgtcagattgcctccttcccgcagcacaacggcgcgccggccttctcgccggatggcagcaaactggcattcgcactgtcgaaaaccggtagcctgaatctgtatgtgatggaccttggctccggccagattcgtcaggtgactaacggtcgcagcaataacaccgaaccgagctggttcccggatagccagaacctggcgtttacttccgaccaggctggccgtcctcaggtgtataaagtcaacatcaacggcggtacgccgcagcgtattacctgggaaggttcgcagaaccaggatgctgacgtcagcgctgatggtaaaattatggtaatggtaagctcggccaacggtcagcagcacattgctaagcaagatctggaagcgggtggtgtacaggttctgtcatcaacgtttttagatgaaacgccaagtctggcacctaacggcactatggtaatctacagctcttctcaggggatgggatccgtgctgaatctggtttctacagatgggcgtttcaaagcgcgtcttccggcaactgatggacaggtaaaattccctgcctggtcgccgtatctgtga

SEQ ID NO: 86844 - DNA, 1305 bp, Enterobacter aerogenes
gtgtcaaaggcaaccgaacaaaacgataagcttaaacgagcgatcatagtttcagtggtgctgcacatcattctgattgcgctactgatctggagttcgttcgacgagcatctggatacttccggcggcggcggaggttcgtccatcgatgcggtgatggtcgatcctggcgcggtagtcaacaactacaaccgccagcagcaacagcagtccagcgcgcgtcgcgcggccgagcagcgtgaaaagcaggctcagcagcaggccgaggaactgcgggaaaaacaggctgccgagcaggaacgcctgaagcaaatggaacaagaacgtctgcaggcgcaggaagcggctaaagaagcgaaagagcagcaaaaacaggctgaagaagcggcagccaaggcggcggccgcggcaaaagcgaaagcagatgcccaggcgaaagaagcgcaggaagctgccgctaaagccgctgctgatgccaaagctaaggccgatgcccaggcgaaagtcgcggaagcggctgccgctaaggcggcagccaaagcagccgctgacgcgaagaaacaggcggaagccgaagcggcgaaagccgccgcggatgcgcagaagaaagccgaagcggaagctgcgaaaaaagctcagcaggatgcagagaagaaagcgcagcagcaggccgagaagaaagctcagcaggaagcggcgaaacaggctgcggcagaaaaggccgccgctgagaaagccgctgcccagaaagctgccgcggaaaaagccgctgctgaaaaagccgcagcagccgaaaaagccgctgccgccaaagctgccgcagcagaaaaagcggcggctgataaagcggccaaagccgccgccgcgaaggccgccgcggccaagaaagccgctgcagctaaagaagcaagcggtgttgacgatctgcttggtgacctgagctcaggtaagaatgcgccgaaaaccggcggtggcgctaaaggcaacggccagccatcgaaagatagcggtgcctcaggcgccaacggcggggcaacgggagctgatatcagcgcatacgcaaagcaaatacagatggctattcaaagccgcctgtatgatgccagcctctatcaaggcaagcgttgcgtgttgcatatcaaccttgggcctgacggcacattaaaggatatcacctctgaaggaggcgaccctgcgctgtgtcaggcggcattaacggcagcacgtactgcgagtattcctaaaccgccaagtcaggctgtttatgagaaaataaaaaatgcgacactagactttaaactgtaa

SEQ ID NO: 86845 - DNA, 429 bp, Enterobacter aerogenes
atggccagagcacgtggacgcggacgtcgcgaactgaagtccgagattaacatcgttccgctgctggatgtcctgttggtgctgttgctgatcttcatggcgacagcgccgatcattacgcagagcgtggaagtcgatctgccggacgccacggagtcgcaagcggtgaaaagcaacgatgaaccaccggttatcgttgaagtctccggagtagggcagtacagcgtgaaagtcggtcaggaaacgttgtcccaactgccgccggagcaggtcattgctgaagcgaagcgccgactcgaagcgaacgagaagacggtgttccttatcggtggcgcgaaagatgtgccttacgatgaaatcattaaagcgcttaacctgttgcatagcgcaggggttaaatcggttggcttaatgaccaagcctatttaa

SEQ ID NO: 86846 - DNA, 693 bp, Enterobacter aerogenes
gtgactgacatgaatatccttgatttgttcctgaaggcgagccttctggttaaacttatcatgttgattttgattggtttttctatcgcttcctgggctattattattcagagaacgcgtatcctcaattccgccagccgcgaagccgaagcgtttgaagataagttctggtccggcattgaactgtctcgcctgtaccaggagagccagggccgtcgcgatagcctcgccggttccgagcagattttttacagcggctttaaagagttcgcgcgtctgcatcgtgccaacagccatgcgccggaagcgattgtcgaaggggcgtcgcgcgcgatgcgtatctcgatgaaccgcgaactggaaacgctggaaacgcatattccgttccttggcaccgtgggttccatcagcccgtatatcggcctgttcggtaccgtctgggggatcatgcacgcctttatcgccctcggcgcggtgaagcaggcgacgctgcagatggttgcgccggggatcgcggaagcgctgatcgccacggcaatcggtctgtttgctgccatcccggcggttatggcctacaaccgtctgaaccagcgcgtgaacaaacttgaactgaactacgacaactttatggaagagttcaccgccattctgcaccgtcaggcgtttaccagcagcgaaagcaataaggggtaa

SEQ ID NO: 86847 - DNA, 405 bp, Enterobacter aerogenes
gtgaatacaacgctgtttcgatggccggtccgggtctactacgaagataccgatgccggtggtgtggtttaccacgccagttacgtcgctttttatgaaagagcacgcacagagatgctgcgccaccatcacttcagtcagcaggttctgttggctgaacgagttgcctttgtcgttcgcaaaatgacgctggagtattttgcgcccgccagactcgacgacatgctcgaaatccagacggaaattacctcgatgcgaggcacctctttggttttcacgcagcgaatcgtcaacgccgagaatacagttttgaacgaagctgaagttctcattgtgtgcgttgatccactcttaatgaagcctcgtgcgcttcccaagtctattgtcgcggagtttaagcagtga

SEQ ID NO: 86848 - DNA, 291 bp, Enterobacter aerogenes
atgaaaattatcgcgaccctttacgcgatgatggacaagcgcccgttaagggcgctttccttattaatggcgctgctgctggcaggctgcatcttctgggatccgtcgcgctttgcggcgaagaccagtgggcttgaaatctggcatggtttcttgctgatgtgggcggtgtgcgccggcgtcattcacggtgtgggcttccgtccgaaagccgtgcactggcaggggattttctgtccgcttatcgctgatattgttctctttgcaggcctgatctttttcttcttttga

SEQ ID NO: 86849 - DNA, 1140 bp, Enterobacter aerogenes
atgatcgattatgaagtattgcgtttaatctggtggctactgatcggcatcctgctgattggcttcgccgtcgccgacggtttcgacatgggggtgggcatgctcacccgtttcctcggtcgtaatgacaccgagcgtcgaatcatgatcaactccatcgccccgcactgggacggaaaccaggtgtggctcatcaccgccggcggcgcgctgtttgctgcctggccgatggtatacgccgccgcgttctccggcttctatgtggcgatgattctggtgctggcgtctttattcttccgtccggtgggcttcgactaccgctccaagattgaagatacccgctggcgcaacatgtgggactggggcatcttcgtggggagctttgtaccgccgctggttatcggcgtggctttcggcaacctgctgcagggcgtaccgttccatattgatgagtatctgcgtctgtactacaccggcaatttcttccagctgctgaatccgtttggtctgctggcgggtatcgtcagcgtggcgatgatcctgacgcagggcgcgacctacctgcagatgcgtaccgtaggcgaactgcatctgcgcacccgcaccgtctccacggtggcggcgctggtgacgctggtttgcttcgcgctggcgggcgtatgggtctactacggtatcgacggttacgtggtgaaatcggtgctggatcataccggcccgtctaacccgctgaccaaagaagtggcgcgtgaagccggcgcgtggatggttaactttaacaatatgccagcgctgtgggctattcctgccctgggcgtggtgctcccgctgctgaccgtcgcgtcgacaaaagcagataaaggcgccatggcgtttctgttctcctcgctgacgctggcctgcatcatcctgaccgcgggtatcgcgatgttcccgttcatcatgccgtccagcacgatgctaaatgcgagcctgacgatgtgggatgccacctccagccagctgacgctgaatgtgatgacctacgtggctatcgtgtttgtgccgattatcctcggctacaccacctggtgttactggaagatgtttggccgcattacccgcgaagacatcgaaaagaacacccactcgctgtactaa

SEQ ID NO: 86850 - DNA, 1569 bp, Enterobacter aerogenes
atgttagatatagtcgaactgtcgcgcttacagtttgccttgaccgcgatgtaccacttcctttttgtgccgctaacgctcggtatggcgttcctgctggccatcatggaaacggtctacgtcctttccggcaaacagatttataaagatatgaccaagttctggggcaagttgtttggtatcaacttcgctctgggtgtcgcaaccggtttgaccatggagttccagttcgggactaactggtcttactattctcactatgtgggcgatatcttcggtgcgccgctggccattgaaggtctgatggccttcttcctcgaatctacctttgtaggtctgttcttcttcggttgggatcgtctgggcaaagttcagcacatggcggtgacctggctggtcgctctggggtctaacctctccgcgctgtggatcctcgtggccaacggctggatgcagaacccgatcgcatcggatttcaactttgaaaccatgcgtatggagatggtcagcttctctgagctggtcctgaacccggttgctcaggttaaattcgtccacaccgtggcctccggctatgtgactggcgcgatgttcatccttgctatcagctcctggtacatgcttaaaggccgtgatttcgcctttgctaagcgctccttcgcgattgctgcaagctttggtatggccgctatcctctccgttatcgtcctcggcgatgagtccggttacgaaatgggtgacgtgcagaaaaccaaactggcggcgattgaagcagaatgggaaactcagccggcgccggctgcctttaccctgtttggtattcccgatcaggaagcgcaaaccaaccacttctccatccagatcccttacgcgctgggtatcatcgctacccgctcggtggataagccggttatcggcctgaaagatctgatggcgcagcatgaagagcgtattcgtaacgggatgaaagcctatgcgctgctggaacagctgcgcgccggttccaccgatcaggcggtacgcgatcggttcaatgatgttaagaaagacctcggttatggcctgctgctcaagcgctataccccgaacgtcgccgacgccacggaagagcagatcgctaaagcgaccaaagactctattccgagcgtagcgccgctgtacttcgccttccgtatcatggtggcgtgcggcgtactgatgctgttgattatcggcgcctctttctggaccgtgattcgtaaccgcattggcgagaaaaaatggctgctgcgcgccgcgttcttcggtctgccgctgccgtggattgccgttgaagcgggctggtttgttgccgagtatggccgtcagccgtgggcgattggtgaagtgctgcctacagcggtggcgaactcatcgctgaccgcgggcgatctgatcttctcgatgttgctgatctgcggtctgtatacgctgttcctggtggctgaactgttcctgatgttcaagtttgcccgcaaaggaccgagcagcctgaaaacgggtcgctatcactttgaacagtcctccgcggctattcagtcggcacgctaa

SEQ ID NO: 86851 - DNA, 162 bp, Enterobacter aerogenes
atgtccgatttcgacatggttggccaccgtcaggtggccttttttttgccttgtcgacagccgcaggcgctctcttgcgttaaaaaacgctattatattgatttactgaatattattgggaataatcactcgccgctttgccgggggaggggagatggttaa

SEQ ID NO: 86852 - DNA, 870 bp, Enterobacter aerogenes
atgtcagttttaattaataaagacaccaaggttatctgccagggctttaccggtagccagggtacattccactctgaacaagcgatcgcttacggcactcagatggttggcggcgtaacgccaggtaaaggcggcaccacccacctgggcctgccggtatttaacaccgtgcgcgaagccgttgaagccaccggcgcgactgcgaccgtcatctacgttccggcgccgttctgcaaagactccattctggaagctatcgacgcgggcattaagctgattatcaccatcaccgaaggtatcccgaccctggatatgctgaccgtgaaagtgaagctggacgaagctggcgttcgcatgatcggcccgaactgcccaggcgttatcaccccgggcgagtgcaaaatcggcatcatgccgggtcacattcacaagccgggtaaagtgggcatcgtttcacgttccggtaccctgacctatgaagcggttaagcagaccaccgactacggcttcggccagtctacctgcgtcggtatcggcggcgacccgatcccgggctccaacttcatcgatatcctgaaaatgttccaggaagacccgcagaccgaagcgatcgtcatgatcggtgaaatcggcggcagcgcggaagaagaagcggcagcttacattaaagagcacgtgactaagccggttgtcggctacatcgcgggcgttaccgcgccgaaaggcaagcgtatgggccacgccggcgccatcatcgcgggcggtaaaggtactgctgatgagaaatttgctgcgctggaagcggccggtgtgaaaaccgttcgcagcctggcggatatcggcgaagcgctgaaagctatcatcaagtaa

SEQ ID NO: 86853 - DNA, 1167 bp, Enterobacter aerogenes
atgaacttacatgaatatcaggcaaaacaactttttgcccgctatggcttaccggcgccggtgggttatgcctgtactactccgcgtgaagcagaagaagccgcttcaaaaatcggcgcgggtccgtgggtagtgaaatgtcaggttcacgctggtggccgcggtaaagcgggcggtgtgaaagtagttaagagcaaagaagagattcgcgcttttgctgagcattggctgggcaaacgcctggtgacttaccaaacagatgctaacggccagccggtaaaccagattctggttgaagcggcgaccgatattgataaagagctgtatctgggcgcggttgttgaccgtagctcccgtcgcgtggtgttcatggcgtctaccgaaggcggcgtggaaatcgaaaaagtagcggaagaaaccccacacctgatccacaagatcgccatcgatccgctggcgggcccgatgccttaccagggtcgcgaactggcgttcaaactgggtctggaaggtaaacaggttcagcagttcaccaagatcttcatgggtctggcgaccatcttcctcgagcgcgacctggcgctgatcgaaatcaacccgctggttatcaccaagcagggtgacctgatctgcctcgacggtaaactgggcgctgacggcaacgcgctgttccgccagccggatctgcgtgaaatgcgcgaccagtctcaggaagatccgcgcgaagctcaggcggcgcagtgggaactgaactacgttgcgctcgacggcaacatcggttgcatggttaacggcgcaggcctggcgatgggtaccatggacatcgttaagctgcacggcggcgaaccggctaacttcctcgacgttggcggcggcgcgaccaaagagcgcgtgaccgaagcgtttaaaatcatcctctctgacgacaacgttaaagcggttctggttaacatcttcggcggtatcgtacgttgcgacctgatcgctgacggcatcatcggcgcggttgaagaagtgggtgttaacgtaccggttgttgtacgtctcgaaggtaacaacgccgaactgggcgcgaaaaaactggctgacagcggcctgaatattattgcagcgaaaagtctgacggacgcagcacagcaggttgttgccgcagtggaggggaaataa

SEQ ID NO: 86854 - DNA, 1221 bp, Enterobacter aerogenes
atgagtagcgtagatattctggttcccgaccttcctgagtccgtagctgacgcaaccgtcgccacctggcacaaaaaaccgggcgacgcggtagtccgcgacgaagttctggtcgaaatcgaaactgacaaagtggtactggaagtaccggcatcagcggacggcattctggatgcagtactggaagacgaaggcgccaccgtgctgtctcgtcagattctgggccgcctgcgtgaaggcaacagcgccggtaaagccgctgatgcgaaagctgataccaaagagtccaccccggctcagcgtcagcaagcgtctctggaagagcagagcaacgacgcgcttagcccggctatccgtcgtctgctggctgaacacagcctcgacgcggcggcgattaaaggcactggcgttggcggccgcctgacccgcgaagacgttgagaaacatctggcgagcgcgccggcgaaagctgaaacgaaagcgccagccgctgctgcggcgccggttgcgcaactgggccaccgctctgaaaaacgcgtaccgatgacccgtctgcgtaaacgcgttgccgagcgtctgctggaagcgaaaaactctaccgccatgctgaccacgttcaacgaagtcaacatgaagccgattatggatctgcgtaagcagtacggcgaagcgttcgaaaaacgtcacggtatccgtctgggcttcatgtccttctacgtgaaagcggttgttgaagcgctgaaacgctacccggaagtgaatgcttccatcgatggcgacgatgtggtttatcacaactacttcgacgtgagcatggcggtttcgaccccacgtggcttggtgactccggtgctgcgtgacgttgacctgctgggcatggcggatatcgaaaagaatattaaagagctggcagtgaaaggccgtgacggcaagctgaccgtagatgacctgaccggcggtaacttcaccattaccaacggcggcgtattcggttctctgatgtccacgccgatcatcaacccaccgcagagcgccattctgggtatgcatgccattaaagaccgtccgatggcggtgaatggcaaggtagaaattctgccgatgatgtacctggcgctctcctacgaccaccgtctgatcgacggacgtgaatcggtaggcttcctggtagcgattaaagagctgctggaagatccgactcgtctgctgctggacgtgtag

SEQ ID NO: 86855 - DNA, 2808 bp, Enterobacter aerogenes
atgcagaacggcgcaatgaaagcctggctggactcttcttacctctctggttcgaaccagagctggatagaacagctctatgaagacttcttaaccgatcctgactctgttgacgccaactggcgttcgatgttccagcagttacctggcaccggagttaaaccggatcaatttcattcgaaaacgcgtgattatttccgtcgactggcgaaggatgcctcacgttacacttcttcgatatccgaccctgataccaatgtgaagcaggttaaagtcctgcagctcatcaacgcataccgcttccgtggtcaccagcaggcgaatctcgatccgctgggactgtggcagcaagagagagtggcggatctcgatccggcttaccacgatctcaccgaggccgatttccaggaaagctataacgtaggttctttcgccatcggaaaagacacgatgaagctgggcgacctgatcgcggcgcttaagcaaacctactgcggctccatcggcgcggaatacatgcacatcacctctactgaagaaaaacgctggatccagcagcgcattgagtcagtagcaggcaaagcgagcttcaccgcggaagagaaaaagcgcttcctgagcgaactgaccgccgcggaaggcctggagcgctatctcggcgccaaattcccgggcgcgaaacgcttctcgctggaaggcggcgatgcgttaatcccgatgctcaaagagatcatccgccacgccggtaagagtggcacccgtgaagtggtgctgggtatggcgcaccgtggtcgtctgaacgtactggtcaacgtgctgggtaaaaaaccgcaggacctgttcgacgaattcgcgggcaaacataaagaacacctcggcaccggcgacgtgaagtaccacatgggcttctcttccgatatggaaaccgaaggcggtctggttcacctggcgctggcgtttaacccgtcgcacctggaaatcgtcagcccggtggttatcggctccgtacgcgcccgtctggatcgtctggacgagccgagcagcaacaaagtgctgccaatcaccatccacggcgacgccgcggtagccggccagggcgtggttcaggaaaccctgaacatgtccaaagcgcgcggttacgaagtgggcggaaccgttcgcatcgttatcaacaaccaggttggcttcaccacgtccaacccgctggatgcgcgttctacgccgtactgcaccgatatcggtaagatggttcaggcgccgattttccacgttaacgcggatgacccggaagcggttgctttcgttacccgtctggcgctggatttccgtaataccttcaaacgcgatgtcttcatcgacctggtgtgctaccgccgtcacggccacaacgaagccgacgagccgagcgcaacccagccgctgatgtaccagaaaatcaaaaagcatccgactccgcgcaaaatctatgctgacaagctggaacaggacaaagtcgcgacgctggaagacgctaccgaacaggttaacctctaccgcgatgcgctggatgccggcgattgcgtggtagcggaatggcgtccgatgaacatgcactcctttacctggtctccgtacctcaaccatgagtgggacgagagctacccggataaagttgagccaaaacgtctgcaagagctggccaaacgcatcagtacggtgccggaaaccgttgagatgcagtctcgcgtagcgaaaatctacggcgaccgccaactgatggccgccggtgagaaactgttcgactggggcgcggcggaaaacctggcgtacgccaccctggttgatgaaggtatcccggtgcgtctgtccggcgaagactccggccgcggcaccttcttccaccgtcatgcggttatccataaccagagcaacggttctacctatacgccgctgcagaacgtacacaacggccagggccagttccgcgtctgggactccgtgctgtctgaagaagcggtactggcattcgaatacggttacgccaccgcggaaccacgcaccctgaccatctgggaagcgcagttcggcgacttcgccaacggcgcgcaggtggtgattgaccagttcatcagctccggcgagcagaaatggggccggatgtgcggcctggtgatgctgctgccgcacggctacgaagggcagggcccggagcactcctccgcgcgtctggaacgttatctgcagctgtgcgctgagcagaacatgcaggtttgcgtaccgtccactccggcacaggtttaccacatgctgcgtcgtcaggcgctgcgcggtatgcgccgtccgctggtggtcatgtcgccgaaatctctgctgcgtcacccgctggcggtttccagcatggacgaactggcgaacggcacctttatgccggcgattggcgaaatcgacgaactcgatccgcaagccgtgaaacgcgtcgtactgtgctctggtaaggtttactacgacctgctggaacagcgccgtaaaaacgagcaaaaagatgtcgccatcgtgcgtatcgaacagctctatccgttcccgcatcaggcggtacaggaagcgctgaaagcttactcgcacgtccacgattttgtctggtgccaggaagagccgctcaaccagggcgcatggtactgcagccagcaccaccttcgtgaagtagttccatttggggcctctctgcgttatgcaggccgcccggcctccgcctctccggcggtagggtatatgtccgttcaccagaaacagcaacaagatctggtcaatgacgcgctgaacgtcgattaa

SEQ ID NO: 86856 - DNA, 717 bp, Enterobacter aerogenes
atgaaactcgagttttcaatttatcgctataacccggatgttgacgacgctccgcatatgcaggattacaccctcgacgcggaagaaggtcgcgacatgatgctgctggatgcgcttatccagctgaaagaaaaagatccgtcgctgtcgttccgccgctcctgccgtgaaggggtgtgcggttccgatggtctgaacatgaacggtaaaaatggtctggcgtgcatcacgccgatctccgcgctgaatcagccgggtaagaaaattgttatccgtccgctgcctggattgccggttatccgcgatttggtggtagacatggggcaattctacgcacaatatgagaagatcaagccttacttattgaataatgggcaaaatcctccggctcgcgagcatctgcagatgcctgagcagcgcgagaaactcgatggtctgtacgagtgtattctgtgcgcatgttgttcgacctcttgcccgtcgttctggtggaacccggacaagttcatcggcccggcaggccttctggccgcgtatcgcttcctgattgacagccgcgataccgaaaccagcgagcgtctggaaggtctgagcgatgctttcagcgtattccgctgtcacagcattatgaactgcgtcagtgtgtgtcctaagggattgaacccaacgcgcgctatcggccatattaagtcgatgctgctgcagcgcagcgcgtaa

SEQ ID NO: 86857 - DNA, 1767 bp, Enterobacter aerogenes
atgaaattgccagtcagagaatttgatgcagttgtaattggtgccggcggcgcaggtatgcgcgcggcgctgcagatttcccagagcggacagacctgtgcgctgctctctaaagttttccctacccgttcccataccgtttccgcgcagggtggcatcaccgtcgcgctcggtaatacccatgaagataactgggaatggcacatgtacgacaccgtaaaagggtcggactatatcggcgaccaggacgccatcgaatatatgtgtaagaccggcccggaagcgattcttgagctggaacatatgggcctgccgttctcccgtcttgatgacggccgtatttatcagcgtccgtttggcggccagtcgaaaaacttcggcggcgagcaggcggcacgcaccgcggcggcggccgaccgtaccggtcacgcgctgctgcacaccctgtatcaacagaacctgaaaaaccacaccactatcttctccgaatggtatgccctcgatctggtgaaaaaccaggacggcgcggtggttggttgtaccgcactgtgcatcgaaaccggcgaagtggtgtacttcaaagcccgcgctaccgtgctggcgaccggcggcgcaggtcgtatttatcaatccaccactaacgcccacatcaacaccggcgacggcgtcggtatggctctgcgcgcgggcgttccggtgcaggatatggaaatgtggcagttccacccgaccggtatcgccggggcaggggtgctggtcaccgaaggttgccgcggcgaaggcggttacctgctgaacaaacacggcgagcgctttatggagcgttatgcgccgaacgcgaaagacctggcgggtcgtgacgtggtggcgcgttccatcatgatcgaaattcgcgaaggccgcggctgcgatggtccgtggggtccgcacgctaaactgaaactggatcacctgggtaaagaagtgctggaatcccgtctgccgggcattcttgaactgtctcgtacctttgcccacgttgacccggttaaagaaccgattccggttatcccaacctgccactacatgatgggcggtattccgaccaaagtgactggccaggcgctgaccgtgaacgagaagggcgaagatgtggtgatcccgggcctgttcgccgttggcgaaatcgcctgcgtatcggtacatggcgccaaccgtctgggcggcaactcgctgctggacctggtggtcttcggccgtgcggcgggtctgcatctgcaggaatccatcgccgagcagggcgcgctgcgcgctgccagcgagtccgatgtcgaagcttccctggaccgcctcaaccgttggaacaacacccgttccggcgaagacccggtcgctatccgcaaagcgctgcaggaatgtatgcagcataacttctcggtcttccgtgaaggcgacgcgatgcataaaggtctggaacagctgaaagagatccgcgagcgtctgaaaaatgcgcgcctggacgacacttccagcgagttcaacacccagcgcgttgagtgcctggagctggataacctgatggaaaccgcgtattccacggcggtatccgctaacttccgtaccgaaagccgcggcgcgcatagccgcttcgacttcccggaacgtgatgatgaaaactggctgtgccattccctgtatctgccagagtcggaatccatgacgcgtcgagcggtcaacatggaaccgaaactgcgtccggcattcccgccgaagattcgtacttattaa

SEQ ID NO: 86858 - DNA, 348 bp, Enterobacter aerogenes
atggtaagcaacgcctcagcactgggacgcaacggcgtacatgactttattctggtccgtgctaccgccatcgttctgaccctctacatcatctacatggttggcttcttcgccacctccggtgagatctcctgggaaatctggaccggattcttctcctccgcgttcaccaaagtctttaccctgctggctctcgtttccatcctgattcacgcctggatcggtatgtggcaggtgttgacggactacgttaaaccactggccgtgcgcttagttctgcaactgattatcgttgtggcgctggtggcttacgttctttatggatttgttgtggtgtggggtgtgtaa

SEQ ID NO: 86859 - DNA, 405 bp, Enterobacter aerogenes
atgtgggcgttattcatggtaagaaatgtgaaaaaacaaagacctgtcaatctggatctacaaacgattcgattcccaatcacggcgatagcgtccattctccatcgcgtatccggtgtgatcacttttgtggcggtcggtattctgctttggttgctgggcaccagcctttcctctccggagggcttcctgacggccgcttccatcatgaatagcttcttcgtgaagttcatcatgtggggcatcctcaccgcgctggcttatcacgccgttgtcggtatccgccatctgctgatggactttggctatctggaagaaaccctcgaagcagggacacgctccgccaaaatttcttttgttattactgtcgtgctttcacttctcgcaggagtcctcgtatggtaa

SEQ ID NO: 86860 - DNA, 1284 bp, Enterobacter aerogenes
atgtctgatgctaaagcaaaaatcaccctgggtggtgacactgctattgaacttgatgtgctaaaaggcacgctcggtcaggatgttattgatattcgtagtcttggttcaaaaggtgtcttcaccttcgaccccggtttcacttcaacagcctcgtgtgaatctaaaattacttttatcgacggcgatgaagggatcctgctccaccgcggtttcccgatcgatcagctggctaccgagtcaaattatcttgaagtgtgctacatcctgttgaacggcgaaaaaccgactcaacagcagtacgacgaattcaaaactaccgttacccgccacaccatgatccacgagcagattacccgtctgttccacgcgttccgccgcgactctcacccgatggcggtgatgtgcggtattaccggcgcgctggcggcgttctatcacgactccctggacgtgaataacccacgccaccgtgaaatcgccgcctatcgtctgctgtccaaaatgccgaccatggcagcgatgtgttacaaatattctatcggccagcctttcgtgtatccgcgcaacgatctctcctacgcgggtaacttcctgaatatgatgttctccacgccgtgcgaaacctatgaggttaacccggtgctggaacgcgcgatggaccgtatcctgatcctgcacgctgaccacgaacagaacgcctcaacctctaccgtgcgtaccgctggctcttccggcgctaacccgttcgcctgcatcgctgcgggtatcgcctccctgtgggggccggcgcacggcggcgccaacgaagccgcgctgaaaatgctggaagagatcagctccgttgaacacattccggaattcgtgcgccgcgcgaaagacaagaatgactctttccgcctgatgggcttcggtcatcgcgtgtacaagaactacgatccgcgcgccaccgtaatgcgtgaaacctgccacgaagtactgaaagagctgggcaccaaggacgatctgctggaagtggcgatggaacttgagcatatcgcgctcaacgacccgtacttcatcgagaagaaactgtatccgaacgtcgacttctactccggcatcatcctgaaagcgatgggtattccatcctcgatgtttaccgtcatcttcgcgatggcgcgtaccgtcggctggattgcccactggaacgaaatgcacagcgacggtatgaaaattgcccgtccgcgtcagctgtataccggctaccagaagcgcgatttcaagtccgatctcaagaagtaa

SEQ ID NO: 86861 - DNA, 792 bp, Enterobacter aerogenes
atgcctgaaggcccggagatccgccgcgcggcggataccctggaggcggctatcaaaggcgaaccgttaaccgaagcctggttcgcctttccacagttgcaaccctatcaaactcagctaattggtcagcgggtgacccatatcgccacccgcggcaaggccctgttaacccacttctccggcggattgacgttgtatagccataaccagctgtatggcgtctggcgcgtggtggatgccggcgttgagccgcaatcgaagcgcgtgctgcgcgtcaggttacagaccgcacgcaaggcgattttgctctatagcgcctccgagattgagatactgacggcgcaagagctggcccatcatccgtttttacaacgggtcgggccggatgtgctggatatgacgttaaccgccgggcaggtcagagagcggctgttatcggcgaaatttcgcaatcgccagttttccggcctgttgctggaccaggcgtttctcgccgggctcggtaactatctgcgggtggagatcctatggcaggtggggttgaccgggcagcataaggccgccgagctcaatgacacgcagctcgatgcgctggcgcacgcgctgctggatatcccgcgcctttcttaccgcacccgcgggcaagtggatgaaaacaaacatcatggcgcgctattccgctttaaggtttttcatcgcgagggtgaggcctgcgaacgctgcggcagtatcattgaaaaaaccatgctgtcatcgcgacccttttactggtgtcctggctgccagcactaa

SEQ ID NO: 86862 - DNA, 645 bp, Enterobacter aerogenes
atggctggcgtattaattaccggttttgagccgttcggcggcgaaacggttaatccttcatgggaagtggttaagcagcttgatggcatgattattcgcgggcagcaggtggtggctaaacagttaccctgcgtgttcggcgaggcgctaacggtgctgaacgccgcgctggaaacctatcaaccgcagctaacgattgccgtcgggcaggccggaggccgtgtcgatattaccgtcgaacgtgtggctatcaacgtcgatgatgcgcggatccccgacaataaaggccagcagccgatcgatgagccgatcgtcgctgacggccccgcggcatgcttcagtacgctaccgatcaaagcgatcgttagcgcgttgcgccagcaggggatcccggcctcggtgtcgcaaaccgcgggcaccttcgtctgcaatcacgtgatgtatggtttgctgcatcagctgcagggaaaaagcgggcagaagggcggttttatccatattccttatctgcctgaacaggcggcggcccatccggggcaggcgagtatgtcggtcgagacggtacgcgcggcgctggaaacggcgattgccgtcgcccttgaacaggatgacgacgtcaaaattggcggcggcgccacgcactaa

SEQ ID NO: 86863 - DNA, 996 bp, Enterobacter aerogenes
atgaacttccagcaaacgtatttatactggctggccggcgcggtactgctggtcgtggctatcatgtcctggcgcgacaaaagcaatccgcggcgtctgacaaccggcctgttctggggtctgtacgggctggtgttcttgctcggcgactggacgtatcaactggtgggcgataagcgtgcggtgaatatcgccgtcggcggggtggtggtggtactggcgctgatcgccggttttggcggtgtgcgcctcggcagctaccatcagcgtagccaggaagagaaaaccgccagcgcgaaacgcctcggcaacaaacttttctatccggcgctggcgattccggtcgtcaccgtcattggcgtactgctgtttaacaatctgccttcatggcaggtggcgctcttcgggccgggcaaccacgcgacgctgattaccctgttctcgatgaccgtcggtacgctgattggcctggcgatggcgattcgtatgacccatgaaacggtggcgcagccgatgcaggaagcgcgccgtttgcttgattccgtcggctgggcctttatcctgccgcaaatcctcgcggtgctggggctgctgttcaccacagcgggtgtcggaaccagcatttcgtggctgaccgagcactatctggcggtagataaccgctttatcgccgtggccgtgtacgccatcggcatggcggtgttgacgatggtgatgggcaatgcctttgccgctttcccgattgtgacagccggggttggcattccgattttagttctgcagcacggcggcaatccggcggtaatggcggcgattggtatgttttccggctactgcggtacgctgatgacgccgatggcggcgaactttaatatcgtaccggcggcgctgctggaactgccggataaaaatgcggtgattaaagcccaggtaccgaccggtatcctgctgctgatcgtcaacgtattcttactctatttcctgatgttcctgtaa

SEQ ID NO: 86864 - DNA, 726 bp, Enterobacter aerogenes
atgcaagaggcgatatccctctggccgctgatcggcattgccgtgattgtggtcggttttgtattacgctttaacccggtgctggtggtgataatctccgggatcgtcaccggcgtggcggcgcatatgccaatagccactattctggagaaactgggcgagggcttccttaatacccgtaatctgccgtttattctgctgctgccgctggcggtgatcgggctgctggagcgacatggtctgaaagagcgggcgcaggcgtggatcgcgaagattcatagcgcgaccgccggacgtctgctgatcgtctatctgtttgtgcgcgaagctaccgccgccctgggattgaccagcctcggcgggcatccgcaaatggtgcgcccgctgctggcgccaatggcggagggggcggcggaaaagcgctttggcccgctgccgggtcatgtgcgctaccgtctgcgcgcgatgtcggcggcgaccgataacgtcgggctgtttttcggtgaagatatttttgtcgcctttggcgcgatcatcttcatgcacaactttatgctggagtcgggcgggatccagacggaaccgttgcatattgccctgtgggggatcccgacggcgatctgcgccttcctgatccacgccgcgcgcctgtggcgcctcgatcgccatctccagcgtgagctggaccgggttaacgccgggcaggcgaaaggcggtgcggcatga

SEQ ID NO: 86865 - DNA, 744 bp, Enterobacter aerogenes
atgagaattgatttaaatgccgacctcggcgaaggctgcgccagcgatagcgcgctgctgcagctggtctcttccgccaatatcgcctgcggctttcacgccggcgatgcgctgctcatgcagcagtgcgtgcgcgaggcgctgaaaaatggcgtcgctattggcgcgcacccaagcttcccggaccgggaaaatttcggccgcaccgcgatgcagttaccgccagagacggtctatgcccaggtgctgtatcaaattggcgcgctggcggcaatcgtgcatgcccagggcggcgagctgcggcacgtcaaaccgcatggcatgttgtacaaccaggcggcgaaagagccggctttggccgatgccatcgcccgtgcggtgcgcgatgccgacgccgggttggtgctggtcgggctggcggggagcgagcttatccgcgccggacagcgctatcagctgacgacgcgccaggaagtcttcgccgatcgcggttatctcgccgacggtagcctggtgccgcgcagccagccgggcgcgctgatagagaacgaagagcaggcgctggcgcaaacgctggaaatggtgcagcacaatcgggtgcgcagcctgagcggcgaatgggcgcatgtgaaggcggaaacggtctgtctgcatggcgatggcgctcatgcgctcgatttcgcccgacgcctgcgcgccgcgtttgccgggcgcaatattgacgtcagcgcggacatcgattaa

SEQ ID NO: 86866 - DNA, 933 bp, Enterobacter aerogenes
atgttgaaatttatccgcgccggcatgtacacctcggtacaggatggcggccgggaaggccagcgccagtgggggatcagccgctgcggcgcgctggataaaccggcgatgaccattgccaatctgctggtgggcaatgcgccggagacggcggcgctggaaattacgctgggtcaggtcgatgtacagtttacccgccattgctggttcgcgttgaccggagccgcctgtgaagcgacgctcgacggcgcgccggtctggctgggctggcgaatggaagcgaaggccgggcagcggctggtgttgaaaactccgcagcatgggatccgcagctacctggcggtggcgggcggtatcgacgtgcctgaagttttaggttcccgctctaccgatctgaaagtcggtatcggcggaatcgaagggcgccggttgcaggatggcgatcaattgaagattgggaaatcctcccgccgctttagcgcttcgcgcggcgttaaacagctgccgataggcaatattattcgcgcgctgccggggccggagtatcacgaattcgacagcgtgtcgcaggagtctttctggcgctcgccgtggaagctgagtccgcagagcaaccgtatgggctaccgcctgcagggtcagccgctcaagcgcacaaccgaccgggaaatgctctcccatggcctgctgcccggcgtggtacaggtaccgcataacggccagccgattgtgttaatgaacgatgcgcagaccaccggcggctatccgcgtatagcgtgcattattgaagccgatatgtaccaactggcgcaaattccgctgggtcagccgatccatttcgtcccctgttcgctggaagatgcgctgaaagcgcgcgccgaccagcagcgttaccttgaacaactggcctggagattaagcgatgagaattga

SEQ ID NO: 86867 - DNA, 672 bp, Enterobacter aerogenes
atgagagagaaaaaagtgcagcgagcgcgttgttatctattaggtgaaacggcggtggtcctggagcttgagcctccggtgaccctggagagccaaaaacgtatctggggcctgacgcagcggttaaccgaccacgaagaagtggttgaagtgataccggggatgaacaacatcaccgttgtactgcgccgcccgcaggagatggcatgggaggcgattgacaagctgcaacgctggtgggaagagagcgaagcgctggatccggaatcccgtgagataagtatcccggttatctatggcggcgaggcagggccagaccttggcgacgtcgcgcgccattgcggattgagcgaaaagcaggtggtcgaactgcactcttcggtggagtacatggtgtggtttctgggtttccagccggggtttccgtactttggcggcctgccggagcagctggcgatgccgcgtcgcgccgagccgcgcgtactggtaccggcgggatcggttggtatcggcggatcgcaaaccggtatttatccgctggcgacgccgggcggctggcagctgctgggtcgcacgccgctggcattattcgatccaaaacgtgaagagccggtgctgctgcgttctggcgatcgcgtacgctttgtgccgcagaaggagggggtatgttga

SEQ ID NO: 86868 - DNA, 744 bp, Enterobacter aerogenes
atgaaaaatagcgaactggaacaattaattaacgaaaaactgaatagcgcggccatcagtgattacgccccgaatggcctgcaggtcgaagggcgggagacggtgcggaaaatcgttaccggcgtgaccgccagccaggcgctgctcgatgaagccgtgcgtctgcaggcggatgcggtgattgtgcatcacggctacttctggaaaggcgagtcgccggtgatccgcggcatgaagcgcaatcggctgaaaacgttgctggccaacgatatcaacctttatggctggcatttaccgctggatgcgcatccggaactgggcaataacgcccaactggcgcagctgctggggatcaatgtcatgggggaaatcgagccattggtgccgtggggcgagctgtctatgccggtatccgggctggaactggcatcgtggattgaagcgcgattgggacgtaaaccgctgtggtgcggcgataccgggccggacaaagtcacccgcgtcgcctggtgtaccggcggcggccagagctttatcgatagcgcggcccgctttggcgtcgatgcctttattaccggcgaagtgtctgagcagaccatccattccgcccgtgagcaagggttgcatttttatgccgccggccatcatgccaccgagcgcggcggtattcgcgccctgagcgagtggctgacggaaaataccgacctggacgtcacctttattgatatccctaacccggcctga

SEQ ID NO: 86869 - DNA, 1479 bp, Enterobacter aerogenes
atgaacagacaaacttcacagccacgggcgatttattacgtcgttgcgctgcaaatttgggaatacttcagtttttacggcatgcgggcgctgttaatcctgtacctcaccaaccagctcaagtacgacgataaccacgcctataccctgtttagcgcctactgctccctggtctatgtcacccctattctcggcggcttcctcgccgacaaactgctcggtaaccgcatggcggtgatgctcggggcgctactcatggctatcggtcacctggtgctcggcgccagcgaaatcgcccccaccttcctctatttatcgctggcgattatcgtttgcggttacgggctgtttaaatccaacgtcagctgcctgcttggcgaactgtatgagccgaccgatccgcgccgcgatggcggcttctcgctgatgtacgccgcgggaaatattggttcgatcatcgcgcctatcgcctgcggctacgtgcaggaagagtacagctgggcgatgggctttgcgctggcggcagtcggtatgattgccggtctggtgatcttcctctgcggcggtcgccacttccgccataccaccggcgttaaccgcgaggcgctgcgcgcgcggaccttcctcctgccgaactggggctggctgctggtattgctggtggcgacgccgctgttgattaccgtgctgttctggcaggagtggtcggtgtatgcgctgatcgtcgcgacggtgattggcctggcggtactggcgcgtatttacctgcgcgcggagaacgacaaacagcgtaaagagctgcgtctgattatcgtcctcaccggttttagcctgctgttctgggcctttgcccagcagggcggcagctccatcagcctgtatatcgaccgtttcgtgaaccgccacgtcatgagctatgaagtaccaaccgcgatgttccagtcggttaacgccttcgcggtaatgctctgcggtatggtgttggcatggctggtcaaagagaacatcaagggcaaccgcaccgtgcgtatctgggggaaattcgccctcggtctggggctaatgagcgccgggttctgcattctgactttaagcgcccgctggtcggccgcttatggccactcctccatgccgctgatggtactggggctggcggtgatgggtttcgccgaactgtttatcgacccggttgcgatgtcgcaaatcacccggatcgaaatccccggcgtcaccggggtgctgaccggtatttatatgctgctttccggggcgatcgccaactatctggccggcgtcatcgccgaccagacgtcgcaggcgtcgtttgatgccgcgggcgcggttaactattcgattgaagcctacatcgacgtcttcagccagatcacctggggcgcgctggcctgcgttggcctggtgctggtcatctggctgtatcactccgtgaaggtcaaaacccgccaactggcggtagagtag

SEQ ID NO: 86870 - DNA, 1410 bp, Enterobacter aerogenes
atggccacccatttggtctggtttcgcatggatttacgccttaacgataatctggcgctggccgccgcctgccgcgacccgcaggcgcaggtgctggcgctgtatatcgctacgccagaacagtggcgccaacatcacatggcgccgcgccaggcggcctttatcgccagccatttacgcagcctccacgcggcgttggcggaacgcggtattccgctgctggtagaagaagcggacgatttcgccgccagcatcgagttgctaaagcgcttttgtaaacagcaccaggtgagccatctattttataactatcagtatgagtttaatgagcgccggcgcgacgccggtgttgagaaaagcctgacagaagtcacctgccaggggtttgacgacagcgtgctgttgccgccgggcagcgtgatgaccggcaaccgcgagatgtataaagtctttacgccgtttaaaaatgcctttatccgccgcctgcgtgaagggctgccggagtgcgtggcggcgccgaaaccgcgccagtcagccacccgacaggcctcgccgctgcctgagatcaactatccgcaaacggcatttgacaccgatctgttcgcggcggatgaaaaaacggcgctggctcgattgcgcgcgttttgtcagcagccggcggcggattacgaccagcagcgcgattttccggcgatagagggaaccagccggctatcgccgtgtctcgcggtaggcgtactgtcgccgcgccagtgcctgcatcgcttgttacgggagcagcccggcgcgctggatggcgaagcgggcgcaagctggctgaacgagattatctggcgcgagttctatcgtcatctgatggtttactacccgaaactgtgtaaaggccggccgtttgtcgcctggaccgacaaggtcgcctggcgcagcaatgaggatgaactgcgggcctggcaacaggggcaaaccggtttccccatcgtcgatgccgccatgcggcagcttaacgccaccggctggatgcacaatcgcctgcggatgattgtcgccagcttcctggcgaaagacctgcgcctcgactggcggcacggagagcgctatttcatgagccaactgatcgacggcgatttggcggccaacaacggcggctggcagtgggcggcctcgaccggtaccgatgcagccccttattttcgtattttcaatccgacgacccagggcgagaaatttgataagcagggcgagtttattcgccgctggctgccggaactggctgaagtgccagagaaagcgctgcatcagccgtggctgtgggcggataaacagggggtaacgctgaggtatccgcgcccgctggttgaccataagcaggcgcggctggagacgctggcggcctgggaagccgccagatag

SEQ ID NO: 86871 - DNA, 207 bp, Enterobacter aerogenes
atggcgttgtacaaagcttatcctgctcacattatcctgatgcgtcgcgctttcgccgtcgtggccggggtcgctgcgctgccggtgatgctgttctggaaagatcgcgcccgttattacagctggctgcatcgcgtatgggcgaaaaccagcgaacagccggtatggatggcgcaggcggaaaaagccgcgcacgacttctactaa

SEQ ID NO: 86872 - DNA, 1680 bp, Enterobacter aerogenes
atggccgcgcaagggttcttacttatcgccagcttcctgctggtactgctggtgctggcgcggccactcggttcgctgctggcgcgaatgatcaacgatgttccgcttcctggacttgccggcgttgagcgcggtatctggcggctggcggggattcgcagccaggagatggactggcggcagtacctgatcgccattgtgctgtttaacgctattggtctcgcggcgctgatggcgctgctgatgtgtcagggatggctgccgttcaatccgcagcacttccccaacctgtcatgggatttagcgttgaataccgcggtaagcttcgtcagcaacactaactggcaggcctacgccggggaaaccaccatgagctatctcagccagatggtgggcctggcggtgcaaaacttcctgtcagccgcgaccggtattgcggtgatcttcgtgctgacccgcgcctgggcgcgacagaaagtcagcaccctcggcaacgcctgggtcgacctgacccgcattacactgtggctgctactgccaatctctctgctgattgcgctgttctttgtgcaacagggcgtgccgcagaacctgcaggcttatcagccgttcaccagcctggaaggcgttcgccaatggctaccgatggggccggtcgcctcgcaggaagcgatcaaaatgctcggtaccaacggcggcggtttctttaacgccaactcatcgcatccgtttgagaacccgacggcgttaaccaacctggtgcagatgctggcgatcttcttgatcccggcggcgctgtgttttgcctttggcgaagcggtcggcgatcgccgtcaggggcgcgccatcctgtgggcgatggcgctgattttcgtggtttgcgtggcggtggtgatgtgggcggaaacccgcggaaatccgcatctgctcagccttggcgccgacagcagcctgaatatggaagggaaagagagccgctttggcattctcgccagcagcctgtttgcggtggtcaccactgcggcctcctgcggcgcggtgaacgcgatgcatgattccttcaccgcgctgggcggtatggtgccgatgtggttgatgcagattggcgaggtggtcttcggcggcgtaggctccgggctgtacggcatgctgctgttcgtcatgctggcggtatttatcgccgggctgatgattggccgcacgccggaatatctcggcaagaaaatcgacgtgcgcgaaatgaaaatgatcgcgctggcgattctggtgaccccgacgctggtactgctcggcaccgcgctggcgatgatgaccgaagccggacgcagcgccatgttgaatcctgggccgcacggctttagcgaagtgttgtacgccgtcacctcggcggccaacaacaacggcagcgccttcggcggcttaagcgccggcacgacattctggaacctgctgctggcgttctgcatgctggtgggccgcttcggagtgatcgtcccggtgatggcgattgccgggtcgctggtgaataagaaaattcagcccgccagctccggcacgctcgccacccacgacgcgctgtttatcggcctgctgatcggcaccgtcctgctggtcggcgccctgacctttatccccgcactggcgctcggcccggtggcggaacacttctctttactttaa

SEQ ID NO: 86873 - DNA, 2049 bp, Enterobacter aerogenes
atgagtcgcaaacaattagccctgctggagccgacgctggtgcgtcaggcgctgctggatgcggtgaaaaaactcagcccctcggtgcagtggcgtaacccggtgatgtttatcgtctggattggcagcgtgctgaccaccctgctggcgatggccatggccggggggtatctcacgggtcacgccggctttaccgccgccgtcagcctgtggttatggtttaccgtactgttcgccaacttcgccgaagccatggccgaaggacgtagcaaagcgcaagccaacagcctgaaaggggtgaagaaaaccgctttcgcccgtaagctgcgcgcgccgcagcacgatgctccgatggatcacgtcccggcggaagagttacgcaaaggcgatatcgtgctagtcgaagctggcgacattatcccctgcgacggcgaagtgatcgaaggcggcgcttcggtagatgaaagcgccatcaccggggaatccgcgccggtgatccgcgagtccggcggcgatttcgcctcggtcaccggcggcacccggatcctctctgactggctggtgatccgctgcagcgtcaaccctggcgaaaccttcctcgaccggatgatcgctatggttgaaggcgcgcagcgccgtaagaccccaaacgaaatcgcgctgacgatcctgctgatcgccctgacgctggtgttcctgctggccaccgccaccatctggcccttctcggcgtggagcggtaatgcggttagcgttaccgtgctggtcgcgctgctggtgtgtctgatcccgaccaccatcggcggcctgctctccgctatcggcgtcgccgggatgagccgaatgctcggcgccaacgttatcgccaccagcggccgcgcggtggaagccgccggcgatgtcgacgtactgctgctggataaaaccggcaccatcaccctcggcaaccgtcaggcctcggctttcctgccggcgcgcggcgtcgaagagcgcgtgttggccgacgccgcccagctgtcgtcgctggcggatgaaacgccggaaggccgcagcatcgtggtactggcgaaacagcgctttaatttgcgcgaacgcgacctgcagtcgctgcacgccacatttgtcccctttaccgcccagacccgtatgagcggtatcaacatcgaccaacgcatgatccgcaaagggtcggtggacgcgattcgccgccatatcgaagccaacggcggccacttcccggccgatgtcgataagcaggtagaagaggtcgcccgccagggggccacgccgctggtggtggcggaaggcgaacgcgtgctgggcattatttcactcaaagatatcgtcaaaggcggcattaaagagcgtttcgcccagctgcgcaaaatgggcattaagacggtgatgatcaccggtgataaccgtctgaccgccgccgctatcgccgccgaagcgggggttgatgattttcttgccgaagcgacgccggaagccaagctggcgctgattcgccagtatcagtcggaaggacggctggtggcgatgaccggtgacggtaccaacgacgccccggcgctggcgcaggctgatgtggcggtcgcgatgaactccggcacccaggcagcaaaagaggcgggcaatatggtggatctcgactcgaacccgaccaagctgattgaagtggtgcatatcggtaaacagatgctgatgacccgtgggtcgttaaccacattcagtatcgccaacgacgtcgccaagtatttcgcgattattccggccgccttcgccgccgcctatccgcagctggcgatgctgaacgtgatgcatctgcactcgccctcttcggcgatcatgagcgcggttattttcaacgccctgattatcgtctgcctgatccctttagcgctgaagggcgtgagctatcgtccgctgtcggcatcggcgatgctgcgccgcaacctgtgggtttacggcctcggcgggctgattgtgccgtttgtcggtattaaagctatcgacctgttgctgaccctgacgggtctggtgtga

SEQ ID NO: 86874 - DNA, 573 bp, Enterobacter aerogenes
atgtcattaattcgtccggcacttgtgctatttattctgttaaccctgctcactggcggcctgtatccgttgctgactaccgccttagggcagtggtggttcccgcagcaggctaacggctcgctgatccagatcgagggcgaggtgcgcggctccgctctgatcgggcagaactttaccgccgccggttatttccatggacgcccttccgcaacggcagaggtggcggataatccgctggcctctggcggcagtaacctggcggtcagcaatccggcgctggataaagcgattagcgagcgggtagaggcgttacgcgccgctaacccgcaagcgaattcgacggtgccggtcgagctggttaccgcgtcggccagcgggctggataacaacctgacccctgccgcggttatgtggcaggtaccgcgcgtcgccaaagcgcgcaatcttagcgatgcgcaggtgaaacagttagtggatcaggcgacgcaaaaaccgttgctcagttttctcggtcaacctgtggtaaatatactgcaactgaatatggcgctggatgccctgaaggattaa

SEQ ID NO: 86875 - DNA, 2688 bp, Enterobacter aerogenes
atgagtgacgagccgctgcgcccggaccccgaccgtctgctgcaacaaaccgctgcgccgcatcgcggcaagctgaaggtgtttttcggcgcctgcgccggggtgggtaagacctgggctatgctggcggaagcgcagcggctgcgcgctcaggggctggatattctgatcggcgtggcggaaacccacggccgcaaagataccgccgccatgctggaggggcttagcgccctcccgcaaaagcgcatttcccatcgcggacgctacgtccatgagtttgacctcgatgccgcgctggcccgccgcccggcgctgatcctggtggacgaactggcgcatagcaacgcgccgggttcgcgccacccgaaacgctggcaggacgtcgaagaactgctcgaagccggtatcgacgtcttcaccaccgtcaacgtccagcatcttgaaagcctcaatgatgtggtcagcggtattaccggcgtgcaggtacgcgaaaccgtccccgaccccttctttgacgccgccgatgatgtagtactggtggatttgccgccggacgatctgcgccagcgcctgaatgagggcaaggtgtacattggcggccaggccgaacgcgccatcgaaaacttcttccgcaaaggtaatctgatcgccctgcgcgagctggcgctgcgccgtaccgccgaccgggtagatgaacaaatgcgcgcctggcgcgaccgccaggggcaggaaaaagtctggcacacccgcgacgccattctgctgtgcatcggccacaacaccggcagcgaaaaactggttcgcgccgccgcccggctggcggccaggctcggcagcgtctggcacgcggtctatgtagaaacgcccgcactgcaccgtctgccggaggccaggcggcgggcgatcctcgccgcgctgaagctggcgcaagagttaggcgccgagaccgccaccctctccgacccatcggaagaaaaagcggtgctgcattacgctcgcgagcacaacctcggcaaaattgtgattggccgccagggagagcgccgctggtgggaacgagccgggtttgccgaccgtctggcgcgtcgcgccccggacctcgatctggtggtgatcgcgctggatgaaaaaccggcctccctgcccgcccgcgcgaacgacaatcgtacggcgctcgacaaatggcgccagcagttgaagggctgtctgttagccgtggcgctgtgcgccattatcaccgtagtcgccatgcagtggctgatggccttcgaagccgccaacctggtgatgctctatctactgggcgtggtgattatcgccctgctgtatggccgctggccatcggtgctggcgacctttatcaacgtcattagcttcgatctcttttttgtcgccccacgcggcacgctggcggtttccgacgtccagtacctgctgacgttcggcgtgatgctgaccgttggtctggtgatcggcaacctgaccgccgggatgcgttaccaggcgcgggtggcgcgttatcgcgagcggcgcacccgccacctgtatgaaatgtcgaaagcgctggcggtcggccgcagccgcgaagatatcgccgccaccagcgaacgctttattacctccacctttcaggcccgcagccaactactgctgccagatgagaacgggcagctgcagccgatgacccagcaatccggcgttttctcgtgggatgatgcgattgcccgctggagcttcgataagggccagccagccggagccggtaccgacactctccccggcgtaccgtatcaaattctgccgctacaaagcgccgcccgcacctgggggctgctgctggtcgaaccggaaaatctgcgtcagttgatgatccccgaacagcaacggctgctggaaacctttaccctgctggtggccagcgcccttgagcgcctgaccctgaccgccagcgaagagcaggcgcgcttgaccagcgaacgtgaaagcctgcgcaactcactactggccgccctctcccacgatctgcggacgccgctgacggtcctgttcggccaggcggagatcctgaccctcgatctggccagcgaaggttcgaagcacgcgccgcaggccaacgaaattcgccagcatgtgctcaacaccacccggctggtgaataatctactggatatggcgcgtattcagtccggcggctttaatctgcataaagagtggttaactctcgaagagatcgtcggtagcgccctgcgtatgctggagccggggcttggcggccagcacatccagctgtcgctgccggacccgctactgctggtccacgtagatggcccgctgtttgagcgggtgctgatcaacctgctggaaaacgcgcataaatacgccggcgcgcaggcgcagattggcattcacgccgaagcggataggcagcagttgatcattgaagtctgggataatggtccggggatcccggcaggccaggaacaagctatctttgataagttcgcgcgtggtaataaagaatcggctatccccggcgtcggtctggggctggcgatttgccaggccattgtcgaggtgcacgacggtagcattaccgccagcaaccgtccggagggcggagcctgtttccgtgttacactgccgcgagaatcgcccccagaactggaagagttaaccgaggacatgtga

SEQ ID NO: 86876 - DNA, 678 bp, Enterobacter aerogenes
gtgattaacgttttaatcatcgaagacgaacacgctatccgccgctttctgcgcaccgcgctggaagccgacggtatgcgcgtatttgaagccgaaaccctgcagcgggggctcatcgaagccgccacccgcaaaccggatttagcgatcctcgatctcggcctgccggacggggacggtaatgattttatccgtgaagttcgccagtggagccagatgccgattatcgtgctgtcggcacgcagcgaagagcatgacaaaatcgccgcccttgacgctggcgccgatgactacctgagtaaaccgtttggcataggcgaactgcaggcgcggctgcgcgtcgcgctgcgccgtcacggcagcgcgcaggccgatgagccggtggtgcattttgccgaaattagcgtcgatatccccgcccgccgtatcatgcgcggcagtgaagaaattcatctgacgcccatcgagtttcgcctgctggcggcgctactgaacaatccgggcaaagtgcttacccagcgccagcttctgaatcaggtatggggacctaacgccgtggagcacagtcactatttgcggatttatatggggcacttacggcaaaaactggaggctgacccggcgcggccgcagcatctgctgaccgaaaccggtattggctatcgctttatgccttga

SEQ ID NO: 86877 - DNA, 1641 bp, Enterobacter aerogenes
atggcaatcgataaacgtgcgggtcagccggcacaacagagtgatttgattaacgtcgcccagctgaccgctcagtactatgtgctgaagccggaagcgggtaatgcggagcatgcggttaagtttggcacctccggccatcgcggtagcgcagggcgccacaatttcaatgagcagcatattctggcgattgcgcaggcgattgcggaaaaccgcgcgaaaaacggcatcaccggcccgtgctacgttggtaaggatacccacgctttatccgaaccggccttcatttccgtgctggaagtgctggcggcgaacggtgttgatgtgatcgttcaggaaaacaacggtttcaccccgacgccggcggtttctaacgcgattctggtgcataacaaaaaaggcggcccgttggcggatggtatcgttatcaccccgtcgcacaacccgccggaagatggcggtattaagtacaacccgccaaacggcggcccggctgataccaacgtgactaaagtggtggagaaccgcgcgaatgaactgctggccgccggtctgcagggcgtgaagcgtatttctctcgacgccgcgctggcttccggccacgtgaaagagcaggacctggtacagccgtttattgaagggctggcggatatcgtcgatatggcggctattcagaaagcgggcctgaaactgggcgtcgacccgctgggcggttcgggtatcgaatactggaaacgcatcggcgagcactacaagctggatctgaccatcgttaacgatcaggtcgatcagacgttccgctttatgcacctggataaagatggcgcgatccgcatggactgctcctccgagtgtgcgatggcgggtctgctggcgctgcgcgataagttcgatctggccttcgccaacgatccggattacgaccgtcacggtatcgtgaccccggctggcctgatgaatccgaaccactatctggcggtggctatcaactacctgttccagcatcgtccgcagtggggtaaagacgttgcggttggtaaaacgctggtttcctcggcgatgattgaccgcgtggttaacgatctgggccgtaagctggtggaagtgccggtgggcttcaagtggtttgttgacggtctgttcgatggcagcttcggcttcggcggcgaagagagcgcaggggcatcattcctgcgtttcgatggcacgccgtggtccaccgataaagacggtatcatcatgtgcctgctggcggcggaaatcaccgcggtgaccggtaagaacccgcaggagcactacaacgagctggcggaacgctttggcgccccgagctacaaccgtctgcaggcatcggccacttccgcgcagaaagcggcgctgtctaagctgtcgccggaaatggttagcgccgacacgctggcgggcgatccaatcaccgcgcgtctgaccgcggcgccgggcaacggcgcttctatcggcgggctgaaagtgatgaccgacaacggctggttcgcggcccgtccgtcaggcaccgaagacgcctacaaaatctactgcgagagcttccttggcgaagagcatcgcaagctgattgaaaaagaagcggtagagattgtcagtgaagtgctgaaaaacgcctga

SEQ ID NO: 86878 - DNA, 561 bp, Enterobacter aerogenes
atgaaaacaatcgaagttgatgatgagctctaccgctatattgccagccacactctgcatatcggcgagagcgcatccgacattttacggcgcatgctgaaattttccgccgtttctcagcctgcatctggcgcgccagcggcgaaagccgcgccggcggctgctcctgcggcggcgccagtcgtcgaagcgaagccggccaacccggttaaagataaagtccgcgccatgcgcgagctgctgttatctgacgaatacgctgaacaaaagcgcgcggttaaccgcttcatgctggtattgactacgctttactcgttagacagcaaggcattttcagaagccactgagtctctgcacggacgcacccgcgtatacttcgccgaagactcacggacgctgctgaaaagcggtaatcagaccaaaccgaaacaggttcctggtacgccgtggtgggttatcaccaatactaataccggccgtaaatgcagcatgatcgaacacatcatgcaatcaatgcagttccctgcggagctgattgaaaaggtatgcggcacgatctag

SEQ ID NO: 86879 - DNA, 774 bp, Enterobacter aerogenes
atgaaattaaatagccgagcgcaatctgcacaaaacccgcacaataaatccccaatcgtcctggtacacggcctgttcggcagcctggacaaccttgggatcctcgcccgcgatctggtcgccgactacgatatattgcaggtcgatatgcgcaaccacggcttatcgccgcgttcaccggagatgacctaccgcgcgatggcgcaggatctgctcgataccctcgacgatcatcagatcgagaaagcgacctttatcggccattcgatgggcggcaaagcggtgatggcgctgaccgcgctggcgccggatcgcatcgccgggctggtggcgattgatattgcgccggtggcttatcacgtccgccgtcatgatgagatcttcgcggcgattaacgccgtcagcaaatccgccgccagcacccgccagcaggcggcgcaggtaatgcgcgagcatataaatgaagaaggcgtcattcagtttctgctgaaatcctttgtcgacggcgcgtggcgcttcaacgtgccggcgctgtgggatcaatacccgcatattgtcggctgggaaaccgtgcccgcctggccgcacccggcgcaatttattcccggcggcaactccccttatgtcaccgatgaataccgcgacgcgctgctggcgcagttcccacaagcccgcgcccacgtcattgccggcgccggacactgggtgcatgcggaaaaacccgaggcggttttacgcgcaattcgccgttatctgagcacaattgaagcctga

SEQ ID NO: 86880 - DNA, 294 bp, Enterobacter aerogenes
atggcaaaagaacaaacggaccgaacgacattagatttgttcgcaaatgagcgtcgcccgggtagaccgaaaaccaatccgctttcgcgcgatgaacaactgcgcatcaacaaacgcaatcagctcaaacgcgataaggttcgcggcttgaagcgcgttgagttgaagctcaacgccgatgcggtcgacgcgcttaatgagctggcggaagcccgcaacatgagccgcagcgatcttatcgaagagatgctgatgcaccaactggcctgcctgcgtaaccagggcgaagtctga

SEQ ID NO: 86881 - DNA, 531 bp, Enterobacter aerogenes
atggcaatcatcggcatcttttttggcagcgacaccggcaacaccgaaaatattgcaaaaatgatccaaaagcagctcggtaaagacgttgctgaagttcacgacattgccaagagcagcaaagaagatctggaaagccacgatattctgctgctcggcatcccaacctggtactacggcgaagcgcagtgcgactgggacgacttcttcccgacgctggaagagatcgacttcaacggtaagctggtagccgtctttggctgcggcgaccaggaagattacgcagaatacttctgcgatgcgctgggcaccattcgtgacatcattgaaccgcgcggcgcaaccatcgttggccactggccgaccgcgggctaccacttcgaagcgtctaaaggcctggcggacgacgatcacttcgtcggtctggcgattgatgaagaccgtcagccggaactgaccaacgagcgcgttgagaagtgggtgaagcagatttccgaagagctgcatctggaagaaatcaaaaacgcctaa

SEQ ID NO: 86882 - DNA, 453 bp, Enterobacter aerogenes
atgactgacaacaatatcgcattaaagaaggctggcctgaaagtcacacttccccgactgaaaattctggaagtgttgcaggaaccggataaccatcacgtcagtgcggaagatttatacaaacgcctgatcgatatgggtgaagagattggtctggctaccgtttaccgcgtgctgaaccagttcgacgatgcaggcatcgtgactcgccacaacttcgaaggcggtaaatccgtattcgagctgactcagcagcaccaccacgatcacctgatttgcctcgactgcggcaaagtgatcgagttcagcgatgattctatcgaatcccgccaacgtgaaattgctgcgcaacacggcatccgcttaaccaaccacagcctgtacctctacggccactgtgcggaaggcgactgccgcgaagatgaacatgcccacgatgcggtgaataaataa

SEQ ID NO: 86883 - DNA, 927 bp, Enterobacter aerogenes
atggagctgcgccagctacgctattttgtccgcatcgtggaaaccggcagtatgggccgcgccgcgctcgatctgaatattggcgtctctgcgctcagccagcaaatggcgcgtctggaaaatgaactcgctatccgcctgctgcaacggacttcgcgcggcgtaatgcccaccagcgccggcctcgccttttactcgcaggcgcaactggcgctgcgccatgctgacgatgccattctcgccgcgcgtgaagcacgcctttccggtcacgtcagcgtcggtatggcgccgagtaccgcttctgtgctgggcgtaccttttatcaacgccatgcgcgaaagctacgccgacgtccgcctgcacctggtggaaagcctctccggcaatctggaacggatgatcaacactcgccagctcgatttagccatcgttttccagaaagagaagatcctgcgctggagcgcccgacccattcttgaggaacgtctgttcctgattggcgcccatgacgtgctggcgccgctgcccggcgatagcatctctccggaccagcttgccgccatcccgctgattatgccaagccagggacatggcctgcgcggcaggctggacgctatttgccaggagcacgccatcaacgttgacgtggtggctgaaatcgatggcctggccctgctgatgcgcgccgtccgtgacgggctcggcgccacgctgcagccgggcgcggcgatttctcatctcgacagcgaggcgctaagagtgatcggcgtcgacaatccggtactaagccgacctaattttctagtcagtctctcagatgacgaacttaccccggcaggccttgcggcacgggtaatgctggcaaaagtcatgcgccagctagttgaatccggcaactggccgggcgccagcctttacacttcctaa

SEQ ID NO: 86884 - DNA, 1404 bp, Enterobacter aerogenes
atggtggatgtactggtgattggcggcggcaacgccgcgttatgcgccgccttaaccgcccgggaagcaggcgcatccgtattgctgctggaagccgcgccgcgggaatggcggggcggtaactctcagcacacgcgtaacctgcgttgtatgcacgatgcgccgcaggatgtcttagtcgacagctacccggaagaagaatactggcaggatctgctgcgcgtcaccgggggcaacaccaacgaagcgctggctcgcctggtgatccgcacttcgtcgcaatgtcgggactggatgcgccgtcatggcgttaactttcaaccgcccttatccggcgccctgcacgtcgcacgcaccaacgccttttttatgggcggcgggaaagccctggtcaatgcctattaccgcagcgccgagcagatgggcgtgcagatccgctataacacgccggtgcaggcgcttgaattacgtgatggcgaattcgtcgccgcgctggcaggcgccgagcgcatcgccgcgaaaacctgcgtgctcgccgccggcggttttgaatctaaccgcgagtggctgcgcgaagcctgggggcaaaatgagcgcggcgagtggcctgccgacaattttctcatccgcggcacccgttttaaccagggagtactgctcaaatttatgatcgacgccggcgccgatatcatcggcgatccttcacagtcgcactgcgtcgccattgacgcccgggcgccgctctatgacggcggcatctgtacccgcgtcgactgcgtgtcgctgggggtggtggtgaaccgcgatgccgagcgcttttatgatgaaggggaggatttctggcccaaacgttacgccatctggggccgtctggtcgcccaccagccggggcaaatcggctactcgatcatcgacagtaaagccgttggacagtttatgccgcccgtttttccgggcgcccaggccaataccatcgcggaactggcccgccaattggggctggatggcgaacgtttgtcgcagaccatcgccagctacaatgccgcctgtacgccaggccagttcgaccatacccgtcttgataactgcgctacctccggcctgacgccgccaaaaacccactgggcgcggcctatcgatacgccgccttattatggttatgccctgcgtccagggatcaccttcacctacctcgggctgtacgtcaatcaacacgccgccgttcactttgccggtaagccgagccgcaacctgtttgtcgccggcgaaatgatggccggcaacgtactgggcaaaggctataccgccggcgtaggcatgtcgattggcaccacattcggccgcattgccggtcagcaagccgccctggcggcgcagcaggagaaacatcatgaagtcgcttga

SEQ ID NO: 86885 - DNA, 1140 bp, Enterobacter aerogenes
atgaagtcgcttgaaaagctgatcatcgaggcgcaaatcatcaccgagccggaggcggaagtcgaacgggtgatgcaggtctgtaacgcctgtcgctattgcgaagggttttgcgccgtattccctgccatgacccagcgtctggcattcggcaaggcggaaattaactatctggcgaacctgtgccacaactgcggcgcctgtctgcacgcctgtcagtatgccccgccgcacgagtttgcgattaatgttcccaaagcaatggcggaagtgcggctggaaacctatcaacattacgcccggcccgccgctttcggcagtttatatcgccgtgcggggatcgccacggtgctggcgctggtcgcgggtcttgtcctgtttctgctgctggcgatggggcttaaaggttcgctgctgcacccgccgctggccggtgatttctaccagattttcccgcataacctgctggcgtggatgttcggttcagttttcattgtggccattggtttattgatgagcggggtgattcgtttctggcgcgagatctcaccgggccaaccgcaagctggcgatatcgccagggcctcgcatgatgcgctgacgttgaaatatctcgacggtggccacggtaaaggctgtaacgaggccgatgatgccttcacgcttatgcgccgccgttttcaccacttcaccttttacggctttatgctctgtttcgccgccacggttgtggctacgggctatcactatttcgccggctgggaagccccctacccgttcttcagcgtaccggtgctgctgggcacgctcggcggcatcgggctactggtgggcccggcgggtttgctatggctgaacctgcgccgctcgccgctgcacggcgacgcacggcaaaaaccgatggatcgcgcttttatcctactgttgctgctgaccagttttaccgggctcgcgctactggcgggccgggacacctcgtggatgggcattctgctcgctatccatctcggggtggtgatggcgctgtttttaacgctgccttacggaaaatttgcccacggattttatcgctgtgcggcgctactcaagtgggcgattgagaaacgccgcggaaaacaggcggcagtcgcaggtgactaa

SEQ ID NO: 86886 - DNA, 1296 bp, Enterobacter aerogenes
atgacccaaccaacctcgcgcgccggtaccttcggcgcaattctccgcgtaaccagcggtaattttctcgagcaattcgacttctttctgtttggtttctatgccacctatatcgccaggaccttctttccggcagagagtgagttcgcggcgttgatgctcacctttgccgtatttggttccggtttcctgatgcgccccatcggcgcggtggtattaggagcttatatcgacaggatcggtcgccgcaaagggctgatggtcaccctggcgattatgggctgcggcacgttactgattgcgctggtgccgggctaccaaaccatcggcgtgctggcgccggtgctggtcttaattggccgtttgttgcaaggattctcggccggggtcgagctcggcggtgtgtcggtctacctgtcggaaatcgccaaaccggggaaaaaggggttctataccagttggcagtccgccagccaacaggtcgccatcgtcatggcggcgctgattggctacgcgctgaacgagactctgggtcacgacgagattgcagaatggggctggcgcattcccttctttatcggctgcctgattatcccgctgattttcgtgctccggcgttcgctgcaggagaccgaagcgtttctgcagcgtaagcatcgtcccgataccaaagagatactgaccactattgttaaaaactggcgcatcatcagcgcgggcaccttactggtggcgatgaccaccaccaccttttattttattaccgtctataccccaacttatggcagagcggtactgcatctgagcgcacgcgacagcttgctggtcacgatgctggtcggtatctctaactttatctggttgccgattggcggggcgctgtcagacaaaataggccgccgtccggtactgatgggaattaccgtcctggcgctgctgaccacctggccggtgatgcaatggctcaccgccgcgccggatttcacccgcatgacgctggtgctgctgtggttctcgttcttctttggtatgtataacggcgcaatggtggcggcgctaacggaagtgatgccggtctacgttcgcaccgtgggcttttcgctggcgtttagcctcgccaccgctatcttcggtgggctgacgccggctatctctaccgcactggtcgaaatcaccggcgataagagcgcgccaggctggtggctgatgtgcgcggccctatgcggattcgccgccaccgccatgctgttcatgcgtctgagccgcggctatcagccagcggaaataccgcgttaa

SEQ ID NO: 86887 - DNA, 333 bp, Enterobacter aerogenes
atgaaaaagttgctgctcatcgccatcatggcatcgggtctggttgcctgcgcgccatcgccagcgccgaaagaagattccaaattgaaagatgcctatagcgcctgtatcaacacggcagaaggtaatccggacaagattgaagcctgtcagagcgtactcaacgtcctgaaggaagagaaaccgcatcagcagtttgcgacgcaggagagcgtcagagtgctggattatcaggcctgtattcaggcgacgcgcaccggtaatgaccaggcggtcaaagcgcgctgcgataaaatctggcaggagattcgcagtaataacaccactaagtaa

SEQ ID NO: 86888 - DNA, 237 bp, Enterobacter aerogenes
atggcatccccggatgcttactacgatcctaactatcgtctgaaagagtccgcctacagtctggatgctatctacaccctgcaggaaggccgggcgaaaggaacgatgttcaaactgcacttcacgcaatacgacaaccactccgacatcccaagctggagcggtggttacggcaacatcttccaggatgagcgtgacgtgaagtttatggttatcgcgccgttcaccattttctga

SEQ ID NO: 86889 - DNA, 1146 bp, Enterobacter aerogenes
atgcgtacgtttagtggcaaacgtagtacgctggcgctggctattgccgccgtcaccgcgatgtcgggttgggttgtggctccacaggccagcgcagcaggctttatcgatgattctactttaactggcggtatctattactggcagcgcgagcgcgaccgtaaaaacgtagaaaccgacaagtatgaaaccaacctttcccattctacctggaacgccaacctggatttccagtccggctatgccgctgatatgttcgggattgatattgctgcctttaccgcgatagaaatggcggaaaacggcgacagcggccacccgaacgaaattgccttctcctccagtaaccgtgcctacagtgaagattattccggcgataagagcgggattagcctgtataaagcagcggctaaatttaaattcggcccggcgtgggcgcgcgcgggttatatccagccgaccgggcaaacgctgctggcgccgcactggagctttatgccgggtacctatcagggggcggaagccggagccaacttcgactatggcgataacggcgcgctgagtttctcctacatgtggaccaacgaatataaagcgccgtggcatatcgagatggatgatttctaccagaacgataagaaaaccaaggtcgactatctgcactctcttggcgcgaaatacgattttaaaaacgatctggtgctggaagccgcttttggccaggctgaaggttatatcgatcaatactttgcgaaggccagctacaaatttgatattgccggttcgccgttaagcgccagctatcagttctatggtacccgcgataaagtcagcaacggcggcgtcaacgacatctacgacggcaccgcgtggctgcaggcgatcacctttggctataaagcggccgatgtgctggatctgcgtctggaagggacctgggttaaagccgatggccagcagggctacttcctgcagcgtatgacgccaacctatgcctcctctaatggtcgtctcgatatctggtgggataaccgctccgactttaacgccaacggcgagaaagcagtattcttcggcgcgatgtatgacatgaagaactgggatatgccgggctgggcgtttggcgcttcctatgtttacgcctag

SEQ ID NO: 86890 - DNA, 1668 bp, Enterobacter aerogenes
atgagtgaggcagaagcccgcccgactaactttatccgtcagatcatcgatgaagatctggctaccggtaagcacaccaccgttcatacccgcttcccgccggaaccgaacggttacctgcacattggccatgcaaaatccatttgcctgaacttcggcatcgctcaggattatcaaggtcaatgtaatctgcgtttcgatgacaccaacccggtgaaagaagatatcgaatacgtggagtcgattaaaaacgacgtgcagtggttaggtttccactggtccggcgatgtctgctactcctctgattacttcgatcagctgcatcagtatgcggttgaactgatcaacaaaggtttggcctacgttgacgaactgtccgccgacgagatccgcgaataccgcggtaccctgaaagaaccgggtaaaaacagcccataccgcgatcgcagcgtggaagagaacctcgcgctgttcgaaaaaatgcgtaccggcggttttgaagagggtaaggcttgcctgcgcgcgaagatcgacatggcgtcgccattcatcgtgatgcgcgatccggtgctgtatcgcattaaatttgccgaacaccatcagaccggcaacaaatggtgcatctacccgatgtacgacttcacccactgcatcagcgatgcgctggaaggtatcacccactcgctgtgtaccctggagttccaggacaaccgtcgtctgtacgactgggtgctagacaacatcagtattccggtgcatccgcgtcagtatgaattctcgcgcctgaatctcgaatacaccgtgatgtccaagcgtaagctgaatcagctggtgaccgaaaagcatgtggaaggctgggatgacccgcgtatgccgactatttccggtctgcgccgtcgcggctataccgctgaatccatccgcgagttctgcaaacgcatcggcgtgaccaagcaggacaacaccattgagatggcgtcgctggagtcgtgcattcgtgaagatctgaatgaaaacgcgccgcgcgcgatggcggtgatcgatccggttaaactggttatcgaaaactatccgcagggcgcaagcgaaatggtggcgatgccgaaccatccgaacaagccggagatgggcagccgcgaagtgccattcagcgctgagatctggatcgatcgcgcggacttccgcgaagaagccaacaaacagtacaagcgtctggtgctgggtaaagaggtgcgtctgcgcaacgcctacgtgattaaagcggaacgcgttgagaaagatgcagagggtaacatcactaccatcttctgtacttacgatgccgacaccctgagtaaagacccggccgatggccgcaaggtcaaaggcgttatccactgggtgagcgcggcgcacgcgctgccggttgaaattcgcctctatgaccgtctgtttagtgtgccgaacccgggcgcggcggatgacttcctggcggtaatgaacccggaatctctggtcatcaagcaaggtttcgcggagccgagcctgtcgaaagcgcaggcgggtaaagcataccagttcgagcgcgaaggttacttctgcctcgacagccgctacgccaccgagggacatctggtcttcaaccgcaccgttggcctgcgtgacacctgggctaaaatcggcgagtaa

SEQ ID NO: 86891 - DNA, 1953 bp, Enterobacter aerogenes
atgaatattttaggtttctttcagcggctgggtagggcattacagctccctatcgcagtgctgccggtcgcggcattgctgctgcgattcgggcaaccggatctgctgaacgtacccttcatcgcgcaagcgggtggggcaatctttgacaacttagcgttgatcttcgccatcggcgtggcatcaagctggtccaaagataacgcgggttctgcggcgctggccggcgcggtaggttatttcgtgatgaccaaagcgatggtcaccatcaacccggaaattaacatgggtgtactggcgggtatcattaccggtctggtcgcgggtgctgtttataaccgctgggccggcattaaactgccagacttcctgagcttcttcggcggcaaacgcttcgtaccgatcgctaccggcttcttctgtctggtgctggctgccatcttcggctatgtctggccgccggtgcagcacgctattcatgcgggcggtgaatggatcgtgtctgcgggcgcgctgggttccggtatcttcggtttcattaaccgtctgctgatcccaaccggtctgcatcaggtgctgaacaccatcgcctggttccagattggcgagttcaccaacgccgcgggtgcggtcttccacggcgacatcaaccgcttctatgccggtgacggcaccgcggggatgttcatgtccggcttcttcccgatcatgatgttcggtctgccgggcgctgcgctggcaatgtacatggctgcgccgaaagagcgtcgtccgatggtcggcggtatgctgctgtccgtggccatcaccgcgttcctgaccggtgtgaccgagccgctggaattcctgttcatgttcctggcgccattgctgtacctcctgcacgctatcctgaccggtatcagcctgttcatcgcaacggcgctgggtatccacgcgggcttctccttctccgcgggcgctatcgactacgtgttgatgtacagcctgccggcagccagcaaaaacgtctggatgctgctggtgatgggcgtggtgttcttcttcgtttacttcctgttgttcagcgcggttatccgcatgttcaacctgaaaacgccgggtcgtgaagataaaaccgacgacgtcgtgactgaagaagctaacagcaacaccgaagaaggtctgactcagctggcgaccaactacatcgcagccgtaggcggtaccgataacctgaaagccattgatgcttgtatcacccgtctgcgtctgaccgtcggcgactcggcgaaagtcaacgatgccgcctgtaaacgtctcggcgcctccggggtggtgaaactgaacaaacagaccatccaggtcattgttggcgcgaaagcggaatccgttggcgacgccatgaagaaagtggttgcccgtggtccggttgctgctgcagctgcttcgactgacagcgcgccagccgccgcgcctgcggccaaaccgcaggcggtcgcgaacgccaaaaccgtcgaagcgctggtttccccgatcaccggtgaagtggtggcgcttgagcaggtaccggatgaagccttcgccagcaaagccgttggtgacggtatcgcggtgaaaccgaccgataacatcgttgtcgcgccggcggccggtacggtggtgaaaatcttcaacaccaaccacgcattctgcctggaaaccgataacggcgcggaaatcgtcgtccatatgggcattgataccgtcgcgctggaaggcaaaggctttaaacgtctggttgaagagggcgcacaggtgaaagccggcgagccgatcctggaaatggatctggcgttccttaacgccaacgcccgctcgatgatcagtccggtcgtctgcagcaacagcgatgattacagcgcgctggtgattcaggcaacgggtaacgttgtcgccggccaaacgccgttgttcgagattaaaggcaagtaa

SEQ ID NO: 86892 - DNA, 801 bp, Enterobacter aerogenes
atgagactgatccccctggtaacagctgaacaagtaggtaaatgggctgcccgtcatatcgttaaccgcattaacgcgttcaaaccgaccgcggaccgtccgttcgtactgggtctgcctaccggtggtacgcctcttaccgcttacaaagcgctggttgaaatgcataaagcaggccaggttagcttcaagcacgttgttaccttcaacatggatgagtatgtcggcctgccgaaagagcatccggaaagctatcatagcttcatgcaccgcaatttctttgaccatgttgatattccagctgaaaatatcaacctgctgaatggtaatgcgccggatatcgatgcagaatgccgtcgttatgaagaaaaaatccgctcctacggtaaaatccacctgtttatgggcggcgtaggtaacgatggtcatatcgcgtttaacgaaccggcctcttctctggcgtcccgtacccgtattaaaaccctgacccatgacacccgcgtggccaactcccgcttcttcgacggcgatgtggatctggtgccgaaatatgcgctgaccgtgggcgtgggtaccctgctggatgcagaagaagtgatgattctggtactgggccatcagaaagcgctggcgctgcaggcggcggtcgaaggtaacgtcaaccacatgtggaccatcacctgtctgcagctgcatccgaaagcggttgtggtctgcgacgagccgtccacgatggaactgaaagtgaagaccctgaaatatttcaacgaattagaagctgaaaatattaaaggtctgtaa

SEQ ID NO: 86893 - DNA, 1149 bp, Enterobacter aerogenes
atgtatgcattaacccagggccgggtttacaccggtcatgaaattctcgatgaccatgcggtcgttatcgccaatggccgtatcgaacgtctctgtccgctggctgatttgccgtctgaaattgagcaacgctcggtcaacggcgcgattattgcccccggtttcatcgacgtccagctgaacggctgcggcggcgtgcaattcaacgatagtccggatgcggtcaccgtcgaaacgctggaaattatgcagaaagcgaatgagcgttccggctgcaccaacttcctgccgacgttgattacttccagcgatgatctgatgaagcaaggcatccgcgtcatgcgcgaatacctgcaaaaacaccccaaccaggcgctgggtctgcatctggaagggccgtggctgaatatcgtcaagaaaggcacccataacccggactacgtgcgtaaaccggacgccgcgctggtcgacttcctgtgcgacaacgccgacgttatcaccaaagtgacgctggcccctgagcgcgtcgagccggaagtgatccgtaaactggtcgccgccggcatcgtggtttcggcaggtcactctaacgctacgctgaaagaagcgaaaatcggtttccgcgccggtatcacttttgcgacgcacctttataatgccatgccgtacattaccggccgtgaaccaggtctggccggcgccattttcgacgagccggatgtctactgcggtatcatcgttgacggcatgcacgtcgattatgccaacgtgcgtaacgctaaacgcctgaaaggcgataaactgtgcctggtgactgacgccaccgcgccggcaggggctaatattgaccagttcatttttgctggtaaaacaatatactaccgtaatggtctgtgcgtggatgaaaacggcactctcagcggttcttcgctgaccatgatcgaaggggtacgtaacctcgttgaacattgcggcgtagcgctggacgaagtgctgcgtatggcgacgctctacccagcgcgcgcgattggcgtggacaagcagctcggcagcattgcgccgggtatggtcgctaacctgaccgctttcagccgcgattataaaatcatcaagaccatcgttaatggtaacgaggtcgtcactgagtaa

SEQ ID NO: 86894 - DNA, 1221 bp, Enterobacter aerogenes
atgacagcaggcggacaagctcaaattggtaacgtcgatctggtaaaacagctgaacagcgcggccgtctatcggctgattgaccaacatggtcccatctcgcgcattcagatagcggaacaaagtcagcttgcccctgccagcgtaaccaaaattacgcgtcagcttattgagcgcggcctgatcaaagaagtcgatcagcaggcctccaccggggggcgccgcgccatctctatcattgcggaaacccgcaatttcaacgctatcggcgtgcggcttggccgctatgacgccaccctgaccctctatgatttaagcagtaagacgctggaagaagagcacttccctctgccggagcgtacccaggaaacgcttgagcacgcactgctgaatatcatcgccacctttattgaaaattgtcagcgcaaaatccgcgagctcatcgccatttcggtcattctgccggggctggtcgatccggaaagcggcgttatccgctatatgccgcacattcaggtagagaactgggggctggtcgaagcgctggaaaaacgttttaacgtcacctgttttgtcggccacgacatccgcagcctggcgttggccgagcactattttggcgcaagccaggattgcgaggactctattctggtgcgcgtacaccgcggtaccggcgcgggcattatttcaaacgggcgcatttttatcggccgtaacggcaacgtcggcgaaattggccatatccaggttgacccattaggcgaacgctgtcactgcggcaacttcggctgtctggaaaccgtcgccgcgaacgccgctattgagcaccgcgtccgccatctgcttgagcagggctatcaaagccgcatcacgcttgatgactgcaatatcaaaaccatctgcaaagcggcaaataaaggcgatgcgctggcctgtgaagtggtcgaatacgttggccgtcatctgggcaaaaccatcgccatcgccatcaacctgtttaacccgcaaaaagtggtgattgccggtgaaatcgtcgaggcggaaaaggtgctgctgccggccatcgaaagctgtatcaacggccaggcgttgaaagcgtttcgccacaatctgccggtggtacgctcgacgctcgatcaccgctccgccatcggcgcctttgcgctggtcaagcgcgcgatgctcaatggcatcctgctacagcatttgctggaaagttaa

SEQ ID NO: 86895 - DNA, 753 bp, Enterobacter aerogenes
atgaccattcaaaacgtaatttgtgatatcgacggcgtgctgatgcacgataacgtggctgttcccggcgccgctgaatttatcaaacgcatcctggaaaaaggcatgccgctggtgatgctgaccaactatccttcgcaaaccgggcaggacctggccaaccgcttcgccaccgccggtatcgaagtgccggataccgcgttctacacctccgccatggccaccgccgatttcctgcgtcgccaggaaggtaaaaaagcctatgtggttggcgaaggcgcgctcatccacgaactgtataaggccggcttcaccatcaccgacgttaaccctgatttcgtcatcgttggcgagacccgctcctttaactgggaaatgatgcataaagcggctttctttgtcgccaacggcgcgcgtttcatcgccaccaacccggatactcacggccgtggctactaccctgcttgcggcgcactctgtgcgggaatcgaaaaaatctccggccgtaaaccgttttatgtcggtaagccgagcccgtggattatccgttccgcgcttaacaaaatgcaggcccactccgagcaaacggtgatcgtcggcgataacctgcgtaccgatatcctcgccggcttccaggcgggccttgagaccattctggtgctctccggagtctccacgctggacgatatcgacagcatgccgttccgcccgtcgtggatttatccgtcggtcgccgaaatcgacgttttttga

SEQ ID NO: 86896 - DNA, 1665 bp, Enterobacter aerogenes
atgtgttctatttttggcgtactggatatcaaaactgacgcaggcgaactgcgtaaaaaggcactggaactttcccgcctgatgcgccaccgcggaccggactggtccggcgtttatgccagcgataaagcgattctcgcccacgaacgtctgtcgatcgtcgacgtcaacgccggcgcccagccgctctataaccaacaaaaaacccatgcgctggcggtcaacggtgaaatctacaaccaccaggcgctgcgcgccgaatatggcgatcgctatcagttccagaccggttccgactgtgaagtgatcctcgcgctgtaccaggaaaaagggcctgagttcctcgatgaactgcaggggatgtttgccttcgcactgtatgacagcgaaaaagacgcttatctgattggccgcgaccatatcggtattatcccgctgtatatgggccacgacgagcacggcaacttctacgtcgcctctgaaatgaaagcgctggtgccggtctgccgcacgattaaagagttccctgcgggtagctacctgtggagccaggatggcgaaattcgccagtactatcagcgcgactggttcgactacgacgcggtaaaagacaacgtcacggataaaaacgaactgcgtcaggcgctggaagagtcggtgaagagccacctgatgtccgatgttccttacggcgtgctgctttctggcggcctggactcttcggtgatttcggccattaccaaaaaatacgccgcccgccgcgttgaagatcaggagcgtagcgaagcctggtggccgcagttgcattcattcgcggtcggcctcgaaggctcccctgacctgaaagcggcgcaggaagtcgcaaaccacctcggcaccgtgcatcacgaaattcactttacggtacaggaagggttggatgcgatccgcgacgttatctatcacatcgaaacgtatgacgtgactaccattcgcgcctcgacgccgatgtacctgatgtcgcgtaaaataaaagccatgggcattaaaatggtgctctctggcgaaggttccgatgaagtattcggcgggtatctctacttccacaaagcgccgaacgctaaagaactgcatgaagaaacggtgcgtaaactgcaggcgctgcacatgtttgactgcgcccgcgctaacaaagcgatgtccgcctggggggtagaggcccgcgtaccgttcctcgataagaaattcctcgatgtggcgatgcgcatcaacccgcaggataaaatgtgcggcaacggcaaaatggaaaaacatattttgcgcgaatgctttgagtcctatctgccagccagcgtcgcctggcgccagaaagagcagttctccgacggcgtgggctatagctggattgatacgctgaaagaagtggcggcaaaacagattagcgaccagcagctggagacggcaagcttccgcttcccgtacaacacgccgacctctaaagaaggttatctgtaccgcgaaatcttcgaagagctgttcccgctgcccagcgcggcggaatgcgtccccggcggcccgtccgttgcctgctcttcagcgaaagccatcgagtgggatgaagcgttcaaaaccatgaacgatccatcaggacgcgcggtcggcgtccaccagtcagcttataaataa

SEQ ID NO: 86897 - DNA, 1176 bp, Enterobacter aerogenes
atgacaattcatgcaacagatatcgccatcgtcggcggcggaatggtcggcggcgcgctggcgctggggctggcgcaacacgggttttcggtgacggtgatagaaaaacacgcgcctccggcctttgatgccgctgcggcgccagatgtgcgtatttcggcgatcagcgcgtcgtcggtcggcttgctcaaaagcctcgacgtttgggaagcggtgcgcggtatgcgcgcgcatgcttatcgtcgtcttgaaacctgggagtgggaaagcgcgcacgttgattttaatgccgccgagctgaagctgcctgagcttggctatatggtggaaaatagcgtgctacagctggcgctgtggcaggcgcttgaagcccatccgcaggtgagcttgcgggttggcgtgacgttaagcgagcttcatcgtgagccgcagggcgtttcgctgcgcctgagcgatgagagcgtttgcacggcgcaactggcgatcggcgcagacggcgcgaattctcaggtgcgcgaactggccggcatcggcgtacaggcgtggcaatatcagcaatcatgtatgctaattagcgtgcaatgcgccgacgatcccggtgatagcacctggcaacagttcacccccagcgggccgcgcgccttcctgccgctattcgataactgggcgtcgctggtgtggtacgacaccccggcgcgcatccgccaactgcaggcgatgtcgatggcccaactgctgcaggaaatcaccgcgcatttcccgaaacgtctgggcagcgtgacgccaatgagcgccggcgccttcccgttaacccgccgacatgcgctgcagtacgtgcaaccggggctggcgctggtaggggatgcggcgcataccattcatccgctggcggggcagggggttaaccttggctatcgcgacgttgacgcgctgttggatattttggcggaagcccgcgggcgcggggaagcctggtccagcttgccggtgctgaagcgctatcaggcgcggcgccgggcggataactttattatgcaatccggcatggatctgttctatgccggcttcagcaacgatttagcgccggtgcgcgtgctgcgtaatattggcctgatggctgccgaacgtgctggtgtattaaagcgccaggcattgaaatatgcattagggttgtaa

SEQ ID NO: 86898 - DNA, 1425 bp, Enterobacter aerogenes
atgacaaaaaaactccatattaaaacctggggctgtcagatgaacgaatacgattcatccaagatggccgatctgctggatgccacccatgggtatcaactcacagaagtggccgaagaagcggacgtgctgctgctcaacacctgctcaattcgcgagaaggcgcaggaaaaagtgttccatcagcttggccgctggaaactactgaaagagaaaaaacccggcgtgattatcggcgtcggcggctgtgtcgcctcccaggaaggcaaactgattcgccagcgcgcccattacgttgacattatttttggcccgcagacgctgcatcgcctgccggagatgatcgacgcggtgcgcaataaccataaaccggttatcgacgtgagcttcccggaaatcgaaaaattcgatcgcctgccggaaccgcgcgccgaggggccgaccgccttcgtttccattatggaaggctgcaacaaatactgcacttactgcgtggtgccctatacccgcggtgaagaagtgagccgtccgtgcgacgatattctgtttgaaatcgctcaactggcggcgcaaggggtgcgtgaagtcaacctgctcgggcagaacgttaacgcctggcgcggcgaaaactacgatggcacgaccggcaactttgccgatctgctgcgtctggtcgccgccatcgacggcatcgaccgtattcgcttcaccaccagccacccgattgagtttactgacgatatcatcgacgtctatcgcgatacccctgagctggtgagcttcctgcatttaccggtgcaggccggttccgatcgcgtactgaacctgatgggccgtacccacaccgtgctggaatataaagcgattatccgcaagctgcgcgaagcgcgcccggatattcagattagctccgactttatcgtcggtttccctggcgaaacgacggaagacttcgaaaaaaccatgaagctgattgccgaggttaactttgatgtcagctacagctttatcttctctgcccgcccgggcaccccggcggcggatatggtcgacgatgttcctgaagccgataaaaaacagcgcctgtatattctgcaggagcgtattaatcagcaggcgatggcatggagccgacgcatgctcggcacaacacagcgtattctggtagaaggcacgtcgcgtaagagcctgatggagctctccgggcgcaccgagaacaaccgcgtggtgaacttcgaaggcacgccggatatggtcggtaaattcgtcgacgtagaaatcgtcgatgtctacactaactcattacgcggcaaaattgtccgcacagaagatgagatgggactgcgcgtcgtggaatcgccggaatcggtcattgcgcgtacgcgaaaagaaaacgatctgggcgtcggcatctaccagccgtaa

SEQ ID NO: 86899 - DNA, 1047 bp, Enterobacter aerogenes
ttgaacatagaaacccgtgaaattaccctggagccagcggacaatgcccgcctgttagcactgtgcggcccgtttgacgacaacatcaaacagctggagcgtcggttgggtattgagatcaaccgccgcgacaatcactttaaactgaccggccgcgccatctgcgtgcacgccgcggccgatattctgacaagcctgtatgtcgataccgcgccaatgcgcggccagattcaggatattgaaccggaacaaatccacctggctattaaagaagcccgggtgctcgagcagagcgccgagagcgtgccggaatacggcaaggccatcaatatcaaaaccaaacgcggggtgatcaaaccgcgtacgccaaaccaggcgcaatacatcgccaatatcctcgaccacgacattacctttggcgtcggcccggcgggtaccggtaaaacctatcttgctgtcgccgcggcggtcgatgccctggagcgtcaggaaattcgccgcattctgctgactcgtcctgcggtcgaagcaggcgagaagctcggcttcctgccgggcgacttaagccagaaggttgacccgtatttgcgcccgctgtacgacgcgctgttcgagatgctcggctttgagaaagtcgagaagctgattgagcgtaacgtcattgaagtcgcgccgctggcctacatgcgcgggcgtacgctgaatgacgcctttatcattctcgatgaaagccagaacaccaccatcgagcagatgaagatgttcctgacccgtatcggttttaattcgaaagcggttatcaccggcgacgttacccagattgacctgccgcgcaataccaaatcaggtctgcgtcacgccgtcgaagtgctggcggaagtcgatgaaatcagcttcaacttcttccacagcgaagacgtggtgcgccatccggtggtcgcccgcatcgtcaatgcctatgaggcatgggaagaagccgaacaaaaacgtaaagcagaactggccgccgagcgcaaacgcgaagcccaggaacaggagcaaaaatga

SEQ ID NO: 86900 - DNA, 474 bp, Enterobacter aerogenes
atgagtcaggtgattctcgatttacagctggcctgcgaagacaccagcggtctaccggacgaagccctctttcaacgctgggtggatgccgtcatcccgcagttccaggaagagtcagagttaacgattcgcctggttgatgtcgccgaaagccacgagctgaacctgacctatcgcggcaaggataagccgactaacgtcctctccttccccttcgaagccccgccgggcattgagatgccgctgctcggcgatctgattatctgccgccaggtggttgaacaggaagccaaagagcaggaaaaaccgctggaggcccactgggcgcacatggtcgtgcacggtagcctgcacctgctgggctacgatcatatcgaagatgaagaagcggaagaaatggaaggactcgaaacagagataatgcttgctctgggctatgaggatccgtacattgccgagaagattgctgaatag

SEQ ID NO: 86901 - DNA, 948 bp, Enterobacter aerogenes
atgccgtacgacgctgagtttacgcgcgacgagcgacaattaaatcaacacgagaacccatacgacgccatgagcgacgacaattcacacagtagtgacacagtaaacagcaaaaagggatttttctccctcttactcagccaacttttccacggtgaacccaaaaaccgtgatgaattattggcgctgatccgtgactccgggcagaacgagcttatcgatgaagatactcgcgacatgctcgaaggggtaatggatatcgccgaccagcgcgtccgcgatattatgatcccgcgttcgcaaatgattaccctgaaacgcaaccagacgctggacgagtgcctcgatgtgatcatcgaatccgcccactcgcgtttcccggtcattagcgaagataaagatcacattgaagggattctgatggctaaggatctgctgccgtttatgcgcagcgacgccgaagctttcagcatggaaaaagtgttacgcccggcggttgtcgtgcctgaaagcaagcgggttgaccgcatgctgaaagagttccgctcgcaacgttatcatatggcgatcgtcatcgacgagttcggcggcgtctctggcctggtgactatcgaagatattctcgaacttatcgtcggcgaaatcgaagacgaatacgatgaagaggaagatatcgatttccgtcagctaagccgtcatacctggacggtacgcgcgctggcatcgattgaagacttcaataaagcctacggcacccacttcagcgatgaagaggtcgataccatcggcggactggtgatgcaggcctttggtcatctcccggcccgcggcgagtcgattgacattgatggttaccaattcaaggtcgcaatggctgacagcagacgtattattcaggtccatgtaaagcttcctgatgatgcgccgcagccgaagctggaagactaa

SEQ ID NO: 86902 - DNA, 1539 bp, Enterobacter aerogenes
atggtatttgcctctttacttgaacgccagcgcgtacgtctgctgctggcgctgttattcggagccagcggaacgctggctttttcaccttacgacttctggccagcggcgattgtctcgctgtttggtctgcaggcgctcactctcaaccgtcgcccactacagagcgcctggattggctacttctgggggcttgggctattcggcaccggtattaactgggtttacgttagcatcgcgcagttcggcggcatgccgggcccggttaacgttttcctcgttgctttgctggcggcctatttatcgctgtacacaggtctgttcgccgggatcctcgcgagactgtggccgaaaaccaactggatccgtctggccattgccgcgcctgtcatctggcaaattaccgaatttctccgcggctgggtgctgaccggtttcccgtggctgcagttcggctatagccagattgacggtccgctaaagggcctggcgccggtgatgggcgttgaggcgataaactttctgttgatggtggtcagcggcctgctggcgctggctatcgcgcagcgtcactggaaaccgctgctggtggcgatagtgctatttgctctgcccttcccgctgcgttatatccagtggtatcaactgctgcctgagcgggcgacggaagtctctttggtgcagggcgatatcccgcaggcgatgaaatgggatgaaaaccagctggtaaacaccctgaaaacctatctcgatctcacccagccgcatatgggtaaatcgcagctgattatctggccggagtcggcgattccggatctggaaatcaatcagcagcatttcctcagcatggttgatgacctgatgcgggcaaaaaatagctcgttgattaccggtattgtcgatgcgcgcctcaataaacaaaaccgctacgatacctacaacaccatcatcacgctgggtaaagataacccgtacagctacgactcgaccaatcgctataacaaaaaccatctggtgccgttcggcgaattcgtaccgctggaatcgattttacgccctctggcgccgttcttcgatttgccgatgtcctcgttcagccgcggcccttacgtgcagccgcagctggtagcgcataacctgaagcttacggcggcaatttgctacgaaatcattctcggcgagcaggtccgcgataatttccgcccggataccgattatctgctgactatctccaacgatgcgtggtttggtaagtcaattggcccatggcagcacttccagatggcgcggatgcgcgcgctggaactggcgcgcccgctgctacgcagcaccaacaacggtatcaccgccgttattggcccgcgtggtgaaattcaggacatgatcccacagtttacccgcgcggtgttgaccactaaggtcacgccaaccaccggcctgacgccgtatgctcgtaccggcaattggccgctgtgggcgttaaccgccctctttggctttgccgcgctggtgatgagtctgcgccagcgtcgacgctaa

SEQ ID NO: 86903 - DNA, 912 bp, Enterobacter aerogenes
atgcaattacgtaaactggccgccgcaatgctggtcatgggagtgaccgctggtctggcgcacgctgaagatgccgccccggccgcaggtcagagcacgctggataaaatcgccaaaaacggggtgatcgtcgtcggccaccgcgagtcgtcagtaccattctcctattacgataaccaacaaaaagtggtgggttactctcaggattactccaacgctatcgttgaagccatcaagaaaaagctgaataaacccgatctgcaggtgaaactgattccggtcacctcgcagaaccgcatcccgttactgcagaacggcacttatgatttcgagtgcggttccaccaccaacaaccttgagcgtcagaagcaggccgccttctccgataccattttcgtcgtcggcactcgtctgctggtgaaaaaaggtgggccgattaaggacttcccggatctgaaagacaaagcggtcgtcgtcacttccggtaccacctcggaagtgctgctgcataagctgaacgacgagaagaaaatgaacatgcgcatcatcagcgcgaaagatcacggcgactctttccgtacgctggaaagtggccgcgcggtggcctttatgatggatgatgccctgctggccggcgagcgcgcaaaagcgaagaaaccggataactgggaaatcgtcggtacgccgcagtcgaaagaggcctatggctgcatgctgcgtaaagacgacgcatcgttcaaaacgctggtagatgacaccgttgcccaggcgcagacctctggcgaagcggcgaaatggttcgatacctggtttaagaacccgattccgccgaaaaatctgaacctgaacttcgaactgtccgacgacatgaaggcgctgttcaaatcacccaatgacaaggctcttaactaa

SEQ ID NO: 86904 - DNA, 741 bp, Enterobacter aerogenes
atgtcaatagactggaactggggaatattcctgcaacccgccccgttcggcaacaccacttatctaggctggttatggagcggctttcaggttaccgtcgcgctgtcgattagcgcctggattatcgctttcctcatcggctcgctgttcggtattctgcgtaccgtccctaaccgctggttagccgggatcggcacctgctacgtcgaactgtttcgtaacgttccactgattgtccagttctttacctggtaccttgttattccggagtttctgccggaaaacatcggcatgtggtttaagtcggaactggatccaaatattcagttctttgtctcctcaatgctgtgccttgggctgtttaccgctgcccgcgtctgcgagcaggtccgcgccgcgatacagtcccttcctcgcgggcagaaaaatgccggcctggcgatggggctgaccctgccgcaaacctatcgctacgtgctgctgccgaacgcttatcgcgttatcgtgccgccgatgacctcggaaatgatgaacctggtaaaaaactcggctatcgcttccactatcggtctggcggatatggcggcgcaggcgggcaagctgctggattactcagcccacgcctgggaatcgtttactgcgatcaccctcgcctatgtcttcatcaacgccgtaatcatgctggtgatgtatgtggttgaacgtaaagttcgcctgccgggcaatatgggaggcaaataa

SEQ ID NO: 86905 - DNA, 675 bp, Enterobacter aerogenes
atgtacgattttgactggagttcaattgttccttccatgccctacctgctggcaggattggtcattacgctgaaaatcaccgtcacggcgattattatcggtatcgtctggggcaccattctggcggtgatgcgcctgtcaagcttcctgccgctggcgtggtttgccaaaacctacgttaacgttttccgctcgattccgctggtgatggtgctgctgtggttctatctgatcgttcccggattcctgcaaaacgtgctggggctgtcgccgaaaaccgatattcgcctgatttcggcgatggtggcattttcaatgtttgaagcggcctactattcggaaattattcgcgccgggatccagagtatttcccgtggtcagtcgagcgccgcgctggcgctggggatgacccactggcaatcgatgaagttggtgattctgccgcaggccttccgcgcgatggtcccgctgctgttaacccagggtatcgtcctgttccaggatacctcgctggtgtacgtcctgagcctggccgatttcttccgtaccgcctccaccattggcgaacgtgacggaacccaggtggaaatgatcctgttcgcaggcgccgtttattttgtatttagtctcagcgcatcgctgttggtcagctggttgaagaaaaggactgtgtaa

SEQ ID NO: 86906 - DNA, 726 bp, Enterobacter aerogenes
atgattaccctgaaaaatatttcaaaatggtatggtcactttcaggtgctgaccgattgctccaccgaagtgaaaaaaggcgaggttgtggtggtttgcgggccgtcaggctccggtaaatcgacgctgattaaaaccgttaatggccttgagccggtgcagcaaggcgaaattatcgttgatggcactcaggttaacgataagaaaaccaatcttgctaaactgcgttcccgcgtcggtatggtattccagcactttgaactgttcccgcacctgtcgatcatcgacaacctgacgctggcgcaaattaaggttctcaatcgcgataaagaatcttcgcgtaaaaaggggcttaagctgctggagcgcgtgggtctggcggcgcatgcggaaaaatatccggcgcagctctccggcggccaacaacagcgtgtcgcgatcgctcgcgcgctgtgcatggatccgattgcgatgctgttcgatgagccgacttcagcgcttgacccggagatgattaacgaagtgctggacgtgatggtcgagctggcgaacgaaggtatgaccatgatggtggtgacgcacgaaatgggctttgcccgtaaagtggctaaccgggtcatctttatggatgaaggtaaaattgtcgaagatgtcgataaagaagccttctttgccaacccgcaatcagaacgcgcgaaagatttcctcgccaaaatcctgcactaa

SEQ ID NO: 86907 - DNA, 1674 bp, Enterobacter aerogenes
atgtttaataaaaaaaatctgattcacaccctgctgattgtgtttttgtgtcagcagcaggttttcgccagtacgatagtctccaccacgactaaccaaaacgcgcaggataaagcccgtcaggcggcgctgacaccacagcagcaggccgcccaggcttcactaattaataccgaccgacaaacgctcacgtttccaaaggaagaaaactgcaggttcatcaataatattcatatcgattctgccgagccgaagctcacgcatcagcttctggacaaccttacagctcaggctctgcatcgttgtctggggattaacggtattcagcacctcaccatggcattacaaaatgagttaatcgcccgtggttacataacttcattactgaccatcccggaacagtcattgacggcgggcacattaaggctcgaactcgcttatggcaaaatcggtgatattttctggtcaacgacaagcgagcaaaccaccagcatctggaacaatatccccacccgcacgggagatatcctgcgtctcaccgatctcgaacagggaatggaaaacctgcgccgcctgccaggaagttcggcgaatatgcaaatattaccgggacaacgggaggcagaaagcaatctgcagctaacgcgtcggctggataaaaaatggcaggtgggagcctggatggatgacgctggcagccgcgccagcggtcgctatcaggccggaggtgcgctctatctttatgatatcaccacactcaacgacattttctatgtctcaggaggaggagatatcgagtttaatcaacataatgatggcaaccagaatggcagcctgtattattcgattcccttcggttactgggcgttaggtctttacggttcacagagccaatatcgccagttgttcaggggcaactggtcgcaaacggattataaaagtaaaaatcgctactatagcgcgacgctgtcacgactgctgtctcacacccgtcagcaaaaaacgtcgctggatttccgtatctcaaaaagtacatcacactactattttggcggtgaagaacttagggtgatgcgcaaacagaacccgacatgggagctgacgctacgacagcaacgctatttcgataaaaaagtcgtcgccgccagcctggggttacagcgccgcctcccatggctaaactccgtcgccacaccggaagaaaaagcaggccagttcagtaagcgctcacgcgtagtacatgccgatttgcaggccttaatgaaattcgatttaaccggagatagatttagctatgcaccgcattttaatgcgcaatatagcccggacattctctcttcggataaccaatttaatattggcaaccgctggacggttcgcggatttgatggcgaatatactctctctggcaatcagggatggtactggagcaatgatttcatctgggatattgccggcccggaacagcaattctatttaggattagatattggtcgtattatcggcagtgaacaatatcggcaaggaaaagttatttcaggtgccgttagcggattgcgcggtgatatattctcaacacaatatgattttttcatcggcacaccgctaagtaaaccagataactttagtagtgactcattcaatatgggtttctcattgaagtggaagtattaa

SEQ ID NO: 86908 - DNA, 1794 bp, Enterobacter aerogenes
atgtttaagtttaaattaacctatgttgctttagcagcagcgttaagctcgacggtggtgtacgccgatccgtcgacttacacccatctatcaggcgcaacggtggttgatattgaagcgccgaatgctgcaggcgtttcgcacaacctgtatcgtgaatttaacgttggcagcaacggtttaatactcaataacagcgacagcgatattaatcatgcgacttttggcaatattgctaaaaacaacaatctgactaatggcggcgcatcggtgatcctgaatgaagtcacctccaataaagccagttcattaaatggcttcattgaagtcgccgggctgaaagccgacgtggtaatcgctaaccctaacggtattacctgctccggctgtagtttcgttaataccaacaaggcaatattaacgacaggtcaggtgaatttgaccgatgaaggcgctatcggcagctataccatcaccaatggcaaaatcaccatcgatgaaaatggcatgaacgccgctaacagctatgctgctctactcgccgacgcgattaaaattaatggtaaagtgcaggccaagaacgcccttgttagtgcaggtaatttcaccatggataacagttctggcgcggtgacctcagcgggtaaaaaagcgaccctgatcgaaatgacgattaacccgcaatacagcatcgacgtcagtagtcttggcggcattactgccaacagcattagcatgattggcaataacattggttttggcgtacgtaataatggctctattatctcaaacagctcactgcagctcaccagctacggaaacctgataaataaagggacgataaaaggcaacggtctgctaagccaggtttctacggtcacaggtatcaccaatgaaggcagtatcggcggagccaattatttaatgctctccagtggggattatatcgttaacgtcggttctatcactggcggtcagctaattgccaccgctaacggcaacatcactaacggcgactctggaacgatgaccggaaccagtgggttaagcctggccagcggtggaaaaatccgtaatgaggctaaggcctccctgctgtcgaataaccagatttccgccacggcaatgggcgattttctgaatgaagggaaaatcagtgctaaaaacaccgcccttacttttgttggcgagagttttaaaaataccgggaacattaattcaaccggcaacaccaccattaagtctcttaaacaggatggcaccgtaaatgtcggggaaatctacaatctgggtaatatcactggcgaaaacatcaatctacaaaccaacggcacactggcgcaaagcaccagtggcaaaatgaccgcaactaacgcgattaccgcgcacagctattggttgaataataatggctcgatgcaagcgcaaagtattaccagcgatcatggcccggtcaataataccggcagcatctccgcacataatatttctatcaccacttatgcggatattgttaatgaaggaaccatttacagtagcggggatttagttctggatacgcaaaaaagaggcaatatctataactacagtctgatcgatgcggatggcaccctgacgatgacggcgaaaaaggtagtcaacagcggtcgtggttgcggttggtttaaatttaatacctgtgatgtcggcaccatcagcgccaacaagatggtcctcaactcctcgcataaatacgccagtgagatgggtggttatcaatacttcaaggttgcagaaattaataccgtactgtaa

SEQ ID NO: 86909 - DNA, 486 bp, Enterobacter aerogenes
atgatgaacaaggttgctcaatattaccgggaactggtctcctcgctcagtgaacggctgcgcaatggagagcgtgacattgacgcgctggtgaagcaggcgagggagaaaatcacccaggcaggcgatctgacgcagagcgaggttgagtcacttatcgcggcggtgaagcgcgatctggaagaatttgcccgcagctatgaagagagccatgaagacgatagcgacagcgtctttatgcgggtgatcaaagagagcctgtggcaggagcttgccgatatcaccgacaaaacccagcttgagtggcgtgaggtgtttcaggatctgaaccaccacggagtctatcacagcggggaagtggtaggtcttggcaacctggtatgcgagaagtgccactaccatctggcggtatacaccccggatgtgctgccactctgcccgaaatgcgggcatgaccagtttcagcggcggccatttgagccgtaa

SEQ ID NO: 86910 - DNA, 2583 bp, Enterobacter aerogenes
atgcaagagcaataccgcccggaagagatagaatcgaaagtccagcttcactgggacgaaaatcgtacatttgaagtaactgaagacgagagcaaagagaagtattactgcctgtcgatgcttccttatccttctggtcgactacacatgggtcacgtgcgtaactacaccatcggcgacgtcatcgcgcgctatcagcgcatgctgggcaaaaacgtcctgcagccgatcggttgggatgcgtttggtctgcctgcggaaggcgcggcggtgaaaaacaataccgccccggccccgtggacctatgacaacatcgcatacatgaaaaaccagctgaaaaagctgggcttcggctatgactggagccgtgaaattgcgacctgcaccccggaatactaccgctgggagcaaaaattcttcaccgagctgtataaaaaaggcctggtgtacaaaaaaacctcagcggtgaactggtgtccgaacgatcagaccgtgctggctaacgaacaggttatcgacggctgctgctggcgctgcgacaccaaagttgagcgcaaagagatcccgcagtggtttattaaaatcaccgcctacgctgacgaactgctcaacgatctggacaacctggatcactggcctgacaccgttaagaccatgcagcgcaactggatcggccgctctgaaggggtagaaatctcctttgacgtcaacgactacgccgataagctgaccgtctacaccacccgcccggataccttcatgggctgcacctaccttgccgtcgcagcgggtcacccgctggcgcaacaggctgcggctaacaatccggcgctggccgcctttatcgacgaatgccgtaacaccaaagttgccgaagccgatatggcgacgatggagaaaaaaggcgtcgacaccggctttaaagctattcacccgctgaccggcgaagccatcccggtatgggcggcaaacttcgtactgatggagtacggcaccggcgcggtgatggccgttccgggtcacgaccagcgcgactacgagtttgccagcaaatacggcctgaacatcaagccggttatcctcgccgccgacggttccgagccggatctctccgagcaggcgctgaccgagaaaggcgtgctgttcaactccggcgaatttagcggcctggattacgaagcgggcttcaacgccattgccgacaaactggccgcgatgggcgttggcgagcgcaaagttaactaccgcctgcgcgactggggggtttcccgccagcgttactggggcgcgccaattccaatggtgaccctggaagacggtaccgtgatgccgacgccggaagaccaactgccggttatcctgccggaagacgtcgtcatggacggcatcaccagcccgatcaaagccgatcctgagtgggcgaaaactaccgttaacggcatgccggcgctgcgtgaaaccgacacctttgacacctttatggagtcctcctggtactacgcgcgctacacctgcccgcagtacgacaaaggtatgctggacccgaatgccgcgaactactggctgccggtggatatctacatcggcggcatcgaacacgccatcatgcacctgctctatttccgcttcttccacaagctgatgcgcgatgccggtatggtgaactccgatgagccagctaaacagctgctgtgccagggtatggtactggccgatgcgttctactacgtcggcgaaaacggcgagcgtaactgggtatcaccgattgacgccaccgttgagcgtgatgaaaaaggccgtatcgttaaagccttcgacccacagggccgcgagctggtgtataccggcatgagcaaaatgtccaagtcgaagaacaacggtatcgacccgcaggttatggttgagcgctacggcgcggataccgtacgtctgttcatgatgttcgcctccccagcagaaatgacccttgagtggcaggaatctggcgtagaaggggcaaaccgcttcctgaaacgcgtctggaaactggtttacgagcatacctctcagggcccggctgtcgccctggatgtggcaagcctcagcgaagatcagcaagcgctgcgtcgcgacgtgcataaaacgattgccaaagtgaccgatgatatcggccgtcgtcagaccttcaataccgccattgccgcggtaatggagctgatgaacaaactggcgaaagcgccgcaggaaggcgaacaggatcgcgcgctgatgcgtgaagcgctgctggcagtggtgcgtatgctcaacccgttcaccccgcatgcctgcttcaccctgtggcaagaactgggcggcgaaggcgatatcgacaacgcgccgtggccggtagcagacgaaagtgcaatggttgaaaacacgactctggtcgtcgtccaggtaaacggtaaagttcgtggtaaaattaccgttgcggtagacgcaaccgaagagcaggttcgtgaacgtgcaggccaggaacatctggtcgcaaaataccttgaaggcgtgaccgtacgtaaagtgatttacgttccgggcaaactgctcaatctggtcgttggctaa

SEQ ID NO: 86911 - DNA, 591 bp, Enterobacter aerogenes
gtgcgatatctggcaacaatgctgttatctctggcggtgttaatcaccgccggttgcggctggcatctacgtagtaatacgcaggttccaaccacaatgaaaactatgattttccagtcaggcgatccgaatggtccgttaagccgtgcggtacgtaaccagctacgtctgaatggcgtagagctgatcgaagccgatacgctgcgtaaggatattccgtccctgcgtctgggtaactcatccattcagaaagatacggcatccattttccaggatggtcgtactgctgaataccaaatggtgctgaccgttaacgccaccgtattgattccgggccatgacatttacccaatcaataccaaggtttatcgctcgttcttcgataacccgcaggcggcgctggcgaaagatgccgagcaggacatgattgttcgtgaaatgtacgataaggctgcggaacagttgatccgtaaattgccgagcgtacatgttgcggatgtcgaagccactaaagaggctgagcagccggtgtctggtaccccggccacctcaacctctggcaaccgcgtctccactacgctgggtaactga

SEQ ID NO: 86912 - DNA, 1032 bp, Enterobacter aerogenes
atgattcggttgtacccggaacaactccgcgcgcagctcactgaagggctgcgcgcggcgtatttattgcttggtagcgacccattgctgttacaggaaagccaggatgcgatccgcgaagccgcggccgcccagggctttaccgaacatcacaccgcgaccatcgatgccagcaccgactggcccgcccttttttccttaagtcaggcgctgagcctcttttccagccgccagacgcttctgcttatcctgccggaaaacggcccgaatgcggcgatcaacgaacagctgtccacgctggtcggtatgctgcatgaagatctgctgctgattgtccgcggcaacaagcttaccaaggcgcaggaaaacgcggcgtggataacaacgcttgccagccgcgccgtgcaggtgagctgccagacgccggaatacgcgcagttgcctcgctggctggccgcccgcgctaaacagaatcagttgcagttagatgaggccgccagccaactgctgtgctactgctatgaaggcaacctgctggcgctggcgcaggcgctggagcgcctctctttgctgtggcctgacggtaaactgacgctgccgcgcgttgaacaggcagtgaatgacgccgcccactttacgccgtatcactgggtcgatgccctgctggccggcaaaagcaaacgcgtactgcacgtcctgcaacaactgcgccttgaaggttgcgaacccgctattttgctgcgcacgctacagcgcgaactgctgctgctggtcactctgaagcgccagtcggcacatacgccgctgcgcacgctgtttgataaacaccgggtctggcagaaccgacgtcagctggtcggcgacgcgctcacgcgcctcagcgccgaacagttacgccaggccgttacgttattaacccgcgccgagctcaccttcaaacaggactacggccagtcaatatggcccgagctggaaagcctttcgttactgctatgccataaagcgctggcggacgtttttattgatggttga

SEQ ID NO: 86913 - DNA, 651 bp, Enterobacter aerogenes
atggttgatatgactcagttgcaggcaatgtacggcggcaccttcgatccggtgcattatggtcaccttaagccggtagagattctggcaaaccaaattggtcttagccgggtcattatcgtgcccaataacgtgccgccgcatcgcccgcagccggaagccaccagcgcccagcgggtgcatatgctggagctggcaattgccgataaacccctattcgttctcgacgaacgagagctacagcgcgatacgccgtcctggactgcgcaaacgctacaggagtggcggcaagaacaaggcccggaacagcccctggcatttatcatcggccaggactcgctgctgaccttccccacctggcataactacgccacgatcctcgataacgcgcatctgatcgtctgtcgccgtccgggatatccgctggcgatgaagcgcgaagaagatcagcaatggctcgataaacatctcacccacgacgtcgagttgttacatacccgtcccgccggggttatctatctggcggaaaccccgtggttcgatatttccgccacgctgattcgtcagcgtctacagcaaggtgtctcctgcgccgatatgctgccggccgccgtactggactatattcaccagcagaagctctattgctga

SEQ ID NO: 86914 - DNA, 609 bp, Enterobacter aerogenes
atgaaattatggctggttcgccacggcgaaacgcaggctaacgtcgacggactgtatagcggacatgctcccaccccccttaccgaacgcggtatccagcaggcgcgctcgctgggtgactatctgcaagcggcgcctttcgaccgggtattgtgcagcgagctggcgagaacccagcacaccgccgacctgttgctcgctggccggcctgtcccccggcaaattattccttcattgaatgagatgttctttggcgattgggaaatgcgccaccatcgcgatctgcaaaaagaagacccgcggaactacgctgcctggtgcaaagactggcaacacgccgcgccgaccaatggcgaaagcttccaggcctttgcccaacgtatcgcggactttgccgccagcctcgggcaatatcaacagcgggctaacctgctgatcgtcggccatcagggcgctttaagcctgttaatcgcactattattgcaaatgcctgcggcagcaatgtggcattttcccctcgcccacggtagctggagccttatcgaacaacgcgacgatttcacaaccttgcgcgtattaaatagccaggcgcagtggcgcgcggaataa

SEQ ID NO: 86915 - DNA, 318 bp, Enterobacter aerogenes
ttgcagggtaaagcactccaggattttgttatcgacaaaattgatgacctgaaaggtcaggacatcgtcgccattgatgtacatggcaaatccagcatcaccgattgcatgattatttgcaccggcacgtctacgcgccacgtgatgtccatcgccgaccatgtggtgcaggaatcccgcgccgccggtatgctgccgctgggcgttgaaggtgaagccgccgccgactggatcgtggtcgatctgggcgacgtgatggttcacgtcatgcaggaagagagccgtcgtctgtacgagctggaaaaactctggagttaa

SEQ ID NO: 86916 - DNA, 468 bp, Enterobacter aerogenes
gtgaagctgcaattggtggccgttggcaccaaaatgccggactgggttcagaccggctttagcgaatatctgcgccgttttccaaaagatatgccgttcgaactggtagagatccctgccggtaagcgcggaaaaaatgccgatatcaaacgtatcctcgaaaaagagggcgaaatgatgctggcagcggcaggcaagaaccgtatcgtgaccctggacatccccggtaaaccctgggatacgccacagctggcgcgagaactggaacgctggaagcaggatggccgggacgtcagtttactcattggcggcccggaaggactctctccggcctgcaaagcggcagcggaacagagttggtcgctttccacgctcacgttgccccatccgctggtacgcgtgctggtggctgagagcctgtatcgtgcgtggagcataacgactaaccacccttaccaccgtgagtaa

SEQ ID NO: 86917 - DNA, 1902 bp, Enterobacter aerogenes
atgaaattacagaattctttccgcgactatacggctgaatcctcgctgtttgtacgccgcgcgctggtcgcttttacgggcattttgttgcttaccggcgtgctgattgccaacctctacaacgtacagattgtccgtttcaacgactaccaaacgcgttccaacgaaaaccgcattaagctggtccctattccgcccagccgcggtattatttacgatcgtaacggcacgccgctggcgctgaaccgcaccatctatcagctggagatgatgccggaaaaagtcgataacgtgcagcagacgctggatgcactgcgcggcgtcgtcgacctgaccgacgacgacatcgccggctttaaaaaagagcgcgcgcgctctcaccgtttcacctcgattccggtgaaggtcaatcttaatgaagtccaggtggcgcgtttcgccgttaaccagtaccgctttcccggcgttgaagtcaaaggctacaagcgccgctactatccgtataactccgccctgacccacgttatcggctacgtctctaaaattaacgataaagacgtcgatcgcctggataaagagggcaaactggccaactacgcgtcgacccacgacatcggtaagctgggaatcgagcgttactatgaagacgtgctgcacgggcaaaccggctacgaagaggttgaagtcaacaaccgcggccgcgttattcgccagctaaaagaagtgccgccgcaggccgggcgcgatatctacctaacccttgatttgaagctgcagcagtatatcgaaacgctgctggcgggcagccgcgcggcggtggtggtcaccgacccgcgcagcggcgcgattctggcgctggtttcaaccccgagctacgatcccaacctgtttgtcgatggtatctccagtaaagattattccggactactcaacgatccaaataccccgctggtcaaccgcgcgacgcagggggtctatccacccgcctcgacggtaaaaccctacgtcgcggtctcagccttgagcgccggcgtcattacccgcaacaccagtctgttcgaccccggctggtggcagttgcctggctcggaaaaacgctatcgcgactggaaaaagtggggtcatggtcatctgaacgtcaccaaggcgctggaagagtccgcggatacctatttctatcaggttgcctatgatatgggcatcgatcgcctttccgaatggatgagtaagtttggctacggcgattacactggcgttgacctggcggaagaacgctccggcaacatgccaactcgcgaatggaagcttaagcgctttaagaaaccctggtatcagggggataccatcccggtcggtatcggccagggctactggaccgccacgccgattcagatgaacaaagcgctgatgatcctgataaacgacggcgtggttaaagtgcctcaccttctgcaaagcaccctcgaagacgggaaacaggtaccgtgggttcagccgcatgaaccgccggtcggcgatattcattccggctattgggaaatcgctaaagatgggatgtatggcgttgccaaccgcggcaatggtaccgcgcacaaatactttgccagcgcgccgtataagattgcggcgaagtccggtaccgcgcaggtattcggcctgaaagccaacgaaacctataacgcgcaccgaatttccgaacgtctgcgtgaccacaaacttatgacggcgtttgcgccttacaacaacccccaggtcgcggtggcgatgatcctggagaatggcggcgccggcccggcggtcggtaccattatgcgccagatcctcgatcacatcatgctgggtgataacaacaccaatctgccgagtgaaagcccggcggtgacggcgggggaggatcaataa

SEQ ID NO: 86918 - DNA, 1113 bp, Enterobacter aerogenes
atgaccgataatccgaacaaaaaatcactatgggataaaatccatctggaccccacgatgctgctcatcctgctggcgctgctcacctacagcgcgctggttatctggagcgccagtggccaggacgtgggcatgatggagcgtaaaatcggccaaatcgccatgggcgtggtgataatgatcgtgatggcgcagatcccgccgcgggtatatgagggctgggcgccctacctctatattttctgtattattttgctggttgccgtagacgccttcggcgcaatatccaaaggcgcacagcgctggttggatctcggtattgtacgctttcagccctcggagattgccaaaatagcggtgccgctgatggtggcgcggtttattaaccgcgatgtctgtccgccgtcattgaagaataccgccatcgcactggtcctgatcttcctgccgaccctgctggttgcggcgcagccagacctcggcacctcgattttgatcgccctctccggcctgtttgtcctgttcctctccggcctcagttggcgtttaatcggtatcgcggtagtgctggtcgccgcctttattccgattttatggttcttcctgatgcacgattaccagcgtcaacgcgtcatgatgctcctcgatccagagaccgatccgctgggcgcgggctatcatattattcagtcgaaaatcgctattggttccggcggcttacgcggtaaaggctggttgcatggtactcagtcgcagctcgaattcctgcctgagcgccatactgactttatcttcgccgtgctggcggaagagctgggtcttatcggggtattgatcctgctggcattgtacattttgcttatcatgcgcggactgtggatcgccgcccaggcacaaaccacctttggccgcgtcatggcaggcggtttaatgttgattttattcgtttatgtcttcgtaaatattggtatggtaagtggtattttgccggtggtgggggtacctttgccgctggtcagctacgggggctcagccctaatcgtattgatggccgggtttggtatcgtaatgtcgatccatacccacagaaaaatgttgtcgaaaagcgtttaa

SEQ ID NO: 86919 - DNA, 1137 bp, Enterobacter aerogenes
atgcgtaagcaatggctggggatctgcatagcagcagggctgctggcggcatgttcgggtgaagacgttcagcagaagacggttagcgtcccgcagccggctgtctgtaatggtccgacggtagaaattagcggcgccgatccgcgtttcgaaacgctgaacgccacggccaatcaggattatgaacgcgatggcaaaagctacaaaatcgtccaggatccggctaacttcacccagaccggtctggcggcaatttatgacgccgagccgaacagcaacctgaccgcctctggcgaagcgttcgatccaacacagcttaccgccgcgcatccgaccttgcccatcccaagctatgcgcgtatcacgaacctggctaatggccgaatgatcgtggtgcgcattaacgatcgcggcccgtacggcaatgaccgggtcatttccctgtcccgcgcctccgccgaccgcctgaatacctcgaacaatactaaagttcgtatcgatcctatcatcgtctctcaggacggcgccttgtccggcccaggtatggcatgcaccaccgtcgccaaacagacctatgccctgccttcacgtcccaaccttgatggcgatggttctgccgccatcgccccggccgatcagtcaaacgttcacgccatcagcaactcaacgcttaagcctgaagataatgtgggcgcgccggttaacggcagtggattccttggcgcaccgacaccgctgaataatggcgtgctggaaagcagcgaacctgctgctgcgcctgccgccgtcgccgcgacgccggcgacacccagcgctccggtcaccgcgccgggctcgattcagggaagcgttgcgcctgccgcgaccgcagcagcagccgcgactgttgccgcaccagccgccagcaccagcggcgagttcgtcgtgcaggtgggcgccgttagcgaccaggctcgtgcccagcaatatcagcagcgcctgagccagcagttcgccgttcccggacgtgtgatgcaaaacggcgccgtatggcggatccaactggggccatttgccagtaagtcgcaagcgtcgacggtacaacagcgcctgcaaaacgaagcgcagttgcaatcatttattactcgcgccaactaa
